(19) United States
(12) Patent Application Publication
(10) Pub. No.: US 2021/0361761 A1
(43) Pub. Date: Nov. 25, 2021

(54) NOVEL YELLOW FEVER NUCLEIC ACID MOLECULES FOR VACCINATION

(71) Applicant: CureVac AG, Tübingen (DE)

(72) Inventors: Johannes LUTZ, Tübingen (DE); Susanne RAUCH, Tübingen (DE); Regina HEIDENREICH, Tübingen (DE); Benjamin PETSCH, Tübingen (DE)

(73) Assignee: CureVac AG, Tübingen (DE)

(21) Appl. No.: 17/045,236

(22) PCT Filed: Apr. 5, 2019
(86) PCT No.: PCT/EP2019/058709

§ 371 Date: Oct. 5, 2020

(30) Foreign Application Priority Data
Apr. 5, 2018 (EP) PCT/EP2018/058784

(51) Int. Cl. A61K 39/12; C12N 7/00; A61K 9/51

(52) U.S. Cl. CPC A61K 39/12; C12N 7/00; A61K 2039/53; C12N 2770/24134; A61K 9/5123

(57) ABSTRACT

The present invention is directed to an artificial nucleic acid, particularly to an artificial RNA suitable for use in treatment and/or prophylaxis of an infection with yellow fewer vims (YFV) or a disorder related to such an infection. The invention further concerns a method of treating or preventing a disorder or a disease, first and second medical uses of the artificial RNA, compositions and vaccines. Further, the invention is directed to a kit, particularly to a kit of parts, comprising the artificial RNA, compositions and vaccines.

### INTRODUCTION

[0001] The present invention is directed to artificial RNA suitable for use in the treatment or prophylaxis of an infection with yellow fever virus (YFV) or of a disorder related to such an infection. In particular, the artificial RNA of the invention comprises at least one heterologous untranslated region (UTR), preferably a 3′-UTR and/or a 5′-UTR, and a coding region encoding at least one antigenic peptide or protein derived from YFV, in particular at least one antigenic peptide or protein derived from YFV prME polyprotein and/or the non-structural protein NS1. The artificial RNA is preferably characterized by increased expression efficacies of coding regions operably linked to said UTR elements. The present invention is also directed to compositions and vaccines comprising said artificial RNA in association with a polymeric carrier, a polycationic protein or peptide, or a lipid nanoparticle (LNP). Further, the invention concerns a kit, particularly a kit of parts comprising the artificial RNA or composition or vaccine. The invention is further directed to a method of treating or preventing a disorder or a disease, and first and second medical uses of the artificial RNA, composition, or vaccine.

[0002] Yellow fever virus (YFV) is a Flavivirus, a group of enveloped positive-stranded RNA arboviruses. Among the flaviviruses there are more than 40 human pathogens responsible for considerable morbidity and mortality throughout the world causing symptoms ranging from rather unspecific pseudo-flu-like syndromes, to severe encephalitic or hemorrhagic disease. YFV is endemic in tropical and subtropical regions in Africa and South-America and causes epidemics of hemorrhagic fever with high fatality rates from 20-50% resulting in an estimated number of 200,000 cases with 30,000 deaths annually.

[0003] In the 1930s, a live attenuated Yellow fever vaccine virus (17D) was developed which confers long-term immunity upon a single injection. However, in some cases vaccination with the 17D YF vaccine may elicit severe side effects such as anaphylactic reactions and yellow-fever-vaccine-associated neurologic disease (YEL-AND). Anaphylaxis is most likely caused by allergic reactions to proteins from eggs or gelatine used in vaccine production. The fatality associated with YEL-AND appears to be relatively low in general, but higher among recipients 60 years of age or older and is presumably attributed to the injection of a live attenuated virus into recipients who fail to adequately control the replication of virus. Other risks associated with the use of the live attenuated YF vaccine are transmission of the 17D virus through transfusion of blood products from recently vaccinated donors and vertical mother-to-child transmission.

[0004] A further complication associated with live attenuated vaccines is Yellow fever vaccine-associated viscerotropic disease (YEL-AVD). YEL-AVD is an illness similar to wild-type yellow fever, in which the vaccine virus proliferates in multiple organs, causing multiple organ dysfunction syndrome or multiorgan failure and death in at least 60% of cases. Viscerotropic disease has been reported in primary vaccines only, with average onset 4 days (range: 0-8 days) after vaccination.

[0005] Therefore, a safe and effective, non-infectious vaccine would be desirable in order to avoid vaccine-associated adverse events and to allow vaccination of young infants and immunocompromised recipients, for whom the live 17D vaccine is contraindicated, as well as pregnant and nursing women and elderly people.

[0006] Further it would be desirable that a yellow fever vaccine has some of the following advantageous features:
[0007] Very efficient induction of YFV antigen-specific immune responses against the encoded antigenic peptide or protein at a very low dosages and dosing regimen.
[0008] Induction of a YFV-specific strong humoral immune response
[0009] Induction of YFV-specific B-cell memory
[0010] Faster onset of immune protection against YFV
[0011] Longevity of the induced immune responses against YFV
[0012] Induction of broad cellular T-cell responses against YFV
[0013] Induction of a (local and transient) pro-inflammatory environment
[0014] No induction of systemic cytokine or chemokine response after application of the vaccine
[0015] Well tolerability, no side-effects, non toxic
[0016] No induction of Yellow Fever Vaccine-Associated Neurologic Disease (YEL-AND) and Yellow Fever Vaccine-Associated Viscerotropic Disease (YEL-AVD))
[0017] Reduction of the YFV pathogenesis by lowering vascular leakage
[0018] Broadening the immune response by targeting two different key antigens, e.g. envelope and NS1
[0019] Advantageous stability characteristics of the vaccine
[0020] Speed, adaptability, simplicity and scalability of YFV vaccine production

[0021] Accordingly, there remains an unmet medical need to provide safe and effective YFV vaccine suitable for pre-exposure prophylaxis and post-exposure prophylaxis. Moreover, there is a need for the development of a safe and effective YFV vaccine that is affordable, that can be manufactured using a scalable, cost-effective, and fast-adaptable production process, and which preferably has superior characteristics in terms of stability (e.g. heat stability).

[0022] It is an object of the underlying invention to provide artificial RNA encoding at least one antigenic peptide or protein derived from YFV characterized by increased expression efficacies which is a prerequisite of an effective RNA-based vaccine. A further object of the underlying invention is to provide safe and effective compositions and vaccines against YFV which are preferably suitable for pre-exposure prophylaxis or for post-exposure prophylaxis.

[0023] The objects outlined above are solved by the claimed subject matter.

### Definitions

[0024] For the sake of clarity and readability the following definitions are provided. Any technical feature mentioned for these definitions may be read on each and every embodiment of the invention. Additional definitions and explanations may be specifically provided in the context of these embodiments.

[0025] Percentages in the context of numbers should be understood as relative to the total number of the respective items. In other cases, and unless the context dictates otherwise, percentages should be understood as percentages by weight (wt.-%).

[0026] Adaptive immune response: The term “adaptive immune response” as used herein will be recognized and understood by the person of ordinary skill in the art, and is for example intended to refer to an antigen-specific response of the immune system (the adaptive immune system). Antigen specificity allows for the generation of responses that are tailored to specific pathogens or pathogen-infected cells. The ability to mount these tailored responses is usually maintained in the body by “memory cells” (B-cells). In the context of the invention, the antigen is provided by the artificial RNA coding sequence encoding at least one antigenic peptide or protein.

[0027] Antigen: The term “antigen” as used herein will be recognized and understood by the person of ordinary skill in the art, and is for example intended to refer to a substance which may be recognized by the immune system, preferably by the adaptive immune system, and is capable of triggering an antigen-specific immune response, e.g. by formation of antibodies and/or antigen-specific T cells as part of an adaptive immune response. Typically, an antigen may be or may comprise a peptide or protein which may be presented by the MHC to T-cells. Also fragments, variants and derivatives of peptides, or proteins derived from YFV prME polyprotein or from the non-structural protein NS1 comprising at least one epitope are understood as antigens in the context of the invention. In the context of the present invention, an antigen may be the product of translation of a provided artificial RNA as specified herein.

[0028] Antigenic peptide or protein: The term “antigenic peptide or protein” will be recognized and understood by the person of ordinary skill in the art, and is for example intended to refer to a peptide, protein (or polyprotein) derived from a (antigenic) protein/polyprotein which may stimulate the body's adaptive immune system to provide an adaptive immune response. Therefore an “antigenic peptide or protein” comprises at least one epitope (as defined herein) or antigen (as defined herein) of the protein it is derived from (e.g., in the context of the invention, YFV peptide or protein, preferably YFV prME).

[0029] Artificial nucleic acid: The terms “artificial nucleic acid” as used herein will be recognized and understood by the person of ordinary skill in the art, and are for example intended to refer to an artificial nucleic acid that does not occur naturally. An artificial nucleic acid may be a DNA molecule, an RNA molecule or a hybrid-molecule comprising DNA and RNA portions. Typically, artificial nucleic acids may be designed and/or generated by genetic engineering methods to correspond to a desired artificial sequence of nucleotides (heterologous sequence). In this context an artificial sequence is usually a sequence that may not occur naturally, i.e. it differs from the wild type sequence by at least one nucleotide. The term “wild type” as used herein will be recognized and understood by the person of ordinary skill in the art, and is for example intended to refer to a sequence occurring in nature. Further, the term “artificial nucleic acid” is not restricted to mean “one single molecule” but is, typically, understood to comprise an ensemble of essentially identical molecules.

[0030] Artificial RNA: The term “artificial RNA” as used herein is intended to refer to an RNA that does not occur naturally. In other words, an artificial RNA may be understood as a non-natural nucleic acid molecule. Such RNA molecules may be non-natural due to its individual sequence (which does not occur naturally, e.g. G/C content modified coding sequence, UTRs) and/or due to other modifications, e.g. structural modifications of nucleotides which do not occur naturally. Typically, artificial RNA may be designed and/or generated by genetic engineering methods to correspond to a desired artificial sequence of nucleotides (heterologous sequence). In this context an artificial RNA sequence is usually a sequence that may not occur naturally, i.e. it differs from the wild type sequence by at least one nucleotide. The term “artificial RNA” is not restricted to mean “one single molecule” but is, typically, understood to comprise an ensemble of essentially identical molecules. Accordingly, it may relate to a plurality of essentially identical RNA molecules contained in an aliquot or a sample.

[0031] Cationic: Unless a different meaning is clear from the specific context, the term “cationic” means that the respective structure bears a positive charge, either permanently or not permanently but in response to certain conditions such as pH. Thus, the term “cationic” covers both “permanently cationic” and “cationisable”.

[0032] Cationisable: The term “cationisable” as used herein means that a compound, or group or atom, is positively charged at a lower pH and uncharged at a higher pH of its environment. Also in non-aqueous environments where no pH value can be determined, a cationisable compound, group or atom is positively charged at a high hydrogen ion concentration and uncharged at a low concentration or activity of hydrogen ions. It depends on the individual properties of the cationisable or polycationisable compound, in particular the pKa of the respective cationisable group or atom, at which pH or hydrogen ion concentration it is charged or uncharged. In diluted aqueous environments, the fraction of cationisable compounds, groups or atoms bearing a positive charge may be estimated using the so-called Henderson-Hasselbalch equation which is well-known to a person skilled in the art. For example, in some embodiments, if a compound or moiety is cationisable, it is preferred that it is positively charged at a pH value of about 1 to 9, preferably 4 to 9, 5 to 8 or even 6 to 8, more preferably of a pH value of or below 9, of or below 8, of or below 7, most preferably at physiological pH values, e.g. about 7.3 to 7.4, i.e. under physiological conditions, particularly under physiological salt conditions of the cell in vivo. In other embodiments, it is preferred that the cationisable compound or moiety is predominantly neutral at physiological pH values, e.g. about 7.0 to 7.4, but becomes positively charged at lower pH values. In some embodiments, the preferred range of pKa for the cationisable compound or moiety is about 5 to about 7.

[0033] Coding sequence/coding region: The terms “coding sequence” or “coding region” and the corresponding abbreviation “cds” as used herein will be recognized and understood by the person of ordinary skill in the art, and are for example intended to refer to a sequence of several nucleotide triplets, which may be translated into a peptide or protein. A coding sequence in the context of the present invention is preferably an RNA sequence, consisting of a number of nucleotides that may be divided by three, which starts with a start codon and which preferably terminates with a stop codon.

[0034] Composition: In the context of the invention, a “composition” refers to any type of composition in which the specified ingredients (e.g. artificial RNA of the invention in association with LNP), may be incorporated, optionally along with any further constituents, usually with at least one pharmaceutically acceptable carrier or excipient. Thus, the composition may be a dry composition such as a powder or granules, or a solid unit such as a lyophilized form or a tablet. Alternatively, the composition may be in liquid form, and each constituent may be independently incorporated in dissolved or dispersed (e.g. suspended or emulsified) form.

[0035] Compound: As used herein, a “compound” means a chemical substance, which is a material consisting of molecules having essentially the same chemical structure and properties. For a small molecular compound, the molecules are typically identical with respect to their atomic composition and structural configuration. For a macromolecular or polymeric compound, the molecules of a compound are highly similar but not all of them are necessarily identical. For example, a segment of a polymer that is designated to consist of 50 monomeric units may also contain individual molecules with e.g. 48 or 53 monomeric units.

[0036] Derived from: The term “derived from” as used throughout the present specification in the context of a nucleic acid, i.e. for a nucleic acid “derived from” (another) nucleic acid, means that the nucleic acid, which is derived from (another) nucleic acid, shares at least 50%, preferably at least 55%, preferably at least 60%, preferably at least 65%, preferably at least 70%, more preferably at least 75%, more preferably at least 80%, 81%, 82%, 83%, 84%, more preferably at least 85%, 86%, 87%, 88%, 89% even more preferably at least 90%, 91%, 92%, 93%, 94%, even more preferably at least 95%, 96%, 97%, and particularly preferably at least 98%, 99% sequence identity with the nucleic acid from which it is derived. The skilled person is aware that sequence identity is typically calculated for the same types of nucleic acids, i.e. for DNA sequences or for RNA sequences. Thus, it is understood, if a DNA is “derived from” an RNA or if an RNA is “derived from” a DNA, in a first step the RNA sequence is converted into the corresponding DNA sequence (in particular by replacing the uracils (U) by thymidines (T) throughout the sequence) or, vice versa, the DNA sequence is converted into the corresponding RNA sequence (in particular by replacing the thymidines (T) by uracils (U) throughout the sequence). Thereafter, the sequence identity of the DNA sequences or the sequence identity of the RNA sequences is determined. Preferably, a nucleic acid “derived from” a nucleic acid also refers to nucleic acid, which is modified in comparison to the nucleic acid from which it is derived, e.g. in order to increase RNA stability even further and/or to prolong and/or increase protein production. It goes without saying that such modifications are preferred, which do not impair RNA stability, e.g. in comparison to the nucleic acid from which it is derived. In the context of amino acid sequences (e.g. antigenic peptides or proteins) the term “derived from” means that the amino acid sequence, which is derived from (another) amino acid sequence (e.g. YFV prME or YFV NS1), shares at least 50%, preferably at least 55%, preferably at least 60%, preferably at least 65%, preferably at least 70%, more preferably at least 75%, more preferably at least 80%, 81%, 82%, 83%, 84%, more preferably at least 85%, 86%, 87%, 88%, 89% even more preferably at least 90%, 91%, 92%, 93%, 94%, even more preferably at least 95%, 96%, 97%, and particularly preferably at least 98%, 99% sequence identity with the amino acid sequence from which it is derived. Thus, it is understood, if a antigenic peptides or protein is “derived from” a YFV protein, e.g. prME, the antigenic peptides or protein that is “derived from” said YFV prME may differ represent a variant or fragment of the (full length) prME protein (e.g. a variant or fragment of pr, M, E, prM, prME or any combinations thereof). Moreover, the antigenic peptides or protein that is “derived from” said YFV prME may differ in the amino acid sequence, sharing a certain percentage of identity as defined above.

[0037] Epitope: The term “epitope” (also called “antigen determinant” in the art) as used herein will be recognized and understood by the person of ordinary skill in the art, and is for example intended to refer to T cell epitopes and B cell epitopes. T cell epitopes or parts of the antigenic peptides or proteins may comprise fragments preferably having a length of about 6 to about 20 or even more amino acids, e.g. fragments as processed and presented by MHC class I molecules, preferably having a length of about 8 to about 10 amino acids, e.g. 8, 9, or 10, (or even 11, or 12 amino acids), or fragments as processed and presented by MHC class II molecules, preferably having a length of about 13 to about 20 or even more amino acids, wherein these fragments may be selected from any part of the amino acid sequence. These fragments are typically recognized by T cells in form of a complex consisting of the peptide fragment and an MHC molecule, i.e. the fragments are typically not recognized in their native form. B cell epitopes are typically fragments located on the outer surface of (native) protein or peptide antigens, preferably having 5 to 15 amino acids, more preferably having 5 to 12 amino acids, even more preferably having 6 to 9 amino acids, which may be recognized by antibodies, i.e. in their native form. Such epitopes of proteins or peptides may furthermore be selected from any of the herein mentioned variants of such proteins or peptides. In this context antigenic determinants can be conformational or discontinuous epitopes which are composed of segments of the proteins or peptides as defined herein that are discontinuous in the amino acid sequence of the proteins or peptides as defined herein but are brought together in the three-dimensional structure or continuous or linear epitopes which are composed of a single polypeptide chain. In the context of the present invention, an epitope may be the product of translation of a provided artificial RNA as specified herein.

[0038] Fragment: The term “fragment” as used throughout the present specification in the context of a nucleic acid sequence or an amino acid sequence may typically be a shorter portion of a full-length sequence of e.g. a nucleic acid sequence or an amino acid sequence. Accordingly, a fragment, typically, consists of a sequence that is identical to the corresponding stretch within the full-length sequence. A preferred fragment of a sequence in the context of the present invention, consists of a continuous stretch of entities, such as nucleotides or amino acids corresponding to a continuous stretch of entities in the molecule the fragment is derived from, which represents at least 5%, 10%, 20%, preferably at least 30%, more preferably at least 40%, more preferably at least 50%, even more preferably at least 60%, even more preferably at least 70%, and most preferably at least 80% of the total (i.e. full-length) molecule from which the fragment is derived (e.g. YFV prME or YFV NS1). The term “fragment” as used throughout the present specification in the context of proteins or peptides may, typically, comprise a sequence of a protein or peptide as defined herein, which is, with regard to its amino acid sequence (or its encoded nucleic acid molecule), N-terminally and/or C-terminally truncated compared to the amino acid sequence of the original (native) protein (or its encoded nucleic acid molecule). Such truncation may thus occur either on the amino acid level or correspondingly on the nucleic acid level. A sequence identity with respect to such a fragment as defined herein may therefore preferably refer to the entire protein or peptide as defined herein or to the entire (coding) nucleic acid molecule of such a protein or peptide. In the context of antigens such fragment may have a length of about 6 to about 20 or even more amino acids, e.g. fragments as processed and presented by MHC class I molecules, preferably having a length of about 8 to about 10 amino acids, e.g. 8, 9, or 10, (or even 6, 7, 11, or 12 amino acids), or fragments as processed and presented by MHC class II molecules, preferably having a length of about 13 or more amino acids, e.g. 13, 14, 15, 16, 17, 18, 19, 20 or even more amino acids, wherein these fragments may be selected from any part of the amino acid sequence. These fragments are typically recognized by T-cells in form of a complex consisting of the peptide fragment and an MHC molecule, i.e. the fragments are typically not recognized in their native form. Fragments of proteins or peptides (e.g. in the context of antigens) may comprise at least one epitope of those proteins or peptides. Furthermore also domains of a protein, like the extracellular domain, the intracellular domain or the transmembrane domain and shortened or truncated versions of a protein may be understood to comprise a fragment of a protein.

[0039] Heterologous: The terms “heterologous” or “heterologous sequence” as used throughout the present specification in the context of a nucleic acid sequence or an amino acid sequence refers to a sequence (e.g. DNA, RNA, amino acid) will be recognized and understood by the person of ordinary skill in the art, and is intended to refer to a sequence that is derived from another gene, from another allele, from another species. Two sequences are typically understood to be “heterologous” if they are not derivable from the same gene or in the same allele. I.e., although heterologous sequences may be derivable from the same organism, they naturally (in nature) do not occur in the same nucleic acid molecule, such as e.g. in the same RNA, or the same protein.

[0040] Humoral immune response: The terms “humoral immunity” or “humoral immune response” will be recognized and understood by the person of ordinary skill in the art, and are for example intended to refer to B-cell mediated antibody production and optionally to accessory processes accompanying antibody production. A humoral immune response may be typically characterized, e.g. by Th2 activation and cytokine production, germinal center formation and isotype switching, affinity maturation and memory cell generation. Humoral immunity also typically may refer to the effector functions of antibodies, which include pathogen and toxin neutralization, classical complement activation, and opsonin promotion of phagocytosis and pathogen elimination.

[0041] Identity (of a sequence): The term “identity” as used throughout the present specification in the context of a nucleic acid sequence or an amino acid sequence will be recognized and understood by the person of ordinary skill in the art, and is for example intended to refer to the percentage to which two sequences are identical. To determine the percentage to which two sequences are identical, e.g. nucleic acid sequences or amino acid sequences as defined herein, preferably the amino acid sequences encoded by the artificial nucleic acid sequence as defined herein or the amino acid sequences themselves, the sequences can be aligned in order to be subsequently compared to one another. Therefore, e.g. a position of a first sequence may be compared with the corresponding position of the second sequence. If a position in the first sequence is occupied by the same component (residue) as is the case at a position in the second sequence, the two sequences are identical at this position. If this is not the case, the sequences differ at this position. If insertions occur in the second sequence in comparison to the first sequence, gaps can be inserted into the first sequence to allow a further alignment. If deletions occur in the second sequence in comparison to the first sequence, gaps can be inserted into the second sequence to allow a further alignment. The percentage to which two sequences are identical is then a function of the number of identical positions divided by the total number of positions including those positions which are only occupied in one sequence. The percentage to which two sequences are identical can be determined using a mathematical algorithm. A preferred, but not limiting, example of a mathematical algorithm which can be used is the algorithm is integrated in the BLAST program. Sequences which are identical to the sequences of the present invention to a certain extent can be identified by this program.

[0042] Immunogen, immunogenic: The terms “immunogen” or “immunogenic” will be recognized and understood by the person of ordinary skill in the art, and are for example intended to refer to a compound that is able to stimulate/induce an immune response. Preferably, an immunogen is a peptide, polypeptide, or protein. An immunogen in the sense of the present invention is the product of translation of a provided artificial nucleic acid, preferably RNA, comprising at least one coding sequence encoding at least one antigenic peptide, protein derived from YFV as defined herein. Typically, an immunogen elicits an adaptive immune response.

[0043] Immune response: The term “immune response” will be recognized and understood by the person of ordinary skill in the art, and is for example intended to refer to a specific reaction of the adaptive immune system to a particular antigen (so called specific or adaptive immune response) or an unspecific reaction of the innate immune system (so called unspecific or innate immune response), or a combination thereof.

[0044] Immune system: The term “immune system” will be recognized and understood by the person of ordinary skill in the art, and is for example intended to refer to a system of the organism that may protect the organisms from infection. If a pathogen succeeds in passing a physical barrier of an organism and enters this organism, the innate immune system provides an immediate, but non-specific response. If pathogens evade this innate response, vertebrates possess a second layer of protection, the adaptive immune system. Here, the immune system adapts its response during an infection to improve its recognition of the pathogen. This improved response is then retained after the pathogen has been eliminated, in the form of an immunological memory, and allows the adaptive immune system to mount faster and stronger attacks each time this pathogen is encountered. According to this, the immune system comprises the innate and the adaptive immune system. Each of these two parts typically contains so called humoral and cellular components.

[0045] Innate immune system: The term “innate immune system” (also known as non-specific or unspecific immune system) will be recognized and understood by the person of ordinary skill in the art, and is for example intended to refer to a system typically comprising the cells and mechanisms that defend the host from infection by other organisms in a non-specific manner. This means that the cells of the innate system may recognize and respond to pathogens in a generic way, but unlike the adaptive immune system, it does not confer long-lasting or protective immunity to the host. The innate immune system may be, e.g. activated by ligands of Toll-like receptors (TLRs) or other auxiliary substances such as lipopolysaccharides, TNF-alpha, CD40 ligand, or cytokines, monokines, lymphokines, interleukins or chemokines, IL-1 to IL-33, IFN-alpha, IFN-beta, IFN-gamma, GM-CSF, G-CSF, M-CSF, LT-beta, TNF-alpha, growth factors, and hGH, a ligand of human Toll-like receptor (e.g., TLR1 to TLR10), a ligand of murine Toll-like receptor, (e.g., TLR1 to TLR13), a ligand of a NOD-like receptor, a ligand of a RIG-I like receptor, an immunostimulatory nucleic acid, an immunostimulatory RNA (isRNA), a CpG-DNA, an antibacterial agent, or an anti-viral agent.

[0046] Lipidoid compound: A lipidoid compound, also simply referred to as lipidoid, is a lipid-like compound, i.e. an amphiphilic compound with lipid-like physical properties. In the context of the present invention the term lipid is considered to encompass lipidoid compounds.

[0047] Nucleic acid: The terms “nucleic acid” or “nucleic acid molecule” will be recognized and understood by the person of ordinary skill in the art, and are for example intended to refer to a molecule comprising, preferably consisting of nucleic acid components. The term nucleic acid molecule preferably refers to DNA or RNA molecules. It is preferably used synonymous with the term polynucleotide. Preferably, a nucleic acid or a nucleic acid molecule is a polymer comprising or consisting of nucleotide monomers, which are covalently linked to each other by phosphodiester-bonds of a sugar/phosphate-backbone. The term “nucleic acid molecule” also encompasses modified nucleic acid molecules, such as base-modified, sugar-modified or backbone-modified DNA or RNA molecules as defined herein.

[0048] Nucleic acid sequence/RNA sequence/amino acid sequence: The terms “nucleic acid sequence”, “RNA sequence” or “amino acid sequence” will be recognized and understood by the person of ordinary skill in the art, and are for example intended to refer to particular and individual order of the succession of its nucleotides or amino acids respectively.

[0049] Permanently cationic: The term “permanently cationic” as used herein will be recognized and understood by the person of ordinary skill in the art, and means, for example, that the respective compound, or group or atom, is positively charged at any pH value or hydrogen ion activity of its environment. Typically, the positive charge is results from the presence of a quaternary nitrogen atom. Where a compound carries a plurality of such positive charges, it may be referred to as permanently polycationic, which is a subcategory of permanently cationic.

[0050] Pharmaceutically effective amount: The terms “pharmaceutically effective amount” or “effective amount” will be recognized and understood by the person of ordinary skill in the art, and are for example intended to refer to an amount of a compound (e.g. the artificial RNA of the invention) that is sufficient to induce a pharmaceutical effect, such as, in the context of the invention, an immune response (e.g. against an antigenic peptide, protein, polyprotein as defined herein).

[0051] Stabilized nucleic acid molecule” or “stabilized RNA: The term “stabilized nucleic acid molecule” or “stabilized RNA” refer to a nucleic acid molecule, preferably an RNA molecule that is modified such, that it is more stable to disintegration or degradation, e.g., by environmental factors or enzymatic digest, such as by an exo- or endonuclease degradation, than the nucleic acid molecule without the modification. Preferably, a stabilized nucleic acid molecule, e.g. stabilized RNA, in the context of the present invention is stabilized in a cell, such as a prokaryotic or eukaryotic cell, preferably in a mammalian cell, such as a human cell. The stabilization effect may also be exerted outside of cells, e.g. in a buffer solution etc., for example, in a manufacturing process for a pharmaceutical composition comprising the stabilized nucleic acid molecule.

[0052] T-cell responses: The terms “cellular immunity” or “cellular immune response” or “cellular T-cell responses” as used herein will be recognized and understood by the person of ordinary skill in the art, and are for example intended to refer to the activation of macrophages, natural killer cells (NK), antigen-specific cytotoxic T-lymphocytes, and the release of various cytokines in response to an antigen. In more general terms, cellular immunity is not based on antibodies, but on the activation of cells of the immune system. Typically, a cellular immune response may be characterized e.g. by activating antigen-specific cytotoxic T-lymphocytes that are able to induce apoptosis in cells, e.g. specific immune cells like dendritic cells or other cells, displaying epitopes of foreign antigens on their surface. In the context of the invention, the antigen is provided by the artificial RNA encoding at least one antigenic peptide or protein derived from YFV, suitably inducing T-cell responses.

[0053] Variant (of a sequence): The term “variant” as used throughout the present specification in the context of a nucleic acid sequence will be recognized and understood by the person of ordinary skill in the art, and is for example intended to refer to a variant of nucleic acid sequences which forms the basis of a nucleic acid sequence. For example, a variant nucleic acid sequence may exhibit one or more nucleotide deletions, insertions, additions and/or substitutions compared to the nucleic acid sequence from which the variant is derived. Preferably, a variant of a nucleic acid sequence is at least 40%, preferably at least 50%, more preferably at least 60%, more preferably at least 70%, even more preferably at least 80%, even more preferably at least 90%, most preferably at least 95% identical to the nucleic acid sequence the variant is derived from. Preferably, the variant is a functional variant. A “variant” of a nucleic acid sequence may have at least 70%, 75%, 80%, 85%, 90%, 95%, 98% or 99% nucleotide identity over a stretch of 10, 20, 30, 50, 75 or 100 nucleotide of such nucleic acid sequence.

[0054] The term “variant” as used throughout the present specification in the context of proteins or peptides will be recognized and understood by the person of ordinary skill in the art, and is for example intended to refer to a proteins or peptide variant having an amino acid sequence which differs from the original sequence in one or more mutation(s), such as one or more substituted, inserted and/or deleted amino acid(s). Preferably, these fragments and/or variants have the same biological function or specific activity compared to the full-length native protein, e.g. its specific antigenic property. “Variants” of proteins or peptides as defined in the context of the present invention may comprise conservative amino acid substitution(s) compared to their native, i.e. non-mutated physiological, sequence. Those amino acid sequences as well as their encoding nucleotide sequences in particular fall under the term variants as defined herein. Substitutions in which amino acids, which originate from the same class, are exchanged for one another are called conservative substitutions. In particular, these are amino acids having aliphatic side chains, positively or negatively charged side chains, aromatic groups in the side chains or amino acids, the side chains of which can enter into hydrogen bridges, e.g. side chains which have a hydroxyl function. This means that e.g. an amino acid having a polar side chain is replaced by another amino acid having a likewise polar side chain, or, for example, an amino acid characterized by a hydrophobic side chain is substituted by another amino acid having a likewise hydrophobic side chain (e.g. serine (threonine) by threonine (serine) or leucine (isoleucine) by isoleucine (leucine)). Insertions and substitutions are possible, in particular, at those sequence positions which cause no modification to the three-dimensional structure or do not affect the binding region. Modifications to a three-dimensional structure by insertion(s) or deletion(s) can easily be determined e.g. using CD spectra (circular dichroism spectra). A “variant” of a protein or peptide may have at least 70%, 75%, 80%, 85%, 90%, 95%, 98% or 99% amino acid identity over a stretch of 10, 20, 30, 50, 75 or 100 amino acids of such protein or peptide. Preferably, a variant of a protein comprises a functional variant of the protein, which means that the variant exerts the same effect or functionality as the protein it is derived from.

[0055] 3′-untranslated region, 3′-UTR element, 3′-UTR: The term “S-untranslated region” or “3′-UTR element” will be recognized and understood by the person of ordinary skill in the art, and are for example intended to refer to a part of a nucleic acid molecule, which is located 3′ (i.e. “downstream”) of a coding sequence and which is typically not translated into protein. Usually, a 3′-UTR is the part of an mRNA which is located between the coding sequence (CDS) and the poly(A) sequence of the mRNA. In the context of the invention, the term 3′-UTR may also comprise elements, which are not encoded in the DNA template, from which an artificial RNA is transcribed, but which are added after transcription during maturation, e.g. a poly(A) sequence.

[0056] 5′-untranslated region, 5′-UTR element, 5′-UTR: The term “5′-untranslated region (5′-UTR)” will be recognized and understood by the person of ordinary skill in the art, and are for example intended to refer to a part of a nucleic acid molecule, which is located 5′ (i.e. “upstream”) of a coding sequence and which is not translated into protein. A 5′-UTR is typically understood to be a particular section of messenger RNA (mRNA), which is located 5′ of the coding sequence of the mRNA. Typically, the 5′-UTR starts with the transcriptional start site and ends one nucleotide before the start codon of the coding sequence. Preferably, the 5′-UTRs have a length of more than 20, 30, 40 or 50 nucleotides. The 5′-UTR may comprise elements for controlling gene expression, also called regulatory elements. Such regulatory elements may be, for example, ribosomal binding sites. The 5′-UTR may be post-transcriptionally modified, for example by addition of a 5′-cap.

[0057] 5′ terminal oligopyrimidine tract (TOP), TOP-UTR: The term “5′ terminal oligopyrimidine tract (TOP)” has to be understood as a stretch of pyrimidine nucleotides located in the 5′ terminal region of a nucleic acid molecule, such as the 5′ terminal region of certain mRNA molecules or the 5′ terminal region of a functional entity, e.g. the transcribed region, of certain genes. The sequence starts with a cytidine, which usually corresponds to the transcriptional start site, and is followed by a stretch of usually about 3 to 30 pyrimidine nucleotides. For example, the TOP may comprise 3, 4, 5, 6, 7, 8, 9, 10, 11, 12, 13, 14, 15, 16, 17, 18, 19, 20, 21, 22, 23, 24, 25, 26, 27, 28, 29, 30 or even more nucleotides. The pyrimidine stretch and thus the 5′-TOP ends one nucleotide 5′ to the first purine nucleotide located downstream of the TOP. Messenger RNA that contains a 5′ terminal oligopyrimidine tract is often referred to as TOP mRNA. Accordingly, genes that provide such messenger RNAs are referred to as TOP genes. The term “TOP motif” or “5′-TOP motif” has to be understood as a nucleic acid sequence which corresponds to a 5′-TOP as defined above. Thus, a TOP motif in the context of the present invention is preferably a stretch of pyrimidine nucleotides having a length of 3-30 nucleotides. Preferably, the TOP-motif consists of at least 3 pyrimidine nucleotides, preferably at least 4 pyrimidine nucleotides, preferably at least 5 pyrimidine nucleotides, more preferably at least 6 nucleotides, more preferably at least 7 nucleotides, most preferably at least 8 pyrimidine nucleotides, wherein the stretch of pyrimidine nucleotides preferably starts at its 5′-end with a cytosine nucleotide. In TOP genes and TOP mRNAs, the TOP-motif preferably starts at its 5′-end with the transcriptional start site and ends one nucleotide 5′ to the first purine residue in said gene or mRNA. A TOP motif in the sense of the present invention is preferably located at the 5′-end of a sequence which represents a 5′-UTR or at the 5′-end of a sequence which codes for a 5′-UTR. Thus, preferably, a stretch of 3 or more pyrimidine nucleotides is called “TOP motif” in the sense of the present invention if this stretch is located at the 5′-end of a respective sequence, such as the artificial nucleic acid, the 5′-UTR element of the artificial nucleic acid, or the nucleic acid sequence which is derived from the 5′-UTR of a TOP gene as described herein. In other words, a stretch of 3 or more pyrimidine nucleotides, which is not located at the 5′-end of a 5′-UTR or a 5′-UTR element but anywhere within a 5′-UTR or a 5′-UTR element, is preferably not referred to as “TOP motif”. In some embodiments, the nucleic acid sequence of the 5′-UTR element, which is derived from a 5′-UTR of a TOP gene, terminates at its 3′-end with a nucleotide located at position 1, 2, 3, 4, 5, 6, 7, 8, 9 or 10 upstream of the start codon (e.g. A(U/T)G) of the gene or RNA it is derived from. Thus, the 5′-UTR element does not comprise any part of the protein coding sequence. Thus, preferably, the only protein coding part of the at least one nucleic acid sequence, particularly of the RNA sequence, is provided by the coding sequence.

### Short Description of the Invention

[0058] The present invention is based on the inventor's surprising finding that at least one peptide or protein derived from of a Yellow fever virus (YFV) protein, preferably a YFV prME polyprotein or a non-structural NS1 protein encoded by the artificial RNA of the invention can efficiently be expressed in a mammalian cell. Unexpectedly, the expression of the YFV proteins (prME polyprotein or NS1 protein) encoded by the artificial nucleic RNA could be increased in vitro and in vivo by selecting suitable heterologous 5′ untranslated regions (UTRs) and suitable heterologous 3′ untranslated regions (UTRs). Advantageously, said artificial RNA of the invention comprising advantageous 3′-UTR/5′-UTR combinations induce very efficient antigen-specific immune responses against the encoded YFV prME polyprotein. Said artificial RNA comprised in lipid nanoparticles (LNPs) very efficiently induces antigen-specific immune responses against YFV prME or NS1 at a very low dosages and dosing regimen. Accordingly, the artificial RNA of the invention is suitable for eliciting an immune response against YFV prME or NS1 in a mammalian subject, in particular, in a human subject. The artificial RNA of the invention is therefore suitable for use as a vaccine, e.g. as a veterinary vaccine, preferably as a human vaccine.

[0059] In a first aspect, the present invention provides an artificial nucleic acid, preferably an artificial RNA comprising at least one 5′ untranslated region (UTR) and/or at least one 3′ untranslated region (UTR); and at least one coding sequence operably linked to said 3′-UTR and/or 5′-UTR encoding at least one antigenic peptide or protein derived from a yellow fever virus peptide or protein, preferably a yellow fever virus prME polyprotein or a fragment or variant thereof. Further, an artificial RNA comprising at least one 5′ untranslated region (UTR) and/or at least one 3′ untranslated region (UTR); and at least one coding sequence operably linked to said 3′-UTR and/or 5′-UTR encoding at least one antigenic peptide or protein derived from a yellow fever virus NS1 protein or a fragment or variant thereof.

[0060] In preferred embodiments, the artificial RNA comprises at least one nucleic acid sequence derived from a 3′-UTR of a gene selected from an ALB7 gene, an alpha-globin gene, a PSMB3 gene, a CASP1 gene, a COX6B1 gene, a NDUFA1 gene and a, or from a homolog, a fragment or a variant thereof.

[0061] In preferred embodiments, the artificial RNA comprises at least one nucleic acid sequence derived from a 5′-UTR of gene selected from a RPL32 gene, a, a HSD17B4 gene, a ATP5A1 gene, a NDUFA4 gene, a NOSIP gene, a RPL31 gene, a SLC7A3 gene, or from a homolog, a fragment or variant of any one of these genes.

[0062] Suitably, the artificial RNA of the invention comprises at least one coding sequence encoding at least one antigenic peptide or protein derived from a Yellow fever virus prME polyprotein operably linked to a 3′-UTR and a 5′-UTR selected from a-1 (HSD17B4/PSMB3), a-2 (Ndufa4/PSMB3), a-4 (NDUFA4/PSMB3), b-4 (HSD17D4/CASP1), c-5 (ATP5A1/PSMB3), d-1 (RpI31/PSMB3), d-5 (Slc7a3/Ndufa1), g-4 (NOSIP/CASP1), h-4 (Slc7a3/CASP1), i-2 (RPL32/ALB7), or i-3 (α-globin gene), wherein a-1 (HSD17B4/PSMB3), a-4 (NDUFA4/PSMB3), b-4 (HSD17B4/CASP1), d-5 (Slc7a3/Ndufa1), c-5 (ATP5A1/PSMB3), i-3 (alpha-globin), or g-4 (NOSIP/CASP1) are preferred, and a-1 (HSD17B4/PSMB3), a-4 (NDUFA4/PSMB3), b-4 (HSD17B4/CASP1), c-5 (ATP5A1/PSMB3), or g-4 (NOSIP/CASP1) are particularly preferred. Further, the artificial RNA of the invention may comprise at least one coding sequence encoding at least one antigenic peptide or protein derived from a Yellow fever virus NS1 protein operably linked to a 3′-UTR and a 5′-UTR selected from a-1 (HSD17B4/PSMB3), a-2 (Ndufa4/PSMB3), a-4 (NDUFA4/PSMB3), b-4 (HSD17B4/CASP1), c-5 (ATP5A1/PSMB3), d-1 (RpI31/PSMB3), d-5 (Slc7a3/Ndufa1), g-4 (NOSIP/CASP1), h-4 (Slc7a3/CASP1), i-2 (RPL32/ALB7), or i-3 (α-globin gene), wherein a-1 (HSD17B4/PSMB3), a-4 (NDUFA4/PSMB3), b-4 (HSD17B4/CASP1), d-5 (Slc7a3/Ndufa1), c-5 (ATP5A1/PSMB3), i-3 (alpha-globin), or g-4 (NOSIP/CASP1) are preferred, and a-1 (HSD17B4/PSMB3), a-4 (NDUFA4/PSMB3), b-4 (HSD17B4/CASP1), c-5 (ATP5A1/PSMB3), or g-4 (NOSIP/CASP1) are particularly preferred.

[0063] The at least one antigenic peptide or protein derived from YFV may be an NS1 protein.

[0064] The at least one antigenic peptide or protein derived from YFV may be prME polyprotein or prME polyprotein additionally comprising a C-terminal overhang comprising a fragment of YFV non-structural protein NS1 and/or an N-terminal overhang comprising a fragment of YFV capsid protein C.

[0065] The artificial RNA may additionally encode a heterologous secretory signal peptide, wherein secretory signal peptides derived from IgE and JEV are preferred.

[0066] The artificial RNA may additionally encode a further virus element, wherein a JEV-Stem is preferred.

[0067] The artificial RNA may comprise a codon modified coding sequence selected from C maximized coding sequence, CAI maximized coding sequence, human codon usage adapted coding sequence, G/C content modified coding sequence, and G/C optimized coding sequence, or any combination thereof.

[0068] The artificial RNA may be an mRNA, a viral RNA, self-replicating RNA, a circular RNA, or a replicon RNA. In preferred embodiments, the artificial RNA is an mRNA.

[0069] The artificial RNA, preferably mRNA, may further comprise at least one selected from a cap structure, a poly(A)sequence, a poly(C)sequence, a histone-stem loop, a 3′-terminal sequence element.

[0070] In a second aspect, the present invention provides a composition comprising said artificial RNA.

[0071] The composition of the second aspect may comprise at least one artificial RNA of the invention encoding YF prME and at least one further artificial RNA encoding YF NS1.

[0072] The composition may comprise at least one artificial RNA of the invention complexed or at least partially complexed with one or more cationic or polycationic compound, preferably with a cationic or polycationic polymer, cationic or polycationic polysaccharide, cationic or polycationic lipid, cationic or polycationic protein, cationic or polycationic peptide, or any combinations thereof.

[0073] The artificial RNA comprised in the composition may be at least partially complexed with protamine.

[0074] The artificial RNA of the invention comprised in the composition may be complexed or associated with a polyethylene glycol/peptide polymer and a lipid component, preferably a lipidoid component.

[0075] Suitably, the composition may comprise the artificial RNA of the invention complexed with, encapsulated in, or associated with one or more lipids, thereby forming lipid nanoparticles.

[0076] The composition may preferably comprise the artificial RNA of the invention complexed with one or more lipids thereby forming lipid nanoparticles (LNP), wherein the LNP essentially consists of

(i) at least one cationic lipid as defined herein, preferably a lipid of Formula (III), more preferably lipid III-3;
(ii) a neutral lipid as defined herein, preferably 1,2-distearoyl-sn-glycero-3-phosphocholine (DSPC);
(iii) a steroid or steroid analogue as defined herein, preferably cholesterol; and
(iv) a PEG-lipid as defined herein, e.g. PEG-DMG or PEG-cDMA, preferably a PEGylated lipid of Formula (IVa);
wherein (i) to (iv) are in a molar ratio of about 20-60% cationic lipid:5-25% neutral lipid:25-55% sterol; 0.5-15% PEG-lipid.

[0077] The present invention also concerns a yellow fever virus vaccine comprising said artificial RNA or said composition.

[0078] The present invention is also directed to the use of the artificial RNA, the composition and the vaccine in treatment or prophylaxis of an infection with a yellow fever virus.

[0079] In particular, the present invention is directed to the use of the artificial RNA, the composition and the vaccine in treatment or prophylaxis of an infection with yellow fever virus or a disorder related to such an infection.

[0080] The invention further concerns a method of treating or preventing a disorder or a disease in a subject, first and second medical uses of the artificial RNA, compositions and vaccines. Further, the invention is directed to a kit, particularly to a kit of parts, comprising the artificial RNA, compositions and vaccines.

### DETAILED DESCRIPTION OF THE INVENTION

[0081] The present application is filed together with a sequence listing in electronic format, which is part of the description of the present application (WIPO standard ST.25). The information contained in the electronic format of the sequence listing filed together with this application is incorporated herein by reference in its entirety. Where reference is made herein to a “SEQ ID NO:” the corresponding nucleic acid sequence or amino acid (aa) sequence in the sequence listing having the respective identifier is referred to. For many sequences, the sequence listing also provides additional detailed information, e.g. regarding certain structural features, sequence optimizations, GenBank identifiers, or regarding its coding capacity. In particular, such information is provided under numeric identifier <223> in the WIPO standard ST.25 sequence listing. Accordingly, information provided under said numeric identifier <223> is explicitly included herein in its entirety and has to be understood as integral part of the description of the underlying invention.

### Artificial Nucleic Acid:

[0082] In a first aspect, the invention relates to an artificial nucleic acid comprising

a) at least one 5′ untranslated region (UTR) and/or at least one 3′ untranslated region (UTR); and
b) at least one coding sequence operably linked to said 3′-UTR and/or 5′-UTR encoding at least one antigenic peptide or protein derived from a Yellow fever virus (YFV) or a fragment or variant thereof.

[0083] In a preferred embodiment of the first aspect, the invention relates to an artificial RNA, preferably an RNA suitable for vaccination, comprising

a) at least one heterologous 5′ untranslated region (5′-UTR) and/or at least one heterologous 3′ untranslated region (3′-UTR); and
b) at least one coding sequence operably linked to said 3′-UTR and/or 5′-UTR encoding at least one antigenic peptide or protein derived from a YFV prME polyprotein or a fragment or variant thereof.

[0084] In other preferred embodiment of the first aspect, the invention relates to an artificial RNA, preferably an RNA suitable for vaccination, comprising

a) at least one heterologous 5′ untranslated region (5′-UTR) and/or at least one heterologous 3′ untranslated region (3′-UTR); and
b) at least one coding sequence operably linked to said 3′-UTR and/or 5′-UTR encoding at least one antigenic peptide or protein derived from a YFV NS1 protein or a fragment or variant thereof.

[0085] In general, RNA is composed of a protein-coding region, and 5′- and 3′-untranslated regions (UTRs). The 3′-UTR is variable in sequence and size; it spans between the stop codon and the poly(A) tail. Importantly, the 3′-UTR sequence harbors several regulatory motifs that determine RNA turnover, stability and localization, and thus governs many aspects of post-transcriptional regulation. In medical application of nucleic acids, e.g. RNA (e.g. immunotherapy applications, vaccination) the regulation of nucleic acid translation into protein is of paramount importance to therapeutic safety and efficacy. The present inventors surprisingly discovered that certain combinations of 3′-UTRs and 5′-UTRs act in concert to synergistically enhance the expression of operably linked nucleic acid sequences encoding YFV antigenic peptides or proteins. Artificial RNA molecules harboring the inventive UTR combinations advantageously enable the rapid and transient expression of high amounts of YFV antigenic peptides or proteins. Accordingly, the artificial RNA provided herein is particularly useful and suitable for various applications in vivo, including the vaccination against YFV.

[0086] Suitably, the artificial RNA may comprise at least one heterologous 5′-UTR and/or at least one heterologous 3′-UTR. In this context, an UTR of the invention comprises or consists of a nucleic acid sequence derived from a 5′-UTR or a 3′-UTR of any naturally occurring gene or a fragment, a homolog or a variant thereof. Preferably, a 5′-UTR or a 3′-UTR of the invention is heterologous to the at least one coding sequence encoding the at least one antigenic peptide or protein derived from a Yellow fever virus. Suitable heterologous 5′-UTRs or heterologous 3′-UTRs are derived from naturally occurring genes (that are not derived from YFV). In other embodiments, synthetically engineered 5′-UTRs or 3′-UTRs may be used in the context of the present invention.

[0087] In preferred embodiments, the at least one artificial RNA comprises at least one heterologous 3′-UTR.

[0088] Preferably, the at least one heterologous 3′-UTR comprises or consists of a nucleic acid sequence derived from a 3′-UTR of a chordate gene, preferably a vertebrate gene, more preferably a mammalian gene, most preferably a human gene, or from a variant of a 3′-UTR of a chordate gene, preferably a vertebrate gene, more preferably a mammalian gene, most preferably a human gene.

[0089] Preferably the artificial RNA of the present invention comprises a 3′-UTR, which may be derivable from a gene that relates to an RNA with an enhanced half-life (that provides a stable RNA), for example a 3′-UTR as defined and described below.

[0090] Preferably, the at least one heterologous 3′-UTR comprises a nucleic acid sequence derived from a 3′-UTR of a gene, which preferably encodes a stable mRNA, or from a homolog, a fragment or a variant of said gene.

[0091] In preferred embodiments of the first aspect, the artificial RNA of the invention comprises at least one heterologous 3′-UTR, wherein the at least one heterologous 3′-UTR comprises a nucleic acid sequence derived from a 3′-UTR of a gene selected from an ALB7 gene, an alpha-globin gene, a PSMB3 gene, a CASP1 gene, a COX6B1 gene, a NDUFA1 gene, or from a homolog, a fragment or a variant thereof.

### ALB7-Derived 3′-UTR:

[0092] In preferred embodiments, the 3′-UTR comprises or consists of a nucleic acid sequence which is derived from the 3′-UTR of a vertebrate albumin gene or from a variant thereof, preferably from the 3′-UTR of a mammalian albumin gene or from a variant thereof, more preferably from the 3′-UTR of a human albumin gene or from a variant thereof, even more preferably from the 3′-UTR of the human albumin gene according to GenBank Accession number NM_000477.5, or from a homolog, fragment or variant thereof.

[0093] Accordingly, the artificial RNA of the invention may comprise a 3′-UTR derived from a ALB7 gene, wherein said 3′-UTR derived from a ALB7 gene comprises or consists of a nucleic acid sequence being identical or at least 70%, 80%, 85%, 86%, 87%, 88%, 89%, 90%, 91%, 92%, 93%, 94%, 95%, 96%, 97%, 98%, or 99% identical to SEQ ID NOs: 23, 24 or a fragment or a variant thereof.

### Alpha-Globin Gene-Derived 3′-UTR:

[0094] In preferred embodiments, the 3′-UTR comprises or consists of a nucleic acid sequence which is derived from the 3′-UTR of a vertebrate alpha-globin gene (herein referred to as “muag”) or from a variant thereof, preferably from the 3′-UTR of a mammalian alpha-globin or from a variant thereof, more preferably from the 3′-UTR of a human alpha-globin gene or from a variant thereof, even more preferably from the 3′-UTR of the human alpha-globin gene.

[0095] Accordingly, the RNA of the invention may comprise a 3′-UTR derived from a alpha-globin gene, wherein said 3′-UTR derived from a alpha-globin gene comprises or consists of a nucleic acid sequence being identical or at least 70%, 80%, 85%, 86%, 87%, 88%, 89%, 90%, 91%, 92%, 93%, 94%, 95%, 96%, 97%, 98%, or 99% identical to SEQ ID NOs: 25, 26 or a fragment or a variant thereof.

### PSMB3-Derived 3′-UTR:

[0096] The artificial RNA of the invention may comprise a 3′-UTR which is derived from a 3′-UTR of a gene encoding a proteasome subunit beta type-3 (PSMB3) protein, or a homolog, variant, fragment or derivative thereof. Such 3′-UTRs preferably comprise or consist of a nucleic acid sequences derived from the 3′-UTR of a proteasome subunit beta type-3 (PSMB3) gene, preferably from a vertebrate, more preferably a mammalian, most preferably a human proteasome subunit beta type-3 (PSMB3) gene, or a homolog, variant, fragment or derivative thereof. Said gene may preferably encode a proteasome subunit beta type-3 (PSMB3) protein corresponding to a human proteasome subunit beta type-3 (PSMB3) protein (UniProt Ref. No. P49720, entry version #183 of 30 Aug. 2017).

[0097] Accordingly, the artificial RNA of the invention may comprise a 3′-UTR derived from a PSMB3 gene, wherein said 3′-UTR derived from a PSMB3 gene comprises or consists of a nucleic acid sequence being identical or at least 70%, 80%, 85%, 86%, 87%, 88%, 89%, 90%, 91%, 92%, 93%, 94%, 95%, 96%, 97%, 98%, or 99% identical to SEQ ID NOs: 15, 16 or a fragment or a variant thereof.

### CASP1-Derived 3′-UTR:

[0098] The artificial RNA of the invention may comprise a 3′-UTR which is derived from a 3′-UTR of a gene encoding a Caspase-1 (CASP1) protein, or a homolog, variant, fragment or derivative thereof. Such 3′-UTRs preferably comprise or consist of a nucleic acid sequence derived from the 3′-UTR of a Caspase-1 (CASP1) gene, preferably from a vertebrate, more preferably a mammalian, most preferably a human Caspase-1 (CASP1) gene, or a homolog, variant, fragment or derivative thereof.

[0099] Accordingly, the RNA of the invention may comprise a 3′-UTR derived from a CASP1 gene, wherein said 3′-UTR derived from a CASP1 gene comprises or consists of a nucleic acid sequence being identical or at least 70%, 80%, 85%, 86%, 87%, 88%, 89%, 90%, 91%, 92%, 93%, 94%, 95%, 96%, 97%, 98%, or 99% identical to SEQ ID NOs: 17, 18 or a fragment or a variant thereof.

### COX6B1-Derived 3′-UTR:

[0100] The artificial RNA of the invention may comprise a 3′-UTR which is derived from a 3′-UTR of a COX6B1 gene encoding a cytochrome c oxidase subunit 6B1 (COX6B1) protein, or a homolog, variant, fragment or derivative thereof. Such 3′-UTRs preferably comprise or consist of a nucleic acid sequence which is derived from the 3′-UTR of a cytochrome c oxidase subunit 6B1 (COX6B1) gene, preferably from a vertebrate, more preferably a mammalian, most preferably a human cytochrome c oxidase subunit 6B1 (COX6B1) gene, or a homolog, variant, fragment or derivative thereof. Said gene may preferably encode a cytochrome c oxidase subunit 6B1 (COX6B1) protein corresponding to a human cytochrome c oxidase subunit 6B1 (COX6B1) protein (UniProt Ref. No. P14854, entry version #166 of 30 Aug. 2017).

[0101] Accordingly, the artificial RNA of the invention may comprise a 3′-UTR derived from a COX6B1 gene, wherein said 3′-UTR derived from a COX6B1 gene comprises or consists of a nucleic acid sequence being identical or at least 70%, 80%, 85%, 86%, 87%, 88%, 89%, 90%, 91%, 92%, 93%, 94%, 95%, 96%, 97%, 98%, or 99% identical to SEQ ID NOs: 21, 22 or a fragment or a variant thereof.

### NDUFA1-Derived 3′-UTR:

[0102] The artificial RNA of the invention may comprise a 3′-UTR which is derived from a 3′-UTR of a gene encoding a NADH dehydrogenase [ubiquinone] 1 alpha sub complex subunit 1 (NDUFA1) protein, or a homolog, variant, fragment or derivative thereof. Such 3′-UTRs preferably comprise or consist of a nucleic acid sequence derived from the 3′-UTR of a NADH dehydrogenase [ubiquinone] 1 alpha sub complex subunit 1 (NDUFA1) gene, preferably from a vertebrate, more preferably a mammalian NADH dehydrogenase [ubiquinone] 1 alpha sub complex subunit 1 (NDUFA1) gene, or a homolog, variant, fragment or derivative thereof. Said gene may preferably encode a NADH dehydrogenase [ubiquinone] 1 alpha sub complex subunit 1 (NDUFA1) protein corresponding to a human NADH dehydrogenase [ubiquinone] 1 alpha sub complex subunit 1 (NDUFA1) protein (UniProt Ref. No. 015239, entry version #152 of 30 Aug. 2017).

[0103] Accordingly, the artificial RNA of the invention may comprise a 3′-UTR derived from a NDUFA1 gene, wherein said 3′-UTR derived from a NDUFA1 gene comprises or consists of a nucleic acid sequence being identical or at least 70%, 80%, 85%, 86%, 87%, 88%, 89%, 90%, 91%, 92%, 93%, 94%, 95%, 96%, 97%, 98%, or 99% identical to SEQ ID NOs: 19, 20 or a fragment or a variant thereof.

[0104] In embodiments, the artificial RNA as defined herein comprises a 3′-UTR as described in WO2016/107877. In this context, the disclosure of WO2016/107877 relating to 3′-UTR sequences is herewith incorporated by reference. Particularly suitable 3′-UTRs are SEQ ID NOs: 1-24 and SEQ ID NOs: 49-318 of patent application WO2016/107877, or fragments or variants of these sequences. Accordingly, the 3′-UTRs of the artificial RNA of the present invention may comprise or consists of a corresponding RNA sequence of the nucleic acid sequence according SEQ ID NOs: 1-24 and SEQ ID NOs: 49-318 of the patent application WO2016/107877.

[0105] In embodiments, the artificial RNA as defined herein comprises a 3′-UTR as described in WO2017/036580. In this context, the disclosure of WO2017/036580 relating to 3′-UTR sequences is herewith incorporated by reference. Particularly suitable 3′-UTRs are SEQ ID NOs: 152-204 of the patent application WO2017/036580, or fragments or variants of these sequences. Accordingly, the 3′-UTR of the artificial RNA of the present invention may comprise or consist of a corresponding RNA sequence of the nucleic acid sequence according SEQ ID NOs: 152-204 of the patent application WO2017/036580.

[0106] According to preferred embodiments the artificial RNA comprises at least one heterologous 5′-UTR.

[0107] In preferred embodiments, the at least one artificial nucleic acid as defined herein, particularly the RNA as defined herein may comprise at least one heterologous 5′-UTR.

[0108] Preferably, the at least one 5′-UTR comprises or consists of a nucleic acid sequence derived from the 5′-UTR of a chordate gene, preferably a vertebrate gene, more preferably a mammalian gene, most preferably a human gene, or from a variant of the 5′-UTR of a chordate gene, preferably a vertebrate gene, more preferably a mammalian gene, most preferably a human gene.

[0109] Preferably the artificial RNA of the present invention comprises a 5′-UTR, which may be derivable from a gene that relates to an RNA with an enhanced half-life (that provides a stable RNA), for example a 5′-UTR as defined and described below.

[0110] Preferably, the at least one heterologous 5′-UTR comprises a nucleic acid sequence derived from a 5′-UTR of a gene, which preferably encodes a stable mRNA, or from a homolog, a fragment or a variant of said gene.

[0111] In preferred embodiments of the first aspect, the artificial RNA of the invention comprises at least one heterologous 5′-UTR, wherein the at least one heterologous 5′-UTR comprises a nucleic acid sequence derived from a 5′-UTR of gene selected from a RPL32 gene, a HSD17B4 gene, a ATP5A1 gene, a NDUFA4 gene, a NOSIP gene, a RPL31 gene, a SLC7A3 gene, or from a homolog, a fragment or variant of any one of these genes.

### RPL32-Derived 5′-UTR:

[0112] The artificial RNA of the invention may comprise a 5′-UTR derived from a 5′-UTR of a gene encoding a 60S ribosomal protein L32, or a homolog, variant, fragment or derivative thereof, wherein said 5′-UTR preferably lacks the 5′TOP motif. Such 5′-UTRs preferably comprise or consist of a nucleic acid sequence derived from the 5′-UTR of a 60S ribosomal protein L32 (RPL32) gene, preferably from a vertebrate, more preferably a mammalian, most preferably a human 60S ribosomal protein L32 (RPL32) gene, or a homolog, variant, fragment or derivative thereof, wherein the 5′-UTR preferably does not comprise the 5′TOP of said gene. Said gene may preferably encode a 60S ribosomal protein L32 (RPL32) corresponding to a human 60S ribosomal protein L32 (RPL32) (UniProt Ref. No. P62899, entry version #138 of 30 Aug. 2017).

[0113] Accordingly, the artificial RNA of the invention may comprise a 5′-UTR derived from a RPL32 gene, wherein said 5′-UTR derived from a RPL32 gene comprises or consists of a nucleic acid sequence being identical or at least 70%, 80%, 85%, 86%, 87%, 88%, 89%, 90%, 91%, 92%, 93%, 94%, 95%, 96%, 97%, 98%, or 99% identical to SEQ ID NOs: 13, 14 or a fragment or a variant thereof.

### HSD17B4-Derived 5′-UTR:

[0114] The artificial RNA of the invention may comprise a 5′-UTR derived from a 5′-UTR of a gene encoding a 17-beta-hydroxysteroid dehydrogenase 4, or a homolog, variant, fragment or derivative thereof, preferably lacking the 5′TOP motif. Such 5′-UTRs preferably comprise or consist of a nucleic acid sequence derived from the 5′-UTR of a 17-beta-hydroxysteroid dehydrogenase 4 (also referred to as peroxisomal multifunctional enzyme type 2) gene, preferably from a vertebrate, more preferably mammalian, most preferably human 17-beta-hydroxysteroid dehydrogenase 4 (HSD17B4) gene, or a homolog, variant, fragment or derivative thereof, wherein preferably the 5′-UTR does not comprise the 5′TOP of said gene. Said gene may preferably encode a 17-beta-hydroxysteroid dehydrogenase 4 protein corresponding to human 17-beta-hydroxysteroid dehydrogenase 4 (UniProt Ref. No. Q9BPX1, entry version #139 of Aug. 30, 2017), or a homolog, variant, fragment or derivative thereof.

[0115] Accordingly, the artificial RNA of the invention may comprise a 5′-UTR derived from a HSD17B4 gene, wherein said 5′-UTR derived from a HSD17B4 gene comprises or consists of a nucleic acid sequence being identical or at least 70%, 80%, 85%, 86%, 87%, 88%, 89%, 90%, 91%, 92%, 93%, 94%, 95%, 96%, 97%, 98%, or 99% identical to SEQ ID NOs: 1, 2 or a fragment or a variant thereof.

### ATP5A1-Derived 5′-UTR:

[0116] The artificial RNA of the invention may comprise a 5′-UTR which is derived from a 5′-UTR of a gene encoding mitochondrial ATP synthase subunit alpha (ATP5A1), or a homolog, variant, fragment or derivative thereof, wherein said 5′-UTR preferably lacks the 5′TOP motif. Such 5′-UTRs preferably comprise or consist of a nucleic acid sequence derived from the 5′-UTR of a mitochondrial ATP synthase subunit alpha (ATP5A1) gene, preferably from a vertebrate, more preferably a mammalian and most preferably a human mitochondrial ATP synthase subunit alpha (ATP5A1) gene, or a homolog, variant, fragment or derivative thereof, wherein the 5′-UTR preferably does not comprise the 5′TOP of said gene. Said gene may preferably encode a mitochondrial ATP synthase subunit alpha protein corresponding to human acid mitochondrial ATP synthase subunit alpha (UniProt Ref. No. P25705, entry version #208 of Aug. 30, 2017), or a homolog, variant, fragment or derivative thereof.

[0117] Accordingly, the artificial RNA of the invention may comprise a 5′-UTR derived from a ATP5A1 gene, wherein said 5′-UTR derived from a ATP5A1 gene comprises or consists of a nucleic acid sequence being identical or at least 70%, 80%, 85%, 86%, 87%, 88%, 89%, 90%, 91%, 92%, 93%, 94%, 95%, 96%, 97%, 98%, or 99% identical to SEQ ID NOs: 5, 6 or a fragment or a variant thereof.

### NDUFA4-Derived 5′-UTR:

[0118] The artificial RNA of the invention may comprise a 5′-UTR which is derived from a 5′-UTR of a gene encoding a Cytochrome c oxidase subunit (NDUFA4), or a homolog, fragment or variant thereof. Such 5′-UTRs preferably comprise or consist of a nucleic acid sequence derived from the 5′-UTR of a Cytochrome c oxidase subunit (NDUFA4) gene, preferably from a vertebrate, more preferably a mammalian Cytochrome c oxidase subunit (NDUFA4) gene, or a homolog, variant, fragment or derivative thereof. Said gene may preferably encode a Cytochrome c oxidase subunit (NDUFA4) protein corresponding to a human Cytochrome c oxidase subunit (NDUFA4) protein (UniProt Ref. No. 000483, entry version #149 of 30 Aug. 2017).

[0119] Accordingly, the artificial RNA of the invention may comprise a 5′-UTR derived from a NDUFA4 gene, wherein said 5′-UTR derived from a NDUFA4 gene comprises or consists of a nucleic acid sequence being identical or at least 70%, 80%, 85%, 86%, 87%, 88%, 89%, 90%, 91%, 92%, 93%, 94%, 95%, 96%, 97%, 98%, or 99% identical to SEQ ID NOs: 3, 4 or a fragment or a variant thereof.

### NOSIP-Derived 5′-UTR:

[0120] The artificial RNA of the invention may comprise a 5′-UTR which is derived from a 5′-UTR of a gene encoding a Nitric oxide synthase-interacting (NOSIP) protein, or a homolog, variant, fragment or derivative thereof. Such 5′-UTRs preferably comprise or consist of a nucleic acid sequence derived from the 5′-UTR of a Nitric oxide synthase-interacting protein (NOSIP) gene, preferably from a vertebrate, more preferably a mammalian, most preferably a human Nitric oxide synthase-interacting protein (NOSIP) gene, or a homolog, variant, fragment or derivative thereof. Said gene may preferably encode a Nitric oxide synthase-interacting protein (NOSIP) protein corresponding to a human Nitric oxide synthase-interacting protein (NOSIP) protein (UniProt Ref. No. Q9Y314, entry version #130 of 7 Jun. 2017).

[0121] Accordingly, the artificial RNA of the invention may comprise a 5′-UTR derived from a NOSIP gene, wherein said 5′-UTR derived from a NOSIP gene comprises or consists of a nucleic acid sequence being identical or at least 70%, 80%, 85%, 86%, 87%, 88%, 89%, 90%, 91%, 92%, 93%, 94%, 95%, 96%, 97%, 98%, or 99% identical to SEQ ID NOs: 7, 8 or a fragment or a variant thereof.

RPL31-derived 5′-UTR:

[0122] The artificial RNA of the invention may comprise a 5′-UTR which is derived from a 5′-UTR of a gene encoding a 60S ribosomal protein L31, or a homolog, variant, fragment or derivative thereof, wherein said 5′-UTR preferably lacks the 5′TOP motif. Such 5′-UTR preferably comprise or consist of a nucleic acid sequence derived from the 5′-UTR of a 60S ribosomal protein L31 (RPL31) gene, preferably from a vertebrate, more preferably a mammalian, most preferably a human 60S ribosomal protein L31 (RPL31) gene, or a homolog, variant, fragment or derivative thereof, wherein the 5′-UTR preferably does not comprise the 5′TOP of said gene. Said gene may preferably encode a 60S ribosomal protein L31 (RPL31) corresponding to a human 60S ribosomal protein L31 (RPL31) (UniProt Ref. No. P62899, entry version #138 of 30 Aug. 2017).

[0123] Accordingly, the artificial RNA of the invention may comprise a 5′-UTR derived from a RPL31 gene, wherein said 5′-UTR derived from a RPL31 gene comprises or consists of a nucleic acid sequence being identical or at least 70%, 80%, 85%, 86%, 87%, 88%, 89%, 90%, 91%, 92%, 93%, 94%, 95%, 96%, 97%, 98%, or 99% identical to SEQ ID NOs: 9, 10 or a fragment or a variant thereof.

### SLC7A3-Derived 5′-UTR:

[0124] The artificial RNA of the invention may comprise a 5′-UTR which is derived from a 5′-UTR of a gene encoding a cationic amino acid transporter 3 (solute carrier family 7 member 3, SLC7A3) protein, or a homolog, variant, fragment or derivative thereof. Such 5′-UTRs preferably comprise or consist of a nucleic acid sequence derived from the 5′-UTR of a cationic amino acid transporter 3 (SLC7A3) gene, preferably from a vertebrate, more preferably a mammalian cationic amino acid transporter 3 (SLC7A3) gene, or a homolog, variant, fragment or derivative thereof. Said gene may preferably encode a cationic amino acid transporter 3 (SLC7A3) protein corresponding to a human cationic amino acid transporter 3 (SLC7A3) protein (UniProt Ref. No. Q8WY07, entry version #139 of 30 Aug. 2017).

[0125] Accordingly, the artificial RNA of the invention may comprise a 5′-UTR derived from a SLC7A3 gene, wherein said 5′-UTR derived from a SLC7A3 gene comprises or consists of a nucleic acid sequence being identical or at least 70%, 80%, 85%, 86%, 87%, 88%, 89%, 90%, 91%, 92%, 93%, 94%, 95%, 96%, 97%, 98%, or 99% identical to SEQ ID NOs: 11, 12 or a fragment or a variant thereof.

[0126] In embodiments, the artificial RNA as defined herein comprises a 5′-UTR as described in WO2013/143700. In this context, the disclosure of WO2013/143700 relating to 5′-UTR sequences is herewith incorporated by reference. Particularly preferred 5′-UTRs are nucleic acid sequences derived from SEQ ID NOs: 1-1363, SEQ ID NO: 1395, SEQ ID NO: 1421 and SEQ ID NO: 1422 of the patent application WO2013/143700, or fragments or variants of these sequences. In this context, it is preferred that the 5′-UTR of the artificial RNA according to the present invention comprises or consists of a corresponding RNA sequence of the nucleic acid sequence according SEQ ID NOs: 1-1363, SEQ ID NO: 1395, SEQ ID NO: 1421 and SEQ ID NO: 1422 of the patent application WO2013/143700.

[0127] In embodiments, the artificial RNA of the invention comprises a 5′-UTR as described in WO2016/107877. In this context, the disclosure of WO2016/107877 relating to 5′-UTR sequences is herewith incorporated by reference. Particularly preferred 5′-UTRs are nucleic acid sequences according to SEQ ID NOs: 25-30 and SEQ ID NOs: 319-382 of the patent application WO2016/107877, or fragments or variants of these sequences. In this context, it is particularly preferred that the 5′-UTR of the artificial RNA comprises or consists of a corresponding RNA sequence of the nucleic acid sequence according SEQ ID NOs: 25-30 and SEQ ID NOs: 319-382 of the patent application WO2016/107877.

[0128] In embodiments, the artificial RNA of the invention comprises a 5′-UTR as described in WO2017/036580. In this context, the disclosure of WO2017/036580 relating to 5′-UTR sequences is herewith incorporated by reference. Particularly preferred 5′-UTRs are nucleic acid sequences according to SEQ ID NOs: 1-151 of the patent application WO2017/036580, or fragments or variants of these sequences. In this context, it is particularly preferred that the 5′-UTR of the artificial RNA comprises or consists of a corresponding RNA sequence of the nucleic acid sequence according to SEQ ID NOs: 1-151 of the patent application WO2017/036580.

[0129] The inventors observed that certain combinations of at least one heterologous 5′-UTR and/or at least one heterologous 3′-UTR are advantageously increasing the translation of the at least one coding sequence operably linked to said 3′-UTR and/or 5′-UTR encoding at least one antigenic peptide or protein derived from a YFV prME polyprotein or an YFV NS1 protein.

[0130] Accordingly it is preferred that the at least one heterologous 5′-UTR as defined herein and the at least one heterologous 3′-UTR as defined herein act synergistically to increase production of antigenic peptide or protein from the artificial RNA of the invention. These advantageous combinations of 5′-UTR and 3′ UTR are specified in the following.

[0131] In preferred embodiments, the artificial RNA of the invention comprises at least one coding sequence encoding at least one antigenic peptide or protein derived from a YFV prME polyprotein operably linked to a 5′-UTR of a HSD17B4 gene and a 3′-UTR of a PSMB3 gene (UTR combination herein referred to as “a-1”)

[0132] In preferred embodiments, the artificial RNA of the invention comprises at least one coding sequence encoding at least one antigenic peptide or protein derived from a YFV prME polyprotein operably linked to a 5′-UTR of a Ndufa4 gene and a 3′-UTR of a PSMB3 gene (UTR combination herein referred to as “a-2”).

[0133] In preferred embodiments, the artificial RNA of the invention comprises at least one coding sequence encoding at least one antigenic peptide or protein derived from a YFV prME polyprotein operably linked to a 5′-UTR of a NOSIP gene and a 3′-UTR of a PSMB3 gene (UTR combination herein referred to as “a-4”).

[0134] In preferred embodiments, the artificial RNA of the invention comprises at least one coding sequence encoding at least one antigenic peptide or protein derived from a YFV prME polyprotein operably linked to a 5′-UTR of a HSD17B4 gene and a 3′-UTR of a CASP1 gene (UTR combination herein referred to as “b-4”).

[0135] In preferred embodiments, the artificial RNA of the invention comprises at least one coding sequence encoding at least one antigenic peptide or protein derived from a YFV prME polyprotein operably linked to a 5′-UTR of a ATP5A1 gene and a 3′-UTR of a PSMB3 gene (UTR combination herein referred to as “c-5”).

[0136] In preferred embodiments, the artificial RNA of the invention comprises at least one coding sequence encoding at least one antigenic peptide or protein derived from a YFV prME polyprotein operably linked to a 5′-UTR of a RPL31 gene and a 3′-UTR of a PSMB3 gene (UTR combination herein referred to as “d-1”).

[0137] In preferred embodiments, the artificial RNA of the invention comprises at least one coding sequence encoding at least one antigenic peptide or protein derived from a YFV prME polyprotein operably linked to a 5′-UTR of a SLC7A3 gene and a 3′-UTR of a NDUFA1 gene (UTR combination herein referred to as “d-5”).

[0138] In preferred embodiments, the artificial RNA of the invention comprises at least one coding sequence encoding at least one antigenic peptide or protein derived from a YFV prME polyprotein operably linked to a 5′-UTR of a NOSIP gene and a 3′-UTR of a CASP1 gene (UTR combination herein referred to as “g-4”).

[0139] In preferred embodiments, the artificial RNA of the invention comprises at least one coding sequence encoding at least one antigenic peptide or protein derived from a YFV prME polyprotein operably linked to a 5′-UTR of a SLC7A3 gene and 3′-UTR of a CASP1 gene (UTR combination herein referred to as “h-4”).

[0140] In preferred embodiments, the artificial RNA of the invention comprises at least one coding sequence encoding at least one antigenic peptide or protein derived from a YFV prME polyprotein operably linked to a 5′-UTR of a SLC7A3 gene and a 3′-UTR of a COX6B1 gene (UTR combination herein referred to as “h-5”).

[0141] In preferred embodiments, the artificial RNA of the invention comprises at least one coding sequence encoding at least one antigenic peptide or protein derived from a YFV prME polyprotein operably linked to a 5′-UTR of a RPL32 gene and a 3′-UTR of a ALB7 gene (UTR combination herein referred to as “i-2”).

[0142] In preferred embodiments, the artificial RNA of the invention comprises at least one coding sequence encoding at least one antigenic peptide or protein derived from a YFV prME polyprotein operably linked to a 3′-UTR of an alpha-globin gene (herein referred to as “i-3”).

[0143] In other preferred embodiments, the artificial RNA of the invention comprises at least one coding sequence encoding at least one antigenic peptide or protein derived from a YFV NS1 protein operably linked to a 5′-UTR of a HSD17B4 gene and a 3′-UTR of a PSMB3 gene (UTR combination herein referred to as “a-1”)

[0144] In other preferred embodiments, the artificial RNA of the invention comprises at least one coding sequence encoding at least one antigenic peptide or protein derived from a YFV NS1 protein operably linked to a 5′-UTR of a Ndufa4 gene and a 3′-UTR of a PSMB3 gene (UTR combination herein referred to as “a-2”).

[0145] In other preferred embodiments, the artificial RNA of the invention comprises at least one coding sequence encoding at least one antigenic peptide or protein derived from a YFV NS1 protein operably linked to a 5′-UTR of a NOSIP gene and a 3′-UTR of a PSMB3 gene (UTR combination herein referred to as “a-4”).

[0146] In other preferred embodiments, the artificial RNA of the invention comprises at least one coding sequence encoding at least one antigenic peptide or protein derived from a YFV NS1 protein operably linked to a 5′-UTR of a HSD17B4 gene and a 3′-UTR of a CASP1 gene (UTR combination herein referred to as “b-4”).

[0147] In other preferred embodiments, the artificial RNA of the invention comprises at least one coding sequence encoding at least one antigenic peptide or protein derived from a YFV NS1 protein operably linked to a 5′-UTR of a ATP5A1 gene and a 3′-UTR of a PSMB3 gene (UTR combination herein referred to as “c-5”).

[0148] In other preferred embodiments, the artificial RNA of the invention comprises at least one coding sequence encoding at least one antigenic peptide or protein derived from a YFV NS1 protein operably linked to a 5′-UTR of a RPL31 gene and a 3′-UTR of a PSMB3 gene (UTR combination herein referred to as “d-1”).

[0149] In other preferred embodiments, the artificial RNA of the invention comprises at least one coding sequence encoding at least one antigenic peptide or protein derived from a YFV NS1 protein operably linked to a 5′-UTR of a SLC7A3 gene and a 3′-UTR of a NDUFA1 gene (UTR combination herein referred to as “d-5”).

[0150] In other preferred embodiments, the artificial RNA of the invention comprises at least one coding sequence encoding at least one antigenic peptide or protein derived from a YFV NS1 protein operably linked to a 5′-UTR of a NOSIP gene and a 3′-UTR of a CASP1 gene (UTR combination herein referred to as “g-4”).

[0151] In other preferred embodiments, the artificial RNA of the invention comprises at least one coding sequence encoding at least one antigenic peptide or protein derived from a YFV NS1 protein operably linked to a 5′-UTR of a SLC7A3 gene and 3′-UTR of a CASP1 gene (UTR combination herein referred to as “h-4”).

[0152] In other preferred embodiments, the artificial RNA of the invention comprises at least one coding sequence encoding at least one antigenic peptide or protein derived from a YFV NS1 protein operably linked to a 5′-UTR of a SLC7A3 gene and a 3′-UTR of a COX6B1 gene (UTR combination herein referred to as “h-5”).

[0153] In other preferred embodiments, the artificial RNA of the invention comprises at least one coding sequence encoding at least one antigenic peptide or protein derived from a YFV NS1 protein operably linked to a 5′-UTR of a RPL32 gene and a 3′-UTR of a ALB7 gene (UTR combination herein referred to as “i-2”).

[0154] In other preferred embodiments, the artificial RNA of the invention comprises at least one coding sequence encoding at least one antigenic peptide or protein derived from a YFV NS1 protein operably linked to a 3′-UTR of an alpha-globin gene (herein referred to as “i-3”).

[0155] Accordingly, in preferred embodiments of the first aspect, the artificial RNA of the invention comprises

a-1. at least one 5′-UTR derived from a 5′-UTR of a HSD17B4 gene, or from a corresponding RNA sequence, homolog, fragment or variant thereof and at least one 3′-UTR derived from a 3′-UTR of a PSMB3 gene, or from a corresponding RNA sequence, homolog, fragment or variant thereof; or
a-2. at least one 5′-UTR derived from a 5′-UTR of a NDUFA4 gene, or from a corresponding RNA sequence, homolog, fragment or variant thereof and at least one 3′-UTR derived from a 3′-UTR of a PSMB3 gene, or from a corresponding RNA sequence, homolog, fragment or variant thereof; or
a-4. at least one 5′ UTR derived from a 5′UTR of a NOSIP gene, or from a corresponding RNA sequence, homolog, fragment or variant thereof and at least one 3′ UTR derived from a 3′UTR of a PSMB3 gene, or from a corresponding RNA sequence, homolog, fragment or variant thereof; or
b-4. at least one 5′-UTR derived from a 5′-UTR of a HSD17B4 gene, or from a corresponding RNA sequence, homolog, fragment or variant thereof and at least one 3′-UTR derived from a 3′-UTR of a CASP1 gene, or from a corresponding RNA sequence, homolog, fragment or variant thereof; or
c-5. at least one 5′-UTR derived from a 5′-UTR of a ATP5A1 gene, or from a corresponding RNA sequence, homolog, fragment or variant thereof and at least one 3′-UTR derived from a 3′-UTR of a PSMB3 gene, or from a corresponding RNA sequence, homolog, fragment or variant thereof; or
d-1. at least one 5′-UTR derived from a 5′-UTR of a RPL31 gene, or from a corresponding RNA sequence, homolog, fragment or variant thereof and at least one 3′-UTR derived from a 3′-UTR of a PSMB3 gene, or from a corresponding RNA sequence, homolog, fragment or variant thereof; or
d-5. at least one 5′-UTR derived from a 5′-UTR of a SLC7A3 gene, or from a corresponding RNA sequence, homolog, fragment or variant thereof and at least one 3′-UTR derived from a 3′-UTR of a NDUFA1 gene, or from a corresponding RNA sequence, homolog, fragment or variant thereof; or
g-4. at least one 5′-UTR element derived from a 5′-UTR of a NOSIP gene, or from a corresponding RNA sequence, homolog, fragment or variant thereof and at least one 3′-UTR element derived from a 3′-UTR of a CASP1 gene, or from a corresponding RNA sequence, homolog, fragment or variant thereof; or
h-4. at least one 5′-UTR derived from a 5′-UTR of a SLC7A3 gene, or from a corresponding RNA sequence, homolog, fragment or variant thereof and at least one 3′-UTR derived from a 3′-UTR of a CASP1 gene, or from a corresponding RNA sequence, homolog, fragment or variant thereof; or
h-5. at least one 5′-UTR derived from a 5′-UTR of a SLC7A3 gene, or from a corresponding RNA sequence, homolog, fragment or variant thereof and at least one 3′-UTR derived from a 3′-UTR of a COX6B1 gene, or from a corresponding RNA sequence, homolog, fragment or variant thereof; or
i-2. at least one 5′-UTR derived from a 5′-UTR of a RPL32 gene, or from a corresponding RNA sequence, homolog, fragment or variant thereof and at least one 3′-UTR derived from a 3′-UTR of a ALB7 gene, or from a corresponding RNA sequence, homolog, fragment or variant thereof.
i-3. at least one 3′-UTR derived from a 3′-UTR of a alpha-globin gene, or from a corresponding RNA sequence, homolog, fragment or variant thereof.

[0156] In particularly preferred embodiments of the first aspect, the artificial RNA of the invention comprises UTR elements according to a-1 (HSD17B4/PSMB3), a-4 (NDUFA4/PSMB3), b-4 (HSD17B4/CASP1), d-5 (Slc7a3/Ndufa1), c-5 (ATP5A1/PSMB3), i-3 (alpha-globin), or g-4 (NOSIP/CASP1).

[0157] In further, even more preferred embodiments of the first aspect, the artificial RNA of the invention comprises

[0158] UTR elements according to a-1 (HSD1764/PSMB3), a-4 (NDUFA4/PSMB3), b-4 (HSD17B4/CASP1), c-5 (ATP5A1/PSMB3), or g-4 (NOSIP/CASP1).

[0159] In a particularly preferred embodiment of the first aspect, the artificial RNA of the invention comprises UTR elements according to a-1 (HSD17B4/PSMB3).

[0160] The invention relates to an artificial RNA, preferably an RNA suitable for vaccination, comprising at least one heterologous 5′-UTR as defined above and/or at least one heterologous 3′-UTR as defined above and at least one coding sequence operably linked to said 3′-UTR and/or 5′-UTR, wherein said coding sequence encodes at least one antigenic peptide or protein derived from a Yellow fever virus, or a fragment or variant thereof.

[0161] As used herein, the term “yellow fever virus” or the corresponding abbreviation “YFV” is not limited to a particular virus strain, variant, serotype, or isolate, etc. but comprises any yellow fever virus of any origin.

[0162] According to preferred embodiments, the artificial RNA, preferably the coding sequence of the artificial RNA comprises or consists of a nucleic acid sequence that is derived from a YFV selected from yellow fever viruses listed in the following, with NCBI Taxonomy ID (“NCBI-ID”) and/or UniprotKB/Swiss Prot/Genbank ID (“GB-ID”) provided below: YFV 17D (NCBI-ID:11090; GB-ID:P03314), YFV 1899/81 (NCBI-ID:31641; GB-ID:P29165), YFV isolate Angola/14FA/1971 (NCBI-ID:407140; GB-ID:Q1X881), YFV isolate Ethiopia/Couma/1961 (NCBI-ID:407141; GB-ID:Q074N0), YFV isolate Ivory Coast/1999 (NCBI-ID:407136; GB-ID:Q6J3P1), YFV isolate Ivory Coast/85-82H/1982 (NCBI-ID:407138; GB-ID:Q6J3P1), YFV isolate Uganda/A7094A4/1948 (NCBI-ID:407139; GB-ID:Q1X880), YFV strain French neurotropic vaccine (NCBI-ID:407135; GB-ID:Q89277), YFV strain Ghana/Asibi/1927 (NCBI-ID:407134; GB-ID:Q6DV88), and YFV Trinidad/79A/1979 (NCBI-ID:407137; GB-ID:Q9YRV3).

[0163] The RNA genome of YFV typically encodes a plurality of structural and non-structural proteins. Translation of viral RNA typically leads to a precursor protein comprising a plurality of individual viral (structural and non-structural) proteins (or precursor of these proteins) in one polypeptide chain, which is typically referred to as “polyprotein” or “precursor protein”. The “polyprotein” or “precursor protein” or is processed by proteases into ten functionally distinct proteins including three structural proteins (capsid (C), premembrane (prM) and envelope (E)) which are incorporated into the viral particle, and seven non-structural proteins (NS1, NS2A, NS2B, NS3, NS4A, NS4B, NS5). The E protein interacts with cellular receptors and viral uptake occurs via receptor-mediated endocytosis followed by fusion of viral and endosomal membrane and release of the nucleocapsid into the cytoplasm. Translation and replication of the viral genome occurs in the cytoplasm in association with intracellular membranes. Particle assembly takes place in the endoplasmic reticulum and first leads to the formation of immature viruses with a rough surface formed by spikes of 60 trimers of prME heterodimers. In the acidic environment of the trans-Golgi network the trimeric spikes undergo a conformational change into 90 dimers and expose the prM protein cleavage site. The peptide pr is cleaved from prM by the cellular protease furin to form a smooth, mature virion virus particle with a herringbone-like arrangement of 90 E homodimers with T=3 pseudo-icosahedral symmetry. The prM cleavage allows E to adopt the conformational state required for its entry functions, i.e. receptor-binding and acidic-pH-induced membrane fusion after uptake by receptor-mediated endocytosis. NS1 is a multifunctional viral protein that is secreted as a hexamer by infected cells and circulates in the bloodstream. Inside infected cells, NS1 acts as a cofactor for viral replication and assembly, while the secreted form plays a role in immune evasion. NS1 has been shown to contribute to flavivirus pathogenisis by directly triggering endothelial hyperpermeability as well as by inducing the release of vasoactive cytokines from peripheral blood mono-nuclear cells (PBMCs) via activation of TLR, both leading to vascular leak: (Beatty et al., 2015, Modhiran et al., 2015). Dengue virus NS1 triggers endothelial permeability and vascular leak that is prevented by NS1 vaccination (Beatty et al 2015) NS1 is well conserved among flaviviruses, exhibiting 20%-40% identity and 60%-80% similarity (Song et al 2016). Therefore targeting YFV NS1 could potentially influence virus dissemination and pathogenesis by reducing vascular leak.

[0164] For example, YFV polyprotein of YFV strain 17D preferably comprises or consists of an amino acid sequence according to GenBank-ID NP_041726.1.

[0165] The term “YFV protein” as used herein typically refers to an individual structural or non-structural YFV protein. For example, YFV protein in the meaning of the present invention may be a protein selected from the group consisting of YFV capsid protein (C), YFV premembrane protein (prM), YFV premembrane envelope protein (prME) also referred herein as “Yellow fever virus prME polyprotein” or “YFV prME polyprotein”, YFV peptide pr (pr), YFV membrane protein (M), YFV envelope protein (E) and a YFV non-structural protein (NS).

[0166] As used herein, the term “YFV protein” may also refer to an amino acid sequence corresponding to an individual YFV protein as present in YFV polyprotein (precursor protein). Said amino acid sequence in the polyprotein may differ from the amino acid sequence of the respective mature YFV protein (i.e. after cleavage/processing the polyprotein). For example, the corresponding amino acid sequence comprised in the polyprotein may comprise amino acid residues that are removed during cleavage/processing of the polyprotein (such as a signal sequence/signal peptide or a target site(s) for a protease) and that are no longer present in the respective mature flavivirus protein. In the context of the present invention, the term “YFV protein” comprises both, the precursor amino acid sequence comprised in a YFV polyprotein (i.e. as part of a polypeptide chain optionally further comprising other viral proteins) as well as the respective mature individual YFV protein.

[0167] In the context of the present invention, the term “YFV protein” may also refer to YFV polyprotein or, more preferably, to a fragment of a YFV polyprotein, such as a YFV prME polyprotein, a YFV ME (e.g. a YFV ME) protein, or a NS1 (e.g. a YFV NS1). In this context, the term “YFV prME polyprotein” thus refers to a protein comprising an amino acid sequence corresponding to YFV prME polyprotein as comprised in a flavivirus polyprotein, or to a fragment or variant of a YFV prME polyprotein as comprised in a YFV polyprotein. Hence, the terms “YFV prME polyprotein or fragments or variants thereof” or “peptide or protein derived from a Yellow fever virus prME polyprotein” as used herein do not necessarily relate to full-length prME polyprotein, but preferably comprises at least a fragment of pr, M, E, ME, prM or prME. Also, the terms “YFV NS1 protein or fragments or variants thereof” or “peptide or protein derived from a Yellow fever virus NS1 protein” as used herein do not necessarily relate to full-length NS1 protein, but preferably comprises at least a fragment of NS1.

[0168] Where reference is made to amino acid (aa) residues and their position in a YFV protein or in a YFV polyprotein, any numbering used herein—unless stated otherwise—relates to the position of the respective aa residue in a corresponding YFV precursor polyprotein, wherein position “1” corresponds to the first aa residue, i.e. the aa residue at the N-terminus of a YFV precursor polyprotein. More preferably, the numbering with regard to aa residues refers to the respective position of an aa residue in a YFV precursor polyprotein, which is preferably derived from a YFV described herein.

[0169] In the following the amino acid (aa) regions of YFV proteins and fragments are indicated herein including the respective aa position in the YFV 17D precursor polyprotein (SEQ ID NO: 120). The following abbreviations are used herein with reference to YFV proteins throughout the specification (including information provided under the identifier <223> of the sequence listing): C: capsid protein C (e.g. aa 1-101); X: fragment of capsid protein C (N-terminal overhang, e.g. aa 92-101); SS: ER anchor/signal sequence/signal peptide (SS) for the capsid protein C (e.g. aa 102-121); pr: peptide pr (e.g. aa 122-210); M: matrix protein M (e.g. aa 211-285); prM: premembrane protein prM (e.g. aa 122-285); E: envelope protein E (e.g. aa 286-778); prME: premembrane envelope protein prME/prME polyprotein (e.g. aa 122-778); XX: fragment of non-structural protein NS1 (C-terminal overhang, e.g. aa 779-788); eSS: signal sequence for the envelope protein E (e.g. aa 758-778), NS1: non-structural protein 1 (e.g. aa 779-1130); Y: fragment of non-structural protein NS2A (c-terminal overhang, e.g. aa 1131-1177), NS2A: non-structural protein 2A (e.g. aa 1131-1354); NS2B: non-structural protein 2B (e.g. aa 1355-1484); NS3: non-structural protein 3 (e.g. aa 1485-2107); NS4A: non-structural protein 4A (e.g. aa 2108-2233); P2K: Peptide 2k (e.g. aa 2234-2256); NS4B: non-structural protein 4B (e.g. aa 2257-2506); NS5: non-structural protein 5 (e.g. aa 2507-3411).

[0170] Suitably, the at least one antigenic peptide or protein is derived from a YFV prME polyprotein, or a fragment or variant thereof.

[0171] In some embodiments, the at least one coding sequence encodes at least one antigenic peptide or protein derived from a Yellow fever virus non-structural protein, wherein said non-structural protein may be selected from NS1, NS2A, NS2B, NS3, NS4A, NS4B, NS5. In that context, NS1 is particularly preferred.

[0172] In preferred embodiments, the at least one coding sequence encodes at least one antigenic peptide or protein derived from a Yellow fever virus prME polyprotein is pr, M, E, ME, prM or prME, or a fragment or variant of any of these.

[0173] YFV prME is a polypeptide which comprises or consists of YFV premembrane (“prM”) and a YFV envelope (“E”) protein. The YFV (pre-) membrane protein ((pr)M) is a seven beta-stranded glycoprotein that facilitates E protein folding and regulates the oligomeric state of E proteins to prevent adventitious fusion during the egress of virus particles from infected cells. The expression of the E protein together with prM or M potentially allows for secretion of the E protein in the form of virus-like particles (VLP) and maintaining the integrity of neutralizing epitopes on E protein. The VLP are similar to infectious YFV virus particles in terms of structure but are safer as they are noninfectious. Accordingly, the artificial RNA comprises or consists of at least one coding sequence encoding at least one antigenic peptide or protein derived from a YFV prME polyprotein or a fragment or variant thereof.

[0174] In preferred embodiments, the at least one coding sequence encodes prME.

[0175] In that context, it has to be understood that advantageously “the at least one coding sequence encoding prME” also comprises a “signal sequence” or a secretory signal peptide (SS: ER anchor/signal sequence (SS) for the capsid protein C (e.g. aa 102-121). As used herein, the term “signal sequence” or “signal peptide” preferably refers to an amino acid sequence, which is involved in the targeting of a protein, e.g. a YFV protein, to a cellular compartment, preferably a membrane, more preferably a membrane of the endoplasmic reticulum (ER). A signal sequence in the context of the present invention preferably comprises from 3 to 40, 3 to 30, 3 to 20, 5 to 20 or 10 to 20 amino acid residues. Such a signal sequence may be present, for example, in a YFV polyprotein and may be removed during processing of said polyprotein in vivo. Suitably, YFV capsid protein (C) as present in a YFV polyprotein typically comprises a C-terminal signal sequence, corresponding to the amino acid sequence immediately N-terminal of YFV pr protein (e.g. amino acid residues aa 102-121 in a YFV polyprotein before cleavage).

[0176] Accordingly, in preferred embodiments, the at least one coding sequence encodes prME, in particular, SS-prME.

[0177] In other preferred embodiments, the at least one coding sequence encodes prME additionally comprising a C-terminal overhang comprising a fragment of YFV non-structural protein NS1 and/or an N-terminal overhang comprising a fragment of YFV capsid protein C.

[0178] The N-terminal overhang of the capsid protein C (“N-terminal overhang”, or “X”) may be beneficial for the correct translocation and orientation of the prM/E membrane protein into the membrane of the endoplasmic reticulum. N-terminal overhangs may comprise a fragment of YFV capsid protein C and may contain 5, 6, 7, 8, 9, 10, 11, 12, 13, 14, 15, 16, 17, 18, 19, 20, or more additional amino acid residues of the C-terminus of capsid protein C. Preferably, the N-terminal overhang comprises 9 additional amino acid residues of the C-terminus of capsid protein C and a methionine residue (e.g. 92-MRGLSSRKRR-101 of SEQ ID NO: 120). Accordingly, in preferred embodiments, the “N-terminal overhang” sequence contains five positively charged residues (K, R) which may be important for the anchoring of the prM/E protein. The C-terminal overhang of the amino terminus of NS1 (“C-terminal overhang” or “XX”) was included to facilitate the correct incorporation into the ER membrane and efficient processing of the polyprotein prM/E by the host signal peptidase. C-terminal overhangs may comprise a fragment of YFV non-structural protein NS1 may contain 5, 6, 7, 8, 9, 10, 11, 12, 13, 14, 15, 16, 17, 18, 19, 20, or more additional amino acid residues of the amino terminus of NS1. Preferably, the C-terminal overhang comprises 10 additional amino acid residues of the amino terminus of NS1 (e.g. 779-DQGCAINFGK-788 of SEQ ID NO: 120) that were suitably included to facilitate the correct incorporation into the ER membrane and efficient processing of the polyprotein prM/E by the host signal peptidase.

[0179] In embodiments, the at least one antigenic protein or peptide preferably comprises or consists of at least one of the following elements, or a fragment or variant thereof (explanation of abbreviations provided above): X; SS; pr; M; prM; E; prME; XX.

[0180] In preferred embodiments, the at least one coding sequence encodes prME, in particular, SS-prME or X-SS-prME-XX. In other embodiments, the at least one coding sequence encodes X-SS-prME or SS-prME-XX.

[0181] In embodiments, the artificial RNA as defined herein comprises at least one coding sequence encoding at least one antigenic peptide or protein derived from YFV comprising or consisting of at least one amino acid sequences being identical or at least 70%, 80%, 85%, 86%, 87%, 88%, 89%, 90%, 91%, 92%, 93%, 94%, 95%, 96%, 97%, 98%, or 99% identical to any one of SEQ ID NO: 23-56, 541-586 of EP patent application EP17207141.7 or a fragment or variant of any of these sequences. In this context, SEQ ID NOs: 23-56, 541-586, the disclosure related thereto, and the description provided under the <223> in the sequence listing of EP patent application EP17207141.7 are herewith incorporated by reference.

[0182] In preferred embodiments, the artificial RNA of the first aspect comprises at least one coding sequence encoding at least one YFV prME comprising or consisting of at least one amino acid sequences being identical or at least 70%, 80%, 85%, 86%, 87%, 88%, 89%, 90%, 91%, 92%, 93%, 94%, 95%, 96%, 97%, 98%, or 99% identical to any one of SEQ ID NOs: 120-126 or a fragment or variant of any of these sequences. Additional information regarding each of these suitable amino acid sequences encoding YFV prME proteins may also be derived from the sequence listing, in particular from the details provided therein under identifier <223> as explained in the following.

[0183] For example, the numeric identifier <223> in the sequence listing of SEQ ID NO: 121 reads as follows: “derived and/or modified protein sequence (wt) from YFV_NC_002031.1_X-SS-prME-XX (polyprotein: aa92-788)”. It has to be noted that throughout the sequence listing, information provided under numeric identifier <223> follows the same structure: “<SEQUENCE_DESCRIPTOR> from <CONSTRUCT_IDENTIFIER>”.

[0184] The <SEQUENCE_DESCRIPTOR> relates to the type of sequence (e.g., “derived and/or modified protein sequence”, “derived and/or modified CDS” “mRNA product Design a-1 comprising derived and/or modified sequence”, or “mRNA product Design b-4 comprising derived and/or modified sequence”, or “mRNA product Design c-5 comprising derived and/or modified sequence”, or “mRNA product Design g-4 comprising derived and/or modified sequence” etc.) and whether the sequence comprises or consists of a wild type sequence (“wt”) or whether the sequence comprises or consists of a sequence-optimized sequence (e.g. “opt1”, “opt2”, “opt3”, “opt4”, “opt5”, “opt6”, “opt11”; sequence optimizations are described in further detail below).

[0185] The <CONSTRUCT_IDENTIFIER> provided under numeric identifier <223> has the following structures: (“organism_construct name”, or “organism_accession number_construct name”) and is intended to help the person skilled in the art to explicitly derive suitable nucleic acid sequences (e.g., RNA, mRNA) encoding the same YFV polyprotein according to the invention. For example, the <CONSTRUCT_IDENTIFIER> provided under numeric identifier <223> of SEQ ID NO: 121 reads as follows: “YFV_NC_002031.1 X-SS-prME-XX (polyprotein: aa92-788)”.

[0186] In that specific example, the respective protein sequence is derived from “Yellow Fever virus” (organism) with the NCBI accession number “NC_002031.1”, wherein the polyprotein comprises the structural elements “X-SS-prME-XX” (construct name). If the skilled person uses the construct identifier of SEQ ID NO: 121, namely “YFV_NC_002031.1_X-SS-prME-XX (polyprotein: aa92-788)”, said person easily arrives at the following list of SEQ ID NOs (amino acid sequences, nucleic acid coding sequences, mRNA sequences) derived from SEQ ID NO: 121 that can easily be retrieved from the sequence listing of the present invention:

### Amino Acid Sequence:

### SEQ ID NO: 121

### Nucleic Acid Coding Sequences:

### SEQ ID NOs: 158, 195, 232, 269, 306, 343, 380, 417, 454, 491

[0187] mRNA Sequences:
SEQ ID NOs: 528, 534, 540, 546, 552, 558, 564, 570, 576, 582, 588, 594, 600, 606, 612, 618, 624, 630, 636, 642, 648, 654, 660, 666, 672, 678, 684, 690, 696, 702, 708, 714, 720, 726, 732, 738, 744, 750, 756, 762, 768, 774, 780, 786, 792, 798, 804, 810, 816, 822, 828, 834, 840, 846, 852, 858, 864, 870, 876, 882, 888, 894, 900, 906, 912, 918, 924, 930, 936, 942, 948, 954, 960, 966, 972, 978, 984, 990, 996, 1002, 1008, 1014, 1020, 1026, 1032, 1038, 1044, 1050, 1056, 1062, 1068, 1074, 1080, 1086, 1092, 1098, 1104, 1110, 1116, 1122, 1128, 1134, 1140, 1146, 1152, 1158, 1164, 1170, 1176, 1182, 1188, 1194, 1200, 1206, 1212, 1218, 1224, 1230, 1236, 1242, 1248, 1254, 1260, 1266, 1272, 1278, 1284, 1290, 1296, 1302, 1308-1320, 1320, 2129, 2130, 2135, 2136, 2141, 2142, 2147, 2148, 2153, 2154, 2159, 2160, 2165, 2166, 2171, 2172, 2177, 2178, 2183, 2184, 2189, 2190, 2195, 2196

[0188] In preferred embodiments, the at least one coding sequence encodes the YFV non-structural protein NS1.

[0189] In that context, it has to be understood that advantageously “the at least one coding sequence encoding NS1” may also comprise a “signal sequence” or a secretory signal peptide (SS: ER anchor/signal sequence (eSS) for the envelope protein E (e.g. aa 758-778). As used herein, the term “signal sequence” or “signal peptide” preferably refers to an amino acid sequence, which is involved in the targeting of a protein, e.g. a YFV protein, to a cellular compartment, preferably a membrane, more preferably a membrane of the endoplasmic reticulum (ER). A signal sequence in the context of the present invention preferably comprises from 3 to 40, 3 to 30, 3 to 25, 5 to 25 or preferably 21 amino acid residues. Such a signal sequence may be present, for example, in a YFV polyprotein and may be removed during processing of said polyprotein in vivo. Suitably, YFV envelope protein (E) as present in a YFV polyprotein typically comprises a C-terminal signal sequence, corresponding to the amino acid sequence immediately N-terminal of YFV E protein (e.g. amino acid residues aa 758-778 in a YFV polyprotein before cleavage).

[0190] Accordingly, in preferred embodiments, the at least one coding sequence encodes NS1, in particular, eSS-NS1.

[0191] In other preferred embodiments, the at least one coding sequence encodes NS1 additionally comprising a C-terminal overhang comprising a fragment of YFV non-structural protein NS2A and/or an N-terminal overhang comprising a fragment of YFV envelope protein E.

[0192] The N-terminal overhang of the non-structural protein NS2A protein (“N-terminal overhang”, or “Y”) may be beneficial for the correct translocation and orientation of the NS1 protein into the membrane of the endoplasmic reticulum. The N-terminal overhang may thereby increase the surface expression of the encoded antigenic peptide or protein. N-terminal overhangs may comprise a fragment of NS2A and may contain 10-50, 20-50, 30-50, 40-50, 41, 42, 43, 44, 45, 46, 47, 48, 49, 50, or more additional amino acid residues of the C-terminus of the NS2A protein. Preferably, the N-terminal overhang comprises 47 additional amino acid residues of the C-terminus of the NS2A protein (e.g. 1131-GEIHAVPFGLVSMMIAMEVVLRKRQGPKQMLVGGVVLLGAMLVGQV-1177 of SEQ ID NO: 120)

[0193] In preferred embodiments, the at least one coding sequence encodes NS1, in particular, eSS-NS1, or eSS-NS1-Y.

[0194] In embodiments, the artificial RNA of the first aspect comprises at least one coding sequence encoding at least one YFV NS1 comprising or consisting of at least one amino acid sequences being identical or at least 70%, 80%, 85%, 86%, 87%, 88%, 89%, 90%, 91%, 92%, 93%, 94%, 95%, 96%, 97%, 98%, or 99% identical to any one of SEQ ID NOs: 2201, 2202, 2203, or 2204 or a fragment or variant of any of these sequences. Additional information regarding each of these suitable amino acid sequences encoding YFV NS1 proteins may also be derived from the sequence listing, in particular from the details provided therein under identifier <223> as explained above.

[0195] According to another preferred embodiment, the artificial RNA of the invention encodes at least one antigenic peptide or protein as defined above and may additionally encode at least one further heterologous peptide or protein element.

[0196] The following abbreviations for heterologous elements that may be part of YFV proteins of the invention are used throughout the specification (including information provided under the identifier <223> of the sequence listing): JEV: aa 400-500 (stem region) of the Japanese encephalitis virus envelope protein E; SSIgE: signal sequence of IgE; SSjev: signal sequence of Japanese encephalitis virus.

[0197] Suitably, the at least one further peptide or protein element may promote secretion of the encoded antigenic peptide or protein of the invention (e.g. via secretory signal sequences), promote anchoring of the encoded antigenic peptide or protein of the invention in the plasma membrane (e.g. via transmembrane elements), promote formation of antigen complexes (e.g. via multimerization domains), promote virus-like particle formation (VLP forming sequence). In addition, the artificial nucleic acid sequence according to the present invention may additionally encode peptide linker elements, self-cleaving peptides, immunologic adjuvant sequences or dendritic cell targeting sequences.

[0198] Suitable multimerization domains may be selected from the list of amino acid sequences according to SEQ ID NOs: 1116-1167 of the patent application WO2017/081082, or fragments or variants of these sequences. On nucleic acid level, any nucleic acid sequence (e.g. RNA sequence) may be selected which encodes such amino acid sequences. In this context, the disclosure of WO2017/081082 is herewith incorporated by reference. Suitable transmembrane elements may be selected from the list of amino acid sequences according to SEQ ID NOs: 1228-1343 of the patent application WO2017/081082, or fragments or variants of these sequences. On nucleic acid level, any nucleic acid sequence (e.g. RNA sequence) may be selected which encodes such amino acid sequences. In this context, the disclosure of WO2017/081082 is herewith incorporated by reference. Suitable VLP forming sequences may be selected from the list of amino acid sequences according to SEQ ID NOs: 1168-1227 of the patent application WO2017/081082, or fragments or variants of these sequences. On nucleic acid level, any nucleic acid sequence (e.g. RNA sequence) may be selected which encodes such amino acid sequences. In this context, the disclosure of WO2017/081082 is herewith incorporated by reference. Suitable peptide linkers may be selected from the list of amino acid sequences according to SEQ ID NOs: 1509-1565 of the patent application WO2017/081082, or fragments or variants of these sequences. On nucleic acid level, any nucleic acid sequence (e.g. RNA sequence) may be selected which encodes such amino acid sequences. In this context, the disclosure of WO2017/081082 is herewith incorporated by reference. Suitable self-cleaving peptides may be selected from the list of amino acid sequences according to SEQ ID NOs: 1434-1508 of the patent application WO2017/081082, or fragments or variants of these sequences. On nucleic acid level, any nucleic acid sequence (e.g. RNA sequence) may be selected which encodes such amino acid sequences. In this context, the disclosure of WO2017/081082 is herewith incorporated by reference. Suitable immunologic adjuvant sequences may be selected from the list of amino acid sequences according to SEQ ID NOs: 1360-1421 of the patent application WO2017/081082, or fragments or variants of these sequences. On nucleic acid level, any nucleic acid sequence (e.g. RNA sequence) may be selected which encodes such amino acid sequences. In this context, the disclosure of WO2017/081082 is herewith incorporated by reference. Suitable dendritic cell (DCs) targeting sequences may be selected from the list of amino acid sequences according to SEQ ID NOs: 1344-1359 of the patent application WO2017/081082, or fragments or variants of these sequences. On nucleic acid level, any nucleic acid sequence (e.g. RNA sequence) may be selected which encodes such amino acid sequences. In this context, the disclosure of WO2017/081082 is herewith incorporated by reference.

[0199] In a preferred embodiment, the RNA encodes at least one antigenic peptide or protein as defined herein and additionally a heterologous secretory signal sequence or heterologous secretory signal peptides. The heterologous secretory signal sequence may increase the secretion of the encoded antigenic peptide or protein.

[0200] Suitable secretory signal peptides may be selected from the list of amino acid sequences according to SEQ ID NOs: 1-1115 and SEQ ID NO: 1728 of the patent application WO2017/081082, or fragments or variants of these sequences. On nucleic acid level, any nucleic acid sequence (e.g. RNA sequence) may be selected which encodes such amino acid sequences. In this context, the disclosure of WO2017/081082 is herewith incorporated by reference.

[0201] In preferred embodiments, the artificial RNA encodes at least one antigenic peptide or protein as defined herein (e.g. prME or NS1) and additionally at least one heterologous secretory signal sequence, wherein the secretory signal sequence is preferably a signal sequence derived from IgE, or Japanese encephalitis virus (JEV).

[0202] In that context it has to be understood that in embodiments where heterologous signal sequences are used, the endogenous signal sequences has to be removed (e.g., “SS” of a “SS-prME-XX” construct has to be removed and exchanged by a heterologous signal sequence, e.g., IgE-leader, to generate an “SSIgE-prME-XX” construct; “SS” of a “SS-prME” construct has to be removed and exchanged by a heterologous signal sequence, e.g., IgE-leader, to generate an “SSIgE-prME construct”; “SS” of a “SS-prME-XX” construct has to be removed and exchanged by a heterologous signal sequence, e.g., SSjev, to generate an “SSjev-prME-XX” construct; “SS” of a “SS-prME” construct has to be removed and exchanged by a heterologous signal sequence, e.g., SSjev, to generate an “SSjev-prME” construct), e.g., SSjev(V3), to generate an “SSjev(V3)-prMEdelsstem_TM-JEV”construct; “X-SS” of a “X-SS-prMEdelstem_TM-JEV” construct has to be removed and exchanged by a heterologous signal sequence, e.g., SSjev(V3), to generate an “SSjev(V3)-prMEdelstem_TM-JEV” construct) or e.g. “eSS” of a “eSS-NS1” construct has to be removed and exchanged by a heterologous signal sequence, e.g., IgE-leader, to generate a “SSIgE-NS1” or “SSIgE-NS1-Y” construct).

[0203] According to preferred embodiments, the secretory signal sequence comprises an amino acid sequence being identical or at least 70%, 80%, 85%, 86%, 87%, 88%, 89%, 90%, 91%, 92%, 93%, 94%, 95%, 96%, 97%, 98%, or 99% identical to any one of SEQ ID NOs: 56-61, or 1330-1357 or a fragment or variant of any of these sequences. Additional information regarding each of these suitable amino acid sequences encoding secretory signal sequences may also be derived from the sequence listing, in particular from the details provided therein under identifier <223>.

[0204] Accordingly, in embodiments, the artificial RNA of the first aspect comprises a coding sequence that comprises at least one of the nucleic acid sequences being identical or at least 70%, 80%, 85%, 86%, 87%, 88%, 89%, 90%, 91%, 92%, 93%, 94%, 95%, 96%, 97%, 98%, or 99% identical to SEQ ID NOs: 62-109, or 1358-1586 or a fragment or a fragment or variant of any of these sequences. Additional information regarding each of these suitable nucleic acid sequences encoding may also be derived from the sequence listing, in particular from the details provided therein under identifier <223>.

[0205] In preferred embodiments, the artificial RNA encodes at least one antigenic peptide or protein as defined herein and additionally at least one heterologous further virus element, preferably a JEV stem sequence.

[0206] In that context, the at least one antigenic peptide or protein encoded by the at least one coding region of the artificial RNA may encode YFV prME, or a fragment or variant thereof, wherein the stem region and/or the transmembrane domain may be deleted and/or replaced by a corresponding amino acid sequence derived from Japanese Encephalitis Virus (JEV: aa 400-500 (stem region) of the Japanese encephalitis virus envelope protein E) e.g., “XX” of a “SS-prME-XX” construct has to be removed and exchanged by a heterologous stem region sequence, e.g., JEV, to generate an “SS-prME-delstem_TM-JEV” construct.

[0207] The stem region connects domain III of the YFV envelope protein to the transmembrane domain. It is believed that the replacement of the endogenous stem region (and/or transmembrane domain) by a stem region (and/or transmembrane domain) derived from Japanese encephalitis virus (JEV) is capable of increasing the production of YFV virus-like particles.

[0208] In one embodiment, the at least one antigenic peptide or protein encoded by the at least one coding region of the artificial RNA comprises or consists of YFV prME, or a fragment or variant thereof, wherein the stem region and the transmembrane domain is replaced by the amino acid sequence derived from JEV (aa 400-500 (stem region) of the Japanese encephalitis virus envelope protein E).

[0209] According to preferred embodiments, the JEV stem sequence comprises an amino acid sequence being identical or at least 70%, 80%, 85%, 86%, 87%, 88%, 89%, 90%, 91%, 92%, 93%, 94%, 95%, 96%, 97%, 98%, or 99% identical to SEQ ID NO: 110, or a fragment or variant of any of these sequences. Additional information regarding each of these suitable amino acid sequences encoding a JEV stem sequence may also be derived from the sequence listing, in particular from the details provided therein under identifier <223>.

[0210] Accordingly, in embodiments, the artificial RNA of the first aspect comprises a coding sequence that comprises at least one of the nucleic acid sequences being identical or at least 70%, 80%, 85%, 86%, 87%, 88%, 89%, 90%, 91%, 92%, 93%, 94%, 95%, 96%, 97%, 98%, or 99% identical to SEQ ID NOs: 111-119 or a fragment or a fragment or variant of any of these sequences. Additional information regarding each of these suitable nucleic acid sequences encoding a JEV stem sequence may also be derived from the sequence listing, in particular from the details provided therein under identifier <223>.

[0211] In preferred embodiments, the artificial RNA of the first aspect comprises at least one coding sequence encoding at least one YFV prME and at least one heterologous element comprising or consisting of at least one amino acid sequences being identical or at least 70%, 80%, 85%, 86%, 87%, 88%, 89%, 90%, 91%, 92%, 93%, 94%, 95%, 96%, 97%, 98%, or 99% identical to any one of SEQ ID NOs: 127-157, 1587, 1588 or a fragment or variant of any of these sequences. Additional information regarding each of these suitable amino acid sequences encoding YFV prME proteins comprising heterologous signal sequences and/or JEV element may also be derived from the sequence listing, in particular from the details provided therein under identifier <223>.

[0212] In some embodiments, the artificial RNA of the first aspect comprises at least one coding sequence encoding at least one YFV NS1 and at least one heterologous element comprising or consisting of at least one amino acid sequences being identical or at least 70%, 80%, 85%, 86%, 87%, 88%, 89%, 90%, 91%, 92%, 93%, 94%, 95%, 96%, 97%, 98%, or 99% identical to SEQ ID NO: 2205 or a fragment or variant of thereof.

[0213] According to preferred embodiments, the artificial nucleic acid, particularly the artificial RNA comprises at least one coding sequence encoding at least one antigenic peptide or protein derived from YFV, preferably derived from YFV prME polyprotein or YFV NS1, or fragments and variants thereof. In that context, any coding sequence encoding at least one antigenic peptide or protein derived from YFV, preferably derived from YFV prME polyprotein or YFV NS1, or fragments and variants thereof may be understood as suitable coding sequence and may therefore be comprised in the artificial RNA of the invention.

[0214] In embodiments, the artificial RNA of the first aspect may comprise or consist of at least one coding sequence encoding at least one antigenic peptide or protein derived from YFV (e.g., C, M, prME, NS1, NS2A, NS3, NS5 etc.) preferably encoding any one of SEQ ID NOs: 23-56, 541-586 of EP patent application EP17207141.7 or a fragment or variant of any of these sequences. More preferably, the artificial RNA of the first aspect comprises a coding sequence that comprises at least one of the nucleic acid sequences being identical or at least 70%, 80%, 85%, 86%, 87%, 88%, 89%, 90%, 91%, 92%, 93%, 94%, 95%, 96%, 97%, 98%, or 99% identical to SEQ ID NOs: 57-540, 587-954 of EP patent application EP17207141.7 or a fragment or variant of any of these sequences. In this context, SEQ ID NOs: 57-540, 587-954, the disclosure related thereto, and the description provided under the <223> in the sequence listing of patent application EP17207141.7 are herewith incorporated by reference.

[0215] In preferred embodiments, the artificial RNA of the first aspect may comprise or consist of at least one coding sequence encoding at least one antigenic peptide or protein derived from YFV prME as defined herein (e.g. SS-prME, X-SS-prME-XX, etc.), preferably encoding any one of SEQ ID NOs: 120-157, 1587, 1588 or fragments of variants thereof. It has to be understood that, on nucleic acid level, any nucleic acid sequence, in particular, any RNA sequence which encodes an amino acid sequences being identical to SEQ ID NOs: 120-157, 1587, 1588 or fragments or variants thereof, or any nucleic acid sequence (e.g. DNA sequence, RNA sequence) which encodes amino acid sequences being at least 70%, 80%, 85%, 86%, 87%, 88%, 89%, 90%, 91%, 92%, 93%, 94%, 95%, 96%, 97%, 98%, or 99% identical to any one of SEQ ID NOs: 120-157, 1587, 1588 or fragments or variants thereof, may be selected and may accordingly be understood as suitable coding sequence and may therefore be comprised in the artificial RNA of the first aspect of the invention.

[0216] In further embodiments, the artificial RNA of the first aspect may comprise or consist of at least one coding sequence encoding at least one antigenic peptide or protein derived from YFV NS1 as defined herein (e.g. eSS-NS1, SSIgE-NS1, eSS-NS1-Y, SSIgE-NS1-Y etc.), preferably encoding any one of SEQ ID NOs: 2201-2205 or fragments of variants thereof. It has to be understood that, on nucleic acid level, any nucleic acid sequence, in particular, any RNA sequence which encodes an amino acid sequences being identical to SEQ ID NOs: 2201-2205 or fragments or variants thereof, or any nucleic acid sequence (e.g. DNA sequence, RNA sequence) which encodes amino acid sequences being at least 70%, 80%, 85%, 86%, 87%, 88%, 89%, 90%, 91%, 92%, 93%, 94%, 95%, 96%, 97%, 98%, or 99% identical to any one of SEQ ID NOs: 2201-2205 or fragments or variants thereof, may be selected and may accordingly be understood as suitable coding sequence and may therefore be comprised in the artificial RNA of the first aspect of the invention.

[0217] Suitably, in particularly preferred embodiments, the artificial RNA of the first aspect comprises a coding sequence located between said 5′-UTR and said 3′-UTR, preferably downstream of said 5′-UTR and upstream of said 3′-UTR.

[0218] In preferred embodiments, the artificial RNA of the first aspect comprises a coding sequence that comprises at least one of the nucleic acid sequences being identical or at least 70%, 80%, 85%, 86%, 87%, 88%, 89%, 90%, 91%, 92%, 93%, 94%, 95%, 96%, 97%, 98%, or 99% identical to SEQ ID NOs: 158-1320, 1589-2200, 2206-2593 or a fragment or a fragment or variant of any of these sequences (see also Table 2AX, Table 2AY, Table 2BX and Table 2BY). Additional information regarding each of these suitable nucleic acid sequences encoding may also be derived from the sequence listing, in particular from the details provided therein under identifier <223>.

[0219] According to preferred embodiments, the artificial RNA is a modified and/or stabilized artificial RNA.

[0220] According to preferred embodiments, the artificial RNA of the present invention may thus be provided as a “stabilized artificial RNA” that is to say an RNA showing improved resistance to in vivo degradation and/or an artificial RNA showing improved stability in vivo, and/or an artificial RNA showing improved translatability in vivo. In the following, specific suitable modifications in this context are described which are suitably to “stabilize” the artificial RNA.

[0221] Such stabilization may be effected by providing a “dried RNA” and/or a “purified RNA” as specified herein. Alternatively or in addition to that, such stabilization can be effected, for example, by a modified phosphate backbone of the artificial RNA of the present invention. A backbone modification in connection with the present invention is a modification in which phosphates of the backbone of the nucleotides contained in the RNA are chemically modified. Nucleotides that may be preferably used in this connection contain e.g. a phosphorothioate-modified phosphate backbone, preferably at least one of the phosphate oxygens contained in the phosphate backbone being replaced by a sulfur atom. Stabilized RNAs may further include, for example: non-ionic phosphate analogues, such as, for example, alkyl and aryl phosphonates, in which the charged phosphonate oxygen is replaced by an alkyl or aryl group, or phosphodiesters and alkylphosphotriesters, in which the charged oxygen residue is present in alkylated form. Such backbone modifications typically include, without implying any limitation, modifications from the group consisting of methylphosphonates, phosphoramidates and phosphorothioates (e.g. cytidine-5′-O-(1-thiophosphate)).

[0222] In the following, suitable modifications are described that are capable of “stabilizing” the artificial RNA of the invention.

[0223] According to embodiments, the artificial RNA according to the invention is a modified artificial RNA, wherein the modification refers to chemical modifications comprising backbone modifications as well as sugar modifications or base modifications.

[0224] In this context, a modified artificial RNA as defined herein may contain nucleotide analogues/modifications, e.g. backbone modifications, sugar modifications or base modifications. A backbone modification in connection with the present invention is a modification, in which phosphates of the backbone of the nucleotides contained in a nucleic acid, e.g. an artificial RNA, are chemically modified. A sugar modification in connection with the present invention is a chemical modification of the sugar of the nucleotides of the RNA as defined herein. Furthermore, a base modification in connection with the present invention is a chemical modification of the base moiety of the nucleotides of the RNA. In this context, nucleotide analogues or modifications are preferably selected from nucleotide analogues which are applicable for transcription and/or translation.

[0225] In particularly preferred embodiments of the present invention, the nucleotide analogues/modifications which may be incorporated into a modified nucleic acid or particularly into a modified RNA as described herein are preferably selected from 2-amino-6-chloropurineriboside-5′-triphosphate, 2-Aminopurine-riboside-5′-triphosphate; 2-aminoadenosine-5′-triphosphate, 2′-Amino-2′-deoxycytidine-triphosphate, 2-thiocytidine-5′-triphosphate, 2-thiouridine-5′-triphosphate, 2′-Fluorothymidine-5′-triphosphate, 2′-O-Methyl-inosine-5′-triphosphate 4-thiouridine-5′-triphosphate, 5-aminoallylcytidine-5′-triphosphate, 5-aminoallyluridine-5′-triphosphate, 5-bromocytidine-5′-triphosphate, 5-bromouridine-5′-triphosphate, 5-Bromo-2′-deoxycytidine-5′-triphosphate, 5-Bromo-2′-deoxyuridine-5′-triphosphate, 5-iodocytidine-5′-triphosphate, 5-lodo-2′-deoxycytidine-5′-triphosphate, 5-iodouridine-5′-triphosphate, 5-lodo-2′-deoxyuridine-5′-triphosphate, 5-methylcytidine-5′-triphosphate, 5-methyluridine-5′-triphosphate, 5-Propynyl-2′-deoxycytidine-5′-triphosphate, 5-Propynyl-2′-deoxyuridine-5′-triphosphate, 6-azacytidine-5′-triphosphate, 6-azauridine-5′-triphosphate, 6-chloropurineriboside-5′-triphosphate, 7-deazaadenosine-5′-triphosphate, 7-deazaguanosine-5′-triphosphate, 8-azaadenosine-5′-triphosphate, 8-azidoadenosine-5′-triphosphate, benzimidazole-riboside-5′-triphosphate, N1-methyladenosine-5′-triphosphate, N1-methylguanosine-5′-triphosphate, N6-methyladenosine-5′-triphosphate, 06-methylguanosine-5′-triphosphate, pseudouridine-5′-triphosphate, or puromycin-5′-triphosphate, xanthosine-5′-triphosphate. Particular preference is given to nucleotides for base modifications selected from the group of base-modified nucleotides consisting of 5-methylcytidine-5′-triphosphate, 7-deazaguanosine-5′-triphosphate, 5-bromocytidine-5′-triphosphate, and pseudouridine-5′-triphosphate, pyridin-4-one ribonucleoside, 5-aza-uridine, 2-thio-5-aza-uridine, 2-thiouridine, 4-thio-pseudouridine, 2-thio-pseudouridine, 5-hydroxyuridine, 3-methyluridine, 5-carboxymethyl-uridine, 1-carboxymethyl-pseudouridine, 5-propynyl-uridine, 1-propynyl-pseudouridine, 5-taurinomethyluridine, 1-taurinomethyl-pseudouridine, 5-taurinomethyl-2-thio-uridine, 1-taurinomethyl-4-thio-uridine, 5-methyl-uridine, 1-methyl-pseudouridine, 4-thio-1-methyl-pseudouridine, 2-thio-1-methyl-pseudouridine, 1-methyl-1-deaza-pseudouridine, 2-thio-1-methyl-1-deaza-pseudouridine, dihydrouridine, dihydropseudouridine, 2-thio-dihydrouridine, 2-thio-dihydropseudouridine, 2-methoxyuridine, 2-methoxy-4-thio-uridine, 4-methoxy-pseudouridine, and 4-methoxy-2-thio-pseudouridine, 5-aza-cytidine, pseudoisocytidine, 3-methyl-cytidine, N4-acetylcytidine, 5-formylcytidine, N4-methylcytidine, 5-hydroxymethylcytidine, 1-methyl-pseudoisocytidine, pyrrolo-cytidine, pyrrolo-pseudoisocytidine, 2-thio-cytidine, 2-thio-5-methyl-cytidine, 4-thio-pseudoisocytidine, 4-thio-1-methyl-pseudoisocytidine, 4-thio-1-methyl-1-deaza-pseudoisocytidine, 1-methyl-1-deaza-pseudoisocytidine, zebularine, 5-aza-zebularine, 5-methyl-zebularine, 5-aza-2-thio-zebularine, 2-thio-zebularine, 2-methoxy-cytidine, 2-methoxy-5-methyl-cytidine, 4-methoxy-pseudoisocytidine, and 4-methoxy-1-methyl-pseudoisocytidine, 2-aminopurine, 2,6-diaminopurine, 7-deaza-adenine, 7-deaza-8-aza-adenine, 7-deaza-2-aminopurine, 7-deaza-8-aza-2-aminopurine, 7-deaza-2,6-diaminopurine, 7-deaza-8-aza-2,6-diaminopurine, 1-methyladenosine, N6-methyladenosine, N6-isopentenyladenosine, N6-(cis-hydroxyisopentenyl)adenosine, 2-methylthio-N6-(cis-hydroxyisopentenyl) adenosine, N6-glycinylcarbamoyladenosine, N6-threonylcarbamoyladenosine, 2-methylthio-N6-threonyl carbamoyladenosine, N6,N6-dimethyladenosine, 7-methyladenine, 2-methylthio-adenine, and 2-methoxy-adenine, inosine, 1-methyl-inosine, wyosine, wybutosine, 7-deaza-guanosine, 7-deaza-8-aza-guanosine, 6-thio-guanosine, 6-thio-7-deaza-guanosine, 6-thio-7-deaza-8-aza-guanosine, 7-methyl-guanosine, 6-thio-7-methyl-guanosine, 7-methylinosine, 6-methoxy-guanosine, 1-methylguanosine, N2-methylguanosine, N2,N2-dimethylguanosine, 8-oxo-guanosine, 7-methyl-8-oxo-guanosine, 1-methyl-6-thio-guanosine, N2-methyl-6-thio-guanosine, and N2,N2-dimethyl-6-thio-guanosine, 5′-O-(1-thiophosphate)-adenosine, 5′-O-(1-thiophosphate)-cytidine, 5′-O-(1-thiophosphate)-guanosine, 5′-O-(1-thiophosphate)-uridine, 5′-O-(1-thiophosphate)-pseudouridine, 6-aza-cytidine, 2-thio-cytidine, alpha-thio-cytidine, Pseudo-iso-cytidine, 5-aminoallyl-uridine, 5-iodo-uridine, N1-methyl-pseudouridine, 5,6-dihydrouridine, alpha-thio-uridine, 4-thio-uridine, 6-aza-uridine, 5-hydroxy-uridine, deoxy-thymidine, 5-methyl-uridine, Pyrrolo-cytidine, inosine, alpha-thio-guanosine, 6-methyl-guanosine, 5-methyl-cytdine, 8-oxo-guanosine, 7-deaza-guanosine, N1-methyl-adenosine, 2-amino-6-Chloro-purine, N6-methyl-2-amino-purine, Pseudo-iso-cytidine, 6-Chloro-purine, N6-methyl-adenosine, alpha-thio-adenosine, 8-azido-adenosine, 7-deaza-adenosine.

[0226] Particularly preferred and suitable in the context of the invention are pseudouridine (ψ), N1-methylpseudouridine (m1ψ), 5-methylcytosine, and 5-methoxyuridine. Accordingly, the artificial RNA as defined herein may comprise at least one modified nucleotide selected from pseudouridine (ψ), N1-methylpseudouridine (m1ψ), 5-methylcytosine, and 5-methoxyuridine.

[0227] In preferred embodiments, the artificial RNA of the invention comprises at least one coding sequence, wherein the at least one coding sequence is a pseudouridine (ψ) modified coding sequence.

[0228] In further preferred embodiments, the artificial RNA of the invention comprises at least one coding sequence, wherein the at least one coding sequence is a N1-methylpseudouridine (m1ψ) modified coding sequence.

[0229] In preferred embodiments, the artificial RNA of the invention comprises at least one coding sequence, wherein the at least one coding sequence is a codon modified coding sequence.

[0230] In preferred embodiments, the at least one coding sequence of the invention is a codon modified coding sequence, wherein the amino acid sequence encoded by the at least one codon modified coding sequence is preferably not being modified compared to the amino acid sequence encoded by the corresponding wild type coding sequence.

[0231] The term “codon modified coding sequence” relates to coding sequences that differ in at least one codon (triplets of nucleotides coding for one amino acid) compared to the corresponding wild type coding sequence. Suitably, a codon modified coding sequence in the context of the invention may show improved resistance to in vivo degradation and/or improved stability in vivo, and/or improved translatability in vivo. Codon modifications in the broadest sense make use of the degeneracy of the genetic code wherein multiple codons may encode the same amino acid and may be used interchangeably (cf. Table 1) to optimize/modify the coding sequence for in vivo applications as outlined above.

[0232] In particularly preferred embodiments of the first aspect, the at least one sequence is a codon modified coding sequence, wherein the codon modified coding sequence is selected from C maximized coding sequence, CAI maximized coding sequence, human codon usage adapted coding sequence, G/C content modified coding sequence, and G/C optimized coding sequence, or any combination thereof, or any combination thereof.

[0233] According to preferred embodiments, the artificial RNA of the invention may be modified, wherein the C content of the at least one coding sequence may be increased, preferably maximized, compared to the C content of the corresponding wild type coding sequence (herein referred to as “C maximized coding sequence”). The amino acid sequence encoded by the C maximized coding sequence of the RNA is preferably not modified as compared to the amino acid sequence encoded by the respective wild type nucleic acid coding sequence. The generation of a C maximized nucleic acid sequences may suitably be carried out using a modification method according to WO2015/062738. In this context, the disclosure of WO2015/062738 is included herewith by reference. Throughout the disclosure of the invention, including the <223> identifier of the sequence listing, C maximized coding sequences of suitable flavivirus nucleic acid sequences are indicated by the abbreviation “opt2”.

[0234] According to embodiments, the artificial RNA of the present invention may be modified, wherein the G/C content of the at least one coding sequence of the invention may be modified compared to the G/C content of the corresponding wild type coding sequence (herein referred to as “G/C content modified coding sequence”). In this context, the terms “G/C optimization” or “G/C content modification” relate to a nucleic acid, preferably an artificial nucleic acid of the invention that comprises a modified, preferably an increased number of guanosine and/or cytosine nucleotides as compared to the corresponding wild type nucleic acid sequence. Such an increased number may be generated by substitution of codons containing adenosine or thymidine nucleotides by codons containing guanosine or cytosine nucleotides. If the enriched G/C content occurs in a coding sequence of DNA or RNA, it makes use of the degeneracy of the genetic code. In particular, in case of RNA, sequences having an increased G (guanosine)/C (cytosine) content are more stable than sequences having an increased A (adenosine)/U (uracil) content. The amino acid sequence encoded by the G/C content modified coding sequence of the nucleic acid sequence is preferably not modified as compared to the amino acid sequence encoded by the respective wild type nucleic acid coding sequence. Preferably, the G/C content of the coding sequence of the artificial nucleic acid sequence, e.g. the RNA sequence of the present invention is increased by at least 10%, preferably by at least 20%, more preferably by at least 30%, most preferably by at least 40% compared to the G/C content of the coding sequence of the corresponding wild type nucleic acid sequence (e.g. RNA sequence), which codes for a YFV antigen as defined herein or a fragment or variant thereof.

[0235] According to preferred embodiments, the artificial RNA of the present invention may be modified, wherein the G/C content of the at least one coding sequence of the invention may be optimized compared to the G/C content of the corresponding wild type coding sequence (herein referred to as “G/C content optimized coding sequence”). “Optimized” in that context refers to a coding sequence wherein the G/C content is preferably increased to the essentially highest possible G/C content. The amino acid sequence encoded by the G/C content optimized coding sequence of the nucleic acid sequence is preferably not modified as compared to the amino acid sequence encoded by the respective wild type nucleic acid coding sequence. The generation of a G/C content optimized nucleic RNA sequence may suitably be carried out using a G/C content optimization method according to WO2002/098443. In this context, the disclosure of WO2002/098443 is included in its full scope in the present invention. Throughout the disclosure of the invention, including the <223> identifier of the sequence listing, G/C optimized coding sequences of suitable flavivirus nucleic acid sequences are indicated by the abbreviation “opt1, opt5, opt6, opt11”.

[0236] According to embodiments, the artificial RNA of the invention may be modified, wherein the codons in the at least one coding sequence of the invention may be adapted to human codon usage (herein referred to as “human codon usage adapted coding sequence”). Codons encoding the same amino acid occur at different frequencies in a subject, e.g. a human. Accordingly, the coding sequence of the artificial RNA is preferably modified such that the frequency of the codons encoding the same amino acid corresponds to the naturally occurring frequency of that codon according to the human codon usage e.g. as shown in Table 1. For example, in the case of the amino acid Ala, the wild type coding sequence is preferably adapted in a way that the codon “GCC” is used with a frequency of 0.40, the codon “GCT” is used with a frequency of 0.28, the codon “GCA” is used with a frequency of 0.22 and the codon “GCG” is used with a frequency of 0.10 etc. (see Table 1). Accordingly, such a procedure (as exemplified for Ala) is applied for each amino acid encoded by the coding sequence of the artificial nucleic acid of the invention to obtain sequences adapted to human codon usage. Throughout the disclosure of the invention, including the <223> identifier of the sequence listing, human codon usage adapted coding sequences of suitable flavivirus nucleic acid sequences are indicated by the abbreviation “opt3”.

TABLE 1
Human codon usaqe table with frequencies
indicated for each amino acid

| Amino acid | codon | frequency |
|---|---|---|
| Ala | GCG | 0.10 |
| Ala | GCA | 0.22 |
| Ala | GCT | 0.28 |
| Ala | GCC* | 0.40 |
| Cys | TGT | 0.42 |
| Cys | TGC* | 0.58 |
| Asp | GAT | 0.44 |
| Asp | GAC* | 0.56 |
| Glu | GAG* | 0.59 |
| Glu | GAA | 0.41 |
| Phe | TTT | 0.43 |
| Phe | TTC* | 0.57 |
| Gly | GGG | 0.23 |
| Gly | GGA | 0.26 |
| Gly | GGT | 0.18 |
| Gly | GGC* | 0.33 |
| His | CAT | 0.41 |
| His | CAC* | 0.59 |
| Ile | ATA | 0.14 |
| Ile | ATT | 0.35 |
| Ile | ATC* | 0.52 |
| Lys | AAG* | 0.60 |
| Lys | AAA | 0.40 |
| Leu | TTG | 0.12 |
| Leu | TTA | 0.06 |
| Leu | CTG* | 0.43 |
| Leu | CTA | 0.07 |
| Leu | CTT | 0.12 |
| Leu | CTC | 0.20 |
| Met | ATG* | 1 |
| Asn | AAT | 0.44 |
| Asn | AAC* | 0.56 |
| Pro | CCG | 0.11 |
| Pro | CCA | 0.27 |
| Pro | CCT | 0.29 |
| Pro | CCC* | 0.33 |
| Gln | CAG* | 0.73 |
| Gln | CAA | 0.27 |
| Arg | AGG | 0.22 |
| Arg | AGA* | 0.21 |
| Arg | CGG | 0.19 |
| Arg | CGA | 0.10 |
| Arg | CGT | 0.09 |
| Arg | CGC | 0.19 |
| Ser | AGT | 0.14 |
| Ser | AGC* | 0.25 |
| Ser | TCG | 0.06 |
| Ser | TCA | 0.15 |
| Ser | TCT | 0.18 |
| Ser | TCC | 0.23 |
| Thr | ACG | 0.12 |
| Thr | ACA | 0.27 |
| Thr | ACT | 0.23 |
| Thr | ACC* | 0.38 |
| Val | GTG* | 0.48 |
| Val | GTA | 0.10 |
| Val | GTT | 0.17 |
| Val | GTC | 0.25 |
| Trp | TGG* | 1 |
| Tyr | TAT | 0.42 |
| Tyr | TAC* | 0.58 |
| Stop | TGA* | 0.61 |
| Stop | TAG | 0.17 |
| Stop | TAA | 0.22 |

*most frequent human codon

[0237] According to embodiments, the artificial RNA of the present invention may be modified, wherein the codon adaptation index (CAI) may be increased or preferably maximised in the at least one coding sequence of the invention (herein referred to as “CAI maximized coding sequence”). Accordingly, it is preferred that all codons of the wild type nucleic acid sequence that are relatively rare in e.g. a human cell are exchanged for a respective codon that is frequent in the e.g. a human cell, wherein the frequent codon encodes the same amino acid as the relatively rare codon. Suitably, the most frequent codons are used for each encoded amino acid (see Table 1, most frequent human codons are marked with asterisks). Suitably, the artificial RNA of the invention comprises at least one coding sequence, wherein the codon adaptation index (CAI) of the at least one coding sequence is at least 0.5, at least 0.8, at least 0.9 or at least 0.95. Most preferably, the codon adaptation index (CAI) of the at least one coding sequence is 1. For example, in the case of the amino acid Ala, the wild type coding sequence is adapted in a way that the most frequent human codon “GCC” is always used for said amino acid. Accordingly, such a procedure (as exemplified for Ala) is applied for each amino acid encoded by the coding sequence of the artificial RNA of the invention to obtain CAI maximized coding sequences. Throughout the disclosure of the invention including the <223> identifier of the sequence listing, CAI maximized coding sequences of suitable flavivirus nucleic acid sequences are indicated by the abbreviation “opt4”.

[0238] Accordingly, in a particularly preferred embodiment, the artificial RNA of the first aspect comprises at least one coding sequence comprising a codon modified nucleic acid sequence which is identical or at least 70%, 80%, 85%, 86%, 87%, 88%, 89%, 90%, 91%, 92%, 93%, 94%, 95%, 96%, 97%, 98%, or 99% identical to a codon modified nucleic acid sequence selected from the group consisting of SEQ ID NOs: 195-527, 1591-1608, or 2211-2245 or a fragment or variant of any of these sequences (see also Table 2AX and Table 2AY). Additional information regarding each of these suitable nucleic acid sequences encoding may also be derived from the sequence listing, in particular from the details provided therein under identifier <223>.

[0239] In particularly preferred embodiment, the artificial RNA of the first aspect comprises at least one coding sequence comprising a codon modified nucleic acid sequence which is identical or at least 70%, 80%, 85%, 86%, 87%, 88%, 89%, 90%, 91%, 92%, 93%, 94%, 95%, 96%, 97%, 98%, or 99% identical to any one of the G/C optimized or G/C content modified nucleic acid sequence according to the SEQ ID NOs: 195-305, 417-527, 1591-1596, 1603-1608, 2211-2215, 2231-2245 or a fragment or variant of any of these sequences (see also Table 2AX and Table 2AY). Additional information regarding each of these suitable nucleic acid sequences encoding may also be derived from the sequence listing, in particular from the details provided therein under identifier <223>.

[0240] In preferred embodiment, the artificial RNA of the invention comprises at least one coding sequence comprising a codon modified nucleic acid sequence which is identical or at least 70%, 80%, 85%, 86%, 87%, 88%, 89%, 90%, 91%, 92%, 93%, 94%, 95%, 96%, 97%, 98%, or 99% identical to any one of the human codon usage adapted nucleic acid sequence according to the SEQ ID NOs: 343-379, 1599, 1600, 2221-2225 or a fragment or variant of any of these sequences (see also Table 2AX and Table 2AY). Additional information regarding each of these suitable nucleic acid sequences encoding may also be derived from the sequence listing, in particular from the details provided therein under identifier <223>.

[0241] In particularly preferred embodiment, the artificial RNA of the first aspect comprises at least one coding sequence comprising a codon modified nucleic acid sequence which is identical or at least 70%, 80%, 85%, 86%, 87%, 88%, 89%, 90%, 91%, 92%, 93%, 94%, 95%, 96%, 97%, 98%, or 99% identical to any one of the C maximized nucleic acid sequence according to the SEQ ID NOs: 306-342, 1597, 1598, 2216-2220 or a fragment or variant of any of these sequences (see also Table 2AX and Table 2AY). Additional information regarding each of these suitable nucleic acid sequences encoding may also be derived from the sequence listing, in particular from the details provided therein under identifier <223>.

[0242] In preferred embodiment, the artificial RNA of the invention comprises at least one coding sequence comprising a codon modified nucleic acid sequence which is identical or at least 70%, 80%, 85%, 86%, 87%, 88%, 89%, 90%, 91%, 92%, 93%, 94%, 95%, 96%, 97%, 98%, or 99% identical to any one of the CAI maximized nucleic acid sequence according to the SEQ ID NOs: 380-416, 1601, 1602, 2226-2230 or a fragment or variant of any of these sequences (see also Table 2AX and Table 2AY). Additional information regarding each of these suitable nucleic acid sequences encoding may also be derived from the sequence listing, in particular from the details provided therein under identifier <223>.

[0243] In embodiments, the A/U content in the environment of the ribosome binding site of the artificial nucleic acid, particularly the artificial RNA of the invention may be increased compared to the A/U content in the environment of the ribosome binding site of its respective wild type nucleic acid. This modification (an increased A/U content around the ribosome binding site) increases the efficiency of ribosome binding to the nucleic acid, preferably the RNA. An effective binding of the ribosomes to the ribosome binding site in turn has the effect of an efficient translation of the RNA. Accordingly, in a particularly preferred embodiment, the artificial nucleic acid of the invention comprises a ribosome binding site, also referred to as “Kozak sequence” identical to or at least 80%, 85%, 90%, 95% identical to any one of the sequences SEQ ID NOs: 29, 30 or fragments or variants thereof.

[0244] Preferred YFV polypeptide and nucleic acid coding sequences (CDS) are provided in Table 2AX. Therein, Columns A to I represent a specific suitable construct of the invention derived from prME of YFV 17D. The protein designs are indicated in row 1, the specific protein SEQ ID NOs as provided in the sequence listing are in row 2 (“protein”), e.g., for “SS-prME” (column A) the protein is SEQ ID NO: 125, 126. The SEQ ID NOs of corresponding wild type coding sequences for each protein construct are provided in row 3 (“CDS wt”), e.g., for “SS-prME” (column A) the protein is SEQ ID NO: 125, 126 and the wt coding sequence is SEQ ID NO: 162, 163. The SEQ ID NOs of corresponding codon modified coding sequences for each protein construct are provided in row 4 to row 10 (“CDS opt1”, “CDS opt2”, “CDS opt3”, “CDS opt4”, “CDS opt5”, “CDS opt6”, “CDS opt11”), e.g., for “SS-prME” (column A) the protein is SEQ ID NO: 125, 126 and the wt coding sequence is SEQ ID NO: 162, 163, and the codon modified coding sequences are SEQ ID NO: 199, 200, 236, 237, 273, 274 for CDS opt1, SEQ ID NO: 310, 311 for CDS opt2, SEQ ID NO: 347, 348 for CDS opt3, SEQ ID NO: 384, 385 for CDS opt4, SEQ ID NO: 421, 422 for CDS opt5, SEQ ID NO: 458, 459 for CDS opt6, and SEQ ID NO: 495, 496 for CDS opt11. Further information e.g. regarding the type of codon modified coding sequence is provided in the <223> identifier for each of the respective SEQ ID NO in the sequence listing.

TABLE 2AX
Preferred coding sequences encoding YFV prME

| | | | | | | | | G | H | |
|---|---|---|---|---|---|---|---|---|---|---|
| | | | | | | | | X-SS- | SSjev(V3)- | |
| | | | B | C | D | E | F | prMEdel- | prMEdel- | I |
| | | A | X-SS- | SSjev- | SSjev- | SSIgE- | SSIgE- | stem_TM- | stem_TM- | X-SS- |
| 1 | | SS-prME | prME-XX | prME | prME-XX | prME | prME-XX | JEV | JEV | prME |
| 2 | Protein | 125, 126 | 121 | 136, 137, | 134, 135, | 132, 133 | 130, 131 | 1587 | 1588 | 122 |
| | | | | 140, 141, | 138, 139, | | | | | |
| | | | | 144, 145, | 142, 143, | | | | | |
| | | | | 148, 149, | 146, 147, | | | | | |
| | | | | 152, 153 | 150, 151 | | | | | |
| 3 | CDS | 162, 163 | 158 | 173, 174, | 171, 172, | 169, 170 | 167, 168 | 1589 | 1590 | 159 |
| | wt | | | 177, 178, | 175, 176, | | | | | |
| | | | | 181, 182, | 179, 180, | | | | | |
| | | | | 185, 186, | 183, 184, | | | | | |
| | | | | 189, 190 | 187, 188 | | | | | |
| 4 | CDS | 199, 200, | 195, 232, | 210, 211, | 208, 209, | 206, 207, | 204, 205, | 1591, 1593, | 1592, 1594, | 196, 233, |
| | opt1 | 236, 237, | 269 | 214, 215, | 212, 213, | 243, 244, | 241, 242, | 1595 | | 270 |
| | | 273, 274 | | 218, 219, | 216, 217, | 280, 281 | 278, 279 | | | |
| | | | | 222, 223, | 220, 221, | | | | 1596 | |
| | | | | 226, 227, | 224, 225, | | | | | |
| | | | | 247, 248, | 245, 246, | | | | | |
| | | | | 251, 252, | 249, 250, | | | | | |
| | | | | 255, 256, | 253, 254, | | | | | |
| | | | | 259, 260, | 257, 258, | | | | | |
| | | | | 263, 264, | 261, 262, | | | | | |
| | | | | 284, 285, | 282, 283, | | | | | |
| | | | | 288, 289, | 286, 287, | | | | | |
| | | | | 292, 293, | 290, 291, | | | | | |
| | | | | 296, 297, | 294, 295, | | | | | |
| | | | | 300, 301 | 298, 299 | | | | | |
| 5 | CDS | 310, 311 | 306 | 321, 322, | 319, 320, | 317, 318 | 315, 316 | 1597 | 1598 | 307 |
| | opt2 | | | 325, 326, | 323, 324, | | | | | |
| | | | | 329, 330, | 327, 328, | | | | | |
| | | | | 333, 334, | 331, 332, | | | | | |
| | | | | 337, 338 | 335, 336 | | | | | |
| 6 | CDS | 347, 348 | 343 | 358, 359, | 356, 357, | 354, 355 | 352, 353 | 1599 | 1600 | 344 |
| | opt3 | | | 362, 363, | 360, 361, | | | | | |
| | | | | 366, 367, | 364, 365, | | | | | |
| | | | | 370, 371, | 368, 369, | | | | | |
| | | | | 374, 375 | 372, 373 | | | | | |
| 7 | CDS | 384, 385 | 380 | 395, 396, | 393, 394, | 391, 392 | 389, 390 | 1601 | 1602 | 381 |
| | opt4 | | | 399, 400, | 397, 398, | | | | | |
| | | | | 403, 404, | 401, 402, | | | | | |
| | | | | 407, 408, | 405, 406, | | | | | |
| | | | | 411, 412 | 409, 410 | | | | | |
| 8 | CDS | 421, 422 | 417 | 432, 433, | 430, 431, | 428, 429 | 426, 427 | 1603 | 1604 | 418 |
| | opt5 | | | 436, 437, | 434, 435, | | | | | |
| | | | | 440, 441, | 438, 439, | | | | | |
| | | | | 444, 445, | 442, 443, | | | | | |
| | | | | 448, 449 | 446, 447 | | | | | |
| 9 | CDS | 458, 459 | 454 | 469, 470, | 467, 468, | 465, 466 | 463, 464 | 1605 | 1606 | 455 |
| | opt6 | | | 473, 474, | 471, 472, | | | | | |
| | | | | 477, 478, | 475, 476, | | | | | |
| | | | | 481, 482, | 479, 480, | | | | | |
| | | | | 485, 486 | 483, 484 | | | | | |
| 10 | CDS | 495, 496 | 491 | 506, 507, | 504, 505, | 502, 503 | 500, 501 | 1607 | 1608 | 492 |
| | opt11 | | | 510, 511, | 508, 509, | | | | | |
| | | | | 514, 515, | 512, 513, | | | | | |
| | | | | 518, 519, | 516, 517, | | | | | |
| | | | | 522, 523 | 520, 521 | | | | | |

[0245] Further preferred YFV polypeptide and nucleic acid coding sequences (CDS) are provided in Table 2AY. Therein, Columns A to E represent a specific suitable construct of the invention derived from NS1 of YFV 17D. The protein designs are indicated in row 1, the specific protein SEQ ID NOs as provided in the sequence listing are in row 2 (“protein”), e.g., for “eSS-NS1-Y” (column A) the protein is SEQ ID NO: 2201. The SEQ ID NOs of corresponding wild type coding sequences for each protein construct are provided in row 3 (“CDS wt”), e.g., for “eSS-NS1-Y” (column A) the protein is SEQ ID NO: 2201 and the wt coding sequence is SEQ ID NO: 2206. The SEQ ID NOs of corresponding codon modified coding sequences for each protein construct are provided in row 4 to row 10 (“CDS opt1”, “CDS opt2”, “CDS opt3”, “CDS opt4”, “CDS opt5”, “CDS opt6”, “CDS opt11”), e.g., for “eSS-NS1-Y” (column A) the protein is SEQ ID NO: 2201 and the wt coding sequence is SEQ ID NO: 2206, and the codon modified coding sequences are SEQ ID NO: 2211 for CDS opt1, SEQ ID NO: 2216 for CDS opt2, SEQ ID NO: 2221 for CDS opt3, SEQ ID NO: 2226 for CDS opt4, SEQ ID NO: 2231 for CDS opt5, SEQ ID NO: 2236 for CDS opt6, and SEQ ID NO: 2241 for CDS opt11. Further information e.g. regarding the type of codon modified coding sequence is provided in the <223> identifier for each of the respective SEQ ID NO in the sequence listing.

TABLE 2AY
Preferred coding sequences encoding YFV NS1

| | | A | B | | | E |
|---|---|---|---|---|---|---|
| | | eSS- | eSS- | C | D | SSIgE- |
| 1 | | NS1-Y | NS1 | NS1-Y | NS1 | NS1 |
| 2 | Protein | 2201 | 2202 | 2203 | 2204 | 2205 |
| 3 | CDS wt | 2206 | 2207 | 2208 | 2209 | 2210 |
| 4 | CDS opt1 | 2211 | 2212 | 2213 | 2214 | 2215 |
| 5 | CDS opt2 | 2216 | 2217 | 2218 | 2219 | 2220 |
| 6 | CDS opt3 | 2221 | 2222 | 2223 | 2224 | 2225 |
| 7 | CDS opt4 | 2226 | 2227 | 2228 | 2229 | 2230 |
| 8 | CDS opt5 | 2231 | 2232 | 2233 | 2234 | 2235 |
| 9 | CDS opt6 | 2236 | 2237 | 2238 | 2239 | 2240 |
| 10 | CDS opt11 | 2241 | 2242 | 2243 | 2244 | 2245 |

[0246] In embodiments, the artificial RNA of the first aspect is monocistronic, bicistronic, or multicistronic.

[0247] In preferred embodiments, the artificial RNA of the invention is monocistronic.

[0248] The term “monocistronic nucleic acid” or “monocistronic nucleic acid” will be recognized and understood by the person of ordinary skill in the art, and is for example intended to refer to an artificial RNA that comprises only one coding sequences as defined herein. The terms “bicistronic nucleic acid, multicistronic nucleic acid” or “monocistronic RNA” as used herein will be recognized and understood by the person of ordinary skill in the art, and are for example intended to refer to an artificial RNA that may have two (bicistronic) or even more (multicistronic) coding sequences.

[0249] In embodiments, the artificial RNA of the invention is monocistronic and the coding sequence of said monocistronic artificial RNA encodes at least two different antigenic peptides or proteins derived from YFV prME as defined herein, or a fragment or variant thereof. Accordingly, the at least one coding sequence of the monocistronic artificial RNA may encode at least two, three, four, five, six, seven, eight and more antigenic peptides or proteins derived from a YFV, preferably a YFV prME as defined herein linked with or without an amino acid linker sequence, wherein said linker sequence can comprise rigid linkers, flexible linkers, cleavable linkers (e.g. self-cleaving peptides) as defined above, or a combination thereof (herein referred to as “multi-antigen-constructs/nucleic acid”).

[0250] In embodiments, the artificial RNA of the invention is bicistronic or multicistronic and comprises at least two coding sequences, wherein the at least two coding sequences encode two or more different antigenic peptides or proteins derived from YFV, preferably YFV prME and/or NS1 as defined herein, or a fragment or variant of any of these. Accordingly, the coding sequences in a bicistronic or multicistronic artificial RNA suitably encodes distinct antigenic proteins or peptides as defined herein or a fragment or variant thereof. Preferably, the coding sequences in said bicistronic or multicistronic artificial RNA may be separated by at least one IRES (internal ribosomal entry site) sequence. Thus, the term “encoding two or more antigenic peptides or proteins” may mean, without being limited thereto, that the bicistronic or multicistronic artificial RNA encodes e.g. at least two, three, four, five, six or more (preferably different) antigenic peptides or proteins of different YFV or their fragments or variants within the definitions provided herein. Alternatively, the bicistronic or multicistronic artificial RNA may encode e.g. at least two, three, four, five, six or more (preferably different) antigenic peptides or proteins derived from the same YFV or fragments or variants within the definitions provided herein. In that context, suitable IRES sequences may be selected from the list of nucleic acid sequences according to SEQ ID NOs: 1566-1662 of the patent application WO2017/081082, or fragments or variants of these sequences. In this context, the disclosure of WO2017/081082 relating to IRES sequences is herewith incorporated by reference.

[0251] It has to be understood that in the context of the invention, certain combinations of coding sequences may be generated by any combination of monocistronic, bicistronic and multicistronic artificial nucleic acids and/or multi-antigen-constructs/nucleic acid to obtain a nucleic acid composition encoding multiple antigenic peptides or proteins as defined herein.

[0252] Preferably, the artificial RNA comprising at least one coding sequence as defined herein typically comprises a length of about 50 to about 20000, or 500 to about 20000 nucleotides, or about 500 to about 20000 nucleotides, or about 500 to about 10000 nucleotides, or of about 1000 to about 10000 nucleotides, or preferably of about 1000 to about 5000 nucleotides, or even more preferably of about 1000 to about 2500 nucleotides. According to preferred embodiments, the artificial RNA of the first aspect may be an mRNA, a self-replicating RNA, a circular RNA, or a replicon RNA.

[0253] In embodiments, the artificial RNA is a circular RNA. As used herein, “circular RNA” has to be understood as a circular polynucleotide that can encode at least one antigenic peptide or protein as defined herein. Accordingly, in preferred embodiments, said circular RNA comprises at least one coding sequence encoding at least one antigenic peptide or protein derived from YFV or a fragment or variant thereof as defined herein. The production of circRNAs can be performed using various methods provided in the art. For example, U.S. Pat. No. 6,210,931 teaches a method of synthesizing circRNAs by inserting DNA fragments into a plasmid containing sequences having the capability of spontaneous cleavage and self-circularization. U.S. Pat. No. 5,773,244 teaches producing circRNAs by making a DNA construct encoding an RNA cyclase ribozyme, expressing the DNA construct as an RNA, and then allowing the RNA to self-splice, which produces a circRNA free from intron in vitro. WO1992001813 teaches a process of making single strand circular nucleic acids by synthesizing a linear polynucleotide, combining the linear nucleotide with a complementary linking oligonucleotide under hybridization conditions, and ligating the linear polynucleotide. The person skilled in the art may also use methods provided in WO2015/034925 or WO2016/011222 to produce circular RNA. Accordingly, methods for producing circular RNA as provided in U.S. Pat. Nos. 6,210,931, 5,773,244, WO1992/001813, WO2015/034925 and WO2016/011222 are incorporated herewith by reference.

[0254] In embodiments, the artificial RNA is a replicon RNA. The term “replicon RNA” will be recognized and understood by the person of ordinary skill in the art, and are for example intended to be optimized self-replicating artificial RNA constructs. Such constructs include replication elements (replicase) derived from alphaviruses and the substitution of the structural virus proteins with the artificial nucleic acid of interest (in the context of the invention, an artificial nucleic acid comprising at least one coding sequence encoding at least one antigenic peptide or protein derived from YFV. Alternatively, the replicase may be provided on an independent construct comprising a replicase RNA sequence derived from e.g. Semliki forest virus (SFV), Sindbis virus (SIN), Venezuelan equine Encephalitis virus (VEE), Ross-River virus (RRV), or other viruses belonging to the alphavirus family. Downstream of the replicase lies a sub-genomic promoter that controls replication of the artificial nucleic acid of the invention, i.e. an artificial nucleic acid comprising at least one coding sequence encoding at least one antigenic peptide or protein derived from YFV.

[0255] In preferred embodiments, the artificial RNA of the first aspect is an mRNA.

[0256] The terms “RNA” and “mRNA” will be recognized and understood by the person of ordinary skill in the art, and are for example intended to be a ribonucleic acid molecule, i.e. a polymer consisting of nucleotides. These nucleotides are usually adenosine-monophosphate, uridine-monophosphate, guanosine-monophosphate and cytidine-monophosphate monomers which are connected to each other along a so-called backbone. The backbone is formed by phosphodiester bonds between the sugar, i.e. ribose, of a first and a phosphate moiety of a second, adjacent monomer. The specific succession of the monomers is called the RNA-sequence. The mRNA (messenger RNA) usually provides the nucleotide sequence that may be translated into an amino-acid sequence of a particular peptide or protein.

[0257] The artificial RNA, preferably the mRNA of the invention may be prepared using any method known in the art, including chemical synthesis such as e.g. solid phase RNA synthesis, as well as in vitro methods, such as RNA in vitro transcription reactions.

[0258] In a preferred embodiment, the artificial RNA, preferably the mRNA is obtained by RNA in vitro transcription.

[0259] Accordingly, the RNA of the invention is preferably an in vitro transcribed RNA.

[0260] The terms “RNA in vitro transcription” or “in vitro transcription” relate to a process wherein RNA is synthesized in a cell-free system (in vitro). RNA may be obtained by DNA-dependent in vitro transcription of an appropriate DNA template, which according to the present invention is a linearized plasmid DNA template or a PCR-amplified DNA template. The promoter for controlling RNA in vitro transcription can be any promoter for any DNA-dependent RNA polymerase. Particular examples of DNA-dependent RNA polymerases are the T7, T3, SP6, or Syn5 RNA polymerases. In a preferred embodiment of the present invention the DNA template is linearized with a suitable restriction enzyme, before it is subjected to RNA in vitro transcription.

[0261] Reagents used in RNA in vitro transcription typically include: a DNA template (linearized plasmid DNA or PCR product) with a promoter sequence that has a high binding affinity for its respective RNA polymerase such as bacteriophage-encoded RNA polymerases (T7, T3, SP6, or Syn5); ribonucleotide triphosphates (NTPs) for the four bases (adenine, cytosine, guanine and uracil); optionally, a cap analogue as defined herein (e.g. m7G(5′)ppp(5′)G (m7G), m7G(5′)ppp(5′)(2′OMeG)pG or m7G(5′)ppp(5′)(2′OMeA)pG); optionally, further modified nucleotides as defined herein; a DNA-dependent RNA polymerase capable of binding to the promoter sequence within the DNA template (e.g. T7, T3, SP6, or Syn5 RNA polymerase); optionally, a ribonuclease (RNase) inhibitor to inactivate any potentially contaminating RNase; optionally, a pyrophosphatase to degrade pyrophosphate, which may inhibit RNA in vitro transcription; MgCl2, which supplies Mg2+ ions as a co-factor for the polymerase; a buffer (TRIS or HEPES) to maintain a suitable pH value, which can also contain antioxidants (e.g. DTT), and/or polyamines such as spermidine at optimal concentrations, e.g. a buffer system comprising TRIS-Citrate as disclosed in WO2017/109161.

[0262] In embodiments, the nucleotide mixture used in RNA in vitro transcription may additionally contain modified nucleotides as defined herein. In that context, preferred modified nucleotides comprise pseudouridine (ip), N1-methylpseudouridine (m1ψ), 5-methylcytosine, and/or 5-methoxyuridine.

[0263] In preferred embodiments, the nucleotide mixture (i.e. the fraction of each nucleotide in the mixture) used for RNA in vitro transcription reactions may be optimized for the given RNA sequence, preferably as described WO2015/188933.

[0264] In embodiment where more than one different artificial RNA as defined herein has to be produced, e.g. where 2, 3, 4, 5, 6, 7, 8, 9, 10 or even more different artificial RNAs have to be produced (e.g. encoding different YFV prME antigens or NS1 antigens), procedures as described in WO2017/109134 may be suitably used.

[0265] In the context of RNA vaccine production, it may be required to provide GMP-grade RNA. GMP-grade RNA may be produced using a manufacturing process approved by regulatory authorities. Accordingly, in a particularly preferred embodiment, RNA production is performed under current good manufacturing practice (GMP), implementing various quality control steps on DNA and RNA level, preferably according to WO2016/180430. In preferred embodiments, the RNA of the invention is a GMP-grade RNA, particularly a GMP-grade mRNA.

[0266] In embodiments where multivalent mRNA compositions are used, said multivalent mRNA compositions are preferably produced according to procedures as disclosed in WO2017/1090134A1. In short, YFV DNA constructs (each of which comprising different YFV coding sequences and a T7 promotor; e.g. a DNA sequence coding for YFV prME and a DNA sequence coding for YFV NS1) may be used as a matrix for simultaneous PCR amplification. The obtained PCR product mixture may subsequently be purified and used as a template for simultaneous RNA in vitro transcription to generate a mixture of YFV mRNA constructs. The obtained YFV mRNA mixture may be subjected to quantitative and qualitative measurements (e.g., RNA AGE, RT-qPCR, NGS, and Spectrometry). Following that, purification may suitably be performed and formulation may be performed (e.g., protamine formulation, preferably LNP formulation).

[0267] The obtained RNA products are preferably purified using PureMessenger® (CureVac, Tubingen, Germany; RP-HPLC according to WO2008/077592) and/or tangential flow filtration (as described in WO2016/193206).

[0268] In a further preferred embodiment, the RNA, particularly the purified RNA, is lyophilized according to WO2016/165831 or WO2011/069586 to yield a temperature stable dried artificial RNA (powder) as defined herein. The RNA of the invention, particularly the purified RNA may also be dried using spray-drying or spray-freeze drying according to WO2016/184575 or WO2016/184576 to yield a temperature stable RNA (powder) as defined herein. Accordingly, in the context of manufacturing and purifying RNA, the disclosures of WO2017/109161, WO2015/188933, WO2016/180430, WO2008/077592, WO2016/193206, WO2016/165831, WO2011/069586, WO2016/184575, and WO2016/184576 are incorporated herewith by reference.

[0269] Accordingly, in preferred embodiments, the RNA is a dried RNA, particularly a dried mRNA.

[0270] The term “dried RNA” as used herein has to be understood as RNA that has been lyophilized, or spray-dried, or spray-freeze dried as defined above to obtain a temperature stable dried RNA (powder).

[0271] In preferred embodiments, the artificial RNA of the invention is a purified RNA, particularly purified mRNA.

[0272] The term “purified RNA” or “purified mRNA” as used herein has to be understood as RNA which has a higher purity after certain purification steps (e.g. HPLC, TFF, Oligo d(T) purification, precipitation steps) than the starting material (e.g. in vitro transcribed RNA). Typical impurities that are essentially not present in purified RNA comprise peptides or proteins (e.g. enzymes derived from DNA dependent RNA in vitro transcription, e.g. RNA polymerases, RNases, pyrophosphatase, restriction endonuclease, DNase), spermidine, BSA, abortive RNA sequences, RNA fragments (short double stranded RNA fragments, abortive sequences etc.), free nucleotides (modified nucleotides, conventional NTPs, cap analogue), template DNA fragments, buffer components (HEPES, TRIS, MgCl2) etc. Other potential impurities that may be derived from e.g. fermentation procedures comprise bacterial impurities (bioburden, bacterial DNA) or impurities derived from purification procedures (organic solvents etc.). Accordingly, it is desirable in this regard for the “degree of RNA purity” to be as close as possible to 100%. It is also desirable for the degree of RNA purity that the amount of full length RNA transcripts is as close as possible to 100%. Accordingly “purified RNA” as used herein has a degree of purity of more than 75%, 80%, 85%, very particularly 90%, 91%, 92%, 93%, 94%, 95%, 96%, 97%, 98% and most favorably 99% or more. The degree of purity may for example be determined by an analytical HPLC, wherein the percentages provided above correspond to the ratio between the area of the peak for the target RNA and the total area of all peaks representing the by-products. Alternatively, the degree of purity may for example be determined by an analytical agarose gel electrophoresis or capillary gel electrophoresis.

[0273] It has to be understood that “dried RNA” as defined herein and “purified RNA” as defined herein or “GMP-grade mRNA” as defined herein may have superior stability characteristics (in vitro, in vivo) and improved efficiency (e.g. better translatability of the mRNA in vivo) and are therefore particularly suitable in the context of the invention.

[0274] The artificial RNA may suitably be modified by the addition of a 5′-cap structure, which preferably stabilizes the nucleic acid as described herein.

[0275] Accordingly, in preferred embodiments, the artificial RNA of the first aspect comprises a 5′-cap structure, preferably m7G, cap0 (e.g. m7G(5′)ppp(5′)G), cap1 (e.g. m7G(5′)ppp(5′)(2′OMeG) or m7G(5′)ppp(5′)(2′OMeA)), cap2, a modified cap0, or a modified cap1 structure.

[0276] The term “5′-cap structure” as used herein will be recognized and understood by the person of ordinary skill in the art, and is for example intended to refer to a modified nucleotide (cap analogue), particularly a guanine nucleotide, added to the 5′-end of an RNA molecule, e.g. an mRNA molecule. Preferably, the 5′-cap is added using a 5′-5′-triphosphate linkage (also named m7GpppN). Further examples of 5′-cap structures include glyceryl, inverted deoxy abasic residue (moiety), 4′,5′ methylene nucleotide, 1-(beta-D-erythrofuranosyl) nucleotide, 4′-thio nucleotide, carbocyclic nucleotide, 1,5-anhydrohexitol nucleotide, L-nucleotides, alpha-nucleotide, modified base nucleotide, threo-pentofuranosyl nucleotide, acyclic 3′,4′-seco nucleotide, acyclic 3,4-dihydroxybutyl nucleotide, acyclic 3,5 dihydroxypentyl nucleotide, 3′-3′-inverted nucleotide moiety, 3′-3′-inverted abasic moiety, 3′-2′-inverted nucleotide moiety, 3′-2′-inverted abasic moiety, 1,4-butanediol phosphate, 3′-phosphoramidate, hexylphosphate, aminohexyl phosphate, 3′-phosphate, 3′phosphorothioate, phosphorodithioate, or bridging or non-bridging methylphosphonate moiety.

[0277] Further 5′-cap structures which may be suitable in the context of the present invention are cap1 (additional methylation of the ribose of the adjacent nucleotide of m7GpppN), cap2 (additional methylation of the ribose of the 2nd nucleotide downstream of the m7GpppN), cap3 (additional methylation of the ribose of the 3rd nucleotide downstream of the m7GpppN), cap4 (additional methylation of the ribose of the 4th nucleotide downstream of the m7GpppN), ARCA (anti-reverse cap analogue), modified ARCA (e.g. phosphothioate modified ARCA), inosine, N1-methyl-guanosine, 2′-fluoro-guanosine, 7-deaza-guanosine, 8-oxo-guanosine, 2-amino-guanosine, LNA-guanosine, and 2-azido-guanosine.

[0278] A 5′-cap (cap0 or cap1) structure may also be formed in chemical RNA synthesis or, preferably, RNA in vitro transcription (co-transcriptional capping) using cap analogues.

[0279] The term “cap analogue” as used herein will be recognized and understood by the person of ordinary skill in the art, and is for example intended to refer to a non-polymerizable di-nucleotide that has cap functionality in that it facilitates translation or localization, and/or prevents degradation of a nucleic acid molecule, particularly of an RNA molecule, when incorporated at the 5′-end of the nucleic acid molecule. Non-polymerizable means that the cap analogue will be incorporated only at the 5′-terminus because it does not have a 5′ triphosphate and therefore cannot be extended in the 3′-direction by a template-dependent polymerase, particularly, by template-dependent RNA polymerase. Examples of cap analogues include, but are not limited to, a chemical structure selected from the group consisting of m7GpppG, m7GpppA, m7GpppC; unmethylated cap analogues (e.g. GpppG); dimethylated cap analogue (e.g. m2,7GpppG), trimethylated cap analogue (e.g. m2,2,7GpppG), dimethylated symmetrical cap analogues (e.g. m7Gpppm7G), or anti reverse cap analogues (e.g. ARCA; m7,2′OmeGpppG, m7,2′dGpppG, m7,3′OmeGpppG, m7,3′dGpppG and their tetraphosphate derivatives). Further cap analogues have been described previously (WO2008/016473, WO2008/157688, WO2009/149253, WO2011/015347, and WO2013/059475). Further suitable cap analogons in that context are described in WO2017/066793, WO2017/066781, WO2017/066791, WO2017/066789, WO2017/066782, and WO2017/066797 wherein the disclosures referring to cap analogues are incorporated herewith by reference.

[0280] In embodiments, a modified cap1 structure is generated using tri-nucleotide cap analogue as disclosed in WO2017/053297, WO2017/066793, WO2017/066781, WO2017/066791, WO2017/066789, WO2017/066782, WO2018075827 and WO2017/066797. In particular, any cap structures derivable from the structure disclosed in claim 1-5 of WO2017/053297 may be suitably used to co-transcriptionally generate a modified cap1 structure. Further, any cap structures derivable from the structure defined in claim 1 or claim 21 of WO2018075827 may be suitably used to co-transcriptionally generate a modified cap1 structure.

[0281] The 5′-cap structure may suitably be added co-transcriptionally using cap-analogues as defined herein in an RNA in vitro transcription reaction as defined herein.

[0282] Preferred cap-analogues are the di-nucleotide cap analogues m7G(5′)ppp(5′)G (m7G) or 3′-O-Me-m7G(5′)ppp(5′)G to co-transcriptionally generate cap0 structures. Particularly preferred cap-analogues are the tri-nucleotide cap analogues m7G(5′)ppp(5′)(2′OMeA)pG or m7G(5′)ppp(5′)(2′OMeG)pG to co-transcriptionally generate cap1 structures,

[0283] In that context, it is preferred that the RNA of the invention comprises a Cap1 structure as defined above, which preferably results in an increased protein expression through e.g. high capping efficiencies and increased translation efficiencies. Further suitably, the RNA of the invention comprising a Cap1 structure displays a decreased stimulation of the innate immune system as compared to Cap0 constructs of the same nucleic acid sequence. The person of ordinary skill knows how to determine translation efficiencies, capping degree, and immune stimulation.

[0284] In other embodiments, the 5′-cap structure is added via enzymatic capping using capping enzymes (e.g. vaccinia virus capping enzymes, commercially available capping kits) to generate cap0 or cap1 or cap2 structures. In other embodiments, the 5′-cap structure (cap0, cap1) is added via enzymatic capping using immobilized capping enzymes, e.g. using a capping reactor (WO2016/193226).

[0285] In a particularly preferred embodiment, the artificial RNA of the first aspect of the invention comprises a cap1 structure, wherein said cap1 structure may be formed enzymatically or co-transcriptionally (e.g. using m7G(5′)ppp(5)(2′OMeA)pG or m7G(5′)ppp(5′)(2′OMeG)pG analogues).

[0286] In preferred embodiments, the artificial RNA of the first aspect comprises an m7G(5′)ppp(5′)(2′OMeA)pG cap structure. In such embodiments, the coding RNA comprises a 5′ terminal m7G cap, and an additional methylation of the ribose of the adjacent nucleotide of m7GpppN, in that case, a 2′O methylated adenosine.

[0287] In other preferred embodiments, the artificial RNA of the first aspect comprises an m7G(5′)ppp(5′)(2′OMeG)pG cap structure. In such embodiments, the coding RNA comprises a 5′ terminal m7G cap, and an additional methylation of the ribose of the adjacent nucleotide, in that case, a 2′O methylated guanosine.

[0288] Accordingly, whenever reference is made to suitable RNA or mRNA sequences in the context of the invention, the first nucleotide of said RNA or mRNA sequence, that is the nucleotide downstream of the m7G(5′)ppp structure, may be a 2′O methylated guanosine or a 2′O methylated adenosine.

[0289] Accordingly, in other embodiments, the artificial RNA of the invention may comprise a 5′-cap sequence element according to SEQ ID NOs: 31 or 1321, or a fragment or variant thereof.

[0290] In preferred embodiments, the artificial RNA of the invention comprises at least one poly(A) sequence, preferably comprising 30 to 150 adenosine nucleotides.

[0291] In preferred embodiments, the poly(A) sequence, suitable located at the 3′ terminus, comprises 10 to 500 adenosine nucleotides, 10 to 200 adenosine nucleotides, 40 to 200 adenosine nucleotides or 40 to 150 adenosine nucleotides. In a particularly preferred embodiment, the poly(A) sequence comprises about 64 adenosine nucleotides. In further particularly preferred embodiments, the poly(A) sequence comprises about 75 adenosine nucleotides. In further particularly preferred embodiments, the poly(A) sequence comprises about 100 adenosine nucleotides.

[0292] The terms “poly(A) sequence”, “poly(A) tail” or “3′-poly(A) tail” as used herein will be recognized and understood by the person of ordinary skill in the art, and are for example intended to be a sequence of adenosine nucleotides, typically located at the 3′-end of an RNA, of up to about 1000 adenosine nucleotides. In the context of the present invention, a poly(A) sequence may be located within an mRNA or any other nucleic acid molecule, such as, e.g., in a DNA vector, for example, in a vector serving as template for the generation of an RNA, preferably an mRNA, e.g., by transcription said vector.

[0293] Preferably, the poly(A) sequence of the artificial RNA is obtained from a DNA template during RNA in vitro transcription. In other embodiments, the poly(A) sequence is obtained in vitro by common methods of chemical synthesis without being necessarily transcribed from a DNA template. In other embodiments, poly(A) sequences are generated by enzymatic polyadenylation of the RNA (after RNA in vitro transcription) using commercially available polyadenylation kits and corresponding protocols known in the art, or alternatively, by using immobilized poly(A)polymerases e.g. using a polyadenylation reactor (as described in WO2016/174271).

[0294] In embodiments, the artificial RNA of the invention may contain a poly(A) sequence derived from a vector and may comprise at least one additional poly(A) sequence generated by enzymatic polyadenylation, e.g. as described in WO2016/091391.

[0295] In preferred embodiments, the artificial RNA of the invention comprises at least one poly(C) sequence, preferably comprising 10 to 40 cytosine nucleotides.

[0296] In preferred embodiments, the poly(C) sequence, suitable located at the 3′ terminus, comprises 10 to 200 cytosine nucleotides, 10 to 100 cytosine nucleotides, 20 to 70 cytosine nucleotides, 20 to 60 cytosine nucleotides, or 10 to 40 cytosine nucleotides. In a particularly preferred embodiment, the poly(C) sequence comprises about 30 cytosine nucleotides.

[0297] The term “poly(C) sequence” as used herein will be recognized and understood by the person of ordinary skill in the art, and are for example intended to be a sequence of cytosine nucleotides, typically located at the 3′-end of an RNA, of up to about 200 cytosine nucleotides. In the context of the present invention, a poly(C) sequence may be located within an mRNA or any other nucleic acid molecule, such as, e.g., in a DNA vector, for example, in a vector serving as template for the generation of an RNA, preferably an mRNA, e.g., by transcription of the vector.

[0298] Preferably, the poly(C) sequence in the RNA sequence of the present invention is derived from a DNA template by RNA in vitro transcription. In other embodiments, the poly(C) sequence is obtained in vitro by common methods of chemical synthesis without being necessarily transcribed from a DNA template.

[0299] In preferred embodiments, the artificial RNA of the first aspect comprises at least one histone stem-loop.

[0300] The term “histone stem-loop” as used herein will be recognized and understood by the person of ordinary skill in the art, and are for example intended to refer to nucleic acid sequences that are predominantly found in histone mRNAs. Exemplary histone stem-loop sequences are described in Lopez et al. (Davila Lopez et al, (2008), RNA, 14(1)). The stem-loops in histone pre-mRNAs are typically followed by a purine-rich sequence known as the histone downstream element (HDE). These pre-mRNAs are processed in the nucleus by a single endonucleolytic cleavage approximately 5 nucleotides downstream of the stem-loop, catalysed by the U7 snRNP through base pairing of the U7 snRNA with the HDE.

[0301] Histone stem-loop sequences/structures may suitably be selected from histone stem-loop sequences as disclosed in WO2012/019780, the disclosure relating to histone stem-loop sequences/structures incorporated herewith by reference. A histone stem-loop sequence that may be used within the present invention may preferably be derived from Formulae (I) or (II) of the patent application WO2012/019780. According to a further preferred embodiment the RNA as defined herein may comprise at least one histone stem-loop sequence derived from at least one of the specific Formulae (Ia) or (IIa) of the patent application WO2012/019780.

[0302] In particularly preferred embodiment, the artificial RNA of the invention comprises at least one histone stem-loop, wherein said histone stem-loop comprises a nucleic acid sequence according to SEQ ID NOs: 27, 28 or a fragments or variant thereof.

[0303] In further embodiments, the artificial RNA of the invention comprises a 3′-terminal sequence element. Said 3′-terminal sequence element has to be understood as a sequence element comprising a poly(A)sequence and a histone-stem-loop sequence, wherein said sequence element is located at the 3′ terminus of the artificial RNA of the invention.

[0304] In other embodiments, the artificial RNA of the invention may comprise a 3′-terminal sequence element according to SEQ ID NOs: 32-51, 1323-1329 or a fragment or variant thereof.

[0305] In preferred embodiments of the first aspect, the artificial RNA, preferably mRNA comprises preferably in 5′- to 3′-direction the following elements a)-h):
[0306] a) 5′-cap structure, preferably as specified herein;
[0307] b) optionally, 5′-UTR, preferably as specified herein;
[0308] c) at least one coding sequence, preferably as specified herein;
[0309] d) 3′-UTR, preferably as specified herein;
[0310] e) optionally, a poly(A) sequence, preferably as specified herein;
[0311] f) optionally, a poly(C) sequence, preferably as specified herein;
[0312] g) optionally, a histone stem-loop, preferably as specified herein;
[0313] h) optionally, a 3′-terminal sequence element as specified herein.

[0314] In further preferred embodiments of the first aspect, the artificial RNA, preferably mRNA comprises the following elements
[0315] a) 5′-cap structure, preferably as specified herein;
[0316] b) a 5′-UTR and a 3′-UTR element according to a-1, a-2, a-4, b-4, c-5, d-1, d-5, g-4, h-4, h-5, i-2, or i-3 as specified herein;
[0317] c) at least one coding sequence as specified herein, wherein said coding sequence is located between said 5′-UTR and said 3′-UTR, preferably downstream of said 5′-UTR and upstream of said 3′-UTR;
[0318] d) optionally, a poly(A) sequence, preferably as specified herein;
[0319] e) optionally, poly(C) sequence, preferably as specified herein;
[0320] f) optionally, histone stem-loop, preferably as specified herein;
[0321] g) optionally, a 3′-terminal sequence element as specified herein.

[0322] In further preferred embodiments of the first aspect, the artificial RNA, preferably mRNA comprises the following elements:
[0323] a) 5′-cap structure, preferably as specified herein;
[0324] b) a 5′-UTR and a 3′-UTR element according to a-1, a-4, b-4, d-5, c-5, i-3, or g-4 as specified herein;
[0325] c) at least one coding sequence as specified herein, wherein said coding region is located between said 5′-UTR and said 3′-UTR, preferably downstream of said 5′-UTR and upstream of said 3′-UTR;
[0326] d) optionally, a poly(A) sequence, preferably as specified herein;
[0327] e) optionally, poly(C) sequence, preferably as specified herein;
[0328] f) optionally, histone stem-loop, preferably as specified herein;
[0329] g) optionally, a 3′-terminal sequence element as specified herein.

[0330] In preferred embodiments of the first aspect, the artificial RNA, preferably mRNA comprises preferably in 5′- to 3′-direction the following elements a)-g):
[0331] a) 5′-cap structure, preferably as specified herein;
[0332] b) optionally, 5′-UTR, preferably as specified herein;
[0333] c) at least one coding sequence, preferably as specified herein;
[0334] d) 3′-UTR, preferably as specified herein;
[0335] e) optionally, a histone stem-loop, preferably as specified herein;
[0336] f) optionally, a poly(A) sequence, preferably as specified herein;
[0337] g) optionally, a 3′-terminal sequence element as specified herein.

[0338] In further preferred embodiments of the first aspect, the artificial RNA, preferably mRNA comprises the following elements
[0339] a) 5′-cap structure, preferably as specified herein;
[0340] b) a 5′-UTR and a 3′-UTR element according to a-1, a-2, a-4, b-4, c-5, d-1, d-5, g-4, h-4, h-5, i-2, or i-3 as specified herein;
[0341] c) at least one coding sequence as specified herein, wherein said coding sequence is located between said 5′-UTR and said 3′-UTR, preferably downstream of said 5′-UTR and upstream of said 3′-UTR;
[0342] d) optionally, histone stem-loop, preferably as specified herein;
[0343] e) optionally, a poly(A) sequence, preferably as specified herein;
[0344] f) optionally, a 3′-terminal sequence element as specified herein.

[0345] In further preferred embodiments of the first aspect, the artificial RNA, preferably mRNA comprises the following elements:
[0346] a) 5′-cap structure, preferably as specified herein;
[0347] b) a 5′-UTR and a 3′-UTR element according to a-1, a-4, b-4, d-5, c-5, i-3, or g-4 as specified herein;
[0348] c) at least one coding sequence as specified herein, wherein said coding region is located between said 5′-UTR and said 3′-UTR, preferably downstream of said 5′-UTR and upstream of said 3′-UTR;
[0349] d) optionally, histone stem-loop, preferably as specified herein;
[0350] e) optionally, a poly(A) sequence, preferably as specified herein;
[0351] f) optionally, a 3′-terminal sequence element as specified herein.

[0352] Preferred YFV polypeptide, nucleic acid and mRNA sequences are provided in Table 2BX. Therein, Columns A to I represent a specific suitable construct of the invention derived from prME of YFV 17D. The protein designs are indicated in row 1, the specific protein SEQ ID NOs as provided in the sequence listing are in row 2 (“protein”), e.g., for “SS-prME” (column A) the protein is SEQ ID NOs: 125, 126. The SEQ ID NOs of corresponding wild type coding sequences for each protein construct are provided in row 3 (“CDS wt”), e.g., for “SS-prME” (column A) the protein is SEQ ID NOs: 125, 126 and the wt coding sequence is SEQ ID NOs: 162, 163. The SEQ ID NOs of corresponding codon modified coding sequences (opt1, opt2, opt3, opt4, opt5, opt6, opt11 etc) for each protein construct are provided in row 4 (“CDS opt”), e.g., for “SS-prME” (column A) the protein is SEQ ID NOs: 125, 126 and the wt coding sequence is SEQ ID NOs: 162, 163, and the codon modified coding sequences are SEQ ID NOs: 199, 200, 236, 237, 273, 274, 310, 311, 347, 348, 384, 385, 421, 422, 458, 459, 495, 496. Further information e.g. regarding the type of codon modified coding sequence (opt1, opt2, opt3, opt4, opt5, opt6, opt11 etc.) is provided in the <223> identifier of the respective SEQ ID NO in the sequence listing. The SEQ ID NOs of corresponding mRNA constructs comprising said coding sequences comprising suitable 5′-UTRs and 3′-UTRs according to the invention are provided in rows 5 to 16 (row 5: “mRNA UTR a-1”; row 6: “mRNA UTR a-2”; row 7: “mRNA UTR b-4”; row 8: “mRNA UTR c-5”; row 9: “mRNA UTR d-1”; row 10: “mRNA UTR d-5”; row 11: “mRNA UTR g-4”; row 12: “mRNA UTR h-4”; row 13: “mRNA UTR h-5”; row 14: “mRNA UTR i-2”; row 15: “mRNA UTR i-3” row 16 “mRNA UTR a-4”). For example, for “SS-prME” (column A) the protein has an amino acid sequence according to SEQ ID NOs: 125, 126 and the wt coding sequence has a nucleic acid sequence according to SEQ ID NOs: 162, 163, and the codon modified coding sequences has a nucleic acid sequence according to SEQ ID NOs: 199, 200, 236, 237, 273, 274, 310, 311, 347, 348, 384, 385, 421, 422, 458, 459, 495, 496, and the mRNA sequences with e.g. UTR a-1 combination has an RNA sequence according to SEQ ID NOs: 529, 535, 541, 547, 553, 559, 565, 571, 577, 583. Further information e.g. regarding the type of coding sequence (wt, opt1, opt2, opt3, opt4, opt5, opt6, opt11 etc.) comprised in the mRNA constructs is provided in the <223> identifier of the respective SEQ ID NO in the sequence listing.

TABLE 2BX
mRNA constructs encoding YFV prME

| | | | | | | | | G | H | |
|---|---|---|---|---|---|---|---|---|---|---|
| | | | | | | | | X-SS- | SSjev(V3)- | |
| | | | B | C | D | E | F | prMEdel- | prMEdel- | I |
| | | A | X-SS- | SSjev- | SSjev- | SSIgE- | SSIgE- | stem_TM- | stem_TM- | X-SS- |
| 1 | | SS-prME | prME-XX | prME | prME-XX | prME | prME-XX | JEV | JEV | prME |
| 2 | Protein | 125, 126 | 121 | 136, 137, | 134, 135, | 132, 133 | 130, 131 | 1587 | 1588 | 122 |
| | | | | 140, 141, | 138, 139, | | | | | |
| | | | | 144, 145, | 142, 143, | | | | | |
| | | | | 148, 149, | 146, 147, | | | | | |
| | | | | 152, 153 | 150, 151 | | | | | |
| 3 | CDS | 162, 163 | 158 | 173, 174, | 171, 172, | 169, 170 | 167, 168 | 1589 | 1590 | 159 |
| | wt | | | 177, 178, | 175, 176, | | | | | |
| | | | | 181, 182, | 179, 180, | | | | | |
| | | | | 185, 186, | 183, 184, | | | | | |
| | | | | 189, 190 | 187, 188 | | | | | |
| 4 | CDS | 199, 200, | 195, 232, | 210, 211, | 208, 209, | 206, 207, | 204, 205, | 1591, 1593, | 1592, 1594, | 196, 233, |
| | opt | 236, 237, | 269, 306, | 214, 215, | 212, 213, | 243, 244, | 241, 242, | 1595, 1597, | 1596, 1598, | 270 |
| | | 273, 274, | 343, 380, | 218, 219, | 216, 217, | 280, 281, | 278, 279, | 1599, 1601, | 1600, 1602, | |
| | | 310, 311, | 417, 454, | 222, 223, | 220, 221, | 317, 318, | 315, 316, | 1603, 1605, | 1604, 1606, | |
| | | 347, 348, | 491 | 226, 227, | 224, 225, | 354, 355, | 352, 353, | 1607 | 1608 | |
| | | 384, 385, | | 247, 248, | 245, 246, | 391, 392, | 389, 390, | | | |
| | | 421, 422, | | 251, 252, | 249, 250, | 428, 429, | 426, 427, | | | |
| | | 458, 459, | | 255, 256, | 253, 254, | 465, 466, | 463, 464, | | | |
| | | 495, 496 | | 259, 260, | 257, 258, | 502, 503 | 500, 501 | | | |
| | | | | 263, 264, | 261, 262, | | | | | |
| | | | | 284, 285, | 282, 283, | | | | | |
| | | | | 288, 289, | 286, 287, | | | | | |
| | | | | 292, 293, | 290, 291, | | | | | |
| | | | | 296, 297, | 294, 295, | | | | | |
| | | | | 300, 301, | 298, 299, | | | | | |
| | | | | 321, 322, | 319, 320, | | | | | |
| | | | | 325, 326, | 323, 324, | | | | | |
| | | | | 329, 330, | 327, 328, | | | | | |
| | | | | 333, 334, | 331, 332, | | | | | |
| | | | | 337, 338, | 335, 336, | | | | | |
| | | | | 358, 359, | 356, 357, | | | | | |
| | | | | 362, 363, | 360, 361, | | | | | |
| | | | | 366, 367, | 364, 365, | | | | | |
| | | | | 370, 371, | 368, 369, | | | | | |
| | | | | 374, 375, | 372, 373, | | | | | |
| | | | | 395, 396, | 393, 394, | | | | | |
| | | | | 399, 400, | 397, 398, | | | | | |
| | | | | 403, 404, | 401, 402, | | | | | |
| | | | | 407, 408, | 405, 406, | | | | | |
| | | | | 411, 412, | 409, 410, | | | | | |
| | | | | 432, 433, | 430, 431, | | | | | |
| | | | | 436, 437, | 434, 435, | | | | | |
| | | | | 440, 441, | 438, 439, | | | | | |
| | | | | 444, 445, | 442, 443, | | | | | |
| | | | | 448, 449, | 446, 447, | | | | | |
| | | | | 469, 470, | 467, 468, | | | | | |
| | | | | 473, 474, | 471, 472, | | | | | |
| | | | | 477, 478, | 475, 476, | | | | | |
| | | | | 481, 482, | 479, 480, | | | | | |
| | | | | 485, 486, | 483, 484, | | | | | |
| | | | | 506, 507, | 504, 505, | | | | | |
| | | | | 510, 511, | 508, 509, | | | | | |
| | | | | 514, 515, | 512, 513, | | | | | |
| | | | | 518, 519, | 516, 517, | | | | | |
| | | | | 522, 523 | 520, 521 | | | | | |
| 5 | mRNA | 529, 535, | 528, 534, | 533, 539, | 532, 538, | 531, 537, | 530, 536, | 1609, 1613, | 1610, 1614, | 1611, 1615, |
| | UTR | 541, 547, | 540, 546, | 545, 551, | 544, 550, | 543, 549, | 542, 548, | 1617, 1621, | 1618, 1622, | 1619, 1623, |
| | a-1 | 553, 559, | 552, 558, | 557, 563, | 556, 562, | 555, 561, | 554, 560, | 1625, 1629, | 1626, 1630, | 1627, 1631, |
| | | 565, 571, | 564, 570, | 569, 575, | 568, 574, | 567, 573, | 566, 572, | 1633, 1637, | 1634, 1638, | 1635, 1639, |
| | | 577, 583 | 576, 582, | 581, 587 | 580, 586, | 579, 585 | 578, 584 | 1641, 1645, | 1642, 1646, | 1643, 1647, |
| | | | 1308, 2129, | | 1612, 1616, | | | 2133, 2169, | 2134, 2170, | 2131, 2167, |
| | | | 2130, 2141, | | 1620, 1624, | | | 2145, 2181, | 2146, 2182, | 2143, 2179, |
| | | | 2142, 2153, | | 1628, 1632, | | | 2157, 2193 | 2158, 2194 | 2155, 2191 |
| | | | 2154, 2165, | | 1636, 1640, | | | | | |
| | | | 2166, 2177, | | 1644, 1648, | | | | | |
| | | | 2178, 2189, | | 2132, 2168, | | | | | |
| | | | 2190 | | 2144, 2180, | | | | | |
| | | | | | 2156, 2192 | | | | | |
| 6 | mRNA | 589, 595, | 588, 594, | 593, 599, | 592, 598, | 591, 597, | 590, 596, | 1649, 1653, | 1650, 1654, | 1651, 1655, |
| | UTR | 601, 607, | 600, 606, | 605, 611, | 604, 610, | 603, 609, | 602, 608, | 1657, 1661, | 1658, 1662, | 1659, 1663, |
| | a-2 | 613, 619, | 612, 618, | 617, 623, | 616, 622, | 615, 621, | 614, 620, | 1665, 1669, | 1666, 1670, | 1667, 1671, |
| | | 625, 631, | 624, 630, | 629, 635, | 628, 634, | 627, 633, | 626, 632, | 1673, 1677, | 1674, 1678, | 1675, 1679, |
| | | 637, 643 | 636, 642, | 641, 647 | 640, 646, | 639, 645 | 638, 644 | 1681, 1685 | 1682, 1686 | 1683, 1687 |
| | | | 1309 | | 1652, 1656, | | | | | |
| | | | | | 1660, 1664, | | | | | |
| | | | | | 1668, 1672, | | | | | |
| | | | | | 1676, 1680, | | | | | |
| | | | | | 1684, 1688 | | | | | |
| 7 | mRNA | 649, 655, | 648, 654, | 653, 659, | 652, 658, | 651, 657, | 650, 656, | 1689, 1693, | 1690, 1694, | 1691, 1695, |
| | UTR | 661, 667, | 660, 666, | 665, 671, | 664, 670, | 663, 669, | 662, 668, | 1697, 1701, | 1698, 1702, | 1699, 1703, |
| | b-4 | 673, 679, | 672, 678, | 677, 683, | 676, 682, | 675, 681, | 674, 680, | 1705, 1709, | 1706, 1710, | 1707, 1711, |
| | | 685, 691, | 684, 690, | 689, 695, | 688, 694, | 687, 693, | 686, 692, | 1713, 1717, | 1714, 1718, | 1715, 1719, |
| | | 697, 703 | 696, 702, | 701, 707 | 700, 706, | 699, 705 | 698, 704 | 1721, 1725 | 1722, 1726 | 1723, 1727 |
| | | | 1310 | | 1692, 1696, | | | | | |
| | | | | | 1700, 1704, | | | | | |
| | | | | | 1708, 1712, | | | | | |
| | | | | | 1716, 1720, | | | | | |
| | | | | | 1724, 1728 | | | | | |
| 8 | mRNA | 709, 715, | 708, 714, | 713, 719, | 712, 718, | 711, 717, | 710, 716, | 1729, 1733, | 1730, 1734, | 1731, 1735, |
| | UTR | 721, 727, | 720, 726, | 725, 731, | 724, 730, | 723, 729, | 722, 728, | 1737, 1741, | 1738, 1742, | 1739, 1743, |
| | c-5 | 733, 739, | 732, 738, | 737, 743, | 736, 742, | 735, 741, | 734, 740, | 1745, 1749, | 1746, 1750, | 1747, 1751, |
| | | 745, 751, | 744, 750, | 749, 755, | 748, 754, | 747, 753, | 746, 752, | 1753, 1757, | 1754, 1758, | 1755, 1759, |
| | | 757, 763 | 756, 762, | 761, 767 | 760, 766, | 759, 765 | 758, 764 | 1761, 1765 | 1762, 1766 | 1763, 1767 |
| | | | 1311 | | 1732, 1736, | | | | | |
| | | | | | 1740, 1744, | | | | | |
| | | | | | 1748, 1752, | | | | | |
| | | | | | 1756, 1760, | | | | | |
| | | | | | 1764, 1768 | | | | | |
| 9 | mRNA | 769, 775, | 768, 774, | 773, 779, | 772, 778, | 771, 777, | 770, 776, | 1769, 1773, | 1770, 1774, | 1771, 1775, |
| | UTR | 781, 787, | 780, 786, | 785, 791, | 784, 790, | 783, 789, | 782, 788, | 1777, 1781, | 1778, 1782, | 1779, 1783, |
| | d-1 | 793, 799, | 792, 798, | 797, 803, | 796, 802, | 795, 801, | 794, 800, | 1785, 1789, | 1786, 1790, | 1787, 1791, |
| | | 805, 811, | 804, 810, | 809, 815, | 808, 814, | 807, 813, | 806, 812, | 1793, 1797, | 1794, 1798, | 1795, 1799, |
| | | 817, 823 | 816, 822, | 821, 827 | 820, 826, | 819, 825 | 818, 824 | 1801, 1805 | 1802, 1806 | 1803, 1807 |
| | | | 1312 | | 1772, 1776, | | | | | |
| | | | | | 1780, 1784, | | | | | |
| | | | | | 1788, 1792, | | | | | |
| | | | | | 1796, 1800, | | | | | |
| | | | | | 1804, 1808 | | | | | |
| 10 | mRNA | 829, 835, | 828, 834, | 833, 839, | 832, 838, | 831, 837, | 830, 836, | 1809, 1813, | 1810, 1814, | 1811, 1815, |
| | UTR | 841, 847, | 840, 846, | 845, 851, | 844, 850, | 843, 849, | 842, 848, | 1817, 1821, | 1818, 1822, | 1819, 1823, |
| | d-5 | 853, 859, | 852, 858, | 857, 863, | 856, 862, | 855, 861, | 854, 860, | 1825, 1829, | 1826, 1830, | 1827, 1831, |
| | | 865, 871, | 864, 870, | 869, 875, | 868, 874, | 867, 873, | 866, 872, | 1833, 1837, | 1834, 1838, | 1835, 1839, |
| | | 877, 883 | 876, 882, | 881, 887 | 880, 886, | 879, 885 | 878, 884 | 1841, 1845 | 1842, 1846 | 1843, 1847 |
| | | | 1313 | | 1812, 1816, | | | | | |
| | | | | | 1820, 1824, | | | | | |
| | | | | | 1828, 1832, | | | | | |
| | | | | | 1836, 1840, | | | | | |
| | | | | | 1844, 1848 | | | | | |
| 11 | mRNA | 889, 895, | 888, 894, | 893, 899, | 892, 898, | 891, 897, | 890, 896, | 1849, 1853, | 1850, 1854, | 1851, 1855, |
| | UTR | 901, 907, | 900, 906, | 905, 911, | 904, 910, | 903, 909, | 902, 908, | 1857, 1861, | 1858, 1862, | 1859, 1863, |
| | g-4 | 913, 919, | 912, 918, | 917, 923, | 916, 922, | 915, 921, | 914, 920, | 1865, 1869, | 1866, 1870, | 1867, 1871, |
| | | 925, 931, | 924, 930, | 929, 935, | 928, 934, | 927, 933, | 926, 932, | 1873, 1877, | 1874, 1878, | 1875, 1879, |
| | | 937, 943 | 936, 942, | 941, 947 | 940, 946, | 939, 945 | 938, 944 | 1881, 1885 | 1882, 1886 | 1883, 1887 |
| | | | 1314 | | 1852, 1856, | | | | | |
| | | | | | 1860, 1864, | | | | | |
| | | | | | 1868, 1872, | | | | | |
| | | | | | 1876, 1880, | | | | | |
| | | | | | 1884, 1888 | | | | | |
| 12 | mRNA | 949, 955, | 948, 954, | 953, 959, | 952, 958, | 951, 957, | 950, 956, | 1889, 1893, | 1890, 1894, | 1891, 1895, |
| | UTR | 961, 967, | 960, 966, | 965, 971, | 964, 970, | 963, 969, | 962, 968, | 1897, 1901, | 1898, 1902, | 1899, 1903, |
| | h-4 | 973, 979, | 972, 978, | 977, 983, | 976, 982, | 975, 981, | 974, 980, | 1905, 1909, | 1906, 1910, | 1907, 1911, |
| | | 985, 991, | 984, 990, | 989, 995, | 988, 994, | 987, 993, | 986, 992, | 1913, 1917, | 1914, 1918, | 1915, 1919, |
| | | 997, 1003 | 996, 1002, | 1001, 1007 | 1000, 1006, | 999, 1005 | 998, 1004 | 1921, 1925 | 1922, 1926 | 1923, 1927 |
| | | | 1315 | | 1892, 1896, | | | | | |
| | | | | | 1900, 1904, | | | | | |
| | | | | | 1908, 1912, | | | | | |
| | | | | | 1916, 1920, | | | | | |
| | | | | | 1924, 1928 | | | | | |
| 13 | mRNA | 1009, 1015, | 1008, 1014, | 1013, 1019, | 1012, 1018, | 1011, 1017, | 1010, 1016, | 1929, 1933, | 1930, 1934, | 1931, 1935, |
| | UTR | 1021, 1027, | 1020, 1026, | 1025, 1031, | 1024, 1030, | 1023, 1029, | 1022, 1028, | 1937, 1941, | 1938, 1942, | 1939, 1943, |
| | h-5 | 1033, 1039, | 1032, 1038, | 1037, 1043, | 1036, 1042, | 1035, 1041, | 1034, 1040, | 1945, 1949, | 1946, 1950, | 1947, 1951, |
| | | 1045, 1051, | 1044, 1050, | 1049, 1055, | 1048, 1054, | 1047, 1053, | 1046, 1052, | 1953, 1957, | 1954, 1958, | 1955, 1959, |
| | | 1057, 1063 | 1056, 1062, | 1061, 1067 | 1060, 1066, | 1059, 1065 | 1058, 1064 | 1961, 1965 | 1962, 1966 | 1963, 1967 |
| | | | 1316 | | 1932, 1936, | | | | | |
| | | | | | 1940, 1944, | | | | | |
| | | | | | 1948, 1952, | | | | | |
| | | | | | 1956, 1960, | | | | | |
| | | | | | 1964, 1968 | | | | | |
| 14 | mRNA | 1069, 1075, | 1068, 1074, | 1073, 1079, | 1072, 1078, | 1071, 1077, | 1070, 1076, | 1969, 1973, | 1970, 1974, | 1971, 1975, |
| | UTR | 1081, 1087, | 1080, 1086, | 1085, 1091, | 1084, 1090, | 1083, 1089, | 1082, 1088, | 1977, 1981, | 1978, 1982, | 1979, 1983, |
| | i-2 | 1093, 1099, | 1092, 1098, | 1097, 1103, | 1096, 1102, | 1095, 1101, | 1094, 1100, | 1985, 1989, | 1986, 1990, | 1987, 1991, |
| | | 1105, 1111, | 1104, 1110, | 1109, 1115, | 1108, 1114, | 1107, 1113, | 1106, 1112, | 1993, 1997, | 1994, 1998, | 1995, 1999, |
| | | 1117, 1123, | 1116, 1122, | 1121, 1127, | 1120, 1126, | 1119, 1125, | 1118, 1124, | 2001, 2005, | 2002, 2006, | 2003, 2007, |
| | | 1129, 1135, | 1128, 1134, | 1133, 1139, | 1132, 1138, | 1131, 1137, | 1130, 1136, | 2009, 2013, | 2010, 2014, | 2011, 2015, |
| | | 1141, 1147, | 1140, 1146, | 1145, 1151, | 1144, 1150, | 1143, 1149, | 1142, 1148, | 2017, 2021, | 2018, 2022, | 2019, 2023, |
| | | 1153, 1159, | 1152, 1158, | 1157, 1163, | 1156, 1162, | 1155, 1161, | 1154, 1160, | 2025, 2029, | 2026, 2030, | 2027, 2031, |
| | | 1165, 1171, | 1164, 1170, | 1169, 1175, | 1168, 1174, | 1167, 1173, | 1166, 1172, | 2033, 2037, | 2034, 2038, | 2035, 2039, |
| | | 1177, 1183 | 1176, 1182, | 1181, 1187 | 1180, 1186, | 1179, 1185 | 1178, 1184 | 2041, 2045 | 2042, 2046 | 2043, 2047 |
| | | | 1317, 1318 | | 1972, 1976, | | | | | |
| | | | | | 1980, 1984, | | | | | |
| | | | | | 1988, 1992, | | | | | |
| | | | | | 1996, 2000, | | | | | |
| | | | | | 2004, 2008, | | | | | |
| | | | | | 2012, 2016, | | | | | |
| | | | | | 2020, 2024, | | | | | |
| | | | | | 2028, 2032, | | | | | |
| | | | | | 2036, 2040, | | | | | |
| | | | | | 2044, 2048 | | | | | |
| 15 | mRNA | 1189, 1195, | 1188, 1194, | 1193, 1199, | 1192, 1198, | 1191, 1197, | 1190, 1196, | 2049, 2053, | 2050, 2054, | 2051, 2055, |
| | UTR | 1201, 1207, | 1200, 1206, | 1205, 1211, | 1204, 1210, | 1203, 1209, | 1202, 1208, | 2057, 2061, | 2058, 2062, | 2059, 2063, |
| | i-3 | 1213, 1219, | 1212, 1218, | 1217, 1223, | 1216, 1222, | 1215, 1221, | 1214, 1220, | 2065, 2069, | 2066, 2070, | 2067, 2071, |
| | | 1225, 1231, | 1224, 1230, | 1229, 1235, | 1228, 1234, | 1227, 1233, | 1226, 1232, | 2073, 2077, | 2074, 2078, | 2075, 2079, |
| | | 1237, 1243 | 1236, 1242, | 1241, 1247 | 1240, 1246, | 1239, 1245 | 1238, 1244 | 2081, 2085, | 2082, 2086, | 2083, 2087, |
| | | | 1319, 2135, | | 2052, 2056, | | | 2139, 2175, | 2140, 2176, | 2137, 2173, |
| | | | 2136, 2147, | | 2060, 2064, | | | 2151, 2187, | 2152, 2188, | 2149, 2185, |
| | | | 2148, 2159, | | 2068, 2072, | | | 2163, 2199 | 2164, 2200 | 2161, 2197 |
| | | | 2160, 2171, | | 2076, 2080, | | | | | |
| | | | 2172, 2183, | | 2084, 2088, | | | | | |
| | | | 2184, 2195, | | 2138, 2174, | | | | | |
| | | | 2196 | | 2150, 2186, | | | | | |
| | | | | | 2162, 2198 | | | | | |
| 16 | mRNA | 1249, 1255, | 1248, 1254, | 1253, 1259, | 1252, 1258, | 1251, 1257, | 1250, 1256, | 2089, 2093, | 2090, 2094, | 2091, 2095, |
| | UTR | 1261, 1267, | 1260, 1266, | 1265, 1271, | 1264, 1270, | 1263, 1269, | 1262, 1268, | 2097, 2101, | 2098, 2102, | 2099, 2103, |
| | a-4 | 1273, 1279, | 1272, 1278, | 1277, 1283, | 1276, 1282, | 1275, 1281, | 1274, 1280, | 2105, 2109, | 2106, 2110, | 2107, 2111, |
| | | 1285, 1291, | 1284, 1290, | 1289, 1295, | 1288, 1294, | 1287, 1293, | 1286, 1292, | 2113, 2117, | 2114, 2118, | 2115, 2119, |
| | | 1297, 1303 | 1296, 1302, | 1301, 1307 | 1300, 1306, | 1299, 1305 | 1298, 1304 | 2121, 2125 | 2122, 2126 | 2123, 2127 |
| | | | 1320 | | 2092, 2096, | | | | | |
| | | | | | 2100, 2104, | | | | | |
| | | | | | 2108, 2112, | | | | | |
| | | | | | 2116, 2120, | | | | | |
| | | | | | 2124, 2128 | | | | | |

[0353] In preferred embodiments, the artificial RNA comprises or consists of an RNA sequence which is identical or at least 70%, 80%, 85%, 86%, 87%, 88%, 89%, 90%, 91%, 92%, 93%, 94%, 95%, 96%, 97%, 98%, or 99% identical to a nucleic acid sequence selected from the group consisting of SEQ ID NOs: 528-1307, 1609-2200 or a fragment or variant of any of these sequences.

[0354] In particularly preferred embodiments, the artificial RNA comprises

(a) at least one heterologous 5′ untranslated region (5′-UTR) and/or at least one heterologous 3′ untranslated region (3′-UTR) and
(b) at least one coding sequence operably linked to said 3′-UTR and/or 5′-UTR encoding at least one antigenic peptide or protein derived from a YFV prME polyprotein or a fragment or variant thereof, wherein
said artificial RNA comprises or consists of an RNA sequence which is identical or at least 70%, 80%, 85%, 86%, 87%, 88%, 89%, 90%, 91%, 92%, 93%, 94%, 95%, 96%, 97%, 98%, or 99% identical to a nucleic acid sequence selected from the group consisting of SEQ ID NOs: 528-587, 1609-1648, 2129-2134, 2141-2146, 2153-2158, 2165-2170, 2177-2182, 2189-2194 or a fragment or variant of any of these sequences;
said artificial RNA comprises or consists of an RNA sequence which is identical or at least 70%, 80%, 85%, 86%, 87%, 88%, 89%, 90%, 91%, 92%, 93%, 94%, 95%, 96%, 97%, 98%, or 99% identical to a nucleic acid sequence selected from the group consisting of SEQ ID NOs: 1248-1307, 2089-2128 or a fragment or variant of any of these sequences;
said artificial RNA comprises or consists of an RNA sequence which is identical or at least 70%, 80%, 85%, 86%, 87%, 88%, 89%, 90%, 91%, 92%, 93%, 94%, 95%, 96%, 97%, 98%, or 99% identical to a nucleic acid sequence selected from the group consisting of SEQ ID NOs: 648-707, 1689-1728 or a fragment or variant of any of these sequences;
said artificial RNA comprises or consists of an RNA sequence which is identical or at least 70%, 80%, 85%, 86%, 87%, 88%, 89%, 90%, 91%, 92%, 93%, 94%, 95%, 96%, 97%, 98%, or 99% identical to a nucleic acid sequence selected from the group consisting of SEQ ID NOs: 708-767, 1729-1768 or a fragment or variant of any of these sequences; or
said artificial RNA comprises or consists of an RNA sequence which is identical or at least 70%, 80%, 85%, 86%, 87%, 88%, 89%, 90%, 91%, 92%, 93%, 94%, 95%, 96%, 97%, 98%, or 99% identical to a nucleic acid sequence selected from the group consisting of SEQ ID NOs: 888-947, 1849-1888 or a fragment or variant of any of these sequences.

[0355] Further preferred YFV polypeptide, nucleic acid and mRNA sequences are provided in Table 2BY. Therein, Columns A to C represent a specific suitable construct of the invention derived from NS1 of YFV 17D. The protein designs are indicated in row 1, the specific protein SEQ ID NOs as provided in the sequence listing are in row 2 (“protein”), e.g., for “eSS-NS1-Y” (column A) the protein is SEQ ID NOs: 2201. The SEQ ID NOs of corresponding wild type coding sequences for each protein construct are provided in row 3 (“CDS wt”), e.g., for “eSS-NS1-Y” (column A) the protein is SEQ ID NOs: 2201 and the wt coding sequence is SEQ ID NOs: 2206. The SEQ ID NOs of corresponding codon modified coding sequences (opt1, opt2, opt3, opt4, opt5, opt6, opt11 etc) for each protein construct are provided in row 4 (“CDS opt”), e.g., for “eSS-NS1-Y” (column A) the protein is SEQ ID NOs: 2201 and the wt coding sequence is SEQ ID NOs: 2206, and the codon modified coding sequences are SEQ ID NOs: 2211, 2216, 2221, 2226, 2231, 2236, 2241. Further information e.g. regarding the type of codon modified coding sequence (opt1, opt2, opt3, opt4, opt5, opt6, opt11 etc.) is provided in the <223> identifier of the respective SEQ ID NO in the sequence listing. The SEQ ID NOs of corresponding mRNA constructs comprising said coding sequences comprising suitable 5′-UTRs and 3′-UTRs according to the invention are provided in rows 5 to 16 (row 5: “mRNA UTR a-1”; row 6: “mRNA UTR a-2”; row 7: “mRNA UTR b-4”; row 8: “mRNA UTR c-5”; row 9: “mRNA UTR d-1”; row 10: “mRNA UTR d-5”; row 11: “mRNA UTR g-4”; row 12: “mRNA UTR h-4”; row 13: “mRNA UTR h-5”; row 14: “mRNA UTR i-2”; row 15: “mRNA UTR i-3” row 16 “mRNA UTR a-4”). For example, for “eSS-NS1-Y” (column A) the protein has an amino acid sequence according to SEQ ID NOs: 2201 and the wt coding sequence has a nucleic acid sequence according to SEQ ID NOs: 2206, and the codon modified coding sequences has a nucleic acid sequence according to SEQ ID NOs: 2211, 2216, 2221, 2226, 2231, 2236, 2241, and the mRNA sequences with e.g. UTR a-1 combination has an RNA sequence according to SEQ ID NOs: 2246, 2249, 2252, 2255, 2258, 2261, 2264, 2267, 2558, 2576, 2564, 2582, 2570, 2588. Further information e.g. regarding the type of coding sequence (wt, opt1, opt2, opt3, opt4, opt5, opt6, opt11 etc.) comprised in the mRNA constructs is provided in the <223> identifier of the respective SEQ ID NO in the sequence listing.

TABLE 2BY
mRNA constructs encoding YFV NS1

| | | A | B | C |
|---|---|---|---|---|
| 1 | | eSS-NS1-Y | eSS-NS1 | SSIgE-NS1 |
| 2 | Protein | 2201 | 2202 | 2205 |
| 3 | CDS wt | 2206 | 2207 | 2210 |
| 4 | CDS opt | 2211, 2216, 2221, 2226, | 2212, 2217, 2222, 2227, | 2215, 2220, 2225, 2230, |
| | | 2231, 2236, 2241 | 2232, 2237, 2242 | 2235, 2240, 2245 |
| 5 | mRNA UTR | 2246, 2249, 2252, 2255, | 2247, 2250, 2253, 2256, | 2248, 2251, 2254, 2257, |
| | a-1 | 2258, 2261, 2264, 2267, | 2259, 2262, 2265, 2268, | 2260, 2263, 2266, 2269, |
| | | 2558, 2576, 2564, 2582, | 2559, 2577, 2565, 2583, | 2560, 2578, 2566, 2584, |
| | | 2570, 2588 | 2571, 2589 | 2572, 2590 |
| 6 | mRNA UTR | 2270, 2273, 2276, 2279, | 2271, 2274, 2277, 2280, | 2272, 2275, 2278, 2281, |
| | a-2 | 2282, 2285, 2288, 2291 | 2283, 2286, 2289, 2292 | 2284, 2287, 2290, 2293 |
| 7 | mRNA UTR | 2294, 2297, 2300, 2303, | 2295, 2298, 2301, 2304, | 2296, 2299, 2302, 2305, |
| | b-4 | 2306, 2309, 2312, 2315 | 2307, 2310, 2313, 2316 | 2308, 2311, 2314, 2317 |
| 8 | mRNA UTR | 2318, 2321, 2324, 2327, | 2319, 2322, 2325, 2328, | 2320, 2323, 2326, 2329, |
| | c-5 | 2330, 2333, 2336, 2339 | 2331, 2334, 2337, 2340 | 2332, 2335, 2338, 2341 |
| 9 | mRNA UTR | 2342, 2345, 2348, 2351, | 2343, 2346, 2349, 2352, | 2344, 2347, 2350, 2353, |
| | d-1 | 2354, 2357, 2360, 2363 | 2355, 2358, 2361, 2364 | 2356, 2359, 2362, 2365 |
| 10 | mRNA UTR | 2366, 2369, 2372, 2375, | 2367, 2370, 2373, 2376, | 2368, 2371, 2374, 2377, |
| | d-5 | 2378, 2381, 2384, 2387 | 2379, 2382, 2385, 2388 | 2380, 2383, 2386, 2389 |
| 11 | mRNA UTR | 2390, 2393, 2396, 2399, | 2391, 2394, 2397, 2400, | 2392, 2395, 2398, 2401, |
| | g-4 | 2402, 2405, 2408, 2411 | 2403, 2406, 2409, 2412 | 2404, 2407, 2410, 2413 |
| 12 | mRNA UTR | 2414, 2417, 2420, 2423, | 2415, 2418, 2421, 2424, | 2416, 2419, 2422, 2425, |
| | h-4 | 2426, 2429, 2432, 2435 | 2427, 2430, 2433, 2436 | 2428, 2431, 2434, 2437 |
| 13 | mRNA UTR | 2438, 2441, 2444, 2447, | 2439, 2442, 2445, 2448, | 2440, 2443, 2446, 2449, |
| | h-5 | 2450, 2453, 2456, 2459 | 2451, 2454, 2457, 2460 | 2452, 2455, 2458, 2461 |
| 14 | mRNA UTR | 2462, 2465, 2468, 2471, | 2463, 2466, 2469, 2472, | 2464, 2467, 2470, 2473, |
| | i-2 | 2474, 2477, 2480, 2483, | 2475, 2478, 2481, 2484, | 2476, 2479, 2482, 2485, |
| | | 2486, 2489, 2492, 2495, | 2487, 2490, 2493, 2496, | 2488, 2491, 2494, 2497, |
| | | 2498, 2501, 2504, 2507 | 2499, 2502, 2505, 2508 | 2500, 2503, 2506, 2509 |
| 15 | mRNA UTR | 2510, 2513, 2516, 2519, | 2511, 2514, 2517, 2520, | 2512, 2515, 2518, 2521, |
| | i-3 | 2522, 2525, 2528, 2531, | 2523, 2526, 2529, 2532, | 2524, 2527, 2530, 2533, |
| | | 2561, 2579, 2567, 2585, | 2562, 2580, 2568, 2586, | 2563, 2581, 2569, 2587, |
| | | 2573, 2591 | 2574, 2592 | 2575, 2593 |
| 16 | mRNA UTR | 2534, 2537, 2540, 2543, | 2535, 2538, 2541, 2544, | 2536, 2539, 2542, 2545, |
| | a-4 | 2546, 2549, 2552, 2555 | 2547, 2550, 2553, 2556 | 2548, 2551, 2554, 2557 |

[0356] In further preferred embodiments, the artificial RNA comprises or consists of an RNA sequence which is identical or at least 70%, 80%, 85%, 86%, 87%, 88%, 89%, 90%, 91%, 92%, 93%, 94%, 95%, 96%, 97%, 98%, or 99% identical to a nucleic acid sequence selected from the group consisting of SEQ ID NOs: 2246-2593 or a fragment or variant of any of these sequences

[0357] In particularly preferred embodiments, the artificial RNA comprises

(a) at least one heterologous 5′ untranslated region (5′-UTR) and/or at least one heterologous 3′ untranslated region (3′-UTR) and
(b) at least one coding sequence operably linked to said 3′-UTR and/or 5′-UTR encoding at least one antigenic peptide or protein derived from a YFV NS1 polyprotein or a fragment or variant thereof, wherein
said artificial RNA comprises or consists of an RNA sequence which is identical or at least 70%, 80%, 85%, 86%, 87%, 88%, 89%, 90%, 91%, 92%, 93%, 94%, 95%, 96%, 97%, 98%, or 99% identical to a nucleic acid sequence selected from the group consisting of SEQ ID NOs: 2246-2269, 2558-2560, 2576-2578, 2564-2566, 2582-2584, 2570-2572, 2588-2590 or a fragment or variant of any of these sequences;
said artificial RNA comprises or consists of an RNA sequence which is identical or at least 70%, 80%, 85%, 86%, 87%, 88%, 89%, 90%, 91%, 92%, 93%, 94%, 95%, 96%, 97%, 98%, or 99% identical to a nucleic acid sequence selected from the group consisting of SEQ ID NOs: 2534-2557 or a fragment or variant of any of these sequences;
said artificial RNA comprises or consists of an RNA sequence which is identical or at least 70%, 80%, 85%, 86%, 87%, 88%, 89%, 90%, 91%, 92%, 93%, 94%, 95%, 96%, 97%, 98%, or 99% identical to a nucleic acid sequence selected from the group consisting of SEQ ID NOs: 2294-2317 or a fragment or variant of any of these sequences;
said artificial RNA comprises or consists of an RNA sequence which is identical or at least 70%, 80%, 85%, 86%, 87%, 88%, 89%, 90%, 91%, 92%, 93%, 94%, 95%, 96%, 97%, 98%, or 99% identical to a nucleic acid sequence selected from the group consisting of SEQ ID NOs: 2510-2533, 2561-2563, 2579-2581, 2567-2569, 2585-2587, 2573-2575, 2591-2593 or a fragment or variant of any of these sequences;
said artificial RNA comprises or consists of an RNA sequence which is identical or at least 70%, 80%, 85%, 86%, 87%, 88%, 89%, 90%, 91%, 92%, 93%, 94%, 95%, 96%, 97%, 98%, or 99% identical to a nucleic acid sequence selected from the group consisting of SEQ ID NOs: 2318-2341 or a fragment or variant of any of these sequences; or
said artificial RNA comprises or consists of an RNA sequence which is identical or at least 70%, 80%, 85%, 86%, 87%, 88%, 89%, 90%, 91%, 92%, 93%, 94%, 95%, 96%, 97%, 98%, or 99% identical to a nucleic acid sequence selected from the group consisting of SEQ ID NOs: 2390-2413 or a fragment or variant of any of these sequences.

### Composition:

[0358] A second aspect relates to a composition comprising at least one artificial RNA of the first aspect.

[0359] In a preferred embodiment of the second aspect, the composition comprises at least one artificial RNA of the first aspect and, optionally, at least one pharmaceutically acceptable carrier.

[0360] The term “pharmaceutically acceptable carrier” as used herein preferably includes the liquid or non-liquid basis of the composition. If the composition is provided in liquid form, the carrier will preferably be water, typically pyrogen-free water; isotonic saline or buffered (aqueous) solutions, e.g. phosphate, citrate etc. buffered solutions. Water or preferably a buffer, more preferably an aqueous buffer, may be used, containing a sodium salt, preferably at least 50 mM of a sodium salt, a calcium salt, preferably at least 0.01 mM of a calcium salt, and optionally a potassium salt, preferably at least 3 mM of a potassium salt. According to a preferred embodiment, the sodium, calcium and, optionally, potassium salts may occur in the form of their halogenides, e.g. chlorides, iodides, or bromides, in the form of their hydroxides, carbonates, hydrogen carbonates, or sulfates, etc. Without being limited thereto, examples of sodium salts include e.g. NaCl, NaI, NaBr, Na₂CO₃, NaHCO₃, Na₂SO₄, examples of the optional potassium salts include e.g. KCl, KI, KBr, K₂CO₃, KHCO₃, K₂SO₄, and examples of calcium salts include e.g. CaCl₂), Cal₂, CaBr₂, CaCO₃, CaSO₄, Ca(OH)₂. Furthermore, organic anions of the aforementioned cations may be contained in the buffer.

[0361] Furthermore, one or more compatible solid or liquid fillers or diluents or encapsulating compounds may be used as well, which are suitable for administration to a person. The term “compatible” as used herein means that the constituents of the composition are capable of being mixed with the at least one RNA of the composition, in such a manner that no interaction occurs, which would substantially reduce the biological activity or the pharmaceutical effectiveness of the composition under typical use conditions. Pharmaceutically acceptable carriers, fillers and diluents must have sufficiently high purity and sufficiently low toxicity to make them suitable for administration to a person to be treated. Compounds which may be used as pharmaceutically acceptable carriers, fillers or constituents thereof are sugars, such as, for example, lactose, glucose, trehalose and sucrose; starches, such as, for example, corn starch or potato starch; dextrose; cellulose and its derivatives, such as, for example, sodium carboxymethylcellulose, ethylcellulose, cellulose acetate; powdered tragacanth; malt; gelatin; tallow; solid glidants, such as, for example, stearic acid, magnesium stearate; calcium sulfate; vegetable oils, such as, for example, groundnut oil, cottonseed oil, sesame oil, olive oil, corn oil and oil from theobroma; polyols, such as, for example, polypropylene glycol, glycerol, sorbitol, mannitol and polyethylene glycol; alginic acid.

[0362] Further additives, which may be included in the composition are emulsifiers, such as, for example, Tween; wetting agents, such as, for example, sodium lauryl sulfate; colouring agents; taste-imparting agents, pharmaceutical carriers; tablet-forming agents; stabilizers; antioxidants; preservatives.

[0363] In embodiments, the composition as defined herein may comprise a plurality or at least more than one of the artificial RNAs as defined in the context of the first aspect of the invention.

[0364] In embodiments, the composition as defined herein may comprise a plurality or at least more than one of the artificial RNAs as defined in the context of the first aspect of the invention and at least one further artificial RNAs.

[0365] Notably, embodiments relating to the artificial RNA of the first aspect may likewise be read on and be understood as suitable embodiments of the at least one further artificial RNA of the second aspect (e.g., embodiments relating to UTR combinations, cds optimizations, histone stem loop, PolyA, PolyC, cap structure, mRNA structure, mRNA production and mRNA purification etc.).

[0366] In various embodiments, the at least one artificial RNA of the first aspect and the at least one further artificial RNA as specified herein is derived from different YF viruses.

[0367] In preferred embodiments, the at least one artificial RNA of the first aspect and the at least one further artificial RNA as specified herein is derived from the same YF virus.

[0368] In preferred embodiments, the at least one artificial RNA of the first aspect is derived from YF 17D and the at least one further artificial RNA as specified herein is derived from YF 17D.

[0369] In embodiments, the at least one RNA comprised in the composition is a bi- or multicistronic nucleic acid, particularly a bi- or multicistronic nucleic acid as defined herein, which encodes the at least two, three, four, five, six, seven, eight, nine, ten, eleven or twelve distinct antigenic peptides or protein derived from the same YFV and/or a different YFV.

[0370] In embodiment, the composition may comprise at least 2, 3, 4, 5, 6, 7, 8, 9, 10 or even more different artificial RNAs as defined in the context of the first aspect of the invention each encoding at least one antigenic peptide or protein derived from genetically the same YFV or a fragment or variant thereof. The terms “same” or “same YFV” as used in the context of a virus, e.g. “same virus”, have to be understood as genetically the same. Particularly, said (genetically) same virus expresses the same proteins or peptides, wherein all proteins or peptides have the same amino acid sequence. Particularly, said (genetically) same YFV express essentially the same proteins, peptides or polyproteins, wherein these protein, peptide or polyproteins preferably do not differ in their amino acid sequence(s).

[0371] In embodiments, the composition comprises at least 2, 3, 4, 5, 6, 7, 8, 9, 10 or even more different RNAs as defined in the context of the first aspect of the invention each encoding at least one peptide or protein derived from a genetically different YFV or a fragment or variant thereof. The terms “different” or “different YFV” as used throughout the present specification in the context of a virus, e.g. “different” virus, has to be understood as the difference between at least two respective viruses, wherein the difference is manifested on the RNA genome of the respective different virus. Particularly, said (genetically) different YFV express at least one different protein, peptide or polyprotein, wherein the at least one different protein, peptide or polyprotein preferably differs in at least one amino acid.

[0372] In particularly preferred embodiments, the composition comprises at least one YFV prME RNA constructs as defined in the context of the first aspect of the invention (preferably any one selected from SEQ ID NOs: 528-1320, 1609-2200) and, in addition, at least 1, 2, 3, 4, 5, 6, 7 or 8 YFV RNA constructs encoding another YFV protein (e.g. NS1, NS2), preferably a YFV RNA constructs comprising a nucleic acid sequence selected from SEQ ID NOs: 57-540, 587-954 of patent application EP17207141.7 and/or a nucleic acid sequence comprising a coding sequence encoding an amino acid sequence selected from SEQ ID NOs: 23-56, 541-586 of patent application EP17207141.7.

[0373] In a preferred embodiment in that context, the composition comprises one YFV prME RNA constructs as defined herein in the context of the first aspect and, in addition, one YFV NS1 RNA construct as defined in the context of the first aspect. In a preferred embodiment in that context, the composition comprises one YFV prME RNA construct as defined herein and, in addition, on YFV NS2 RNA construct. In a preferred embodiment in that context, the composition comprises one YFV prME RNA constructs as defined herein and, in addition, on YFV NS3 RNA construct. In a preferred embodiment in that context, the composition comprises one YFV prME RNA constructs as defined herein and, in addition, on YFV NS4 RNA construct. In a preferred embodiment in that context, the composition comprises one YFV prME RNA constructs as defined herein and, in addition, on YFV NS5 RNA construct

[0374] In a particularly preferred embodiment in that context, the composition comprises at least one YFV prME RNA construct (as defined in the first aspect) and, in addition, at least one YFV NS1 RNA construct (as defined in the first aspect). The combination of prME and NS1 is advantageous, as NS1 may suitably reduce pathogenesis trough decrease of vascular leakage.

[0375] In a particularly preferred embodiment the composition comprises at least one YFV prME RNA construct, preferably selected from X-SS-prME-XX, X-SS-prME, SS-prME, SSjev(V3)-prME-XX, X-SS-prMEdelstem_TM-JEV or SSjev(V3)-prMEdelstem_TM-JEV and, in addition, at least one YFV NS1 RNA construct, preferably selected from eSS-NS1-Y, eSS-NSE and SSIgE-NS1.

[0376] In various embodiments, different combinations of prME RNA constructs and NS1 RNA constructs are suitably comprised in the composition (as disclosed in Table 2C; combinations 1-18):

TABLE 2C
suitable combinations of prME and NS1 RNA constructs

| | | SEQ | | SEQ |
|---|---|---|---|---|
| Combi- | prME | ID NO: | NS1 | ID NO: |
| nation | Construct | Protein | Construct | Protein |
| 1 | X-SS-prME-XX | 121 | eSS-NS1-Y | 2201 |
| 2 | X-SS-prME-XX | 121 | eSS-NS1 | 2202 |
| 3 | X-SS-prME-XX | 121 | SSIgE-NS1 | 2205 |
| 4 | X-SS-prME | 122 | eSS-NS1-Y | 2201 |
| 5 | X-SS-prME | 122 | eSS-NS1 | 2202 |
| 6 | X-SS-prME | 122 | SSIgE-NS1 | 2205 |
| 7 | SS-prME | 126 | eSS-NS1-Y | 2201 |
| 8 | SS-prME | 126 | eSS-NS1 | 2202 |
| 9 | SS-prME | 126 | SSIgE-NS1 | 2205 |
| 10 | SSjev(V3)-prME-XX | 142 | eSS-NS1-Y | 2201 |
| 11 | SSjev(V3)-prME-XX | 142 | eSS-NS1 | 2202 |
| 12 | SSjev(V3)-prME-XX | 142 | SSIgE-NS1 | 2205 |
| 13 | X-SS-prMEdelstem_TM-JEV | 1587 | eSS-NS1-Y | 2201 |
| 14 | X-SS-prMEdelstem_TM-JEV | 1587 | eSS-NS1 | 2202 |
| 15 | X-SS-prMEdelstem_TM-JEV | 1587 | SSIgE-NS1 | 2205 |
| 16 | SSjev(V3)- | 1588 | eSS-NS1-Y | 2201 |
| | prMEdelstem_TM-JEV | | | |
| 17 | SSjev(V3)- | 1588 | eSS-NS1 | 2202 |
| | prMEdelstem_TM-JEV | | | |
| 18 | SSjev(V3)- | 1588 | SSIgE-NS1 | 2205 |
| | prMEdelstem_TM-JEV | | | |

[0377] In a particularly preferred embodiment, the composition comprises one YFV prME RNA construct and, in addition, one YFV NS1 RNA construct, preferably eSS-NS1 or eSS-NS1-Y.

[0378] In a particularly preferred embodiment, the composition comprises one YFV prME RNA construct and, in addition, one YFV NS1 RNA construct, preferably SSIgE-NS1-Y.

[0379] Accordingly, in preferred embodiments the composition of the second aspect may suitably comprise at least one artificial RNA encoding YF prME (as defined in the first aspect) and at least one artificial RNA comprising at least one coding sequence encoding at least one antigenic peptide or protein derived from YF NS1 (as defined in the first aspect)

[0380] In particularly preferred embodiments, one RNA construct encoding NS1, selected from SEQ ID NOs: 2579, 2588, 2580, 2589, 2581, 2590, and one RNA construct encoding prME, selected from SEQ ID NOs: 1194, 534, 2171, 2190, 2183, 2173, 2191, 1195, 2174, 2192, 2175, 2193, 2176, 2194, are comprised in the composition of the invention.

[0381] In a preferred embodiment, one RNA construct encoding NS1, SEQ ID NOs: 2579, and one RNA construct encoding prME, selected from SEQ ID NOs: 1194, 534, 2171, 2190, 2183, 2173, 2191, 1195, 2174, 2192, 2175, 2193, 2176, 2194, are comprised in the composition of the invention.

[0382] In a preferred embodiment, one RNA construct encoding NS1, SEQ ID NOs: 2588, and one RNA construct encoding prME, selected from SEQ ID NOs: 1194, 534, 2171, 2190, 2183, 2173, 2191, 1195, 2174, 2192, 2175, 2193, 2176, 2194, are comprised in the composition of the invention.

[0383] In a preferred embodiment, one RNA construct encoding NS1, SEQ ID NOs: 2580, and one RNA construct encoding prME, selected from SEQ ID NOs: 1194, 534, 2171, 2190, 2183, 2173, 2191, 1195, 2174, 2192, 2175, 2193, 2176, 2194, are comprised in the composition of the invention.

[0384] In a preferred embodiment, one RNA construct encoding NS1, SEQ ID NOs: 2589, and one RNA construct encoding prME, selected from SEQ ID NOs: 1194, 534, 2171, 2190, 2183, 2173, 2191, 1195, 2174, 2192, 2175, 2193, 2176, 2194, are comprised in the composition of the invention.

[0385] In a preferred embodiment, one RNA construct encoding NS1, SEQ ID NOs: 2581, and one RNA construct encoding prME, selected from SEQ ID NOs: 1194, 534, 2171, 2190, 2183, 2173, 2191, 1195, 2174, 2192, 2175, 2193, 2176, 2194, are comprised in the composition of the invention.

[0386] In a preferred embodiment, one RNA construct encoding NS1, SEQ ID NOs: 2590, and one RNA construct encoding prME, selected from SEQ ID NOs: 1194, 534, 2171, 2190, 2183, 2173, 2191, 1195, 2174, 2192, 2175, 2193, 2176, 2194, are comprised in the composition of the invention.

[0387] It has to be understood that in the context of the invention, certain combinations of coding sequences may be generated by any combination of monocistronic, bicistronic and multicistronic artificial nucleic acids and/or multi-antigen-constructs/nucleic acid to obtain a nucleic acid composition encoding multiple antigenic peptides or proteins as defined herein.

[0388] Furthermore, one or more compatible solid or liquid fillers or diluents or encapsulating compounds may be used as well, which are suitable for administration to a person. The term “compatible” as used herein means that the constituents of the composition are capable of being mixed with the at least one RNA and, optionally, the further artificial RNA of the composition, in such a manner that no interaction occurs, which would substantially reduce the biological activity or the pharmaceutical effectiveness of the composition under typical use conditions. Pharmaceutically acceptable carriers, fillers and diluents must have sufficiently high purity and sufficiently low toxicity to make them suitable for administration to a person to be treated. Compounds which may be used as pharmaceutically acceptable carriers, fillers or constituents thereof are sugars, such as, for example, lactose, glucose, trehalose and sucrose; starches, such as, for example, corn starch or potato starch; dextrose; cellulose and its derivatives, such as, for example, sodium carboxymethylcellulose, ethylcellulose, cellulose acetate; powdered tragacanth; malt; gelatin; tallow; solid glidants, such as, for example, stearic acid, magnesium stearate; calcium sulfate; vegetable oils, such as, for example, groundnut oil, cottonseed oil, sesame oil, olive oil, corn oil and oil from theobroma; polyols, such as, for example, polypropylene glycol, glycerol, sorbitol, mannitol and polyethylene glycol; alginic acid.

[0389] Further additives, which may be included in the composition are emulsifiers, such as, for example, Tween;

[0390] wetting agents, such as, for example, sodium lauryl sulfate; colouring agents; taste-imparting agents, pharmaceutical carriers; tablet-forming agents; stabilizers; antioxidants; preservatives.

[0391] In a preferred embodiment of the second aspect, the at least one artificial RNA of the first aspect is complexed or associated with or at least partially complexed or partially associated with one or more cationic or polycationic compound, preferably cationic or polycationic polymer, cationic or polycationic polysaccharide, cationic or polycationic lipid, cationic or polycationic protein, cationic or polycationic peptide, or any combinations thereof.

[0392] The term “cationic or polycationic compound” as used herein will be recognized and understood by the person of ordinary skill in the art, and are for example intended to refer to a charged molecule, which is positively charged at a pH value ranging from about 1 to 9, at a pH value ranging from about 3 to 8, at a pH value ranging from about 4 to 8, at a pH value ranging from about 5 to 8, more preferably at a pH value ranging from about 6 to 8, even more preferably at a pH value ranging from about 7 to 8, most preferably at a physiological pH, e.g. ranging from about 7.2 to about 7.5. Accordingly, a cationic component, e.g. a cationic peptide, cationic protein, cationic polymer, cationic polysaccharide, cationic lipid may be any positively charged compound or polymer which is positively charged under physiological conditions. A “cationic or polycationic peptide or protein” may contain at least one positively charged amino acid, or more than one positively charged amino acid, e.g. selected from Arg, His, Lys or Orn. Accordingly, “polycationic” components are also within the scope exhibiting more than one positive charge under the given conditions.

[0393] Cationic or polycationic compounds, being particularly preferred in this context may be selected from the following list of cationic or polycationic peptides or proteins of fragments thereof: protamine, nucleoline, spermine or spermidine, or other cationic peptides or proteins, such as poly-L-lysine (PLL), poly-arginine, basic polypeptides, cell penetrating peptides (CPPB), including HIV-binding peptides, HIV-1 Tat (HIV), Tat-derived peptides, Penetratin, VP22 derived or analog peptides, HSV VP22 (Herpes simplex), MAP, KALA or protein transduction domains (PTDs), PpT620, prolin-rich peptides, arginine-rich peptides, lysine-rich peptides, MPG-peptide(s), Pep-1, L-oligomers, Calcitonin peptide(s), Antennapedia-derived peptides, pAntp, 051, FGF, Lactoferrin, Transportan, Buforin-2, Bac715-24, SynB, SynB(1), pVEC, hCT-derived peptides, SAP, or histones. More preferably, the nucleic acid as defined herein, preferably the mRNA as defined herein, is complexed with one or more polycations, preferably with protamine or oligofectamine, most preferably with protamine.

[0394] In a preferred embodiment of the second aspect, the at least one artificial RNA of the first aspect is complexed with protamine.

[0395] Further preferred cationic or polycationic compounds, which can be used as transfection or complexation agent may include cationic polysaccharides, for example chitosan, polybrene etc.; cationic lipids, e.g. DOTMA, DMRIE, di-C14-amidine, DOTIM, SAINT, DC-Chol, BGTC, CTAP, DOPC, DODAP, DOPE: Dioleyl phosphatidylethanol-amine, DOSPA, DODAB, DOIC, DMEPC, DOGS, DIMRI, DOTAP, DC-6-14, CLIP1, CLIP6, CLIP9, oligofectamine; or cationic or polycationic polymers, e.g. modified polyaminoacids, such as beta-aminoacid-polymers or reversed polyamides, etc., modified polyethylenes, such as PVP etc., modified acrylates, such as pDMAEMA etc., modified amidoamines such as pAMAM etc., modified polybetaaminoester (PBAE), such as diamine end modified 1,4 butanediol diacrylate-co-5-amino-1-pentanol polymers, etc., dendrimers, such as polypropylamine dendrimers or pAMAM based dendrimers, etc., polyimine(s), such as PEI, poly(propyleneimine), etc., polyallylamine, sugar backbone based polymers, such as cyclodextrin based polymers, dextran based polymers, etc., silan backbone based polymers, such as PMOXA-PDMS copolymers, etc., blockpolymers consisting of a combination of one or more cationic blocks (e.g. selected from a cationic polymer as mentioned above) and of one or more hydrophilic or hydrophobic blocks (e.g. polyethyleneglycol); etc.

[0396] In this context it is particularly preferred that the at least one artificial RNA as defined herein is complexed or at least partially complexed with a cationic or polycationic compound and/or a polymeric carrier, preferably cationic proteins or peptides. In this context, the disclosure of WO2010/037539 and WO2012/113513 is incorporated herewith by reference. Partially means that only a part of the artificial nucleic acid is complexed with a cationic compound and that the rest of the artificial nucleic acid is (comprised in the inventive (pharmaceutical) composition) in uncomplexed form (“free”).

[0397] In a preferred embodiment of the second aspect, the at least one artificial RNA of the first aspect is complexed with one or more cationic or polycationic compounds, preferably protamine, and at least one free artificial RNA of the first aspect.

[0398] In this context it is particularly preferred that the at least one artificial RNA as defined herein, is complexed, or at least partially complexed with protamine. Preferably, the molar ratio of the nucleic acid, particularly the RNA of the protamine-complexed RNA to the free RNA may be selected from a molar ratio of about 0.001:1 to about 1:0.001, including a ratio of about 1:1. Suitably, the complexed RNA is complexed with protamine by addition of protamine-trehalose solution to the RNA sample at a RNA:protamine weight to weight ratio (w/w) of 2:1.

[0399] Further preferred cationic or polycationic proteins or peptides that may be used for complexation can be derived from Formula (Arg)l; (Lys)m; (His)n; (Orn)o; (Xaa)x of the patent application WO2009/030481 or WO2011/026641, the disclosure of WO2009/030481 or WO2011/026641 relating thereto incorporated herewith by reference.

[0400] In a preferred embodiment of the second aspect, the at least one artificial RNA of the first aspect is complexed, or at least partially complexed with cationic or polycationic proteins or peptides preferably selected from CHHHHHHRRRRHHHHHHC (SEQ ID NO: 55), CRRRRRRRRRRRRC (SEQ ID NO: 52), CRRRRRRRRRRRR (SEQ ID NO: 53), or WRRRRRRRRRRRRC (SEQ ID NO: 54), or a fragment or variant of any of these sequences.

[0401] According to embodiments, the composition of the present invention comprises the RNA as defined herein, and a polymeric carrier.

[0402] The term “polymeric carrier” as used herein will be recognized and understood by the person of ordinary skill in the art, and are for example intended to refer to a compound that facilitates transport and/or complexation of another compound (cargo). A polymeric carrier is typically a carrier that is formed of a polymer. A polymeric carrier may be associated to its cargo (nucleic acid, RNA) by covalent or non-covalent interaction

[0403] A suitable polymeric carrier may be a polymeric carrier formed by disulfide-crosslinked cationic compounds. The disulfide-crosslinked cationic compounds may be the same or different from each other. The polymeric carrier can also contain further components. The polymeric carrier used according to the present invention may comprise mixtures of cationic peptides, proteins or polymers and optionally further components as defined herein, which are crosslinked by disulfide bonds (via —SH groups).

[0404] In this context, polymeric carriers according to Formula {(Arg)l; (Lys)m; (His)n; (Orn)o; (Xaa′)x(Cys)y} and Formula Cys,{(Arg)l; (Lys)m; (His)n; (Orn)o; (Xaa)x}Cys₂ of the patent application WO2012/013326 are preferred, the disclosure of WO2012/013326 relating thereto incorporated herewith by reference.

[0405] In embodiments, the polymeric carrier used to complex the RNA as defined herein may be derived from a polymeric carrier molecule according Formula (L-P¹-S-[S-P²-S]ₙ-S-P³-L) of the patent application WO2011/026641, the disclosure of WO2011/026641 relating thereto incorporated herewith by reference.

[0406] In embodiments, the polymeric carrier compound is formed by, or comprises or consists of the peptide elements CysArg12Cys (SEQ ID NO: 52) or CysArg12 (SEQ ID NO: 53) or TrpArg12Cys (SEQ ID NO: 54). In particularly preferred embodiments, the polymeric carrier compound consists of a (R₁₂C)-(R₁₂C) dimer, a (WR₁₂C)—(WR₁₂C) dimer, or a (CR₁₂)—(CR₁₂C)—(CR₁₂) trimer, wherein the individual peptide elements in the dimer (e.g. (WR₁₂C)), or the trimer (e.g. (CR₁₂)), are connected via —SH groups.

[0407] In a preferred embodiment of the second aspect, the at least one artificial RNA of the first aspect is complexed or associated with a polyethylene glycol/peptide polymer comprising HO-PEG5000-S-(S-CHHHHHHRRRRHHHHHHC-S-)7-S-PEG5000-OH (SEQ ID NO: 55 as peptide monomer).

[0408] In a further preferred embodiment of the second aspect, the at least one artificial RNA of the first aspect is complexed or associated with a polyethylene glycol/peptide polymer comprising HO-PEG5000-S-(S-CHHHHHHRRRRHHHHHHC-S-)4-S-PEG5000-OH (SEQ ID NO: 55 as peptide monomer).

[0409] In a further preferred embodiment of the second aspect, the at least one artificial RNA of the first aspect is complexed or associated with a polyethylene glycol/peptide polymer comprising HO-PEG5000-S-(S-CGHHHHHRRRRHHHHHGC-S-)7-S-PEG5000-OH (SEQ ID NO: 1321 as peptide monomer).

[0410] In a further preferred embodiment of the second aspect, the at least one artificial RNA of the first aspect is complexed or associated with a polyethylene glycol/peptide polymer comprising HO-PEG5000-S-(S-CGHHHHHRRRRHHHHHGC-S-)4-S-PEG5000-OH (SEQ ID NO: 1321 as peptide monomer).

[0411] In other embodiments, the composition comprises at least one artificial RNA as described herein, wherein the at least one artificial RNA is complexed or associated with polymeric carriers and, optionally, with at least one lipid component as described in the published PCT applications WO2017/212008A1, WO2017/212006A1, WO2017/212007A1, and WO2017/212009A1. In this context, the disclosures of WO2017/212008A1, WO2017/212006A1, WO2017/212007A1, and WO2017/212009A1 are herewith incorporated by reference.

[0412] In a particularly preferred embodiment, the polymeric carrier is a peptide polymer, preferably a polyethylene glycol/peptide polymer as defined above, and a lipid component, preferably a lipidoid component, more preferably lipidoid component.

[0413] In preferred embodiment of the second aspect, the at least one artificial RNA of the first aspect is complexed or associated with a polymeric carrier, preferably with a polyethylene glycol/peptide polymer as defined above, and a lipidoid component, wherein the lipidoid component is a compound according to Formula A

[chemical structure]

[0414] wherein
[0415] R_{A} is independently selected for each occurrence an unsubstituted, cyclic or acyclic, branched or unbranched C₁₋₂₀ aliphatic group; a substituted or unsubstituted, cyclic or acyclic, branched or unbranched C₁₋₂₅ heteroaliphatic group; a substituted or unsubstituted aryl; a substituted or unsubstituted heteroaryl;

[chemical structure]

wherein at least one R_{A} is

[chemical structure]

[0416] R₅ is independently selected for each occurrence of from an unsubstituted, cyclic or acyclic, branched or unbranched C₈₋₁₆ aliphatic; a substituted or unsubstituted aryl; or a substituted or unsubstituted heteroaryl;
[0417] each occurrence of x is an integer from 1 to 10;
[0418] each occurrence of y is an integer from 1 to 10;
   or a pharmaceutically acceptable salt thereof.

[0419] In a preferred embodiment, the lipidoid component is 3-C12-OH according to Formula B

[chemical structure]

[0420] In preferred embodiments, the peptide polymer comprising lipidoid 3-C12-OH as specified above is used to complex the RNA of the first aspect to form complexes having an N/P ratio from about 0.1 to about 20, or from about 0.2 to about 15, or from about 2 to about 15, or from about 2 to about 12, wherein the N/P ratio is defined as the mole ratio of the nitrogen atoms of the basic groups of the cationic peptide or polymer to the phosphate groups of the artificial nucleic acid. In that context, the disclosure of WO2017/212009A1, in particular claims 1 to 10 of WO2017/212009A1, and the specific disclosure relating thereto is herewith incorporated by reference.

### Encapsulation/Complexation in LNPs:

[0421] In preferred embodiments of the second aspect, the artificial RNA of the first aspect is complexed or associated with one or more lipids (e.g. cationic lipids and/or neutral lipids), thereby forming liposomes, lipid nanoparticles (LNPs), lipoplexes, and/or nanoliposomes.

[0422] For compositions comprising more than one artificial RNA construct as defined herein (prME and NS1), said constructs may be co-formulated in e.g. LNPs to form the respective composition.

[0423] Alternatively, said more than one artificial RNA construct may be formulated separately, and may subsequently be combined, to form the respective composition.

[0424] In this context, the terms “complexed” or “associated” refer to the essentially stable combination of artificial RNA of the first aspect with one or more lipids into larger complexes or assemblies without covalent binding.

[0425] The term “lipid nanoparticle”, also referred to as “LNP”, is not restricted to any particular morphology, and include any morphology generated when a cationic lipid and optionally one or more further lipids are combined, e.g. in an aqueous environment and/or in the presence of RNA. For example, a liposome, a lipid complex, a lipoplex and the like are within the scope of a lipid nanoparticle (LNP).

[0426] Accordingly, in preferred embodiments of the second aspect, the artificial RNA of the first aspect is complexed with one or more lipids thereby forming lipid nanoparticles (LNP).

[0427] LNPs typically comprise a cationic lipid and one or more excipient selected from neutral lipids, charged lipids, steroids and polymer conjugated lipids (e.g. PEGylated lipid). The RNA may be encapsulated in the lipid portion of the LNP or an aqueous space enveloped by some or the entire lipid portion of the LNP. The RNA or a portion thereof may also be associated and complexed with the LNP. An LNP may comprise any lipid capable of forming a particle to which the nucleic acids are attached, or in which the one or more nucleic acids are encapsulated. Preferably, the LNP comprising nucleic acids comprises one or more cationic lipids, and one or more stabilizing lipids. Stabilizing lipids include neutral lipids and PEGylated lipids.

[0428] The cationic lipid of an LNP may be cationisable, i.e. it becomes protonated as the pH is lowered below the pK of the ionizable group of the lipid, but is progressively more neutral at higher pH values. At pH values below the pK, the lipid is then able to associate with negatively charged nucleic acids. In certain embodiments, the cationic lipid comprises a zwitterionic lipid that assumes a positive charge on pH decrease.

[0429] The LNP may comprise any further cationic or cationisable lipid, i.e. any of a number of lipid species which carry a net positive charge at a selective pH, such as physiological pH.

[0430] Such lipids include, but are not limited to, N,N-dioleyl-N,N-dimethylammonium chloride (DODAC), N,N-distearyl-N,N-dimethylammonium bromide (DDAB), 1,2-dioleoyltrimethyl ammonium propane chloride (DOTAP) (also known as N-(2,3-dioleoyloxy)propyI)-N,N,N-trimethylammonium chloride and 1,2-Dioleyloxy-3-trimethylaminopropane chloride salt), N-(1-(2,3-dioleyloxy)propyl)-N,N,N-trimethylammonium chloride (DOTMA), N,N-dimethyl-2,3-dioleyloxy)propylamine (DODMA), 1,2-DiLinoleyloxy-N,N-dimethylaminopropane (DLinDMA), 1,2-Dilinolenyloxy-N,N-dimethylaminopropane (DLenDMA), 1,2-di-y-linolenyloxy-N,N-dimethylaminopropane (γ-DLenDMA), 1,2-Dilinoleylcarbamoyloxy-3-dimethylaminopropane (DLin-C-DAP), 1,2-Dilinoleyoxy-3-(dimethylamino)acetoxypropane (DLin-DAC), 1,2-Dilinoleyoxy-3-morpholinopropane (DLin-MA), 1,2-Dilinoleoyl-3-dimethylaminopropane (DLinDAP), 1,2-Dilinoleylthio-3-dimethylaminopropane (DLin-S-DMA), 1-Linoleoyl-2-linoleyloxy-3-dimethylaminopropane (DLin-2-DMAP), 1,2-Dilinoleyloxy-3-trimethylaminopropane chloride salt (DLin-TMA.Cl), 1,2-Dilinoleoyl-3-trimethylaminopropane chloride salt (DLin-TAP.Cl), 1,2-Dilinoleyloxy-3-(N-methylpiperazino)propane (DLin-MPZ), or 3-(N,N-Dilinoleylamino)-1,2-propanediol (DLinAP), 3-(N,N-Dioleylamino)-1,2-propanediol (DOAP), 1,2-Dilinoleyloxo-3-(2-N,N-dimethylamino)ethoxypropane (DLin-EG-DM A), 2,2-Dilinoleyl-4-dimethylaminomethyl[1,3]-dioxolane (DLin-K-DMA) or analogs thereof, (3aR,5s,6aS)-N,N-dimethyl-2,2-di((9Z,12Z)-octadeca-9,12-dienyl)tetrahydro-3aH-cyclopenta[d][1,3]dioxol-5-amine, (6Z,9Z,28Z,31Z)-heptatriaconta-6,9,28,31-tetraen-19-yl4-(dimethylamino)butanoate (MC3), 1,1′-(2-(4-(2-((2-(bis(2-hydroxydodecyl)amino)ethyl)(2-hydroxydodecyl)amino)ethyl)piperazin-1-yl)ethylazanediyl)didodecan-2-ol (C12-200), 2,2-dilinoleyl-4-(2-dimethylaminoethyl)[1,3]-dioxolane (DLin-K-C2-DMA), 2,2-dilinoleyl-4-dimethylaminomethyl[1,3]-dioxolane (DLin-K-DMA), (6Z,9Z,28Z,31Z)-heptatriaconta-6,9,28,31-tetraen-19-yl4-(dimethylamino) butanoate (DLin-M-C3-DMA), 3-((6Z,9Z,28Z,31Z)-heptatriaconta-6,9,28,31-tetraen-19-yloxy)-N,N-dimethylpropan-1-amine (MC3 Ether), 4-((6Z,9Z,28Z,31Z)-heptatriaconta-6,9,28,31-tetraen-19-yloxy)-N,N-dimethylbutan-1-amine (MC4 Ether), LIPOFECTIN® (commercially available cationic liposomes comprising DOTMA and 1,2-dioleoyl-sn-3phosphoethanolamine (DOPE), from GIBCO/BRL, Grand Island, N.Y.); LIPOFECTAMINE® (commercially available cationic liposomes comprising N-(1-(2,3dioleyloxy)propyl)-N-(2-(sperminecarboxamido)ethyl)-N,N-dimethylammonium trifluoroacetate (DOSPA) and (DOPE), from GIBCO/BRL); and TRANSFECTAM® (commercially available cationic lipids comprising dioctadecylamidoglycyl carboxyspermine (DOGS) in ethanol from Promega Corp., Madison, Wis.) or any combination of any of the foregoing.

[0431] In some embodiments, the lipid is selected from the group consisting of 98N12-5, C12-200, and ckk-E12.

[0432] In one embodiment, the further cationic lipid is an amino lipid.

[0433] Representative amino lipids include, but are not limited to, 1,2-dilinoleyoxy-3-(dimethylamino)acetoxypropane (DLin-DAC), 1,2-dilinoleyoxy-3morpholinopropane (DLin-MA), 1,2-dilinoleoyl-3-dimethylaminopropane (DLinDAP), 1,2-dilinoleylthio-3-dimethylaminopropane (DLin-S-DMA), 1-linoleoyl-2-linoleyloxy-3dimethylaminopropane (DLin-2-DMAP), 1,2-dilinoleyloxy-3-trimethylaminopropane chloride salt (DLin-TMA.Cl), 1,2-dilinoleoyl-3-trimethylaminopropane chloride salt (DLin-TAP.Cl), 1,2-dilinoleyloxy-3-(N-methylpiperazino)propane (DLin-MPZ), 3-(N,Ndilinoleylamino)-1,2-propanediol (DLinAP), 3-(N,N-dioleylamino)-1,2-propanediol (DOAP), 1,2-dilinoleyloxo-3-(2-N,N-dimethylamino)ethoxypropane (DLin-EG-DMA), and 2,2-dilinoleyl-4-dimethylaminomethyl-[1,3]-dioxolane (DLin-K-DMA), 2,2-dilinoleyl-4-(2-dimethylaminoethyl)-[1,3]-dioxolane (DLin-KC2-DMA); dilinoleyl-methyl-4-dimethylaminobutyrate (DLin-MC3-DMA); MC3 (US20100324120).

[0434] In one embodiment, the artificial RNA of the first aspect may be formulated in an aminoalcohol lipidoid. Aminoalcohol lipidoids which may be used in the present invention may be prepared by the methods described in U.S. Pat. No. 8,450,298, herein incorporated by reference in its entirety. Suitable (ionizable) lipids can also be the compounds as disclosed in Tables 1, 2 and 3 and as defined in claims 1-24 of WO2017/075531A1, hereby incorporated by reference.

[0435] In another embodiment, ionizable lipids can also be the compounds as disclosed in WO2015/074085A1 (i.e. ATX-001 to ATX-032 or the compounds as specified in claims 1-26), U.S. Appl. No. 61/905,724 and Ser. No. 15/614,499 or U.S. Pat. Nos. 9,593,077 and 9,567,296 hereby incorporated by reference in their entirety.

[0436] In that context, any lipid derived from generic Formula (X1)

[chemical structure]

wherein, R1 and R2 are the same or different, each a linear or branched alkyl consisting of 1 to 9 carbons, an alkenyl or alkynyl consisting of 2 to 11 carbons, L1 and L2 are the same or different, each a linear alkylene or alkenylene consisting of 5 to 18 carbons, or forming a heterocycle with N, Xi is a bond, or is —CO—O— whereby -L2-CO—O—R2 is formed, X2 is S or O, L3 is a bond or a linear or branched alkylene consisting of 1 to 6 carbons, or forming a heterocycle with N, R3 is a linear or branched alkylene consisting of 1 to 6 carbons, and R4 and R5 are the same or different, each hydrogen or a linear or branched alkyl consisting of 1 to 6 carbons; or a pharmaceutically acceptable salt thereof may be suitably used.

[0437] In other embodiments, suitable cationic lipids can also be the compounds as disclosed in WO2017/117530A1 (i.e. lipids 13, 14, 15, 16, 17, 18, 19, 20, or the compounds as specified in the claims), hereby incorporated by reference in its entirety.

[0438] In that context, any lipid derived from generic Formula (X2)

[chemical structure]

wherein,
X is a linear or branched alkylene or alkenylene, monocyclic, bi cyclic, or tricyclic arene or heteroarene;
Y is a bond, an ethene, or an unsubstituted or substituted aromatic or heteroaromatic ring; Z is S or 0;
L is a linear or branched alkylene of 1 to 6 carbons;
R-3 and R4 are independently a linear or branched alkyl of 1 to 6 carbons;
Ri and R2 are independently a linear or branched alkyl or alkenyl of 1 to 20 carbons; r is 0 to 6; and
m, n, p, and q are independently 1 to 18;
wherein when n=q, m=p, and Ri=R2, then X and Y differ;
wherein when X=Y, n=q, m=p, then Ri and R2 differ;
wherein when X=Y, n=q, and Ri=R2, then m and p differ; and
wherein when X=Y, m=p, and Ri=R2, then n and q differ;
or a pharmaceutically acceptable salt thereof.

[0439] In preferred embodiments, a lipid may be used derived from Formula (X2), wherein, X is a bond, linear or branched alkylene, alkenylene, or monocyclic, bicyclic, or tricyclic arene or heteroarene; Y is a monocyclic, bicyclic, or tricyclic arene or heteroarene; Z is S or O; L is a linear or branched alkylene of 1 to 6 carbons; R3 and R4 are independently a linear or branched alkyl of 1 to 6 carbons; Ri and R2 are independently a linear or branched alkyl or alkenyl of 1 to 20 carbons; r is 0 to 6; and m, n, p, and q are independently 1 to 18; or a pharmaceutically acceptable salt thereof may be suitably used.

[0440] In preferred embodiments, ionizable lipids may also be selected from the lipid compounds disclosed in PCT application PCT/EP2017/077517 (i.e. lipid compounds derived from Formula I, II, and III of PCT/EP2017/077517, or lipid compounds as specified in claims 1 to 12 of PCT/EP2017/077517), the disclosure of PCT/EP2017/077517 hereby incorporated by reference in its entirety. In that context, lipid compounds disclosed in Table 7 of PCT/EP2017/077517 (e.g. lipid compounds derived from Formula I-1 to 1-41) and lipid compounds disclosed in Table 8 of PCT/EP2017/077517 (e.g. lipid compounds derived from Formula II-1 to II-36) may be suitably used in the context of the invention. Accordingly, Formula I-1 to Formula I-41 and Formula II-1 to Formula II-36 of PCT/EP2017/077517, and the specific disclosure relating thereto, are herewith incorporated by reference.

[0441] In particularly preferred embodiments of the second aspect, a suitable lipid may be a cationic lipid according to

[chemical structure]

or a pharmaceutically acceptable salt, tautomer, prodrug or stereoisomer thereof, wherein, R1, R2, R3, L1, L2, G1, G2, and G3 are as below.

[0442] Formula (III) is further defined in that:

one of L¹ or L² is —O(C═O)—, —(C═O)O—, —C(═O)—, —O—, —S(O)ₓ—, —S—S—, —C(═O)S—, SC(═O)—, —NRaC(═O)—, —C(═O)NR^{a}—, —NR^{a}C(═O)NR^{a}—, —OC(═O)NR^{a}— or —NR^{a}C(═O)O—, and the other of L¹ or L² is —O(C═O)—, —(C═O)O—, —C(═O)—, —O—, —S(O)ₓ—, —S—S—, —C(═O)S—, SC(═O)—, —NR^{a}C(═O)—, —C(═O)NR^{a}—, —NR^{a}C(═O)NR^{a}—, —OC(═O)NR^{a}— or —NR^{a}C(═O)O— or a direct bond;
G¹ and G² are each independently unsubstituted C₁-C₁₂ alkylene or C₁-C₁₂ alkenylene;
G³ is C₁-C₂₄ alkylene, C₁-C₂₄ alkenylene, C₃-C₈ cycloalkylene, C₃-C₈ cycloalkenylene;
R^{a} is H or C₁-C₁₂ alkyl;
R¹ and R² are each independently C₆-C₂₄ alkyl or C₆-C₂₄ alkenyl;
R³ is H, OR⁵, CN, —C(═O)OR⁴, —OC(═O)R⁴ or —NR⁵C(═O)R⁴;
R⁴ is C₁-C₁₂ alkyl;
R⁵ is H or C₁-C₆ alkyl; and
x is 0, 1 or 2.

[0443] In some of the foregoing embodiments of Formula (III), the lipid has one of the following structures (IIIA) or (IIIB):

[chemical structure]

wherein:
A is a 3 to 8-membered cycloalkyl or cycloalkylene ring; R⁶ is, at each occurrence, independently H, OH or C₁-C₂₄ alkyl; n is an integer ranging from 1 to 15.

[0444] In some of the foregoing embodiments of Formula (III), the lipid has structure (IIIA), and in other embodiments, the lipid has structure (IIIB).

[0445] In other embodiments of Formula (III), the lipid has one of the following structures (IIIC) or (IIID):

[chemical structure]

wherein y and z are each independently integers ranging from 1 to 12.

[0446] In any of the foregoing embodiments of Formula (III), one of L¹ or L² is —O(C═O)—. For example, in some embodiments each of L¹ and L² are —O(C═O)—. In some different embodiments of any of the foregoing, L¹ and L² are each independently —(C═O)O— or —O(C═O)—. For example, in some embodiments each of L¹ and L² is —(C═O)O—.

[0447] In preferred embodiments of the second aspect, the cationic lipid of the LNP is a compound of Formula III, wherein:

L¹ and L² are each independently —O(C═O)— or (C═O)—O—;
G³ is C₁-C₂₄ alkylene or C₁-C₂₄ alkenylene; and
R³ is H or OR⁵.

[0448] In some different embodiments of Formula (III), the lipid has one of the following structures (IIIE) or (IIIF):

[chemical structure]

[0449] In some of the foregoing embodiments of Formula (III), the lipid has one of the following structures (IIIG), (IIIH), (IIII), or (IIIJ):

[chemical structure]

[0450] In some of the foregoing embodiments of Formula (III), n is an integer ranging from 2 to 12, for example from 2 to 8 or from 2 to 4. In some embodiments, n is 3, 4, 5 or 6. In some embodiments, n is 3. In some embodiments, n is 4. In some embodiments, n is 5. In some embodiments, n is 6. In some other of the foregoing embodiments of Formula (III), y and z are each independently an integer ranging from 2 to 10. For example, in some embodiments, y and z are each independently an integer ranging from 4 to 9 or from 4 to 6. In some of the foregoing embodiments of Formula (III), R⁶ is H. In other of the foregoing embodiments, R⁶ is C₁-C₂₄ alkyl. In other embodiments, R⁶ is OH. In some embodiments of Formula (III), G³ is unsubstituted. In other embodiments, G3 is substituted. In various different embodiments, G³ is linear C₁-C₂₄ alkylene or linear C₁-C₂₄ alkenylene. In some other foregoing embodiments of Formula (III), R¹ or R², or both, is C₆-C₂₄ alkenyl. For example, in some embodiments, R¹ and R² each, independently have the following structure:

[chemical structure]

wherein:
R^{7a} and R⁷b are, at each occurrence, independently H or C₁-C₁₂ alkyl; and a is an integer from 2 to 12, wherein R^{7a}, R^{7b} and a are each selected such that R¹ and R² each independently comprise from 6 to 20 carbon atoms. For example, in some embodiments a is an integer ranging from 5 to 9 or from 8 to 12. In some of the foregoing embodiments of Formula (III), at least one occurrence of R^{7a} is H. For example, in some embodiments, R^{7a} is H at each occurrence. In other different embodiments of the foregoing, at least one occurrence of R^{7b} is C₁-C₈ alkyl. For example, in some embodiments, C₁-C₈ alkyl is methyl, ethyl, n-propyl, iso-propyl, n-butyl, iso-butyl, tert-butyl, n-hexyl or n-octyl.

[0451] In different embodiments of Formula (III), R¹ or R², or both, has one of the following structures:

[chemical structure]

[0452] In preferred embodiments of the second aspect, the cationic lipid of the LNP is a compound of Formula III, wherein:

L¹ and L² are each independently —O(C═O)— or (C═O)—O—; and
R¹ and R² each independently have one of the following structures:

[chemical structure]

[0453] In some of the foregoing embodiments of Formula (III), R³ is OH, CN, —C(═O)OR⁴, —OC(═O)R⁴ or —NHC(═O)R⁴. In some embodiments, R⁴ is methyl or ethyl.

[0454] In preferred embodiments of the second aspect, the cationic lipid of the LNP is a compound of Formula III, wherein R³ is OH.

[0455] In particularly preferred embodiment of the second aspect, the artificial RNA of the first aspect is complexed with one or more lipids thereby forming lipid nanoparticles (LNP), wherein the LNP is selected from structures III-1 to III-36 (see Table A).

TABLE A
Representative Compounds of Formula (III)

| No. | Structure |
|---|---|
| III-1 | [chemical structure] |
| III-2 | [chemical structure] |
| III-3 | [chemical structure] |
| III-4 | [chemical structure] |
| III-5 | [chemical structure] |
| III-6 | [chemical structure] |
| III-7 | [chemical structure] |
| III-8 | [chemical structure] |
| III-9 | [chemical structure] |
| III-10 | [chemical structure] |
| III-11 | [chemical structure] |
| III-12 | [chemical structure] |
| III-13 | [chemical structure] |
| III-14 | [chemical structure] |
| III-15 | [chemical structure] |
| III-16 | [chemical structure] |
| III-17 | [chemical structure] |
| III-18 | [chemical structure] |
| III-19 | [chemical structure] |
| III-20 | [chemical structure] |
| III-21 | [chemical structure] |
| III-22 | [chemical structure] |
| III-23 | [chemical structure] |
| III-24 | [chemical structure] |
| III-25 | [chemical structure] |
| III-26 | [chemical structure] |
| III-27 | [chemical structure] |
| III-28 | [chemical structure] |
| III-29 | [chemical structure] |
| III-30 | [chemical structure] |
| III-31 | [chemical structure] |
| III-32 | [chemical structure] |
| III-33 | [chemical structure] |
| III-34 | [chemical structure] |
| III-35 | [chemical structure] |
| III-36 | [chemical structure] |

[0456] In some embodiments, the LNPs comprise a lipid of Formula (III), an artificial RNA of the first aspect, and one or more excipient selected from neutral lipids, steroids and PEGylated lipids. In some embodiments the lipid of Formula (III) is compound III-3. In some embodiments the lipid of Formula (III) is compound III-7.

[0457] In preferred embodiments, the LNP comprises a cationic lipid selected from:

[chemical structure]

[0458] In a particularly preferred embodiment of the second aspect, the artificial RNA of the first aspect is complexed with one or more lipids thereby forming lipid nanoparticles (LNP), wherein the LNP comprises the following cationic lipid (lipid according to Formula III-3 of Table A):

[chemical structure]

[0459] In certain embodiments, the cationic lipid as defined herein, preferably as disclosed in Table A, more preferably cationic lipid compound III-3, is present in the LNP in an amount from about 30 to about 95 mole percent, relative to the total lipid content of the LNP. If more than one cationic lipid is incorporated within the LNP, such percentages apply to the combined cationic lipids.

[0460] In one embodiment, the cationic lipid is present in the LNP in an amount from about 30 to about 70 mole percent. In one embodiment, the cationic lipid is present in the LNP in an amount from about 40 to about 60 mole percent, such as about 40, 41, 42, 43, 44, 45, 46, 47, 48, 49, 50, 51, 52, 53, 54, 55, 56, 57, 58, 59 or 60 mole percent, respectively. In embodiments, the cationic lipid is present in the LNP in an amount from about 47 to about 48 mole percent, such as about 47.0, 47.1, 47.2, 47.3, 47.4, 47.5, 47.6, 47.7, 47.8, 47.9, 50.0 mole percent, respectively, wherein 47.7 mole percent are particularly preferred.

[0461] In some embodiments, the cationic lipid is present in a ratio of from about 20 mol % to about 70 or 75 mol % or from about 45 to about 65 mol % or about 20, 25, 30, 35, 40, 45, 50, 55, 60, 65, or about 70 mol % of the total lipid present in the LNP. In further embodiments, the LNPs comprise from about 25% to about 75% on a molar basis of cationic lipid, e.g., from about 20 to about 70%, from about 35 to about 65%, from about 45 to about 65%, about 60%, about 57.5%, about 57.1%, about 50% or about 40% on a molar basis (based upon 100% total moles of lipid in the lipid nanoparticle). In some embodiments, the ratio of cationic lipid to nucleic acid, preferably to the artificial RNA of the first aspect, is from about 3 to about 15, such as from about 5 to about 13 or from about 7 to about 11.

[0462] In some embodiments of the invention the LNP comprises a combination or mixture of any the lipids described above.

[0463] Other suitable (cationic) lipids are disclosed in WO2009/086558, WO2009/127060, WO2010/048536, WO2010/054406, WO2010/088537, WO2010/129709, WO2011/153493, US2011/0256175, US2012/0128760, US2012/0027803, U.S. Pat. No. 8,158,601, WO2016/118724, WO2016/118725, WO2017/070613, WO2017/070620, WO2017/099823, and WO2017/112865. In that context, the disclosures of WO2009/086558, WO2009/127060, WO2010/048536, WO2010/054406, WO2010/088537, WO2010/129709, WO2011/153493, US2011/0256175, US2012/0128760, US2012/0027803, U.S. Pat. No. 8,158,601, WO2016/118724, WO2016/118725, WO2017/070613, WO2017/070620, WO2017/099823, and WO2017/112865 specifically relating to (cationic) lipids suitable for LNPs are incorporated herewith by reference.

[0464] In some embodiments, the lipid is selected from the group consisting of 98N12-5, C12-200, and ckk-E12.

[0465] In some embodiments, amino or cationic lipids as defined herein have at least one protonatable or deprotonatable group, such that the lipid is positively charged at a pH at or below physiological pH (e.g. pH 7.4), and neutral at a second pH, preferably at or above physiological pH. It will, of course, be understood that the addition or removal of protons as a function of pH is an equilibrium process, and that the reference to a charged or a neutral lipid refers to the nature of the predominant species and does not require that all of lipids have to be present in the charged or neutral form. Lipids having more than one protonatable or deprotonatable group, or which are zwitterionic, are not excluded and may likewise suitable in the context of the present invention.

[0466] In some embodiments, the protonatable lipids have a pKa of the protonatable group in the range of about 4 to about 11, e.g., a pKa of about 5 to about 7.

[0467] LNPs can comprise two or more (different) cationic lipids. The cationic lipids may be selected to contribute different advantageous properties. For example, cationic lipids that differ in properties such as amine pKa, chemical stability, half-life in circulation, half-life in tissue, net accumulation in tissue, or toxicity can be used in the LNP. In particular, the cationic lipids can be chosen so that the properties of the mixed-LNP are more desirable than the properties of a single-LNP of individual lipids.

[0468] The amount of the permanently cationic lipid or lipidoid may be selected taking the amount of the nucleic acid cargo into account. In one embodiment, these amounts are selected such as to result in an N/P ratio of the nanoparticle(s) or of the composition in the range from about 0.1 to about 20. In this context, the N/P ratio is defined as the mole ratio of the nitrogen atoms (“N”) of the basic nitrogen-containing groups of the lipid or lipidoid to the phosphate groups (“P”) of the RNA which is used as cargo. The N/P ratio may be calculated on the basis that, for example, 1 μg RNA typically contains about 3 nmol phosphate residues, provided that the RNA exhibits a statistical distribution of bases. The “N”-value of the lipid or lipidoid may be calculated on the basis of its molecular weight and the relative content of permanently cationic and—if present—cationisable groups.

[0469] LNP in vivo characteristics and behavior can be modified by addition of a hydrophilic polymer coating, e.g. polyethylene glycol (PEG), to the LNP surface to confer steric stabilization. Furthermore, LNPs can be used for specific targeting by attaching ligands (e.g. antibodies, peptides, and carbohydrates) to its surface or to the terminal end of the attached PEG chains (e.g. via PEGylated lipids).

[0470] In some embodiments, the LNPs comprise a polymer conjugated lipid. The term “polymer conjugated lipid” refers to a molecule comprising both a lipid portion and a polymer portion. An example of a polymer conjugated lipid is a PEGylated lipid. The term “PEGylated lipid” refers to a molecule comprising both a lipid portion and a polyethylene glycol portion. PEGylated lipids are known in the art and include 1-(monomethoxy-polyethyleneglycol)-2,3-dimyristoylglycerol (PEG-s-DMG) and the like.

[0471] In certain embodiments, the LNP comprises an additional, stabilizing-lipid which is a polyethylene glycol-lipid (PEGylated lipid). Suitable polyethylene glycol-lipids include PEG-modified phosphatidylethanolamine, PEG-modified phosphatidic acid, PEG-modified ceramides (e.g. PEG-CerC14 or PEG-CerC20), PEG-modified dialkylamines, PEG-modified diacylglycerols, PEG-modified dialkylglycerols. Representative polyethylene glycol-lipids include PEG-c-DOMG, PEG-c-DMA, and PEG-s-DMG. In one embodiment, the polyethylene glycol-lipid is N-[(methoxy poly(ethylene glycol)2000)carbamyl]-1,2-dimyristyloxlpropyl-3-amine (PEG-c-DMA). In a preferred embodiment, the polyethylene glycol-lipid is PEG-2000-DMG. In one embodiment, the polyethylene glycol-lipid is PEG-c-DOMG). In other embodiments, the LNPs comprise a PEGylated diacylglycerol (PEG-DAG) such as 1-(monomethoxy-polyethyleneglycol)-2,3-dimyristoylglycerol (PEG-DMG), a PEGylated phosphatidylethanoloamine (PEG-PE), a PEG succinate diacylglycerol (PEG-S-DAG) such as 4-O-(2′,3′-di(tetradecanoyloxy)propyl-1-O-(ω-methoxy(polyethoxy)ethypbutanedioate (PEG-S-DMG), a PEGylated ceramide (PEG-cer), or a PEG dialkoxypropylcarbamate such as w-methoxy(polyethoxy)ethyl-N-(2,3di(tetradecanoxy)propyl)carbamate or 2,3-di(tetradecanoxy)propyl-N-(ω-methoxy(polyethoxy)ethyl)carbamate.

[0472] In preferred embodiments of the second aspect, the artificial RNA of the first aspect is complexed with one or more lipids thereby forming lipid nanoparticles (LNP), wherein the LNP additionally comprises a PEGylated lipid with the Formula (IV):

[chemical structure]

or a pharmaceutically acceptable salt, tautomer or stereoisomer thereof, wherein R⁸ and R⁹ are each independently a straight or branched, saturated or unsaturated alkyl chain containing from 10 to 30 carbon atoms, wherein the alkyl chain is optionally interrupted by one or more ester bonds; and w has mean value ranging from 30 to 60.

[0473] In some of the foregoing embodiments of the PEGylated lipid according to Formula (IV), R⁸ and R⁹ are not both n-octadecyl when w is 42. In some other embodiments, R⁸ and R⁹ are each independently a straight or branched, saturated or unsaturated alkyl chain containing from 10 to 18 carbon atoms. In some embodiments, R⁸ and R⁹ are each independently a straight or branched, saturated or unsaturated alkyl chain containing from 12 to 16 carbon atoms. In some embodiments, R⁸ and R⁹ are each independently a straight or branched, saturated or unsaturated alkyl chain containing 12 carbon atoms. In some embodiments, R⁸ and R⁹ are each independently a straight or branched, saturated or unsaturated alkyl chain containing 14 carbon atoms. In other embodiments, R⁸ and R⁹ are each independently a straight or branched, saturated or unsaturated alkyl chain containing 16 carbon atoms. In still more embodiments, R⁸ and R⁹ are each independently a straight or branched, saturated or unsaturated alkyl chain containing 18 carbon atoms. In still other embodiments, R⁸ is a straight or branched, saturated or unsaturated alkyl chain containing 12 carbon atoms and R⁹ is a straight or branched, saturated or unsaturated alkyl chain containing 14 carbon atoms.

[0474] In various embodiments, w spans a range that is selected such that the PEG portion of the PEGylated lipid according to Formula (IV) has an average molecular weight of about 400 to about 6000 g/mol. In some embodiments, the average w is about 50.

[0475] In preferred embodiments of the second aspect, R⁸ and R⁹ of the PEGylated lipid according to Formula (IV) are saturated alkyl chains.

[0476] In a particularly preferred embodiment of the second aspect, the artificial RNA of the first aspect is complexed with one or more lipids thereby forming lipid nanoparticles (LNP), wherein the LNP additionally comprises a PEGylated lipid, wherein the PEG lipid is of Formula (IVa)

[chemical structure]

wherein n has a mean value ranging from 30 to 60, such as about 28 to about 32, about 30 to about 34, 32 to about 36, about 34 to about 38, 36 to about 40, about 38 to about 42, 40 to about 44, about 42 to about 46, 44 to about 48, about 46 to about 50, 48 to about 52, about 50 to about 54, 52 to about 56, about 54 to about 58, 56 to about 60, about 58 to about 62. In preferred embodiments, n is about 45, 46, 47, 48, 49, 50, 51, 52, 53, 54. In a most preferred embodiment n has a mean value of 49.

[0477] In other embodiments, the PEGylated lipid has one of the following structures:

[chemical structure]

wherein n is an integer selected such that the average molecular weight of the PEGylated lipid is about 2500 g/mol, most preferably n is about 49.

[0478] Further examples of PEG-lipids suitable in that context are provided in US2015/0376115A1 and WO2015/199952, each of which is incorporated by reference in its entirety.

[0479] In some embodiments, LNPs include less than about 3, 2, or 1 mole percent of PEG or PEG-modified lipid, based on the total moles of lipid in the LNP. In further embodiments, LNPs comprise from about 0.1% to about 20% of the PEG-modified lipid on a molar basis, e.g., about 0.5 to about 10%, about 0.5 to about 5%, about 10%, about 5%, about 3.5%, about 3%, about 2.5%, about 2%, about 1.5%, about 1%, about 0.5%, or about 0.3% on a molar basis (based on 100% total moles of lipids in the LNP). In preferred embodiments, LNPs comprise from about 1.0% to about 2.0% of the PEG-modified lipid on a molar basis, e.g., about 1.2 to about 1.9%, about 1.2 to about 1.8%, about 1.3 to about 1.8%, about 1.4 to about 1.8%, about 1.5 to about 1.8%, about 1.6 to about 1.8%, in particular about 1.4%, about 1.5%, about 1.6%, about 1.7%, about 1.8%, about 1.9%, most preferably 1.7% (based on 100% total moles of lipids in the LNP).

[0480] In various embodiments, the molar ratio of the cationic lipid to the PEGylated lipid ranges from about 100:1 to about 25:1.

[0481] In preferred embodiments, the LNP additionally comprises one or more additional lipids which stabilize the formation of particles during their formation (e.g. neutral lipid and/or one or more steroid or steroid analogue).

[0482] In preferred embodiments of the second aspect, the artificial RNA of the first aspect is complexed with one or more lipids thereby forming lipid nanoparticles (LNP), wherein the LNP additionally comprises one or more neutral lipid and/or one or more steroid or steroid analogue.

[0483] Suitable stabilizing lipids include neutral lipids and anionic lipids. The term “neutral lipid” refers to any one of a number of lipid species that exist in either an uncharged or neutral zwitterionic form at physiological pH. Representative neutral lipids include diacylphosphatidylcholines, diacylphosphatidylethanolamines, ceramides, sphingomyelins, dihydro sphingomyelins, cephalins, and cerebrosides.

[0484] In embodiments of the second aspect, the LNP additionally comprises one or more neutral lipids, wherein the neutral lipid is selected from the group comprising distearoylphosphatidylcholine (DSPC), dioleoylphosphatidylcholine (DOPC), dipalmitoylphosphatidylcholine (DPPC), dioleoylphosphatidylglycerol (DOPG), dipalmitoylphosphatidylglycerol (DPPG), dioleoyl-phosphatidylethanolamine (DOPE), palmitoyloleoylphosphatidylcholine (POPC), palmitoyloleoyl-phosphatidylethanolamine (POPE) and dioleoyl-phosphatidylethanolamine 4-(N-maleimidomethyl)-cyclohexane-1 carboxylate (DOPE-mal), dipalmitoyl phosphatidyl ethanolamine (DPPE), dimyristoylphosphoethanolamine (DMPE), distearoyl-phosphatidylethanolamine (DSPE), 16-O-monomethyl PE, 16-O-dimethyl PE, 18-1-trans PE, 1-stearioyl-2-oleoylphosphatidyethanol amine (SOPE), and 1,2-dielaidoyl-sn-glycero-3-phophoethanolamine (transDOPE).

[0485] In some embodiments, the LNPs comprise a neutral lipid selected from DSPC, DPPC, DMPC, DOPC, POPC, DOPE and SM. In various embodiments, the molar ratio of the cationic lipid to the neutral lipid ranges from about 2:1 to about 8:1.

[0486] In preferred embodiments of the second aspect, the neutral lipid is 1,2-distearoyl-sn-glycero-3-phosphocholine (DSPC). The molar ratio of the cationic lipid to DSPC may be in the range from about 2:1 to 8:1.

[0487] In preferred embodiments of the second aspect, the steroid is cholesterol. The molar ratio of the cationic lipid to cholesterol may be in the range from about 2:1 to 1:1

[0488] The sterol can be about 10 mol % to about 60 mol % or about 25 mol % to about 40 mol % of the lipid particle. In one embodiment, the sterol is about 10, 15, 20, 25, 30, 35, 40, 45, 50, 55, or about 60 mol % of the total lipid present in the lipid particle. In another embodiment, the LNPs include from about 5% to about 50% on a molar basis of the sterol, e.g., about 15% to about 45%, about 20% to about 40%, about 48%, about 40%, about 38.5%, about 35%, about 34.4%, about 31.5% or about 31% on a molar basis (based upon 100% total moles of lipid in the lipid nanoparticle).

[0489] Preferably, lipid nanoparticles (LNPs) comprise: (a) at least one artificial RNA of the first aspect, (b) a cationic lipid, (c) an aggregation reducing agent (such as polyethylene glycol (PEG) lipid or PEG-modified lipid), (d) optionally a non-cationic lipid (such as a neutral lipid), and (e) optionally, a sterol.

[0490] In other preferred embodiments, lipid nanoparticles (LNPs) comprise: (a) at least one artificial RNA encoding prME of the first aspect and at least one artificial RNA encoding NS1 of the first aspect, (b) a cationic lipid, (c) an aggregation reducing agent (such as polyethylene glycol (PEG) lipid or PEG-modified lipid), (d) optionally a non-cationic lipid (such as a neutral lipid), and (e) optionally, a sterol.

[0491] In other preferred embodiments, the composition comprises lipid nanoparticles (LNPs) comprising: (a) at least one artificial RNA encoding prME of the first aspect, (b) a cationic lipid, (c) an aggregation reducing agent (such as polyethylene glycol (PEG) lipid or PEG-modified lipid), (d) optionally a non-cationic lipid (such as a neutral lipid), and (e) optionally, a sterol and additionally lipid nanoparticles (LNPs) comprising (a) at least one artificial RNA encoding prME of the first aspect and at least one artificial RNA encoding NS1 of the first aspect, (b) a cationic lipid, (c) an aggregation reducing agent (such as polyethylene glycol (PEG) lipid or PEG-modified lipid), (d) optionally a non-cationic lipid (such as a neutral lipid), and (e) optionally, a sterol.

[0492] In some embodiments, the LNPs comprise a lipid of Formula (III), an artificial RNA as defined above, a neutral lipid, a steroid and a PEGylated lipid. In preferred embodiments, the lipid of Formula (III) is lipid compound III-3, the neutral lipid is DSPC, the steroid is cholesterol, and the PEGylated lipid is the compound of Formula (IVa).

[0493] In a preferred embodiment of the second aspect, the LNP consists essentially of (i) at least one cationic lipid; (ii) a neutral lipid; (iii) a sterol, e.g., cholesterol; and (iv) a PEG-lipid, e.g. PEG-DMG or PEG-cDMA, in a molar ratio of about 20-60% cationic lipid:5-25% neutral lipid:25-55% sterol; 0.5-15% PEG-lipid.

[0494] In particularly preferred embodiments of the second aspect, the artificial RNA of the first aspect is complexed with one or more lipids thereby forming lipid nanoparticles (LNP), wherein the LNP essentially consists of
[0495] (i) at least one cationic lipid as defined herein, preferably a lipid of Formula MO, more preferably lipid III-3;
[0496] (ii) a neutral lipid as defined herein, preferably 1,2-distearoyl-sn-glycero-3-phosphocholine (DSPC);
[0497] (iii) a steroid or steroid analogue as defined herein, preferably cholesterol; and
[0498] (iv) a PEG-lipid as defined herein, e.g. PEG-DMG or PEG-cDMA, preferably a PEGylated lipid of Formula (IVa),
   wherein (i) to (iv) are in a molar ratio of about 20-60% cationic lipid:5-25% neutral lipid: 25-55% sterol; 0.5-15% PEG-lipid.

[0499] In one preferred embodiment, the lipid nanoparticle comprises: a cationic lipid with Formula MO and/or PEG lipid with Formula (IV), optionally a neutral lipid, preferably 1,2-distearoyl-sn-glycero-3-phosphocholine (DSPC) and optionally a steroid, preferably cholesterol, wherein the molar ratio of the cationic lipid to DSPC is optionally in the range from about 2:1 to 8:1, wherein the molar ratio of the cationic lipid to cholesterol is optionally in the range from about 2:1 to 1:1.

[0500] In a particular preferred embodiment, the composition of the second aspect comprising at least one artificial RNA of the first aspect comprises lipid nanoparticles (LNPs), which have a molar ratio of approximately 50:10:38.5:1.5, preferably 47.5:10:40.8:1.7 or more preferably 47.4:10:40.9:1.7 (i.e. proportion (mol %) of cationic lipid (preferably lipid 111-3), DSPC, cholesterol and PEG-lipid ((preferably PEG-lipid of Formula (IVa) with n=49); solubilized in ethanol).

[0501] In a particular preferred embodiment, the composition of the second aspect comprises lipid nanoparticles (LNPs), which have a molar ratio of approximately 50:10:38.5:1.5, preferably 47.5:10:40.8:1.7 or more preferably 47.4:10:40.9:1.7 (i.e. proportion (mol %) of cationic lipid (preferably lipid III-3), DSPC, cholesterol and PEG-lipid ((preferably PEG-lipid of Formula (IVa) with n=49); solubilized in ethanol), wherein the lipid nanoparticles comprise at least one RNA encoding prME, and, additionally lipid nanoparticles (LNPs), which have a molar ratio of approximately 50:10:38.5:1.5, preferably 47.5:10:40.8:1.7 or more preferably 47.4:10:40.9:1.7 (i.e. proportion (mol %) of cationic lipid (preferably lipid III-3), DSPC, cholesterol and PEG-lipid ((preferably PEG-lipid of Formula (IVa) with n=49); solubilized in ethanol), wherein the lipid nanoparticles comprise at least one RNA encoding NS1.

[0502] In a particular preferred embodiment, the composition of the second aspect comprises lipid nanoparticles (LNPs), which have a molar ratio of approximately 50:10:38.5:1.5, preferably 47.5:10:40.8:1.7 or more preferably 47.4:10:40.9:1.7 (i.e. proportion (mol %) of cationic lipid (preferably lipid III-3), DSPC, cholesterol and PEG-lipid ((preferably PEG-lipid of Formula (IVa) with n=49); solubilized in ethanol), wherein the lipid nanoparticles comprise at least one RNA encoding prME, and at least one RNA encoding NS1.

[0503] The total amount of RNA in the lipid nanoparticles may vary and is defined depending on the e.g. RNA to total lipid w/w ratio. In one embodiment of the invention the artificial RNA to total lipid ratio is less than 0.06 w/w, preferably between 0.03 w/w and 0.04 w/w.

[0504] In various embodiments, the LNP as defined herein have a mean diameter of from about 50 nm to about 200 nm, from about 60 nm to about 200 nm, from about 70 nm to about 200 nm, from about 80 nm to about 200 nm, from about 90 nm to about 200 nm, from about 90 nm to about 190 nm, from about 90 nm to about 180 nm, from about 90 nm to about 170 nm, from about 90 nm to about 160 nm, from about 90 nm to about 150 nm, from about 90 nm to about 140 nm, from about 90 nm to about 130 nm, from about 90 nm to about 120 nm, from about 90 nm to about 100 nm, from about 70 nm to about 90 nm, from about 80 nm to about 90 nm, from about 70 nm to about 80 nm, or about 30 nm, 35 nm, 40 nm, 45 nm, 50 nm, 55 nm, 60 nm, 65 nm, 70 nm, 75 nm, 80 nm, 85 nm, 90 nm, 95 nm, 100 nm, 105 nm, 110 nm, 115 nm, 120 nm, 125 nm, 130 nm, 135 nm, 140 nm, 145 nm, 150 nm, 160 nm, 170 nm, 180 nm, 190 nm, or 200 nm and are substantially non-toxic. As used herein, the mean diameter may be represented by the z-average as determined by dynamic light scattering as commonly known in the art.

[0505] In another preferred embodiment of the invention the lipid nanoparticles have a hydrodynamic diameter in the range from about 50 nm to about 300 nm, or from about 60 nm to about 250 nm, from about 60 nm to about 150 nm, or from about 60 nm to about 120 nm, respectively.

[0506] According to further embodiments, the composition of the second aspect may comprise at least one adjuvant. Suitably, the adjuvant is preferably added to enhance the immunostimulatory properties of the composition.

[0507] The term “adjuvant” as used herein will be recognized and understood by the person of ordinary skill in the art, and is for example intended to refer to a pharmacological and/or immunological agent that may modify, e.g. enhance, the effect of other agents (herein: the effect of the artificial nucleic acid of the invention) or that may be suitable to support administration and delivery of the composition. The term “adjuvant” refers to a broad spectrum of substances. Typically, these substances are able to increase the immunogenicity of antigens. For example, adjuvants may be recognized by the innate immune systems and, e.g., may elicit an innate immune response (that is, a non-specific immune response). “Adjuvants” typically do not elicit an adaptive immune response. In the context of the invention, adjuvants may enhance the effect of the antigenic peptide or protein provided by the artificial nucleic acid as defined herein or the polyprotein as defined herein.

[0508] In that context, the at least one adjuvant may be selected from any adjuvant known to a skilled person and suitable for the present case, i.e. supporting the induction of an immune response in a subject, e.g. in a human subject.

[0509] Accordingly, the composition of the second aspect may comprise at least one adjuvant, wherein the at least one adjuvant may be suitably selected from any adjuvant provided in of published PCT application WO2016/203025. Adjuvants disclosed in any of the claims 2 to 17 of WO2016/203025, preferably adjuvants disclosed in claim 17 of WO2016/203025 are particularly suitable, the specific content relating thereto herewith incorporated by reference.

[0510] The composition of the second aspect may comprise, besides the components specified herein, at least one further component which may be selected from the group consisting of further antigens (e.g. in the form of a peptide or protein) or further antigen-encoding nucleic acids; a further immunotherapeutic agent; one or more auxiliary substances (cytokines, such as monokines, lymphokines, interleukins or chemokines); or any further compound, which is known to be immune stimulating due to its binding affinity (as ligands) to human Toll-like receptors; and/or an adjuvant nucleic acid, preferably an immunostimulatory RNA (isRNA), e.g. CpG-RNA etc.

### Vaccine:

[0511] In a third aspect, the present invention provides a vaccine wherein the vaccine comprises at least one artificial RNA of the first aspect, or the composition of the second aspect.

[0512] Notably, embodiments relating to the composition of the second aspect may likewise be read on and be understood as suitable embodiments of the vaccine of the third aspect. Also, embodiments relating to the vaccine of the third aspect may likewise be read on and be understood as suitable embodiments of the composition of the second aspect.

[0513] The term “vaccine” will be recognized and understood by the person of ordinary skill in the art, and is for example intended to be a prophylactic or therapeutic material providing at least one epitope or antigen, preferably an immunogen. In the context of the invention the antigen or antigenic function is provided by the inventive artificial

[0514] RNA of the first aspect (said artificial RNA comprising a coding sequence encoding a antigenic peptide or protein derived from YFV prME and/or NS1) or the composition of the second aspect (comprising said artificial RNA).

[0515] In a particularly preferred embodiment of the third aspect, the vaccine comprises the artificial RNA of the first aspect, or the composition of the second aspect, wherein said artificial RNA or said composition elicits an adaptive immune response.

[0516] According to a preferred embodiment of the third aspect, the vaccine may further comprise a pharmaceutically acceptable carrier and optionally at least one adjuvant as specified in the context of the second aspect.

[0517] Suitable adjuvants in that context may be selected from adjuvants disclosed in claim 17 of WO2016/203025.

[0518] In embodiments the vaccine comprises a plurality or at least more than one of the artificial RNAs as defined in the context of the first aspect (prME and/or NS1) or the second aspect of the invention.

[0519] Any combination of mono-, bi- or multicistronic artificial nucleic acid, preferably RNA encoding the at least one antigenic peptide or protein derived from YFV, preferably derived from YFV prME, or any combination of antigens as defined herein (and optionally further antigens), provided as separate entities (containing one RNA species) or as combined entity (containing more than one RNA species, e.g. YFV prME in combination with e.g. YFV NS1 and/or YFV NS2), is understood as a vaccine according to the present invention.

[0520] The vaccine of the third aspect typically comprises a safe and effective amount of the artificial RNA of the first aspect. As used herein, “safe and effective amount” means an amount of the artificial nucleic acid, preferably the RNA, that is sufficient to significantly induce a positive modification of a disease or disorder related to an infection with a YFV. At the same time, a “safe and effective amount” is small enough to avoid serious side-effects. In relation to the vaccine or composition of the present invention, the expression “safe and effective amount” preferably means an amount of the artificial RNA that is suitable for stimulating the adaptive immune system in such a manner that no excessive or damaging immune reactions are achieved but, preferably, also no such immune reactions below a measurable level.

[0521] A “safe and effective amount” of the artificial RNA of the composition or vaccine as defined above will furthermore vary in connection with the particular condition to be treated and also with the age and physical condition of the patient to be treated, the severity of the condition, the duration of the treatment, the nature of the accompanying therapy, of the particular pharmaceutically acceptable carrier used, and similar factors, within the knowledge and experience of the accompanying medical doctor. Moreover, the “safe and effective amount” of the artificial RNA, the composition, the vaccine may depend from application route (intradermal, intramuscular), application device (jet injection, needle injection, microneedle patch) and/or complexation (protamine complexation or LNP encapsulation). Accordingly, the suitable “safe and effective amount” has to be adapted accordingly and will be chosen and defined by the skilled person.

[0522] The vaccine or composition according to the invention can be used according to the invention for human medical purposes and also for veterinary medical purposes (mammals, vertebrates, avian species), as a pharmaceutical composition, or as a vaccine.

[0523] In a preferred embodiment, the RNA, the composition, or the vaccine according to the invention is provided in lyophilized form (as defined herein using e.g. lyophilisation methods as described in WO2016/165831, WO2011/069586, WO2016/184575 or WO2016/184576). Preferably, the lyophilized RNA, or the lyophilized composition, or the lyophilized vaccine is reconstituted in a suitable buffer, advantageously based on an aqueous carrier, prior to administration, e.g. Ringer-Lactate solution or a phosphate buffer solution.

[0524] Accordingly, the pharmaceutically acceptable carrier as used herein preferably includes the liquid or non-liquid basis of the inventive vaccine. If the inventive vaccine is provided in liquid form, the carrier will be water, typically pyrogen-free water; isotonic saline or buffered (aqueous) solutions, e.g. phosphate, citrate etc. buffered solutions. Preferably, Ringer-Lactate solution is used as a liquid basis for the vaccine or the composition according to the invention as described in WO2006/122828, the disclosure relating to suitable buffered solutions incorporated herewith by reference.

[0525] The choice of a pharmaceutically acceptable carrier as defined herein is determined, in principle, by the manner, in which the pharmaceutical composition or vaccine according to the invention is administered. The composition or vaccine can be administered, for example, systemically or locally. Routes for systemic administration in general include, for example, transdermal, oral, parenteral routes, including subcutaneous, intravenous, intramuscular, intra-arterial, intradermal and intraperitoneal injections and/or intranasal administration routes. Routes for local administration in general include, for example, topical administration routes but also intradermal, transdermal, subcutaneous, or intramuscular injections or intralesional, intracranial, intrapulmonal, intracardial, intraarticular and sublingual injections. More preferably, composition or vaccines according to the present invention may be administered by an intradermal, subcutaneous, or intramuscular route, preferably by injection, which may be needle-free and/or needle injection. Compositions/vaccines are therefore preferably formulated in liquid or solid form. The suitable amount of the vaccine or composition according to the invention to be administered can be determined by routine experiments, e.g. by using animal models. Such models include, without implying any limitation, rabbit, sheep, mouse, rat, dog and non-human primate models. Preferred unit dose forms for injection include sterile solutions of water, physiological saline or mixtures thereof. The pH of such solutions should be adjusted to about 7.4. Suitable carriers for injection include hydrogels, devices for controlled or delayed release, polylactic acid and collagen matrices. Suitable pharmaceutically acceptable carriers for topical application include those which are suitable for use in lotions, creams, gels and the like. If the inventive composition or vaccine is to be administered perorally, tablets, capsules and the like are the preferred unit dose form. The pharmaceutically acceptable carriers for the preparation of unit dose forms which can be used for oral administration are well known in the prior art. The choice thereof will depend on secondary considerations such as taste, costs and storability, which are not critical for the purposes of the present invention, and can be made without difficulty by a person skilled in the art.

[0526] The inventive vaccine or composition can additionally contain one or more auxiliary substances as defined above in order to further increase the immunogenicity. A synergistic action of the nucleic acid contained in the inventive composition and of an auxiliary substance, which may be optionally be co-formulated (or separately formulated) with the inventive vaccine or composition as described above, is preferably achieved thereby. Preferably, such immunogenicity increasing agents or compounds are provided separately (not co-formulated with the inventive vaccine or composition) and administered individually.

[0527] Further additives which may be included in the inventive vaccine or composition are emulsifiers, such as, for example, Tween; wetting agents, such as, for example, sodium lauryl sulfate; colouring agents; taste-imparting agents, pharmaceutical carriers; tablet-forming agents; stabilizers; antioxidants; preservatives.

### Kit or Kit of Parts, Application, Medical Uses, Method of Treatment:

[0528] In a forth aspect, the present invention provides a kit or kit of parts, wherein the kit or kit of parts comprises the artificial RNA of the first aspect, the composition of the second aspect, or the vaccine of the third aspect, optionally comprising a liquid vehicle for solubilising, and optionally technical instructions providing information on administration and dosage of the components.

[0529] The technical instructions may contain information about administration and dosage and patient groups. Such kits, preferably kits of parts, may be applied e.g. for any of the applications or uses mentioned herein, preferably for the use of the artificial RNA, the composition comprising the artificial RNA, or the vaccine, for the treatment or prophylaxis of an infection or diseases caused by YFV or disorders related thereto. Preferably, the artificial RNA, the composition comprising the artificial RNA, or the vaccine is provided in a separate part of the kit, wherein the artificial RNA, the composition comprising the artificial RNA, or the vaccine is preferably lyophilised. The kit may further contain as a part a vehicle (e.g. buffer solution) for solubilising the artificial RNA, the composition comprising the artificial RNA, or the vaccine.

[0530] In an embodiment, where the composition of the second aspect, or the vaccine of the third aspect comprises more than on RNA species, said more than one mRNA species may be provided as separate entities (each containing one RNA species, preferably an LNP formulated RNA species, e.g. LNP formulated YFV prME mRNA and LNP formulated YFV NS1 and/or YFV NS2 mRNA) is understood as a vaccine according to the present invention.

[0531] In preferred embodiments, the kit or kit of parts as defined herein comprises Ringer lactate solution.

[0532] Any of the above kits may be used in a treatment or prophylaxis as defined herein. More preferably, any of the above kits may be used as a vaccine, preferably a vaccine against infections caused by YFV as defined herein.

### Medical Use:

[0533] In a further aspect, the present invention relates to the first medical use of the artificial RNA of the first aspect, the composition of the second aspect, the vaccine of the third aspect, or the kit or kit of parts of the forth aspect.

[0534] Accordingly, the artificial RNA of the first aspect, the composition of the second aspect, the vaccine of the third aspect, or the kit or kit of parts of the forth aspect is for use as a medicament.

[0535] The present invention furthermore provides several applications and uses of the artificial RNA of the first aspect, the composition of the second aspect, the vaccine of the third aspect, or the kit or kit of parts of the forth aspect. In particular, said RNA, composition, vaccine, or the kit or kit of parts may be used for human medical purposes and also for veterinary medical purposes, preferably for human medical purposes.

[0536] In particular, said RNA, composition, vaccine is for use as a medicament for human medical purposes, wherein said RNA, composition, vaccine may be particularly suitable for young infants, immunocompromised recipients, as well as pregnant and nursing women and elderly people.

[0537] In yet another aspect, the present invention relates to the second medical use of the artificial RNA of the first aspect, the composition of the second aspect, the vaccine of the third aspect, or the kit or kit of parts of the forth aspect.

[0538] Accordingly, the artificial RNA of the first aspect, the composition of the second aspect, the vaccine of the third aspect, or the kit or kit of parts of the forth aspect is for use in the treatment or prophylaxis of an infection with Yellow fever virus, or a disorder related to such an infection.

[0539] In particular, the artificial RNA of the first aspect, the composition of the second aspect, the vaccine of the third aspect, or the kit or kit of parts of the forth aspect may be used in the treatment or prophylaxis of an infection with flavivirus, in particular with YFV, or a disorder related to such an infection for human and also for veterinary medical purposes, preferably for human medical purposes.

[0540] As used herein, “a disorder related to a YFV infection” may preferably comprise a typical symptom or a complication of a flavivirus infection, such as, preferably a YFV infection.

[0541] Particularly, the artificial RNA of the first aspect, the composition of the second aspect, the vaccine of the third aspect, or the kit or kit of parts of the forth aspect may be used in a method of prophylactic (pre-exposure prophylaxis or post-exposure prophylaxis) and/or therapeutic treatment of infections caused by YFV.

[0542] The composition or the vaccine as defined herein, in particular the composition comprising at least one artificial nucleic acid according to the invention may preferably administered locally. In particular, composition or vaccines may be administered by an intradermal, subcutaneous, intranasal, or intramuscular route. Inventive compositions or vaccines of the invention are therefore preferably formulated in liquid (or sometimes in solid) form. In embodiments, the inventive vaccine may be administered by conventional needle injection or needle-free jet injection. Preferred in that context is the artificial RNA, the composition, the vaccine is administered by intramuscular needle injection.

[0543] The term “jet injection”, as used herein, refers to a needle-free injection method, wherein a fluid containing at least one artificial RNA of the first aspect, and, optionally, further suitable excipients is forced through an orifice, thus generating an ultra-fine liquid stream of high pressure that is capable of penetrating mammalian skin and, depending on the injection settings, subcutaneous tissue or muscle tissue. In principle, the liquid stream perforates the skin, through which the liquid stream is pushed into the target tissue. Preferably, jet injection is used for intradermal, subcutaneous or intramuscular injection of the artificial RNA, the composition, the vaccine.

[0544] In embodiments, the artificial RNA as comprised in a composition or vaccine as defined herein is provided in an amount of about 100 ng to about 500 ug, in an amount of about 1 ug to about 200 ug, in an amount of about 1 ug to about 100 ug, in an amount of about 5 ug to about 100 ug, preferably in an amount of about 1 ug to about 50 ug, specifically, in an amount of about 5 ug, 10 ug, 15 ug, 20 ug, 25 ug, 30 ug, 35 ug, 40 ug, 45 ug, 50 ug, 55 ug, 60 ug, 65 ug, 70 ug, 75 ug, 80 ug, 85 ug, 90 ug, 95 ug or 100 ug.

[0545] In embodiments, where the composition of the second aspect, or the vaccine of the third aspect comprises more than on RNA species, said more than one mRNA species may be administered as separate entities (each containing one RNA species, preferably an LNP formulated RNA species, e.g. LNP formulated YFV prME mRNA and LNP formulated YFV NS1 mRNA or YFV NS2 mRNA).

[0546] Depending from application route (intradermal, intramuscular, intranasal), application device (jet injection, needle injection, microneedle patch) and/or complexation (protamine complexation or LNP encapsulation) the suitable amount has to be adapted accordingly and will be chosen and defined by the skilled person.

[0547] The immunization protocol for the treatment or prophylaxis of an infection as defined herein, i.e. the immunization of a subject against a YFV, typically comprises a series of single doses or dosages of the composition or the vaccine. A single dosage, as used herein, refers to the initial/first dose, a second dose or any further doses, respectively, which are preferably administered in order to “boost” the immune reaction.

[0548] In one embodiment, the immunization protocol for the treatment or prophylaxis of an infection as defined herein, i.e. the immunization of a subject against a YFV, comprises one single doses of the composition or the vaccine.

[0549] The treatment or prophylaxis as defined above may comprise the administration of a further active pharmaceutical ingredient. In the case of the inventive vaccine or composition, which is based on the artificial RNA of the first aspect, a polypeptide may be co-administered as a further active pharmaceutical ingredient.

[0550] For example, at least one YFV protein or peptide as described herein, or a fragment or variant thereof, may be co-administered in order to induce or enhance an immune response. Further, two distinct artificial RNAs of the first aspect may be administered at different time points, preferably in a prime-boost scenario, e.g. using a composition comprising at least one YFV polypeptide as prime vaccination and a composition/vaccine comprising at least one artificial RNA of the first aspect as boost vaccination.

[0551] Suitably, the treatment or prophylaxis as defined above comprises the administration of a further active pharmaceutical ingredient, wherein the further active pharmaceutical ingredient may be an immunotherapeutic agent that can be selected from immunoglobulins, preferably IgGs, monoclonal or polyclonal antibodies, polyclonal serum or sera, etc., most preferably immunoglobulins directed against a YFV protein or peptide as defined herein. Preferably, such a further immunotherapeutic agent may be provided as a peptide/protein or may be encoded by a nucleic acid, preferably by a DNA or an RNA, more preferably an mRNA. Such an immunotherapeutic agent allows providing passive vaccination additional to active vaccination triggered by the inventive artificial nucleic acid or by the inventive polypeptide.

### Method of Treatment and Use, Diagnostic Method and Use:

[0552] In another aspect, the present invention relates to a method of treating or preventing a disorder. In preferred embodiments, the present invention relates to a method of treating or preventing a disorder, wherein the method comprises applying or administering to a subject in need thereof the artificial RNA of the first aspect, the composition of the second aspect, the vaccine of the third aspect, or the kit or kit of parts of the forth aspect.

[0553] In preferred embodiments, the disorder is an infection with YFV, or a disorder related to such an infection.

[0554] In preferred embodiments, the present invention relates to a method of treating or preventing a disorder, wherein the method comprises applying or administering to a subject in need thereof the artificial RNA of the first aspect, the composition of the second aspect, the vaccine of the third aspect, or the kit or kit of parts of the forth aspect, wherein the subject in need is a mammalian subject or an avian subject. In particularly preferred embodiments, the mammalian subject is a human subject.

[0555] In particular, such a method may preferably comprise the steps of:
[0556] a) providing the artificial RNA of the first aspect, the composition of the second aspect, the vaccine of the third aspect, or the inventive kit or kit of parts of the forth aspect;
[0557] b) applying or administering said RNA, composition, vaccine, or kit or kit of parts to a tissue or an organism;
[0558] c) optionally, administering immunoglobulin (IgGs) against a YFV.
[0559] d) optionally, administering a further substance (adjuvant, auxiliary substance, further antigen).

[0560] According to a further aspect, the present invention also provides a method for expression of at least one polypeptide comprising at least one peptide or protein derived from a YFV, or a fragment or variant thereof, wherein the method preferably comprises the following steps:

a) providing the artificial RNA of the first aspect or the composition of the second aspect; and
b) applying or administering said RNA or composition to an expression system (cells), a tissue, an organism.

[0561] The method may be applied for laboratory, for research, for diagnostic, for commercial production of peptides or proteins and/or for therapeutic purposes. The method may furthermore be carried out in the context of the treatment of a specific disease, particularly in the treatment of infectious diseases, e.g. flavivirus infections, particularly YFV infections.

[0562] Likewise, according to another aspect, the present invention also provides the use of the artificial RNA of the first aspect, the composition of the second aspect, the vaccine of the third aspect, or the inventive kit or kit of parts of the forth aspect preferably for diagnostic or therapeutic purposes, for expression of an encoded YFV antigenic peptide or protein, e.g. by applying or administering said RNA, composition, vaccine, e.g. to a cell-free expression system, a cell (e.g. an expression host cell or a somatic cell), a tissue or an organism.

[0563] The use may be applied for a (diagnostic) laboratory, for research, for diagnostics, for commercial production of peptides or proteins and/or for therapeutic purposes. The use may be carried out in vitro, in vivo or ex vivo. The use may furthermore be carried out in the context of the treatment of a specific disease, particularly in the treatment of a flavivirus infection, particularly YFV infection or a related disorder.

[0564] In a particularly preferred embodiment, the invention provides the artificial RNA of the first aspect, the composition of the second aspect, the vaccine of the third aspect, or the inventive kit or kit of parts of the forth aspect for use as a medicament, for use in treatment or prophylaxis, preferably treatment or prophylaxis of a YFV infection or a related disorder, or for use as a vaccine.

### BRIEF DESCRIPTION OF THE DRAWINGS

[0565] FIG. 1 shows that LNP-formulated mRNA encoding X-SS-prME-XX induces PRNT titers in non-human primates after i.m. injection. Further details are provided in Example 2.

[0566] FIG. 2 shows that LNP-formulated mRNA encoding X-SS-prME-XX induces long lasting PRNT titers in non-human primates after i.m. injection. Further details are provided in Example 2.

[0567] FIG. 3 shows that UTR combinations according to the invention increase the expression of YFV prME in vitro. Data shows the result of an ICW assay on HeLa cells. Values show % of the detected YFV signal. Values normalized to 100% according to the expression of the reference (UTR combination RPL32/ALB7), also indicated by dashed horizontal line. Water for injection (WFI) serves as a control. N=4. Further details are provided in Example 3.

[0568] FIG. 4 shows that UTR combinations according to the invention increase the expression of YFV prME in vitro. Data shows the result of an ICW assay on HDF cells. Values show % of the detected YFV signal. Values normalized to 100% according to the expression of the reference (UTR combination RPL32/ALB7), also indicated by dashed horizontal line. WFI serves as a control. N=6. Further details are provided in Example 3.

[0569] FIG. 5 shows that UTR combinations according to the invention increase the expression of YFV prME in vitro. Data shows the result of a dot-blot assay using supernatants of transfected HeLa cells. Values show % of the detected YFV signal. Values normalized to 100% according to the expression of the reference (UTR combination RPL32/ALB7), also indicated by dashed horizontal line. Further details are provided in Example 3.

[0570] FIG. 6 shows that UTR combinations according to the invention increase the expression of YFV prME in vivo. Data shows the result of a FACS-based immunoassay using supernatants of vaccinated mice.

[0571] FIG. 6A shows the result of serum samples of day 14 (1:100), FIG. 6B shows the result of serum samples of day 28 (1:150). Values show % of the detected YFV signal. Values normalized to 100% according to the reference UTR combination (RPL32/ALB7) expression (also indicated by dashed horizontal line). Further details are provided in Example 4.

[0572] FIG. 7 shows that UTR combinations according to the invention increase the expression of YFV prME in vivo. Data shows the result of a FACS-based immunoassay using supernatants of vaccinated mice.

[0573] FIG. 7A shows the result of serum samples of day 56 (1:200), FIG. 7B shows the result of serum samples of day 70 (1:500). Further details are provided in Example 4.

[0574] FIG. 8 shows that a dose of 1 ug mRNA encoding X-SS-prME-XX (LNP formulated) is sufficient to induce binding antibody titers. Further details are provided in Example 5.

[0575] FIG. 9 shows that LNP-formulated mRNA encoding X-SS-prME-XX induces PRNT titers in in mice after i.m. injection Further details are provided in Example 5.

[0576] FIG. 10 shows that Capt mRNA encoding YFV prME lead to an increased expression of YFV prME in vitro in comparison to m7G (Cap0) mRNA. Further details are provided in Example 6. (FIG. 10a: Western blot, FIG. 10b: relative signal intensity).

### EXAMPLES

[0577] The examples shown in the following are merely illustrative and shall describe the present invention in a further way. These examples shall not be construed to limit the present invention thereto.

### Example 1: Preparation of mRNA Constructs and Compositions for In Vitro and In Vivo Experiments

[0578] The present Example provides methods of obtaining the artificial RNA of the invention as well as methods of generating a composition or a vaccine of the invention.

1.1. Preparation of DNA and mRNA Constructs:

[0579] For the present examples, DNA sequences encoding YFV prME were prepared and used for subsequent RNA in vitro transcription reactions. Said DNA sequences were prepared by modifying the wild type encoding DNA sequences by introducing a G/C optimized or C-maximized sequence for stabilization. Sequences were introduced into a pUC19 derived vector to comprise stabilizing 3′-UTR sequences derived from an ALB7 gene, an alpha-globin gene, a PSMB3 gene, a CASP1 gene, a COX6B1 gene, or a NDUFA1 gene and 5′-UTR sequences derived from a RPL32 gene, a HSD17B4 gene, an ATP5A1 gene, a NDUFA4 gene, a NOSIP gene, a RPL31 gene, or a SLC7A3 gene, additionally comprising, a stretch of adenosines (64A or 75A), and, optionally, a histone-stem-loop (hSL) structure and/or, a stretch of 30 cytosines (C30) as listed in Table 3.

[0580] The obtained plasmid DNA constructs were transformed and propagated in bacteria using common protocols known in the art. Eventually, the plasmid DNA constructs were extracted, purified, and used for subsequent RNA in vitro transcription (see section 1.2).

[0581] Alternatively, DNA plasmids prepared according to paragraph 1 are used as DNA template for PCR-based amplification. Eventually, the generated PCR products are purified and used for subsequent RNA in vitro transcription (see section 1.3).

1.2. RNA In Vitro Transcription from Plasmid DNA Templates:

[0582] DNA plasmids prepared according to paragraph 1.1 were enzymatically linearized using EcoRI or SapI and used for DNA dependent RNA in vitro transcription using T7 RNA polymerase in the presence of a nucleotide mixture (ATP/GTP/CTP/UTP) and cap analog (m7GpppG, m7G(5′)ppp(5′)(2′OMeA)pG, or m7G(5′)ppp(5)(2′OMeG)pG) under suitable buffer conditions. The obtained mRNA constructs were purified using RP-HPLC (PureMessenger®, CureVac AG, Tubingen, Germany; WO2008/077592) and used for in vitro and in vivo experiments. RNA for clinical development (see Example 6) is produced under current good manufacturing practice e.g. according to WO2016/180430, implementing various quality control steps on DNA and RNA level. The generated RNA sequences/constructs are provided in Table 3 with the encoded YFV protein, the UTR elements, and the 3′-terminal end indicated therein. In addition to the information provided in Table 3, further information relating to specific mRNA construct SEQ-ID NOs may be derived from the information provided under <223> identifier provided in the ST.25 sequence listing.

[0583] Alternatively, EcoRI or SapI linearized DNA is used for DNA dependent RNA in vitro transcription using an RNA polymerase in the presence of a modified nucleotide mixture (ATP, GTP, CTP, N(1)-methylpseudouridine (m14P) or pseudouridine (Ψ) and cap analog (m7GpppG, m7G(5)ppp(5′)(2′OMeA)pG, or m7G(5′)ppp(5′)(2′OMeG)pG) under suitable buffer conditions. The obtained m14Ψ- or Ψ-modified mRNAs are purified using RP-HPLC (PureMessenger®, CureVac, Tubingen, Germany; WO2008/077592) and used for further experiments.

[0584] Some mRNA constructs are in vitro transcribed in the absence of a cap analog. The cap-structure (cap1) is added enzymatically using Capping enzymes as commonly known in the art. In short, in vitro transcribed mRNA is capped using an m7G capping kit with 2′-O-methyltransferase to obtain cap1-capped mRNA. Cap1-capped mRNA is purified using RP-HPLC (PureMessenger®, CureVac, Tubingen, Germany; WO2008/077592) and used for further experiments.

1.3. RNA In Vitro Transcription from PCR Amplified DNA Templates:

[0585] Purified PCR amplified DNA templates prepared according to paragraph 1.1 are transcribed in vitro using DNA dependent T7 RNA polymerase in the presence of a nucleotide mixture (ATP/GTP/CTP/UTP) and cap analog (m7GpppGunder suitable buffer conditions. Alternatively, PCR amplified DNA is transcribed in vitro using DNA dependent T7 RNA polymerase in the presence of a modified nucleotide mixture (ATP, GTP, CTP, N(1)-methylpseudouridine (m14′) or pseudourinde (Ψ)) and cap analog (m7GpppG, m7G(5′)ppp(5)(2′OMeA)pG or m7G(5′)ppp(5′)(2′OMeG)pG) under suitable buffer conditions. Some mRNA constructs are in vitro transcribed in the absence of a cap analog and the cap-structure (cap1) is added enzymatically using capping enzymes as commonly known in the art e.g. using an m7G capping kit with 2′-O-methyltransferase. The obtained mRNAs are purified e.g. using RP-HPLC (PureMessenger®, CureVac AG, Tubingen, Germany; WO2008/077592) and used for in vitro and in vivo experiments.

TABLE 3
mRNA constructs used in the present examples (Example 1)

| | | 5′-UTR/3′-URT; | | SEQ |
|---|---|---|---|---|
| RNA ID | construct | UTR Design | 3′-end | ID NO: |
| R2388/ | X-SS-prME-XX (opt1) | 3′-UTR of an alpha- | A64-N5-C30-hSL-N5 | 1194 |
| R2571/ | | globin gene (muag); i-3 | | |
| R6711 | | | | |
| R2581/ | X-SS-prME-XX (opt1) | RPL32/ALB7; i-2 | A64-N5-C30-hSL-N5 | 1074 |
| R2582/ | | | | |
| R3911 | | | | |
| R5351 | X-SS-prME-XX (opt1) | HSD17B4/PSMB3; a-1 | A64-N5 | 1308 |
| R5353 | X-SS-prME-XX (opt1) | HSD17B4/CASP1; b-4 | A64-N5 | 1310 |
| R5356 | X-SS-prME-XX (opt1) | SLC7A3/NDUFA1; d-5 | A64-N5 | 1313 |
| R5357 | X-SS-prME-XX (opt1) | ATP5A1/PSMB3; c-5 | A64-N5 | 1311 |
| R5360 | X-SS-prME-XX (opt1) | N0SIP/CASP1; g-4 | A64-N5 | 1314 |
| R5362 | X-SS-prME-XX (opt1) | RPL31/PSMB3; d-1 | A64-N5 | 1312 |
| R5364 | X-SS-prME-XX (opt1) | N0SIP/PSMB3; a-4 | A64-N5 | 1320 |
| R5367 | X-SS-prME-XX (opt1) | SLC7A3/CASP1; h-4 | A64-N5 | 1315 |
| R5368 | X-SS-prME-XX (opt1) | SLC7A3/COX6B1; h-5 | A64-N5 | 1316 |
| R5369 | X-SS-prME-XX (opt1) | NDUFA4/PSMB3; a-2 | A64-N5 | 1309 |
| R5372 | X-SS-prME-XX (opt1) | RPL32/ALB7; i-2 | A64-N5 | 1318 |
| R7229 | X-SS-prME-XX (opt1) | NDUFA4/PSMB3; a-2 | A64-N5-C30-hSL-N5 | 594 |
| R7230 | X-SS-prME-XX (opt1) | N0SIP/PSMB3; a-4 | A64-N5-C30-hSL-N5 | 1254 |
| R7231 | X-SS-prME-XX (opt1) | ATP5A1/PSMB3; c-5 | A64-N5-C30-hSL-N5 | 714 |
| R7232 | X-SS-prME-XX (opt1) | HSD17B4/CASP1; b-4 | A64-N5-C30-hSL-N5 | 654 |
| R7233 | X-SS-prME-XX (opt1) | HSD17B4/PSMB3; a-1 | A64-N5-C30-hSL-N5 | 534 |
| R8481/ | X-SS-prME-XX (opt1) | 3′-UTR of an alpha- | hSL-A64-N5 | 2171 |
| R8482 | | globin gene (muag); i-3 | | |
| R8483 | X-SS-prME-XX (opt1) | HSD17B4/PSMB3; a-1 | hSL-A100 | 2190 |
| R8484 | X-SS-prME-XX (opt1) | 3′-UTR of an alpha- | A64-N5-hSL-N5 | 2183 |
| | | globin gene (muag); i-3 | | |
| R7253 | X-SS-prME-XX (opt11) | 3′-UTR of an alpha- | A64-N5-C30-hSL-N5 | 1242 |
| | | globin gene (muag); i-3 | | |
| R7250 | X-SS-prME-XX (opt2) | 3′-UTR of an alpha- | A64-N5-C30-hSL-N5 | 1212 |
| | | globin gene (muag); i-3 | | |
| R7251 | X-SS-prME-XX (opt4) | 3′-UTR of an alpha- | A64-N5-C30-hSL-N5 | 1224 |
| | | globin gene (muag); i-3 | | |
| R7252 | X-SS-prME-XX (opt6) | 3′-UTR of an alpha- | A64-N5-C30-hSL-N5 | 1236 |
| | | globin gene (muag); i-3 | | |
| R2387 | X-SS-prME-XX (wt) | 3′-UTR of an alpha- | A64-N5-C30-hSL-N5 | 1188 |
| | | globin gene (muag); i-3 | | |
| R8491/ | X-SS-prME (opt1) | 3′-UTR of an alpha- | hSL-A64-N5 | 2173 |
| R8492 | | globin gene (muag); i-3 | | |
| R8493 | X-SS-prME (opt1) | HSD17B4/PSMB3; a-1 | hSL-A100 | 2191 |
| R2605/ | SS-prME (opt1) | 3′-UTR of an alpha- | A64-N5-C30-hSL-N5 | 1195 |
| R2606 | | globin gene (muag); i-3 | | |
| R2607/ | SS-prME (opt1) | RPL32/ALB7; i-2 | A64-N5-C30-hSL-N5 | 1075 |
| R2608 | | | | |
| R8488/ | SSjev(V3)-prME-XX (opt1) | 3′-UTR of an alpha- | hSL-A64-N5 | 2174 |
| R8489 | | globin gene (muag); i-3 | | |
| R8490 | SSjev(V3)-prME-XX (opt1) | HSD17B4/PSMB3; a-1 | hSL-A100 | 2192 |
| R8494/ | X-SS-prMEdelstem_TM-JEV (opt1) | 3′-UTR of an alpha- | hSL-A64-N5 | 2175 |
| R8495 | | globin gene (muag); i-3 | | |
| R8496 | X-SS-prMEdelstem_TM-JEV (opt1) | HSD17B4/PSMB3; a-1 | hSL-A100 | 2193 |
| R8497/ | SSjev(V3)-prMEdelstem_TM-JEV | 3′-UTR of an alpha- | hSL-A64-N5 | 2176 |
| R8498 | (opt1) | globin gene (muag); i-3 | | |
| R8499 | SSjev(V3)-prMEdelstem_TM-JEV | HSD17B4/PSMB3; a-1 | hSL-A100 | 2194 |
| | (opt1) | | | |
| R8501/ | eSS-NS1-Y (opt1) | 3′-UTR of an alpha- | hSL-A64-N5 | 2579 |
| R8502 | | globin gene (muag); i-3 | | |
| R8503 | eSS-NS1-Y (opt1) | HSD17B4/PSMB3; a-1 | hSL-A100 | 2588 |
| R8504/ | eSS-NS1 (opt1) | 3′-UTR of an alpha- | hSL-A64-N5 | 2580 |
| R8505 | | globin gene (muag); i-3 | | |
| R8506 | eSS-NS1 (opt1) | HSD17B4/PSMB3; a-1 | hSL-A100 | 2589 |
| R8507/ | SSIgE-NS1 (opt1) | 3′-UTR of an alpha- | hSL-A64-N5 | 2581 |
| R8508 | | globin gene (muag); i-3 | | |
| R8509 | SSIgE-NS1 (opt1) | HSD17B4/PSMB3; a-1 | hSL-A100 | 2590 |

1.4. Preparation of an LNP Formulated mRNA Composition:

[0586] Lipid nanoparticles (LNP), cationic lipids, and polymer conjugated lipids (PEG-lipid) were prepared and tested essentially according to the general procedures described in WO2015/199952, WO2017/004143 and WO2017/075531, the full disclosures of which are incorporated herein by reference. LNP formulated mRNA was prepared using an ionizable amino lipid (cationic lipid), phospholipid, cholesterol and a PEGylated lipid. Briefly, cationic lipid compound of Formula III-3, DSPC, cholesterol, and PEG-lipid of Formula IVa were solubilized in ethanol at a molar ratio (%) of approximately 50:10:38.5:1.5 or 47.5:10:40.9:1.7. LNPs comprising cationic lipid compound III-3 and PEG-lipid compound IVa were prepared at a ratio of mRNA to total Lipid of 0.03-0.04 w/w. The mRNA was diluted to 0.05 mg/mL to 0.2 mg/mL in 10 mM to 50 mM citrate buffer, pH 4. Syringe pumps were used to mix the ethanolic lipid solution with the mRNA aqueous solution at a ratio of about 1:5 to 1:3 (vol/vol) with total flow rates above 15m1/min. The ethanol was then removed and the external buffer replaced with a PBS buffer comprising Sucrose by dialysis. Finally, the lipid nanoparticles were filtered through a 0.2 um pore sterile filter and the LNP-formulated mRNA composition was adjusted to about 1 mg/ml total mRNA. Lipid nanoparticle particle diameter size was 60-90 nm as determined by quasi-elastic light scattering using a Malvern Zetasizer Nano (Malvern, UK). For other cationic lipid compounds mentioned in the present specification, the formulation process is essentially similar. The obtained LNP-formulated mRNA composition (1 mg/ml total mRNA) was diluted to the desired target concentration using Saline before in vivo application.

1.5. Preparation of a Protamine Complexed mRNA Composition:

[0587] mRNA constructs are complexed with protamine prior to use in in vivo immunization experiments. The mRNA formulation consisted of a mixture of 50% free mRNA and 50% mRNA complexed with protamine at a weight ratio of 2:1. First, mRNA was complexed with protamine by addition of protamine-Ringer's lactate solution to mRNA. After incubation for 10 minutes, when the complexes were stably generated, free mRNA is added, and the final concentration is adjusted with Ringer's lactate solution.

1.6. Preparation of Polymer-Lipidoid Complexed mRNA Composition:

[0588] mRNA constructs are complexed with a polymer-lipidoid prior to use in in vivo immunization experiments. 20 mg peptide (CHHHHHHRRRRHHHHHHC-NH2; SEQ ID NO: 55) TFA salt are dissolved in 2 mL borate buffer pH 8.5 and stirred at room temperature for approximately 18h. Then, 12.6 mg PEG-SH 5000 (Sunbright) dissolved in N-methylpyrrolidone is added to the peptide solution and filled up to 3 mL with borate buffer pH 8.5. After 18h incubation at room temperature, the reaction mixture is purified and concentrated by centricon procedure (MWCO 10 kDa), washed against water, and lyophilized. The obtained lyophilisate is dissolved in ELGA water and the concentration of the polymer is adjusted to 10 mg/mL. The obtained polyethylene glycol/peptide polymers (HO-PEG 5000-S-(S-CHHHHHHRRRRHHHHHHC-S-)7-S-PEG 5000-OH) are used for further formulation. Lipidoid component 3-C12 is obtained by acylation of tris(2-aminoethyl)amine with an activated lauric (C12) acid derivative, followed by reduction of the amide. Alternatively, it may be prepared by reductive amination with the corresponding aldehyde. Lipidoid 3-C12-OH is prepared by addition of the terminal C12 alkyl epoxide with the same oligoamine essentially according to e.g. Love et al., pp. 1864-1869, PNAS, vol. 107 (2010). Ringer lactate buffer (RiLa; alternatively e.g. saline (NaCl) or PBS buffer may be used), respective amounts of lipidoid, and respective amounts of said polymer are mixed to prepare compositions comprising a lipidoid and a peptide or polymer. Then, the polymer-lipidoid carrier compositions are used to assemble nanoparticles with the mRNA by mixing the mRNA with respective amounts of polymer-lipidoid carrier by incubation of 10 min at RT. In order to characterize the integrity of the obtained polymer-lipidoid complexed mRNA particles, RNA agarose gel shift assays are performed. In addition, size measurements are performed (gel shift assay, Zetasizer) to evaluate whether the obtained nanoparticles have a uniform size profile.

### Example 2: Vaccination of NHP with LNP Formulated YFV mRNA Vaccine

[0589] The present Example shows that LNP-formulated mRNA encoding YFV prME according to the invention induces long lasting PRNT titers in vaccinated NHPs.

[0590] Cynomolgus monkeys (Macaca fascicularis, two male and two female) were vaccinated intramuscularly on days 0, 28 and 56 with 10 ug LNP-formulated YFV X-SS-prME-XX mRNA (R3911). Animals received a single intramuscular injection in biceps femoris muscle at the day of vaccination. Serum samples were collected from all animals at day 0, 28, 56, and 77 to determine immunogenicity. Immune response to yellow fever virus was assessed in a plaque reduction neutralizing titer (PRNT) using an attenuated YFV 17D strain. The results of the PRNT assay are shown in FIG. 1. For assessing the durability of the immune responses, serum samples collected from all animals at day 294 were analyzed (see FIG. 2).

### 2.1. Plaque Reduction Neutralization Test (PRNT50):

[0591] Sera are analyzed by a plaque reduction neutralization test (PRNT50), performed as commonly known in the art. Briefly, obtained serum samples of vaccinated NHPs were incubated with YFV. That mixture is used to infect cultured cells, and the reduction in the number of plaques was determined. The results of the PRNT assay are shown in FIGS. 1 and 2.

### 2.2. Results:

[0592] As shown in FIG. 1, immunization of Cynomolgus macaques with LNP-formulated mRNA based vaccine led to the production of YF-specific neutralizing antibodies. The results of FIG. 2 further demonstrate that induced immune responses have a remarkable longevity as all vaccinated animals maintained high PRNT titers at day 294 post prime vaccination.

[0593] To further improve the efficiency of the mRNA-based vaccine, several alternative YFV prME mRNA constructs were designed harboring different UTR combinations to potentially increase translation efficiency of the mRNA. Those mRNA constructs were tested in vitro (see Example 3) and in vivo (see e.g. Example 4).

### Example 3: In Vitro Expression Screen of YFV mRNA Constructs in Cell Western (ICW) and Dot-Blot Analysis

[0594] The present Example shows that the UTR combinations according to the invention strongly improve the expression performance of said mRNA constructs compared to a reference mRNA construct (harboring RPL32/ALB7 UTRs) used e.g. in Example 2.

[0595] To determine in vitro protein expression performance of YFV prME mRNA constructs comprising different UTR combinations (mRNA constructs used: R5351, R5369, R5353, R5357, R5362, R5356, R5360, R5367, R5368, R5372, R5364 see Example 1, Table 3), different cell types were transiently transfected with said mRNA constructs and YFV prME antigen expression was analyzed using in cell western analysis (for HeLa, and HDF cells) and dot-blot analysis (for HeLa cells).

### 3.1. In Cell Western (ICW) Analysis on HeLa and HDF Cells:

[0596] HeLa cells and HDF cells were analyzed via ICW according to the following protocol: Cells were seeded on 96 well plates with black rim and clear optical bottom (Nunc Microplate; Thermo Fisher). HeLa cells or HDF (10,000 cells in 200 ul/well) were seeded 24h before transfection in a compatible complete cell medium. Cells were maintained at 37° C., 5% CO2. The day of transfection, the complete medium on HeLa or HDF was replaced with serum-free Opti-MEM medium (Thermo Fisher). Lipocomplexed mRNAs (Lipofectamine) were added to cells for transfection with 200 ng of RNA (HeLa & HDF) per well in a total volume of 150 ul. 90 min post start of transfection, 100 ul/well of transfection solution on HeLa or HDF was exchanged for 100 ul/well of complete medium. Cells were further maintained at 37° C., 5% CO2 before performing ICW.

[0597] 36h post start of transfection, YFV prME expression was quantified by ICW according to the following procedure (all steps performed at room temperature): First, cells were washed once with PBS and fixed with 3.7% formaldehyde in PBS for 10 min. After washing once in PBS, cells were permeabilized with Perm/Wash buffer (BD) for 30 min. Cells were blocked for 30 min with a mix of Odyssey blocking buffer (PBS) (LI-COR) and Perm/Wash buffer (BD) (1:1). Next, cells were incubated for 150 min with primary antibody directed against YFV prME (mouse monoclonal anti-YF (3576); Santa Cruz SC-58083/F1714; diluted 1:200 in BD). Cells were then washed 3 times (Perm/Wash buffer (BD)). Subsequently, cells were incubated with a mixture of secondary antibody (IRDye-coupled secondary antibody (IRDye 800CW goat anti-rabbit IgG; LI-COR; diluted 1:200 in BD) and Cell-Tag 700 Stain (LI-COR) (1:1000 in BD) for 1 h in the dark. After washing 4 times in BD, PBS was added to cells and plates scanned using an Odyssey® CLx Imaging system (LI-COR). Fluorescence (800 nm) was quantified using Image Studio Lite Software, normalized to the Cell-Tag 700 Stain and the results compared to expression from a reference construct containing the RPL32/ALB7 UTR-combination, set to a level of 100% expression. The results of the analysis are shown in FIG. 3 (HeLa cells) and FIG. 4 (HDF cells).

### 3.2. Dot Blot Analysis on HeLa Cells:

[0598] HeLa cells were seeded in a 24 well plate at a density of 300,000 cells/well in cell culture medium (RPMI, 10% FCS, 1% L-Glutamine, 1% Pen/Strep), 24h prior to transfection in a compatible complete cell medium. Cells were maintained at 37° C., 5% CO2. The day of transfection, the complete medium on HeLa was replaced with serum-free Opti-MEM medium (Thermo Fisher). Lipocomplexed mRNA (Lipofectamine) was added to cells for transfection with 500 ng of RNA per well in a total volume of 1000 ul. 90 min post start of transfection, transfection solution was exchanged of complete medium. Cells were further maintained at 37° C., 5% CO2. Supernatants were harvested 24h post transfection and 200 ul of each supernatant was used to performing Dot blot analysis. Non-specific sites of the membrane were blocked in blocking buffer (5% (w/v) skim milk powder in TBS with 0.1% Tween-20) for 1h at 4° C. on a shaker. Next, the membrane was incubated in primary antibody dilution (5 ul mouse anti-Flavivirus group antigen antibody; clone D1-4G2-4-15 (Millipore, 1:2000) in 10m1 dilution buffer (0.5% (w/v) skim milk powder in TBS with 0.1% Tween-20)) for 2h at RT in a 100m1 falcon tube on a rotating shaker. After 3×10 min washing steps in washing buffer (1×TBS with 0.1% Tween 20), the membrane was incubated in secondary antibody (goat anti-mouse IgG (H+L) IRDye 800CW; LI-COR Biosciences; 1:10000) for 1h at RT in the dark. After 3×10 min washing steps in washing buffer, the membrane was placed in TBS and subsequently imaged using an Odyssey CLx image system. The results were compared to the expression from a reference construct containing the RPL32/ALB7 UTR-combination which was set to a level of 100%. The results of the analysis are shown in FIG. 5.

### 3.3. Results:

[0599] As shown in FIGS. 3-5, the expression performances of the mRNA constructs comprising UTR combinations according to the invention were strongly increased compared to the construct comprising the reference UTR combination (RPL32/ALB7). Notably, the increase in expression was observed in different cell types (HeLa, HDF) using different in vitro assays (ICW, dot-blot). The herein identified advantageous UTR combinations were further analyzed in vivo (see Example 4).

### Example 4: Vaccination of Mice with mRNA Encoding YFV prME

[0600] The present Example shows that specific UTR combinations according to the invention also improved the expression performance of mRNA constructs in vivo. The data furthermore shows that mice vaccinated with said improved mRNA constructs show much higher humoral immune responses compared to mice vaccinated with a reference mRNA (harboring RPL32/ALB7 UTRs) used e.g. in Example 2.

### 4.1. Immunization Procedure:

[0601] Female BALB/c mice (8 animals per group) were injected intramuscularly (i.m.) with 50 ug non-formulated mRNA per dose. As a negative control, one group of mice (5 animals) was injected with buffer (ringer lactate). All animals were injected on day 0, 28 and 56. Blood samples were collected on day 14, 28, 56, and 70 for the determination of antibody titers. Further details are provided in Table 4 below.

TABLE 4
Vaccination regimen (Example 4):

| | RNA ID/SEQ | | UTR description | Volume per |
|---|---|---|---|---|
| Group | ID NO: | Construct | (5′-UTR/3′-UTR) | injection |
| 1 | R5353/1310 | X-SS-prME-XX (opt1) | HSD17B4/CASP1 | 2 × 25 ul |
| 2 | R5356/1313 | X-SS-prME-XX (opt1) | SLC7A3/NDUFA1 | 2 × 25 ul |
| 3 | R5357/1311 | X-SS-prME-XX (opt1) | ATP5A1/PSMB3 | 2 × 25 ul |
| 4 | R5360/1314 | X-SS-prME-XX (opt1) | NOSIP/CASP1 | 2 × 25 ul |
| 5 | R5362/1312 | X-SS-prME-XX (opt1) | RPL31/PSMB3 | 2 × 25 ul |
| 6 | R5367/1315 | X-SS-prME-XX (opt1) | SLC7A3/CASP1 | 2 × 25 ul |
| 7 | R5368/1316 | X-SS-prME-XX (opt1) | SLC7A3/COX6B1 | 2 × 25 ul |
| 8 | R5369/1309 | X-SS-prME-XX (opt1) | NDUFA4/PSMB3 | 2 × 25 ul |
| 9 | R5372/1318 | X-SS-prME-XX (opt1) | RPL32/ALB7 | 2 × 25 ul |
| 10 | RiLa | | | 2 × 25 ul |

### 4.2. Detection of Antigen Specific Humoral Immune Responses:

[0602] Hela cells were transfected with 2 ug YFV prME mRNA constructs (R3758) using lipofectamine. The cells were harvested 20h post transfection, and seeded at 1×10⁵ per well into a 96 well plate. The cells were incubated with corresponding sera of vaccinated mice (serum of day 14, diluted 1:100; serum of day 28, diluted 1:150; serum of day 56, diluted 1:200; serum of day 70, diluted 1:500) followed by a FITC-conjugated anti-mouse IgG antibody staining. Cells were acquired on BD FACS Canto II using DIVA software and analyzed by FlowJo. The results are shown in FIG. 6 (day 14 and day 28) and FIG. 7 (day 56 and day 70). As read out MFI of living cells (MFI=geometric mean fluorescence intensity) was used.

### 4.3. Results:

[0603] As shown in FIG. 6 and FIG. 7, the mRNA constructs encoding YFV prME harboring different UTR combinations of the invention are expressed in mice after i.m. administration. Moreover, as specific antigen IgGs were detected in sera of immunized mice, the results also show that the applied mRNA constructs are suitable to induce specific humoral immune responses. Furthermore, the results reveal that the mRNA constructs harboring different UTR combinations (HSD17B4/CASP1, Slc7a3/Ndufa1, ATP5A1/PSMB3, Nosip/CASP1, Rpl31/PSMB3, Slc7a3/CASP1, Slc7a3/COX6B1, Ndufa4/PSMB3) induce stronger immune responses compared to the reference mRNA construct (RPL32/ALB7) showing that these improved mRNA constructs may be particularly suitable for use as a vaccine, e.g. as an LNP-formulated mRNA based YFV vaccine (tested in Example 5).

### Example 5: Vaccination of Mice with LNP-Formulated mRNA Encoding YFV prME

[0604] The present example shows that LNP formulated mRNA vaccine efficiently induces binding Antibody titers in vaccinated mice at a low dose (paragraph 5.1). In addition, different mRNA constructs with optimized UTR combinations are tested as LNP-formulated vaccine (paragraph 5.4).

### 5.1. Immunization Procedure of the Dose Finding Experiment:

[0605] Female BALB/c mice (8 animals per group) were injected intramuscularly (i.m.) with LNP-formulated vaccine. As a negative control, one group of mice (5 animals) was injected with 0.9% NaCl buffer. All animals were injected on day 0 and 21. Blood samples were collected on day 21 and 35 for the determination of antibody titers. Further details are provided in Table 5 below.

TABLE 5
Vaccination regimen (Example 5.1):

| | RNA ID/SEQ | | Formu- | Dose per |
|---|---|---|---|---|
| Group | ID NO: | Construct | lation | injection |
| A | R6711/1194 | X-SS-prME-XX (opt1) | LNP | 10 ug |
| B | R6711/1194 | X-SS-prME-XX (opt1) | LNP | 5 ug |
| C | R6711/1194 | X-SS-prME-XX (opt1) | LNP | 1 ug |
| D | buffer | | | |

### 5.2 Detection of Antigen Specific Humoral Immune Responses:

[0606] HeLa cells were transfected with 2 ug R6711 using lipofectamine. Transfected cells were harvested 20h post transfection and seeded at 1×10^{5/}well into 96-well V-bottom plate. Cells were stained with live/dead marker, fixed, permeabilized, and subsequently incubated with sera of mRNA vaccinated mice (diluted 1:50) followed by FITC-conjugated anti-mouse IgG antibody. Cells were acquired on BD FACS Canto II using DIVA software and analyzed by FlowJo. The result is shown in FIG. 8. The results show that the LNP-formulated mRNA vaccine induces binding antibody titers at a dose of 1 ug.

### 5.3. Plaque Reduction Neutralization Test (PRNT50):

[0607] Sera are analyzed by a plaque reduction neutralization test (PRNT50), performed as commonly known in the art. Briefly, obtained serum samples of vaccinated mice were incubated with YFV. That mixture is used to infect cultured cells, and the reduction in the number of plaques was determined. The result of the PRNT assay is shown in FIG. 9. The result shows that the LNP-formulated mRNA vaccine led to the induction of YF-specific neutralizing antibodies.

5.4. Immunization Procedure of the mRNA Construct Evaluation Experiment:

[0608] Optimized YF mRNA constructs with inventive UTR combinations are used in the present experiment. Female BALB/c mice (6 animals per group) are injected intramuscularly (i.m.) with LNP-formulated mRNA with constructs as indicated in Table 6A and B. As a negative control, one group of mice is injected with buffer (ringer lactate). All animals are injected on day 0 and 21. Blood samples were collected on day 21 and 35 for the determination of antibody titers (as e.g. explained in paragraph 5.2). Splenocytes were isolated on day 35 for analysis of CD4/CD8 T cells. Further details are provided in Table 6A and B below.

TABLE 6A
Vaccination regimen (Example 5.4):

| | mRNA vaccine | | | | |
|---|---|---|---|---|---|
| Gr. Balb/C | | UTR description | RNA ID/SEQ | | Dose per |
| mice N = 8 | Construct | (5′-UTR/3′-UTR) | ID NO: | Formulation | injection |
| 1 | X-SS-prME-SS (opt1) | HSD17B4/CASP1 | R7232/654 | LNP | 5 ug |
| 2 | X-SS-prME-SS (opt1) | HSD17B4/CASP1 | R7232/654 | LNP | 1 ug |
| 3 | X-SS-prME-SS (opt1) | ATP5A1/PSMB3 | R7231/714 | LNP | 5 ug |
| 4 | X-SS-prME-SS (opt1) | ATP5A1/PSMB3 | R7231/714 | LNP | 1 ug |
| 5 | X-SS-prME-SS (opt1) | NOSIP/PSMB3 | R7230/1254 | LNP | 5 ug |
| 6 | X-SS-prME-SS (opt1) | NOSIP/PSMB3 | R7230/1254 | LNP | 1 ug |
| 7 | X-SS-prME-SS (opt1) | HSD17B4/PSMB3 | R7233/534 | LNP | 5 ug |
| 8 | X-SS-prME-SS (opt1) | HSD17B4/PSMB3 | R7233/534 | LNP | 1 ug |
| 9 | buffer | | | | |

TABLE 6B
Vaccination regimen (Example 5.4):

| | mRNA vaccine | | | | |
|---|---|---|---|---|---|
| Gr. Balb/C | | UTR description | RNA ID/SEQ | | Dose per |
| mice N = 8 | Construct | (5′-UTR/3′-UTR) | ID NO: | Formulation | injection |
| 1 | X-SS-prME-SS (opt2) | —/muag | R7250/1212 | LNP | 5 ug |
| 2 | X-SS-prME-SS (opt2) | —/muag | R7250/1212 | LNP | 1 ug |
| 3 | X-SS-prME-SS (opt4) | —/muag | R7251/1224 | LNP | 5 ug |
| 4 | X-SS-prME-SS (opt4) | —/muag | R7251/1224 | LNP | 1 ug |
| 5 | X-SS-prME-SS (opt6) | —/muag | R7252/1236 | LNP | 5 ug |
| 6 | X-SS-prME-SS (opt6) | —/muag | R7252/1236 | LNP | 1 ug |
| 7 | X-SS-prME-SS (opt11) | —/muag | R7253/1242 | LNP | 5 ug |
| 8 | X-SS-prME-SS (opt11) | —/muag | R7253/1242 | LNP | 1 ug |
| 9 | buffer | | | | |

### Example 6: In Vitro Expression Analysis of YFV mRNA Constructs Comprising Cap1 or Cap0 with Western Blot

[0609] The present Example shows that the use of Cap1 according to the invention strongly improve the expression performance of said mRNA construct compared to a reference mRNA construct comprising Cap0.

### 6.1. Western Blot Analysis

[0610] To determine in vitro protein expression performance of YFV prME mRNA constructs comprising different Cap analogues (mRNA constructs used: R7233 (cap0) and R7927 (cap1)), see Example 1, Table 3), HeLa cells were transiently transfected with said mRNA constructs and YFV prME antigen expression was analyzed in cell lysates using western blot analysis.

[0611] For the analysis HeLa cells were transfected with 2 μg unformulated mRNA (R7233 (cap0), R7927 (cap1) or WFI (negative control)) using 3 μl of Lipofectamine as the transfection reagent, and cell lysates were prepared 20h post transfection. Western Blot analysis was performed using anti-flavivirus group antigen (4G2; 1:2000 diluted) as primary antibody in combination with secondary anti-mouse IRDye 800CW labelled antibody. The result of the analysis is shown in FIG. 10.

### 6.2. Results:

[0612] For both of the tested mRNA constructs (R7233 (cap0) and R7927 (cap1) YFV protein was detectable. As shown in FIG. 10, the expression performances of the mRNA constructs comprising Capt according to the invention was strongly increased (2.4×) compared to the construct comprising Cap0.

### Example 7: Vaccination of Mice with LNP-Formulated mRNA Encoding YFV NS1

[0613] mRNA vaccines encoding YFV NS1 proteins (eSS-NS1, SSIgE-NS1, and eSS-NS1-Y) are prepared according to Example 1.

[0614] Female BALB/c mice or A129 mice (type-I interferon receptor deficient) (9-10 animals per group) are injected intramuscularly (i.m.) with LNP-formulated mRNA with constructs as indicated in Table 7. As a negative control, one group of mice is injected with LNP-formulated irrelevant mRNA. All animals are injected on day 0 and 21. Blood samples are collected on day 21 and 35 for the determination of antibody titers (as e.g. explained in paragraph 5.2) and NS1-specific antibodies will be detected via ELISA. Splenocytes are isolated on day 35 for analysis of CD4/CD8 T cells. A129 mice are challenged 2 weeks post last vaccination with YFV BeH 622205 strain (human case from Brazil, 2000), 10⁴ PFU via s.c. into foodpad. Upon challenge the mice are observed for 2 weeks regarding survival, body weight, morbidity index, temperature, and viremia.

TABLE 7
Vaccination regimen (Example 7):

| | mRNA vaccine | | | | |
|---|---|---|---|---|---|
| Gr. Balb/C | | UTR description | | | Dose per |
| mice N = 8 | Construct | (5′-UTR/3′-UTR) | RNA ID | Formulation | injection |
| 1 | eSS-NS1 | —/muag | R8504/R8505 | LNP | 1 μg, |
| | | | | | 2.5 μg or 5 μg |
| 2 | SSIgE-NS1 | —/muag | R8507/R8508 | LNP | 1 μg, |
| | | | | | 2.5 μg or 5 μg |
| 3 | eSS-NS1-Y | —/muag | R8501/R8502 | LNP | 1 μg, |
| | | | | | 2.5 μg or 5 μg |
| 4 | eSS-NS1 | HSD17B4/PSMB3 | R8506 | LNP | 1 μg, |
| | | | | | 2,5 μg or 5 μg |
| 5 | SSIgE-NS1 | HSD17B4/PSMB3 | R8509 | LNP | 1 μg, |
| | | | | | 2.5 μg or 5 μg |
| 6 | eSS-NS1-Y | HSD17B4/PSMB3 | R8503 | LNP | 1 μg, |
| | | | | | 2.5 μg or 5 μg |
| 7 | Irrelevant mRNA | | | LNP | 1 μg, |
| | | | | | 2.5 μg or 5 μg |

### Example 8: Vaccination of Mice with LNP-Formulated mRNA Encoding YFV prME and YFV NS1

[0615] To broaden and optimize the YFV specific immune response and to potentially reduce the pathogenicity of the YFV, mRNA vaccines encoding different YFV proteins (prME construct: SS-prME, X-SS-prME-XX, SSjev-prME, SSjev-prME-XX, SSIgE-prME, SSIgE-prME-XX, X-SS-prMEdelstem_TM-JEV, SSjev(V3)-prMEdelstem_TM-JEV, X-SS-prME and NS1 construct: eSS-NS1, SSIgE-NS1, and eSS-NS1-Y) are prepared according to Example 1.

[0616] In order to assess the effect of single or combined vaccines, these vaccines are administered i.m. with 2.5 ug mRNA for each antigen either alone or in combination as shown in Table 8.

TABLE 8
Vaccination regimen (Example 7):

| Gr. Balb/C | | UTR description | Formu- |
|---|---|---|---|
| mice N = 8 | Construct | (5′-UTR/3′-UTR) | lation |
| 1 | NS1 construct | —/muag or HSD17B4/PSMB3 | LNP |
| 2 | prME construct | —/muag or HSD17B4/PSMB3 | LNP |
| 3 | prME | —/muag or HSD17B4/PSMB3 | LNP |
| | construct + | | |
| | NS1 construct | | |
| 8 | Irrelevant | —/muag or HSD17B4/PSMB3 | LNP |
| | mRNA | | |

[0617] Female BALB/c mice or A129 mice (type-I interferon receptor deficient) (9-10 animals per group) are injected intramuscularly (i.m.) with LNP-formulated mRNA with constructs as indicated in Table 8. As a negative control, one group of mice is injected with buffer (ringer lactate). All animals are injected on day 0 and 21. Blood samples are collected on day 21 and 35 for the determination of antibody titers (as e.g. explained in paragraph 5.2) and YF-specific neutralizing antibodies are determined using the plaque reduction neutralization test (PRNT50) (as e.g. explained in paragraph 5.3) and NS1-specific antibodies are determined using ELISA, Splenocytes are isolated on day 35 for CD4/CD8 T cells analysis by ICS. A129 mice are challenged 2 weeks post last vaccination with YFV BeH 622205 strain (human case from Brazil, 2000), 10⁴ PFU via s.c. into foodpad. Upon challenge the mice are observed for 2 weeks regarding survival, body weight, morbidity index, temperature, and viremia.

### Example 9: Clinical Development of a YFV mRNA Vaccine Composition

[0618] To demonstrate safety and efficiency of the YFV mRNA vaccine composition, a clinical trial (phase I) is initiated. For clinical development, RNA is used that has been produced under GMP conditions (e.g. using a procedure as described in WO2016/180430).

[0619] In the clinical trial, a cohort of healthy human volunteers is intramuscularly injected for at least two times with respective LNP formulated vaccine compositions comprising favorable UTR combinations.

[0620] In order to assess the safety profile of the vaccine compositions according to the invention, subjects are monitored after administration (vital signals, vaccination site tolerability assessments, hematologic analysis).

[0621] The efficacy of the immunization is analyzed by determination of virus neutralizing titers (VNT) in sera from vaccinated subjects. Blood samples are collected on day 0 as baseline and after completed vaccination. Sera are analyzed for virus neutralizing antibodies.

1. An artificial RNA comprising
a) at least one heterologous 5′ untranslated region (5′-UTR) and/or at least one heterologous 3′ untranslated region (3′-UTR); and
b) at least one coding sequence operably linked to said 3′-UTR and/or 5′-UTR encoding at least one antigenic peptide or protein derived from a Yellow fever virus prME polyprotein or a fragment or variant thereof or a Yellow fewer virus NS1 protein or a fragment or variant thereof.

2. Artificial RNA according to claim 1, wherein the at least one heterologous 3′-UTR comprises a nucleic acid sequence derived from a 3′-UTR of a gene selected from an ALB7 gene, an alpha-globin gene, a PSMB3 gene, a CASP1 gene, a COX6B1 gene, a NDUFA1 gene, or from a homolog, a fragment or a variant thereof.

3. Artificial RNA according to claim 1, wherein the at least one heterologous 5′-UTR comprises a nucleic acid sequence derived from a 5′-UTR of a gene selected from a RPL32 gene, a HSD17B4 gene, a ATP5A1 gene, a NDUFA4 gene, a NOSIP gene, RPL31 gene, a SLC7A3 gene, or from a homolog, a fragment or variant of any one of these genes.

4. Artificial RNA according to any one of the preceding claims, comprising
a-1. at least one 5′-UTR derived from a 5′-UTR of a HSD17B4 gene, or from a corresponding RNA sequence, homolog, fragment or variant thereof and at least one 3′-UTR derived from a 3′-UTR of a PSMB3 gene, or from a corresponding RNA sequence, homolog, fragment or variant thereof; or
a-2. at least one 5′-UTR derived from a 5′-UTR of a NDUFA4 gene, or from a corresponding RNA sequence, homolog, fragment or variant thereof and at least one 3′-UTR derived from a 3′-UTR of a PSMB3 gene, or from a corresponding RNA sequence, homolog, fragment or variant thereof; or
a-4. at least one 5′ UTR derived from a 5′UTR of a NOSIP gene, or from a corresponding RNA sequence, homolog, fragment or variant thereof and at least one 3′ UTR derived from a 3′UTR of a PSMB3 gene, or from a corresponding RNA sequence, homolog, fragment or variant thereof; or
b-4. at least one 5′-UTR derived from a 5′-UTR of a HSD17B4 gene, or from a corresponding RNA sequence, homolog, fragment or variant thereof and at least one 3′-UTR derived from a 3′-UTR of a CASP1 gene, or from a corresponding RNA sequence, homolog, fragment or variant thereof; or
c-5. at least one 5′-UTR derived from a 5′-UTR of a ATP5A1 gene, or from a corresponding RNA sequence, homolog, fragment or variant thereof and at least one 3′-UTR derived from a 3′-UTR of a PSMB3 gene, or from a corresponding RNA sequence, homolog, fragment or variant thereof; or
d-1. at least one 5′-UTR derived from a 5′-UTR of a RPL31 gene, or from a corresponding RNA sequence, homolog, fragment or variant thereof and at least one 3′-UTR derived from a 3′-UTR of a PSMB3 gene, or from a corresponding RNA sequence, homolog, fragment or variant thereof; or
d-5. at least one 5′-UTR derived from a 5′-UTR of a SLC7A3 gene, or from a corresponding RNA sequence, homolog, fragment or variant thereof and at least one 3′-UTR derived from a 3′-UTR of a NDUFA1 gene, or from a corresponding RNA sequence, homolog, fragment or variant thereof; or
g-4. at least one 5′-UTR element derived from a 5′-UTR of a NOSIP gene, or from a corresponding RNA sequence, homolog, fragment or variant thereof and at least one 3′-UTR element derived from a 3′-UTR of a CASP1 gene, or from a corresponding RNA sequence, homolog, fragment or variant thereof; or
h-4. at least one 5′-UTR derived from a 5′-UTR of a SLC7A3 gene, or from a corresponding RNA sequence, homolog, fragment or variant thereof and at least one 3′-UTR derived from a 3′-UTR of a CASP1 gene, or from a corresponding RNA sequence, homolog, fragment or variant thereof; or
h-5. at least one 5′-UTR derived from a 5′-UTR of a SLC7A3 gene, or from a corresponding RNA sequence, homolog, fragment or variant thereof and at least one 3′-UTR derived from a 3′-UTR of a COX6B1 gene, or from a corresponding RNA sequence, homolog, fragment or variant thereof; or
i-2. at least one 5′-UTR derived from a 5′-UTR of a RPL32 gene, or from a corresponding RNA sequence, homolog, fragment or variant thereof and at least one 3′-UTR derived from a 3′-UTR of a ALB7 gene, or from a corresponding RNA sequence, homolog, fragment or variant thereof.
i-3. at least one 3′-UTR derived from a 3′-UTR of a alpha-globin gene, or from a corresponding RNA sequence, homolog, fragment or variant thereof.

5. Artificial RNA according to claim 4 comprising UTR elements according to a-1 (HSD17B4/PSMB3), a-4 (NDUFA4/PSMB3), b-4 (HSD17B4/CASP1), c-5 (ATP5A1/PSMB3), or g-4 (NOSIP/CASP1).

6. Artificial RNA according to any one of the preceding claims, wherein
said 5′-UTR derived from a HSD17B4 gene comprises or consists of a nucleic acid sequence being identical or at least 70%, 80%, 85%, 86%, 87%, 88%, 89%, 90%, 91%, 92%, 93%, 94%, 95%, 96%, 97%, 98%, or 99% identical to SEQ ID NOs: 1, 2 or a fragment or a variant thereof;
said 5′-UTR derived from a ATP5A1 gene comprises or consists of a nucleic acid sequence being identical or at least 70%, 80%, 85%, 86%, 87%, 88%, 89%, 90%, 91%, 92%, 93%, 94%, 95%, 96%, 97%, 98%, or 99% identical to SEQ ID NOs: 5, 6 or a fragment or a variant thereof;
said 5′-UTR derived from a NDUFA4 gene comprises or consists of a nucleic acid sequence being identical or at least 70%, 80%, 85%, 86%, 87%, 88%, 89%, 90%, 91%, 92%, 93%, 94%, 95%, 96%, 97%, 98%, or 99% identical to SEQ ID NOs: 3, 4 or a fragment or a variant thereof;
said 5′-UTR derived from a NOSIP gene comprises or consists of a nucleic acid sequence being identical or at least 70%, 80%, 85%, 86%, 87%, 88%, 89%, 90%, 91%, 92%, 93%, 94%, 95%, 96%, 97%, 98%, or 99% identical to SEQ ID NOs: 7, 8 or a fragment or a variant thereof;
said 5′-UTR derived from a RPL31 gene comprises or consists of a nucleic acid sequence being identical or at least 70%, 80%, 85%, 86%, 87%, 88%, 89%, 90%, 91%, 92%, 93%, 94%, 95%, 96%, 97%, 98%, or 99% identical to SEQ ID NOs: 9, 10 or a fragment or a variant thereof;
said 5′-UTR derived from a RPL32 gene comprises or consists of a nucleic acid sequence being identical or at least 70%, 80%, 85%, 86%, 87%, 88%, 89%, 90%, 91%, 92%, 93%, 94%, 95%, 96%, 97%, 98%, or 99% identical to SEQ ID NOs: 13, 14 or a fragment or a variant thereof;
said 5′-UTR derived from a SLC7A3 gene comprises or consists of a nucleic acid sequence being identical or at least 70%, 80%, 85%, 86%, 87%, 88%, 89%, 90%, 91%, 92%, 93%, 94%, 95%, 96%, 97%, 98%, or 99% identical to SEQ ID NOs: 11, 12 or a fragment or a variant thereof;
said 3′-UTR derived from a PSMB3 gene comprises or consists of a nucleic acid sequence being identical or at least 70%, 80%, 85%, 86%, 87%, 88%, 89%, 90%, 91%, 92%, 93%, 94%, 95%, 96%, 97%, 98%, or 99% identical to SEQ ID NOs: 15, 16 or a fragment or a variant thereof;
said 3′-UTR derived from a CASP1 gene comprises or consists of a nucleic acid sequence being identical or at least 70%, 80%, 85%, 86%, 87%, 88%, 89%, 90%, 91%, 92%, 93%, 94%, 95%, 96%, 97%, 98%, or 99% identical to SEQ ID NOs: 17, 18 or a fragment or a variant thereof;
said 3′-UTR derived from a COX6B1 gene comprises or consists of a nucleic acid sequence being identical or at least 70%, 80%, 85%, 86%, 87%, 88%, 89%, 90%, 91%, 92%, 93%, 94%, 95%, 96%, 97%, 98%, or 99% identical to SEQ ID NOs: 21, 22 or a fragment or a variant thereof;
said 3′-UTR derived from a NDUFA1 gene comprises or consists of a nucleic acid sequence being identical or at least 70%, 80%, 85%, 86%, 87%, 88%, 89%, 90%, 91%, 92%, 93%, 94%, 95%, 96%, 97%, 98%, or 99% identical to SEQ ID NOs: 19, 20 or a fragment or a variant thereof;
said 3′-UTR derived from a ALB7 gene comprises or consists of a nucleic acid sequence being identical or at least 70%, 80%, 85%, 86%, 87%, 88%, 89%, 90%, 91%, 92%, 93%, 94%, 95%, 96%, 97%, 98%, or 99% identical to SEQ ID NOs: 23, 24 or a fragment or a variant thereof;
said 3′-UTR derived from a alpha-globin gene comprises or consists of a nucleic acid sequence being identical or at least 70%, 80%, 85%, 86%, 87%, 88%, 89%, 90%, 91%, 92%, 93%, 94%, 95%, 96%, 97%, 98%, or 99% identical to SEQ ID NOs: 25, 26 or a fragment or a variant thereof.

7. Artificial RNA according to any one of the preceding claims, wherein the at least one antigenic peptide or protein derived from a Yellow fever virus prME polyprotein is pr, M, E, ME, prM or prME, or a fragment or variant of any of these.

8. Artificial RNA according to any one of the preceding claims, wherein the at least one antigenic peptide or protein is prME or prME additionally comprising a C-terminal overhang comprising a fragment of YFV non-structural protein NS1 and/or an N-terminal overhang comprising a fragment of YFV capsid protein C.

9. Artificial RNA according to any one of the preceding claims, wherein the at least one coding sequence encodes at least one of the amino acid sequences being identical or at least 70%, 80%, 85%, 86%, 87%, 88%, 89%, 90%, 91%, 92%, 93%, 94%, 95%, 96%, 97%, 98%, or 99% identical to any one of SEQ ID NOs: 120-126 or a fragment or variant of any of these sequences.

10. Artificial RNA according to any one of the preceding claims, wherein the at least one coding sequence additionally encodes at least one heterologous signal sequence, preferably signal sequence derived from IgE or Japanese encephalitis virus (JEV), or preferably selected from SEQ ID NOs: 56-61, 1330-1357 or a fragment or variant of any of these sequences.

11. Artificial RNA according to any one of the preceding claims, wherein the at least one coding sequence additionally encodes at least one heterologous further virus element, preferably a JEV stem sequence, preferably selected from SEQ ID NO: 110 or a fragment or variant of any of these sequences.

12. Artificial RNA according to any one of the preceding claims, wherein the at least one coding sequence encodes at least one of the amino acid sequences being identical or at least 70%, 80%, 85%, 86%, 87%, 88%, 89%, 90%, 91%, 92%, 93%, 94%, 95%, 96%, 97%, 98%, or 99% identical to any one of SEQ ID NOs: 127-157, 1587, 1588 or a fragment or variant of any of these sequences.

13. Artificial RNA according to claims 1-6, wherein the at least one antigenic peptide or protein is NS1 or NS1 additionally comprising a C-terminal overhang comprising a fragment of YFV non-structural protein NS2A and/or an N-terminal overhang comprising a fragment of YFV envelope protein E.

14. Artificial RNA according to claims 1-6 and 13, wherein the at least one coding sequence encodes at least one of the amino acid sequences being identical or at least 70%, 80%, 85%, 86%, 87%, 88%, 89%, 90%, 91%, 92%, 93%, 94%, 95%, 96%, 97%, 98%, or 99% identical to any one of SEQ ID NOs: 2201-2204 or a fragment or variant of any of these sequences.

15. Artificial RNA according to claims 1-6 and 13-14, wherein the at least one coding sequence additionally encodes at least one heterologous signal sequence, preferably signal sequence derived from IgE or Japanese encephalitis virus (JEV), preferably selected from SEQ ID NOs: 56-61, 1330-1356 or a fragment or variant of any of these sequences.

16. Artificial RNA according to claim 15, wherein the at least one coding sequence encodes at least one of the amino acid sequences being identical or at least 70%, 80%, 85%, 86%, 87%, 88%, 89%, 90%, 91%, 92%, 93%, 94%, 95%, 96%, 97%, 98%, or 99% identical to SEQ ID NOs: 2005 or a fragment or variant of thereof.

17. Artificial RNA according to any one of the preceding claims, wherein the at least one coding sequence is located between said 5′-UTR and said 3′-UTR, preferably downstream of said 5′-UTR and upstream of said 3′-UTR.

18. Artificial RNA according to any one of the preceding claims, wherein the at least one coding sequence comprises at least one of the nucleic acid sequences being identical or at least 70%, 80%, 85%, 86%, 87%, 88%, 89%, 90%, 91%, 92%, 93%, 94%, 95%, 96%, 97%, 98%, or 99% identical to SEQ ID NOs: 158-527, 1589-1608, 2206-2245 or a fragment or a fragment or variant of any of these sequences.

19. Artificial RNA according to any one of the preceding claims, wherein the artificial RNA is a modified and/or stabilized artificial RNA.

20. Artificial RNA according to any one of the preceding claims, wherein the at least one coding sequence is a codon modified coding sequence, wherein the amino acid sequence encoded by the at least one codon modified coding sequence is preferably not being modified compared to the amino acid sequence encoded by the corresponding wild type coding sequence.

21. Artificial RNA according to claim 20, wherein the at least one codon modified coding sequence is selected from C maximized coding sequence, CAI maximized coding sequence, human codon usage adapted coding sequence, G/C content modified coding sequence, and G/C optimized coding sequence, or any combination thereof.

22. Artificial RNA according to claim 20 or 21, wherein the at least one coding sequence comprises a codon modified coding sequence comprising a nucleic acid sequence being identical or at least 70%, 80%, 85%, 86%, 87%, 88%, 89%, 90%, 91%, 92%, 93%, 94%, 95%, 96%, 97%, 98%, or 99% identical to any one of SEQ ID NOs: 195-527, 1591-1608, 2211-2245 or a fragment or variant of any of these sequences.

23. Artificial RNA according to claim 22, wherein the at least one coding sequence comprises a codon modified coding sequence comprising a nucleic acid sequence being identical or at least 70%, 80%, 85%, 86%, 87%, 88%, 89%, 90%, 91%, 92%, 93%, 94%, 95%, 96%, 97%, 98%, or 99% identical to any one of SEQ ID NOs: 195-305, 1591-1596, 2211-2215 or a fragment or variant of any of these sequences.

24. Artificial RNA according to any one of the preceding claims, wherein the RNA is an mRNA, a self-replicating RNA, a circular RNA, or a replicon RNA.

25. Artificial RNA according to claim 24, wherein the RNA is an mRNA.

26. Artificial RNA according to any one of the preceding claims, which comprises a 5′-cap structure, preferably m7G, cap0, cap1 or cap2.

27. Artificial RNA according to any one of the preceding claims, which comprises at least one histone stem-loop, wherein the histone stem-loop preferably comprises a nucleic acid sequence according to SEQ ID NOs: 27, 28 or a fragment or variant thereof.

28. Artificial RNA according to any one of the preceding claims which comprises a 3′-terminal sequence element according to SEQ ID NOs: 32-51, 1323-1329 or a fragment or variant thereof.

29. Artificial RNA according to any one of the preceding claims comprising, preferably in 5′- to 3′-direction, the following elements a) to h):
a) 5′-cap structure, preferably as defined in claim 26;
b) optionally, 5′-UTR, preferably as defined by any one of claim 3 or 6;
c) at least one coding sequence, preferably as defined by any one of claims 9 to 23;
d) 3′-UTR, preferably as defined by any one of claim 2 or 6;
e) optionally, a poly(A) sequence;
f) optionally, a poly(C) sequence,
g) optionally, a histone stem-loop, preferably as defined by any one of claim 27;
h) optionally, a 3′-terminal sequence element as defined by claim 28.

30. Artificial RNA according claims 1 to 29 comprising the following elements:
a) 5′-cap structure, preferably as defined in claim 26;
b) a 5′-UTR and a 3′-UTR according to a-1, a-2, a-4, b-4, c-5, d-1, d-5, g-4, h-4, h-5, i-2, or i-3;
c) at least one coding sequence as defined in claims 9 to 23, wherein said coding sequence is located between said 5′-UTR and said 3′-UTR, preferably downstream of said 5′-UTR and upstream of said 3′-UTR.
e) optionally, a poly(A) sequence
f) optionally, poly(C) sequence
g) optionally, histone stem-loop, preferably as defined by any one of claim 27;
h) optionally, a 3′-terminal sequence element as defined by claim 28.

31. Artificial RNA according claims 1 to 30 comprising the following elements:
a) 5′-cap structure, preferably as defined in claim 26;
b) a 5′-UTR and a 3′-UTR according to a-1, a-4, b-4, c-5, or g-4;
c) at least one coding sequence as defined in claims 9 to 23, wherein said coding sequence is located between said 5′-UTR and said 3′-UTR, preferably downstream of said 5′-UTR and upstream of said 3′-UTR.
d) optionally, a poly(A) sequence,
e) optionally, poly(C) sequence,
f) optionally, histone stem-loop, preferably as defined by any one of claim 27;
g) optionally, a 3′-terminal sequence element as defined by claim 28.

32. Artificial RNA according to any one of claims 25 to 31, wherein the artificial RNA comprises or consists of an RNA sequence which is identical or at least 70%, 80%, 85%, 86%, 87%, 88%, 89%, 90%, 91%, 92%, 93%, 94%, 95%, 96%, 97%, 98%, or 99% identical to a nucleic acid sequence selected from the group consisting of SEQ ID NOs: 528-1320, 1609-2200, 2246-2593 or a fragment or variant of any of these sequences.

33. Artificial RNA according to claim 32, wherein
said artificial RNA comprises or consists of an RNA sequence which is identical or at least 70%, 80%, 85%, 86%, 87%, 88%, 89%, 90%, 91%, 92%, 93%, 94%, 95%, 96%, 97%, 98%, or 99% identical to a nucleic acid sequence selected from the group consisting of SEQ ID NOs: 528-587, 1308, 1609-1648, 2129-2134, 2141-2146, 2153-2158, 2165-2170, 2177-2182, 2189-2194, 2246-2269, 2558-2560, 2576-2578, 2564-2566, 2582-2584, 2570-2572, 2588-2590 or a fragment or variant of any of these sequences;
said artificial RNA comprises or consists of an RNA sequence which is identical or at least 70%, 80%, 85%, 86%, 87%, 88%, 89%, 90%, 91%, 92%, 93%, 94%, 95%, 96%, 97%, 98%, or 99% identical to a nucleic acid sequence selected from the group consisting of SEQ ID NOs: 1248-1307, 1320, 2089-2128, 2534-2557 or a fragment or variant of any of these sequences;
said artificial RNA comprises or consists of an RNA sequence which is identical or at least 70%, 80%, 85%, 86%, 87%, 88%, 89%, 90%, 91%, 92%, 93%, 94%, 95%, 96%, 97%, 98%, or 99% identical to a nucleic acid sequence selected from the group consisting of SEQ ID NOs: 648-707, 1310, 1689-1728, 2294-2317 or a fragment or variant of any of these sequences;
said artificial RNA comprises or consists of an RNA sequence which is identical or at least 70%, 80%, 85%, 86%, 87%, 88%, 89%, 90%, 91%, 92%, 93%, 94%, 95%, 96%, 97%, 98%, or 99% identical to a nucleic acid sequence selected from the group consisting of SEQ ID NOs: 708-767, 1311, 1729-1768, 2318-2341 or a fragment or variant of any of these sequences;
said artificial RNA comprises or consists of an RNA sequence which is identical or at least 70%, 80%, 85%, 86%, 87%, 88%, 89%, 90%, 91%, 92%, 93%, 94%, 95%, 96%, 97%, 98%, or 99% identical to a nucleic acid sequence selected from the group consisting of SEQ ID NOs: 888-947, 1314, 1849-1888, 2390-2413 or a fragment or variant of any of these sequences; or
said artificial RNA comprises or consists of an RNA sequence which is identical or at least 70%, 80%, 85%, 86%, 87%, 88%, 89%, 90%, 91%, 92%, 93%, 94%, 95, 96%, 97%, 98%, or 99% identical to a nucleic acid sequence selected from the group consisting of SEQ ID NOs: 1188-1247, 1319, 2049-2088, 2135-2140, 2147-2152, 2159-2164, 2171-2176, 2183-2188, 2195-2200, 2510-2533, 2561-2563, 2579-2581, 2567-2569, 2585-2587, 2573-2575, 2591-2593 or a fragment or variant of any of these sequences.

34. A composition comprising at least one artificial RNA as defined in any one of claims 1 to 33, wherein the composition optionally comprises at least one pharmaceutically acceptable carrier.

35. Composition according to claim 34, wherein the composition comprises at least one YFV prME RNA construct, preferably selected from X-SS-prME-XX, X-SS-prME, SS-prME, SSjev(V3)-prME-XX, X-SS-prMEdelstem_TM-JEV or SSjev(V3)-prMEdelstem_TM-JEV and, in addition, at least one YFV NS1 RNA construct, preferably selected from eSS-NS1-Y, eSS-NSE and SSIgE-NS1.

36. Composition according to claim 35 or 34, wherein the at least one artificial RNA is complexed or associated with or at least partially complexed or partially associated with one or more cationic or polycationic compound, preferably cationic or polycationic polymer, cationic or polycationic polysaccharide, cationic or polycationic lipid, cationic or polycationic protein, cationic or polycationic peptide, or any combinations thereof.

37. Composition according to claim 36, wherein the cationic or polycationic peptide is protamine.

38. Composition according to any one of claim 36 or 37 comprising the at least one artificial RNA, which is complexed with one or more cationic or polycationic compounds, preferably protamine, and at least one free artificial RNA.

39. Composition according to claim 36, wherein the cationic or polycationic peptide is selected from CHHHHHHRRRRHHHHHHC (SEQ ID NO: 55), CRRRRRRRRRRRRC (SEQ ID NO: 52), CRRRRRRRRRRRR (SEQ ID NO: 53), or WRRRRRRRRRRRRC (SEQ ID NO: 54), or a fragment or variant of any of these sequences.

40. Composition according to claim 36, wherein the cationic or polycationic polymer is a polyethylene glycol/peptide polymer selected from HO-PEG5000-S-(S-CHHHHHHRRRRHHHHHHC-S-)7-S-PEG5000-OH (SEQ ID NO: 55 of the peptide monomer), HO-PEG5000-S-(S-CHHHHHHRRRRHHHHHHC-S-)4-S-PEG5000-0H (SEQ ID NO: 55 as peptide monomer), HO-PEG5000-S-(S-CGHHHHHRRRRHHHHHGC-S-)7-S-PEG5000-0H (SEQ ID NO: 1321 as peptide monomer), or HO-PEG5000-S-(S-CGHHHHHRRRRHHHHHGC-S-)4-S-PEG5000-0H (SEQ ID NO: 1321 as peptide monomer).

41. Composition according to claim 40, wherein the composition comprises a lipid component, preferably a lipidoid component, wherein the lipidoid component is a compound according to formula A

[chemical structure]

42. Composition according to claim 41, wherein the lipidoid component is 3-C12-OH according to formula B.

[chemical structure]

43. Composition according to claim 36, wherein the artificial RNA is complexed or associated with one or more lipids, thereby forming liposomes, lipid nanoparticles, lipoplexes, and/or nanoliposomes.

44. Composition according to claim 43, wherein the artificial RNA is complexed with one or more lipids thereby forming lipid nanoparticles (LNP).

45. Composition according to claim 44, wherein the LNP comprises a cationic lipid with the formula [chemical structure]
or a pharmaceutically acceptable salt, tautomer, prodrug or stereoisomer thereof, wherein:
L¹ or L² is each independently —O(C═O)—, —(C═O)O—, —C(═O)—, —O—, —S(O)X—, —S—S—, —C(═O)S—, —SC(═O)—, —NR^{a}C(═O)—, —C(═O)NR^{a}—, —NR^{a}C(═O)NR^{a}—, —OC(═O)NR^{a}— or —NR^{a}C(═O)O—, preferably L¹ or L² is —O(C═O)— or —(C═O)O—;
G¹ and G² are each independently unsubstituted C₁-C₁₂ alkylene or C₁-C₁₂ alkenylene;
G³ is C₁-C₂₄ alkylene, alkenylene, C₃-C₈ cycloalkylene, or C₃-C₈ cycloalkenylene;
R^{a} is H or C₁-C₁₂ alkyl;
R¹ and R² are each independently C₆-C₂₄ alkyl or C₆-C₂₄ alkenyl;
R³ is H, OR⁵, CN, —C(═O)OR⁴, —OC(═O)R⁴ or —NR⁵C(═O)R⁴;
R⁴ is C₁-C₁₂ alkyl;
R⁵ is H or C₁-C₆ alkyl; and
x is 0, 1 or 2;

46. Composition according to claim 45, wherein the cationic lipid is a compound of formula III, and wherein:
L¹ and L² are each independently —O(C═O)— or (C═O)—O—;
G³ is C₁-C₂₄ alkylene or C₁-C₂₄ alkenylene; and
R³ is H or OR⁵.

47. Composition according to any one of claims 45 to 46, wherein the cationic lipid is a compound of formula III, and wherein:
L¹ and L² are each independently —O(C═O)— or (C═O)—O—; and
R¹ and R² each independently have one of the following structures:

[chemical structure]

48. Composition according to any one of claims 45 to 47, wherein the cationic lipid is a compound of formula III, and wherein R³ is OH.

49. Composition according to any one of claims 45 to 48, wherein the cationic lipid is selected from structures III-1 to III-36:

| No. | Structure |
|---|---|
| III-1 | [chemical structure] |
| III-2 | [chemical structure] |
| III-3 | [chemical structure] |
| III-4 | [chemical structure] |
| III-5 | [chemical structure] |
| III-6 | [chemical structure] |
| III-7 | [chemical structure] |
| III-8 | [chemical structure] |
| III-9 | [chemical structure] |
| III-10 | [chemical structure] |
| III-11 | [chemical structure] |
| III-12 | [chemical structure] |
| III-13 | [chemical structure] |
| III-14 | [chemical structure] |
| III-15 | [chemical structure] |
| III-16 | [chemical structure] |
| III-17 | [chemical structure] |
| III-18 | [chemical structure] |
| III-19 | [chemical structure] |
| III-20 | [chemical structure] |
| III-21 | [chemical structure] |
| III-22 | [chemical structure] |
| III-23 | [chemical structure] |
| III-24 | [chemical structure] |
| III-25 | [chemical structure] |
| III-26 | [chemical structure] |
| III-27 | [chemical structure] |
| III-28 | [chemical structure] |
| III-29 | [chemical structure] |
| III-30 | [chemical structure] |
| III-31 | [chemical structure] |
| III-32 | [chemical structure] |
| III-33 | [chemical structure] |
| III-34 | [chemical structure] |
| III-35 | [chemical structure] |
| III-36 | [chemical structure] |

50. Composition according to any one of claims 45 to 49, wherein the cationic lipid is

[chemical structure]

51. Composition according to any one of claims 44 to 50, wherein the LNP additionally comprises a PEG lipid with the formula (IV): [chemical structure]
wherein R⁸ and R⁹ are each independently a straight or branched, saturated or unsaturated alkyl chain containing from 10 to 30 carbon atoms, wherein the alkyl chain is optionally interrupted by one or more ester bonds;
and w has a mean value ranging from 30 to 60.

52. Composition according to claim 51, wherein in the PEG lipid R⁸ and R⁹ are saturated alkyl chains.

53. Composition according to claim 51 or 52, wherein the PEG lipid is [chemical structure]
wherein n has a mean value ranging from 30 to 60, preferably wherein n has a mean value of about 45, 46, 47, 48, 49, 50, 51, 52, 53, 54, most preferably wherein n has a mean value of 49.

54. Composition according to any one of claims 44 to 53, wherein the LNP additionally comprises one or more neutral lipids and/or a steroid or steroid analogues.

55. Composition according to claim 54, wherein the neutral lipid is selected from the group comprising distearoylphosphatidylcholine (DSPC), dioleoylphosphatidylcholine (DOPC), dipalmitoylphosphatidylcholine (DPPC), dioleoylphosphatidylglycerol (DOPG), dipalmitoylphosphatidylglycerol (DPPG), dioleoyl-phosphatidylethanolamine (DOPE), palmitoyloleoylphosphatidylcholine (POPC), palmitoyloleoyl-phosphatidylethanolamine (POPE) and dioleoyl-phosphatidylethanolamine 4-(N-maleimidomethyl)-cyclohexane-1carboxylate (DOPE-mal), dipalmitoyl phosphatidyl ethanolamine (DPPE), dimyristoylphosphoethanolamine (DMPE), distearoyl-phosphatidylethanolamine (DSPE), 16-O-monomethyl PE, 16-O-dimethyl PE, 18-1-trans PE, 1-stearioyl-2-oleoylphosphatidyethanol amine (SOPE), and 1,2-dielaidoyl-sn-glycero-3-phophoethanolamine (transDOPE).

56. Composition according to claim 54 or 55 wherein the neutral lipid is 1,2-distearoyl-sn-glycero-3-phosphocholine (DSPC), and wherein the molar ratio of the cationic lipid to DSPC is optionally in the range from about 2:1 to 8:1.

57. Composition according to claim 54, wherein the steroid is cholesterol, and wherein the molar ratio of the cationic lipid to cholesterol is optionally in the range from about 2:1 to 1:1

58. Composition according to any one of claims 44 to 57, wherein the LNP essentially consists of
(i) at least one cationic lipid, preferably as defined in any one of claims 47 to 50;
(ii) a neutral lipid, preferably as defined in any one of claims 54 to 56;
(iii) a steroid or steroid analogue, preferably as in claim 57; and
(iv) a PEG-lipid, e.g. PEG-DMG or PEG-cDMA, preferably as defined in any one of claims 51 to 53,
wherein (i) to (iv) are in a molar ratio of about 20-60% cationic lipid, 5-25% neutral lipid, 25-55% sterol, and 0.5-15% PEG-lipid.

59. A vaccine comprising the artificial RNA as defined in any one of claims 1 to 33, or the composition as defined in any one of claims 34 to 58.

60. Vaccine according to claim 56, wherein the artificial RNA as defined in any one of claims 1 to 33 or the composition as defined in any one of claims 34 to 58 elicits an adaptive immune response.

61. Vaccine according to claim 59 or 60, wherein the vaccine further comprises a pharmaceutically acceptable carrier and optionally at least one adjuvant.

62. A Kit or kit of parts comprising the artificial RNA as defined in any one of claims 1 to 33, the composition as defined in any one of claims 34 to 58, or the vaccine as defined in any one of claims 59 to 61, optionally comprising a liquid vehicle for solubilising, and optionally technical instructions providing information on administration and dosage of the components.

63. Kit or kit of parts according to claim 62 further comprising Ringer lactate solution.

64. Artificial RNA as defined in any one of claims 1 to 33, the composition as defined in any one of claims 34 to 58, the vaccine as defined in any one of claims 59 to 61, or the kit or kit of parts as defined in claims 62 to 63 for use as a medicament.

65. Artificial RNA as defined in any one of claims 1 to 33, the composition as defined in any one of claims 34 to 58, the vaccine as defined in any one of claims 59 to 61, or the kit or kit of parts as defined in claims 62 to 63 for use in the treatment or prophylaxis of an infection with Yellow fever virus, or a disorder related to such an infection.

66. A method of treating or preventing a disorder, wherein the method comprises applying or administering to a subject in need thereof the artificial RNA as defined in any one of claims 1 to 33, the composition as defined in any one of claims 34 to 58, the vaccine as defined in any one of claims 59 to 61, or the kit or kit of parts as defined in claims 62 to 63.

67. Method according to claim 66, wherein the disorder is an infection with a Yellow fever virus, or a disorder related to such an infection.

68. Method according to claim 66 or 67, wherein the subject in need is a mammalian subject or an avian subject.

69. Method according to claim 68, wherein the mammalian subject is a human subject.

The application's sequence listing, which the Patent Office published only in electronic form, follows.

SEQUENCE LISTING (2593 sequences)

SEQ ID NO: 1 - DNA, 62 bp, Artificial Sequence
  5'-UTR of human peroxisomal multifunctional enzyme type 2 lacking the 5'- terminal oligopyrimidine tract (HSD17B4)
gtcccgcagtcggcgtccagcggctctgcttgttcgtgtgtgtgtcgttgcaggccttattc

SEQ ID NO: 2 - RNA, 62 nt, Artificial Sequence
  5'-UTR of human peroxisomal multifunctional enzyme type 2 lacking the 5' -terminal oligopyrimidine tract (HSD17B4) mRNA
gucccgcagucggcguccagcggcucugcuuguucgugugugugucguugcaggccuuauuc

SEQ ID NO: 3 - DNA, 81 bp, Artificial Sequence
  5'-UTR of mouse NADH dehydrogenase (ubiquinone) 1 alpha subcomplex, 4 (Ndufa4)
gtccgctcagccaggttgcagaagcggcttagcgtgtgtcctaatcttctctctgcgtgtaggtaggcctgtgccgcaaac

SEQ ID NO: 4 - RNA, 81 nt, Artificial Sequence
  5'-UTR of mouse NADH dehydrogenase (ubiquinone) 1 alpha subcomplex, 4 (Ndufa4) mRNA
guccgcucagccagguugcagaagcggcuuagcguguguccuaaucuucucucugcguguagguaggccugugccgcaaac

SEQ ID NO: 5 - DNA, 75 bp, Artificial Sequence
  5'-UTR of human mitochondrial ATP synthase subunit alpha lacking the 5' -terminal oligopyrimidine tract (ATP5A1)
gcggctcggccattttgtcccagtcagtccggaggctgcggctgcagaagtaccgcctgcggagtaactgcaaag

SEQ ID NO: 6 - RNA, 75 nt, Artificial Sequence
  5'-UTR of human mitochondrial ATP synthase subunit alpha lacking the 5' -terminal oligopyrimidine tract (ATP5A1) mRNA
gcggcucggccauuuugucccagucaguccggaggcugcggcugcagaaguaccgccugcggaguaacugcaaag

SEQ ID NO: 7 - DNA, 108 bp, Artificial Sequence
  5'-UTR of mouse nitric oxide synthase interacting protein (Nosip)
ctcctgtcgggcggaagtaggaggagtagagtttaaaaacagtactctttttccggttcgggacgtagttgaagcaacgacaagccggataaccgctcttgagacagg

SEQ ID NO: 8 - RNA, 108 nt, Artificial Sequence
  5'-UTR of mouse nitric oxide synthase interacting protein (Nosip) mRNA
cuccugucgggcggaaguaggaggaguagaguuuaaaaacaguacucuuuuuccgguucgggacguaguugaagcaacgacaagccggauaaccgcucuugagacagg

SEQ ID NO: 9 - DNA, 84 bp, Artificial Sequence
  5'-UTR of mouse ribosomal protein L31 (Rpl31)
cccgtgacccggaagttgtacggctacgcgactttccctcccacaaaccctcgcgcccttcctttcctacttgggcccggcaga

SEQ ID NO: 10 - RNA, 84 nt, Artificial Sequence
  5'-UTR of mouse ribosomal protein L31 (Rpl31) mRNA
cccgugacccggaaguuguacggcuacgcgacuuucccucccacaaacccucgcgcccuuccuuuccuacuugggcccggcaga

SEQ ID NO: 11 - DNA, 159 bp, Artificial Sequence
  5'-UTR of mouse solute carrier family 7 (cationic amino acid transporter, y+ system), member 3 (Slc7a3)
gggcgcttggcttgcaaggaccctgagctgcggcattgaagcacacccaacccaactcgactgaagtcagcctcactgaaccggatctgagaatcttctctctctgggcttgccagggctctccgaacctagctagcatcctcttcaattccaactaga

SEQ ID NO: 12 - RNA, 159 nt, Artificial Sequence
  5'-UTR of mouse solute carrier family 7 (cationic amino acid transporter, y+ system), member 3 (Slc7a3) mRNA
gggcgcuuggcuugcaaggacccugagcugcggcauugaagcacacccaacccaacucgacugaagucagccucacugaaccggaucugagaaucuucucucucugggcuugccagggcucuccgaaccuagcuagcauccucuucaauuccaacuaga

SEQ ID NO: 13 - DNA, 42 bp, Artificial Sequence
  5'-UTR of human ribosomal protein Large 32 lacking the 5' -terminal oligopyrimidine tract (RPL32, 32L4, 32L3)
ggcgctgcctacggaggtggcagccatctccttctcggcatc

SEQ ID NO: 14 - RNA, 42 nt, Artificial Sequence
  5'-UTR of human ribosomal protein Large 32 lacking the 5' -terminal oligopyrimidine tract (RPL32, 32L4, 32L3) mRNA
ggcgcugccuacggagguggcagccaucuccuucucggcauc

SEQ ID NO: 15 - DNA, 57 bp, Artificial Sequence
  3'-UTR of human proteasome subunit beta 3 (PSMB3)
ccctgttcccagagcccacttttttttctttttttgaaataaaatagcctgtctttc

SEQ ID NO: 16 - RNA, 57 nt, Artificial Sequence
  3'-UTR of human proteasome subunit beta 3 (PSMB3) mRNA
cccuguucccagagcccacuuuuuuuucuuuuuuugaaauaaaauagccugucuuuc

SEQ ID NO: 17 - DNA, 121 bp, Artificial Sequence
  3'-UTR of human caspase 1 (CASP1)
aataaggaaactgtatgaatgtctgtgggcaggaagtgaagagatccttctgtaaaggtttttggaattatgtctgctgaataataaacttttttgaaataataaatctggtagaaaaatg

SEQ ID NO: 18 - RNA, 121 nt, Artificial Sequence
  3'-UTR of human caspase 1 (CASP1) mRNA
aauaaggaaacuguaugaaugucugugggcaggaagugaagagauccuucuguaaagguuuuuggaauuaugucugcugaauaauaaacuuuuuugaaauaauaaaucugguagaaaaaug

SEQ ID NO: 19 - DNA, 133 bp, Artificial Sequence
  3'-UTR of mouse NADH dehydrogenase (ubiquinone) 1 alpha subcomplex, 1 (Ndufa1)
ggaagcattttcctggctgattaaaagaaattactcagctatggtcatctgttcctgttagaaggctatgcagcatattatatactatgcgcatgttatgaaatgcataataaaaaattttaaaaaatctaaa

SEQ ID NO: 20 - RNA, 133 nt, Artificial Sequence
  3'-UTR of mouse NADH dehydrogenase (ubiquinone) 1 alpha subcomplex, 1 (Ndufa1) mRNA
ggaagcauuuuccuggcugauuaaaagaaauuacucagcuauggucaucuguuccuguuagaaggcuaugcagcauauuauauacuaugcgcauguuaugaaaugcauaauaaaaaauuuuaaaaaaucuaaa

SEQ ID NO: 21 - DNA, 137 bp, Artificial Sequence
  3'-UTR of human cytochrome c oxidase subunit 6B1 (COX6B1)
actggctgcatctccctttcctctgtcctccatccttctcccaggatggtgaagggggacctggtacccagtgatccccaccccaggatcctaaatcatgacttacctgctaataaaaactcattggaaaagtgaga

SEQ ID NO: 22 - RNA, 137 nt, Artificial Sequence
  3'-UTR of human cytochrome c oxidase subunit 6B1 (COX6B1) mRNA
acuggcugcaucucccuuuccucuguccuccauccuucucccaggauggugaagggggaccugguacccagugauccccaccccaggauccuaaaucaugacuuaccugcuaauaaaaacucauuggaaaagugaga

SEQ ID NO: 23 - DNA, 187 bp, Artificial Sequence
  3'-UTR ALB7
gcatcacatttaaaagcatctcagcctaccatgagaataagagaaagaaaatgaagatcaatagcttattcatctctttttctttttcgttggtgtaaagccaacaccctgtctaaaaaacataaatttctttaatcattttgcctcttttctctgtgcttcaattaataaaaaatggaaagaacct

SEQ ID NO: 24 - RNA, 187 nt, Artificial Sequence
  3'-UTR ALB7 mRNA
gcaucacauuuaaaagcaucucagccuaccaugagaauaagagaaagaaaaugaagaucaauagcuuauucaucucuuuuucuuuuucguugguguaaagccaacacccugucuaaaaaacauaaauuucuuuaaucauuuugccucuuuucucugugcuucaauuaauaaaaaauggaaagaaccu

SEQ ID NO: 25 - DNA, 44 bp, Artificial Sequence
  Center, alpha-complex-binding portion of the 3'-UTR of an alpha-globin gene (muag)
gcccgatgggcctcccaacgggccctcctcccctccttgcaccg

SEQ ID NO: 26 - RNA, 44 nt, Artificial Sequence
  Center, alpha-complex-binding portion of the 3'-UTR of an alpha-globin gene (muag) mRNA
gcccgaugggccucccaacgggcccuccuccccuccuugcaccg

SEQ ID NO: 27 - DNA, 24 bp, Artificial Sequence
  histone stem-loop sequence (histoneSL, hSL)
caaaggctcttttcagagccacca

SEQ ID NO: 28 - RNA, 24 nt, Artificial Sequence
  histone stem-loop sequence (histoneSL, hSL) mRNA
caaaggcucuuuucagagccacca

SEQ ID NO: 29 - DNA, 13 bp, Artificial Sequence
  Kozak
gccgccaccatgg

SEQ ID NO: 30 - RNA, 13 nt, Artificial Sequence
  Kozak mRNA
gccgccaccaugg

SEQ ID NO: 31 - RNA, 6 nt, Artificial Sequence
  mRNA 5'-end
gggaga

SEQ ID NO: 32 - RNA, 99 nt, Artificial Sequence
  mRNA 3'-end A75-histoneSL
aaaaaaaaaaaaaaaaaaaaaaaaaaaaaaaaaaaaaaaaaaaaaaaaaaaaaaaaaaaaaaaaaaaaaaaaaaacaaaggcucuuuucagagccacca

SEQ ID NO: 33 - RNA, 102 nt, Artificial Sequence
  mRNA 3'-end U3-A75-histoneSL
uuuaaaaaaaaaaaaaaaaaaaaaaaaaaaaaaaaaaaaaaaaaaaaaaaaaaaaaaaaaaaaaaaaaaaaaaaaaaacaaaggcucuuuucagagccacca

SEQ ID NO: 34 - RNA, 178 nt, Artificial Sequence
  mRNA 3'-end A154-histoneSL
aaaaaaaaaaaaaaaaaaaaaaaaaaaaaaaaaaaaaaaaaaaaaaaaaaaaaaaaaaaaaaaaaaaaaaaaaaaaaaaaaaaaaaaaaaaaaaaaaaaaaaaaaaaaaaaaaaaaaaaaaaaaaaaaaaaaaaaaaaaaaaaaaaaaaaaaaacaaaggcucuuuucagagccacca

SEQ ID NO: 35 - RNA, 181 nt, Artificial Sequence
  mRNA 3'-end U3-A154-histoneSL
uuuaaaaaaaaaaaaaaaaaaaaaaaaaaaaaaaaaaaaaaaaaaaaaaaaaaaaaaaaaaaaaaaaaaaaaaaaaaaaaaaaaaaaaaaaaaaaaaaaaaaaaaaaaaaaaaaaaaaaaaaaaaaaaaaaaaaaaaaaaaaaaaaaaaaaaaaaaacaaaggcucuuuucagagccacca

SEQ ID NO: 36 - RNA, 101 nt, Artificial Sequence
  mRNA 3'-end N2-A75-histoneSL
agaaaaaaaaaaaaaaaaaaaaaaaaaaaaaaaaaaaaaaaaaaaaaaaaaaaaaaaaaaaaaaaaaaaaaaaaaaacaaaggcucuuuucagagccacca

SEQ ID NO: 37 - RNA, 99 nt, Artificial Sequence
  mRNA 3'-end histoneSL-A75
caaaggcucuuuucagagccaccaaaaaaaaaaaaaaaaaaaaaaaaaaaaaaaaaaaaaaaaaaaaaaaaaaaaaaaaaaaaaaaaaaaaaaaaaaaa

SEQ ID NO: 38 - RNA, 124 nt, Artificial Sequence
  mRNA 3'-end histoneSL-A100
caaaggcucuuuucagagccaccaaaaaaaaaaaaaaaaaaaaaaaaaaaaaaaaaaaaaaaaaaaaaaaaaaaaaaaaaaaaaaaaaaaaaaaaaaaaaaaaaaaaaaaaaaaaaaaaaaaaa

SEQ ID NO: 39 - RNA, 170 nt, Artificial Sequence
  mRNA 3'-end histoneSL-A146
caaaggcucuuuucagagccaccaaaaaaaaaaaaaaaaaaaaaaaaaaaaaaaaaaaaaaaaaaaaaaaaaaaaaaaaaaaaaaaaaaaaaaaaaaaaaaaaaaaaaaaaaaaaaaaaaaaaaaaaaaaaaaaaaaaaaaaaaaaaaaaaaaaaaaaaaaaaaaaaaaa

SEQ ID NO: 40 - RNA, 136 nt, Artificial Sequence
  mRNA 3'-end N8-A64-N5-C30-histoneSL-N5
agauuaauaaaaaaaaaaaaaaaaaaaaaaaaaaaaaaaaaaaaaaaaaaaaaaaaaaaaaaaaaaaaaaaaugcaucccccccccccccccccccccccccccccccaaaggcucuuuucagagccaccagaauu

SEQ ID NO: 41 - RNA, 131 nt, Artificial Sequence
  mRNA 3'-end N8-A64-N5-C30-histoneSL
agauuaauaaaaaaaaaaaaaaaaaaaaaaaaaaaaaaaaaaaaaaaaaaaaaaaaaaaaaaaaaaaaaaaaugcaucccccccccccccccccccccccccccccccaaaggcucuuuucagagccacca

SEQ ID NO: 42 - RNA, 105 nt, Artificial Sequence
  mRNA 3'-end N8-A64-N5-C4-histoneSL
agauuaauaaaaaaaaaaaaaaaaaaaaaaaaaaaaaaaaaaaaaaaaaaaaaaaaaaaaaaaaaaaaaaaaugcaucccccaaaggcucuuuucagagccacca

SEQ ID NO: 43 - RNA, 115 nt, Artificial Sequence
  mRNA 3'-end N8-A64-N5-C14-histoneSL
agauuaauaaaaaaaaaaaaaaaaaaaaaaaaaaaaaaaaaaaaaaaaaaaaaaaaaaaaaaaaaaaaaaaaugcaucccccccccccccccaaaggcucuuuucagagccacca

SEQ ID NO: 44 - RNA, 134 nt, Artificial Sequence
  mRNA 3'-end N6-A64-N5-C30-histoneSL-N5
agaucuaaaaaaaaaaaaaaaaaaaaaaaaaaaaaaaaaaaaaaaaaaaaaaaaaaaaaaaaaaaaaaaaugcaucccccccccccccccccccccccccccccccaaaggcucuuuucagagccaccagaauu

SEQ ID NO: 45 - RNA, 129 nt, Artificial Sequence
  mRNA 3'-end N6-A64-N5-C30-histoneSL
agaucuaaaaaaaaaaaaaaaaaaaaaaaaaaaaaaaaaaaaaaaaaaaaaaaaaaaaaaaaaaaaaaaaugcaucccccccccccccccccccccccccccccccaaaggcucuuuucagagccacca

SEQ ID NO: 46 - RNA, 103 nt, Artificial Sequence
  mRNA 3'-end N6-A64-N5-C4-histoneSL
agaucuaaaaaaaaaaaaaaaaaaaaaaaaaaaaaaaaaaaaaaaaaaaaaaaaaaaaaaaaaaaaaaaaugcaucccccaaaggcucuuuucagagccacca

SEQ ID NO: 47 - RNA, 113 nt, Artificial Sequence
  mRNA 3'-end N6-A64-N5-C14-histoneSL
agaucuaaaaaaaaaaaaaaaaaaaaaaaaaaaaaaaaaaaaaaaaaaaaaaaaaaaaaaaaaaaaaaaaugcaucccccccccccccccaaaggcucuuuucagagccacca

SEQ ID NO: 48 - RNA, 128 nt, Artificial Sequence
  mRNA 3'-end A64-N5-C30-histoneSL-N5
aaaaaaaaaaaaaaaaaaaaaaaaaaaaaaaaaaaaaaaaaaaaaaaaaaaaaaaaaaaaaaaaugcaucccccccccccccccccccccccccccccccaaaggcucuuuucagagccaccagaauu

SEQ ID NO: 49 - RNA, 123 nt, Artificial Sequence
  mRNA 3'-end A64-N5-C30-histoneSL
aaaaaaaaaaaaaaaaaaaaaaaaaaaaaaaaaaaaaaaaaaaaaaaaaaaaaaaaaaaaaaaaugcaucccccccccccccccccccccccccccccccaaaggcucuuuucagagccacca

SEQ ID NO: 50 - RNA, 97 nt, Artificial Sequence
  mRNA 3'-end A64-N5-C4-histoneSL
aaaaaaaaaaaaaaaaaaaaaaaaaaaaaaaaaaaaaaaaaaaaaaaaaaaaaaaaaaaaaaaaugcaucccccaaaggcucuuuucagagccacca

SEQ ID NO: 51 - RNA, 107 nt, Artificial Sequence
  mRNA 3'-end A64-N5-C14-histoneSL
aaaaaaaaaaaaaaaaaaaaaaaaaaaaaaaaaaaaaaaaaaaaaaaaaaaaaaaaaaaaaaaaugcaucccccccccccccccaaaggcucuuuucagagccacca

SEQ ID NO: 52 - protein, 14 aa, Artificial Sequence
  derived and/or modified protein sequence (artificial) from Artificial____carrier peptide 1
CRRRRRRRRRRRRC

SEQ ID NO: 53 - protein, 13 aa, Artificial Sequence
  derived and/or modified protein sequence (artificial) from Artificial____carrier peptide 2
CRRRRRRRRRRRR

SEQ ID NO: 54 - protein, 14 aa, Artificial Sequence
  derived and/or modified protein sequence (artificial) from Artificial____carrier peptide 3
WRRRRRRRRRRRRC

SEQ ID NO: 55 - protein, 18 aa, Artificial Sequence
  derived and/or modified protein sequence (artificial) from Artificial____carrier peptide 4
CHHHHHHRRRRHHHHHHC

SEQ ID NO: 56 - protein, 18 aa, Artificial Sequence
  derived and/or modified protein sequence (wt) from Homo sapiens__AAB59424.1__signal peptide_IgE/SSIgE
MDWTWILFLVAAATRVHS

SEQ ID NO: 57 - protein, 24 aa, Artificial Sequence
  derived and/or modified protein sequence (wt) from JEV__AOT85928.1__signal peptide_JEV-V1/SSjev
MGKRSAGSIMWLASLAVVIACAGA

SEQ ID NO: 58 - protein, 30 aa, Artificial Sequence
  derived and/or modified protein sequence (wt) from JEV__AOT85928.1__signal peptide_JEV-V2/SSjev(V2)
MGRKQNKRGGNEGSIMWLASLAVVIACAGA

SEQ ID NO: 59 - protein, 21 aa, Artificial Sequence
  derived and/or modified protein sequence (wt) from JEV__AOT85928.1__signal peptide_JEV-V3/SSjev(V3)
MNEGSIMWLASLAVVIACAGA

SEQ ID NO: 60 - protein, 24 aa, Artificial Sequence
  derived and/or modified protein sequence (wt) from JEV__BAE48356.1__signal peptide_JEV-prM/SSjev(V4)
MLGSNSGQRVVFTILLLLVAPAYS

SEQ ID NO: 61 - protein, 15 aa, Artificial Sequence
  derived and/or modified protein sequence (wt) from JEV__ADN94470.1__signal peptide_JEV-ER/SSjev(V5)
MWLVSLAIVTACAGA

SEQ ID NO: 62 - RNA, 54 nt, Artificial Sequence
  derived and/or modified CDS sequence (wt) from Homo sapiens__AAB59424.1__signal peptide_IgE/SSIgE
auggacuggaccuggauccuguuccucguggccgccgcgacccgcguccacagc

SEQ ID NO: 63 - RNA, 72 nt, Artificial Sequence
  derived and/or modified CDS sequence (wt) from JEV__AOT85928.1__signal peptide_JEV-V1/SSjev
auggguaaacggagcgcuggcucaaucauguggcucgcgagcuuggcaguugucauagcuugugcaggagcc

SEQ ID NO: 64 - RNA, 90 nt, Artificial Sequence
  derived and/or modified CDS sequence (wt) from JEV__AOT85928.1__signal peptide_JEV-V2/SSjev(V2)
augggcagaaagcaaaacaaaagaggaggaaaugaaggcucaaucauguggcucgcgagcuuggcaguugucauagcuugugcaggagcc

SEQ ID NO: 65 - RNA, 63 nt, Artificial Sequence
  derived and/or modified CDS sequence (wt) from JEV__AOT85928.1__signal peptide_JEV-V3/SSjev(V3)
augaaugaaggcucaaucauguggcucgcgagcuuggcaguugucauagcuugugcaggagcc

SEQ ID NO: 66 - RNA, 72 nt, Artificial Sequence
  derived and/or modified CDS sequence (wt) from JEV__BAE48356.1__signal peptide_JEV-prM/SSjev(V4)
augcuuggcagcaacaguggccaacgugugguguucacuauucucuugcuguuggucgcuccggcuuacagu

SEQ ID NO: 67 - RNA, 45 nt, Artificial Sequence
  derived and/or modified CDS sequence (wt) from JEV__ADN94470.1__signal peptide_JEV-ER/SSjev(V5)
auguggcuugucagcuuggcaaucguaacagcuugugccggagcu

SEQ ID NO: 68 - RNA, 54 nt, Artificial Sequence; identical to SEQ ID NO: 62
  derived and/or modified CDS sequence (opt1) from Homo sapiens__AAB59424.1__signal peptide_IgE/SSIgE

SEQ ID NO: 69 - RNA, 72 nt, Artificial Sequence
  derived and/or modified CDS sequence (opt1) from JEV__AOT85928.1__signal peptide_JEV-V1/SSjev
augggcaagcgcagcgccggguccaucauguggcuggccagccucgcgguggucaucgccugcgccggcgcc

SEQ ID NO: 70 - RNA, 90 nt, Artificial Sequence
  derived and/or modified CDS sequence (opt1) from JEV__AOT85928.1__signal peptide_JEV-V2/SSjev(V2)
augggccggaagcagaacaagcgcgggggcaacgaggggagcaucauguggcuggccucccucgccguggucaucgcgugcgccggcgcc

SEQ ID NO: 71 - RNA, 63 nt, Artificial Sequence
  derived and/or modified CDS sequence (opt1) from JEV__AOT85928.1__signal peptide_JEV-V3/SSjev(V3)
augaacgagggcagcaucauguggcuggccucccucgccguggucaucgcgugcgccggggcc

SEQ ID NO: 72 - RNA, 72 nt, Artificial Sequence
  derived and/or modified CDS sequence (opt1) from JEV__BAE48356.1__signal peptide_JEV-prM/SSjev(V4)
augcugggcagcaacuccgggcagcgcguggucuucaccauccuccugcugcucguggcccccgccuacagc

SEQ ID NO: 73 - RNA, 45 nt, Artificial Sequence
  derived and/or modified CDS sequence (opt1) from JEV__ADN94470.1__signal peptide_JEV-ER/SSjev(V5)
auguggcuggugagccucgccaucgucaccgccugcgcgggcgcc

SEQ ID NO: 74 - RNA, 54 nt, Artificial Sequence
  derived and/or modified CDS sequence (opt2) from Homo sapiens__AAB59424.1__signal peptide_IgE/SSIgE
auggacuggaccuggauccucuuccucgucgccgccgccacccgcguccacucc

SEQ ID NO: 75 - RNA, 72 nt, Artificial Sequence
  derived and/or modified CDS sequence (opt2) from JEV__AOT85928.1__signal peptide_JEV-V1/SSjev
augggcaagcgcuccgccggcuccaucauguggcucgccucccucgccgucgucaucgccugcgccggcgcc

SEQ ID NO: 76 - RNA, 90 nt, Artificial Sequence
  derived and/or modified CDS sequence (opt2) from JEV__AOT85928.1__signal peptide_JEV-V2/SSjev(V2)
augggccgcaagcagaacaagcgcggcggcaacgagggcuccaucauguggcucgccucccucgccgucgucaucgccugcgccggcgcc

SEQ ID NO: 77 - RNA, 63 nt, Artificial Sequence
  derived and/or modified CDS sequence (opt2) from JEV__AOT85928.1__signal peptide_JEV-V3/SSjev(V3)
augaacgagggcuccaucauguggcucgccucccucgccgucgucaucgccugcgccggcgcc

SEQ ID NO: 78 - RNA, 72 nt, Artificial Sequence
  derived and/or modified CDS sequence (opt2) from JEV__BAE48356.1__signal peptide_JEV-prM/SSjev(V4)
augcucggcuccaacuccggccagcgcgucgucuucaccauccuccuccuccucgucgcccccgccuacucc

SEQ ID NO: 79 - RNA, 45 nt, Artificial Sequence
  derived and/or modified CDS sequence (opt2) from JEV__ADN94470.1__signal peptide_JEV-ER/SSjev(V5)
auguggcucgucucccucgccaucgucaccgccugcgccggcgcc

SEQ ID NO: 80 - RNA, 54 nt, Artificial Sequence
  derived and/or modified CDS sequence (opt3) from Homo sapiens__AAB59424.1__signal peptide_IgE/SSIgE
auggacuggaccuggauccuguuccucguggccgcugcaacaagaguccacagc

SEQ ID NO: 81 - RNA, 72 nt, Artificial Sequence
  derived and/or modified CDS sequence (opt3) from JEV__AOT85928.1__signal peptide_JEV-V1/SSjev
augggcaagagaagcgccggguccaucauguggcuggcuucucucgcaguggucauugccugcgcgggagcu

SEQ ID NO: 82 - RNA, 90 nt, Artificial Sequence
  derived and/or modified CDS sequence (opt3) from JEV__AOT85928.1__signal peptide_JEV-V2/SSjev(V2)
augggcaggaagcagaacaaaagagggggaaaugaggguagcaucauguggcuggccucccucgcuguggucauugcaugcgccggcgcg

SEQ ID NO: 83 - RNA, 63 nt, Artificial Sequence
  derived and/or modified CDS sequence (opt3) from JEV__AOT85928.1__signal peptide_JEV-V3/SSjev(V3)
augaacgagggcagcaucauguggcuggccucccucgcuguggucauugcaugcgccggggcg

SEQ ID NO: 84 - RNA, 72 nt, Artificial Sequence
  derived and/or modified CDS sequence (opt3) from JEV__BAE48356.1__signal peptide_JEV-prM/SSjev(V4)
augcugggcagcaacuccgggcagagaguggucuucaccauccuccuucuguugguugcccccgcuuacucu

SEQ ID NO: 85 - RNA, 45 nt, Artificial Sequence
  derived and/or modified CDS sequence (opt3) from JEV__ADN94470.1__signal peptide_JEV-ER/SSjev(V5)
auguggcuggugagccucgccaucgucaccgcuugcgcaggcgcc

SEQ ID NO: 86 - RNA, 54 nt, Artificial Sequence
  derived and/or modified CDS sequence (opt4) from Homo sapiens__AAB59424.1__signal peptide_IgE/SSIgE
auggacuggaccuggauccuguuccugguggccgccgccaccagagugcacagc

SEQ ID NO: 87 - RNA, 72 nt, Artificial Sequence
  derived and/or modified CDS sequence (opt4) from JEV__AOT85928.1__signal peptide_JEV-V1/SSjev
augggcaagagaagcgccggcagcaucauguggcuggccagccuggccguggugaucgccugcgccggcgcc

SEQ ID NO: 88 - RNA, 90 nt, Artificial Sequence
  derived and/or modified CDS sequence (opt4) from JEV__AOT85928.1__signal peptide_JEV-V2/SSjev(V2)
augggcagaaagcagaacaagagaggcggcaacgagggcagcaucauguggcuggccagccuggccguggugaucgccugcgccggcgcc

SEQ ID NO: 89 - RNA, 63 nt, Artificial Sequence
  derived and/or modified CDS sequence (opt4) from JEV__AOT85928.1__signal peptide_JEV-V3/SSjev(V3)
augaacgagggcagcaucauguggcuggccagccuggccguggugaucgccugcgccggcgcc

SEQ ID NO: 90 - RNA, 72 nt, Artificial Sequence
  derived and/or modified CDS sequence (opt4) from JEV__BAE48356.1__signal peptide_JEV-prM/SSjev(V4)
augcugggcagcaacagcggccagagagugguguucaccauccugcugcugcugguggcccccgccuacagc

SEQ ID NO: 91 - RNA, 45 nt, Artificial Sequence
  derived and/or modified CDS sequence (opt4) from JEV__ADN94470.1__signal peptide_JEV-ER/SSjev(V5)
auguggcuggugagccuggccaucgugaccgccugcgccggcgcc

SEQ ID NO: 92 - RNA, 54 nt, Artificial Sequence
  derived and/or modified CDS sequence (opt5) from Homo sapiens__AAB59424.1__signal peptide_IgE/SSIgE
auggacuggaccuggauccuguuccucguggccgcugccacaagaguccacagc

SEQ ID NO: 93 - RNA, 72 nt, Artificial Sequence
  derived and/or modified CDS sequence (opt5) from JEV__AOT85928.1__signal peptide_JEV-V1/SSjev
augggcaagagaagcgccggguccaucauguggcuggcuucucucgccguggucauugcgugcgcuggagcc

SEQ ID NO: 94 - RNA, 90 nt, Artificial Sequence
  derived and/or modified CDS sequence (opt5) from JEV__AOT85928.1__signal peptide_JEV-V2/SSjev(V2)
augggccggaagcagaacaaaagagggggaaaugagggcagcaucauguggcuggccucccucgcuguggucauugccugcgcgggggcu

SEQ ID NO: 95 - RNA, 63 nt, Artificial Sequence
  derived and/or modified CDS sequence (opt5) from JEV__AOT85928.1__signal peptide_JEV-V3/SSjev(V3)
augaacgagggcagcaucauguggcuggccucccucgcuguggucauugccugcgcgggggcu

SEQ ID NO: 96 - RNA, 72 nt, Artificial Sequence
  derived and/or modified CDS sequence (opt5) from JEV__BAE48356.1__signal peptide_JEV-prM/SSjev(V4)
augcugggcagcaacuccgggcagagaguggucuucaccauccuccugcuucugguugcccccgcuuacucu

SEQ ID NO: 97 - RNA, 45 nt, Artificial Sequence
  derived and/or modified CDS sequence (opt5) from JEV__ADN94470.1__signal peptide_JEV-ER/SSjev(V5)
auguggcuggugagccucgccaucgucaccgcuugcgccggcgcg

SEQ ID NO: 98 - RNA, 54 nt, Artificial Sequence
  derived and/or modified CDS sequence (opt6) from Homo sapiens__AAB59424.1__signal peptide_IgE/SSIgE
auggacuggacauggauauuauuuuuaguagcagcagcaacaagaguacauuca

SEQ ID NO: 99 - RNA, 72 nt, Artificial Sequence
  derived and/or modified CDS sequence (opt6) from JEV__AOT85928.1__signal peptide_JEV-V1/SSjev
augggaaaaagaagugcaggaaguauaaugugguuggcaaguuuagcaguaguaauagcaugugcaggagca

SEQ ID NO: 100 - RNA, 90 nt, Artificial Sequence
  derived and/or modified CDS sequence (opt6) from JEV__AOT85928.1__signal peptide_JEV-V2/SSjev(V2)
augggaagaaaacaaaauaaaagaggaggaaaugaaggaaguauaaugugguuggcaaguuuagcaguaguaauagcaugugcaggagca

SEQ ID NO: 101 - RNA, 63 nt, Artificial Sequence
  derived and/or modified CDS sequence (opt6) from JEV__AOT85928.1__signal peptide_JEV-V3/SSjev(V3)
augaaugaagguucaauuaugugguuggcaucauuagcaguuguaauugcaugugcuggugca

SEQ ID NO: 102 - RNA, 72 nt, Artificial Sequence
  derived and/or modified CDS sequence (opt6) from JEV__BAE48356.1__signal peptide_JEV-prM/SSjev(V4)
augcuaggaucaaacucaggacaaagaguaguauucacaauacuacuacuacuaguagcaccagcauacuca

SEQ ID NO: 103 - RNA, 45 nt, Artificial Sequence
  derived and/or modified CDS sequence (opt6) from JEV__ADN94470.1__signal peptide_JEV-ER/SSjev(V5)
augugguuaguuucauuagcaauugugacugcaugugcaggugca

SEQ ID NO: 104 - RNA, 54 nt, Artificial Sequence
  derived and/or modified CDS sequence (opt11) from Homo sapiens__AAB59424.1__signal peptide_IgE/SSIgE
auggauuggacguggauacucuuucucguggccgcggccacgcgcgugcacucg

SEQ ID NO: 105 - RNA, 72 nt, Artificial Sequence
  derived and/or modified CDS sequence (opt11) from JEV__AOT85928.1__signal peptide_JEV-V1/SSjev
auggggaaaaggagcgcgggcucgauaaugugguuggccucgcucgcggucgugaucgcgugcgcgggcgcg

SEQ ID NO: 106 - RNA, 90 nt, Artificial Sequence
  derived and/or modified CDS sequence (opt11) from JEV__AOT85928.1__signal peptide_JEV-V2/SSjev(V2)
auggggagaaagcagaauaaaaggggagggaacgaggggucgauaaugugguuggcgucgcuggcgguagugauagcgugcgcgggggcg

SEQ ID NO: 107 - RNA, 63 nt, Artificial Sequence
  derived and/or modified CDS sequence (opt11) from JEV__AOT85928.1__signal peptide_JEV-V3/SSjev(V3)
augaacgagggcucgaucaugugguuggccucgcucgcggucgugaucgcgugcgcgggcgcg

SEQ ID NO: 108 - RNA, 72 nt, Artificial Sequence
  derived and/or modified CDS sequence (opt11) from JEV__BAE48356.1__signal peptide_JEV-prM/SSjev(V4)
augcucggcuccaacuccggccaacgcgucgucuucaccauccuccuccuccucgucgcccccgccuacucc

SEQ ID NO: 109 - RNA, 45 nt, Artificial Sequence
  derived and/or modified CDS sequence (opt11) from JEV__ADN94470.1__signal peptide_JEV-ER/SSjev(V5)
augugguuggucucgcucgcgaucgugaccgcgugcgcgggcgcg

SEQ ID NO: 110 - protein, 101 aa, Artificial Sequence
  derived and/or modified protein sequence (wt) from JEV__AF495589.1__C terminus_JEV-E/JEV
GSTLGKAFSTTLKGAQRLAALGDTAWDFGSIGGVFNSIGRAVHQVFGGAFRTLFGGMSWITQGLMGALLLWMGVNARDRSIALAFLATGGVLVFLATNVHA

SEQ ID NO: 111 - RNA, 303 nt, Artificial Sequence
  derived and/or modified CDS sequence (wt) from JEV__AF495589.1__C terminus_JEV-E/JEV
ggcagcacgcugggcaaggccuuuucaacaacuuugaagggagcucaaagacuggcagcguugggcgacacagccugggacuuuggcucuauuggaggggucuucaacuccauaggaagagccguucaccaaguguuugguggugccuucagaacacucuuugggggaaugucuuggaucacacaagggcuaaugggugcccuacugcucuggaugggcgucaacgcacgagaccgaucaauugcuuuggccuucuuagccacaggaggugugcucguguucuuagcgaccaaugugcacgcc

SEQ ID NO: 112 - RNA, 303 nt, Artificial Sequence
  derived and/or modified CDS sequence (opt1) from JEV__AF495589.1__C terminus_JEV-E/JEV
ggcagcacccuggggaaggccuucuccaccacgcucaagggcgcccagcgccuggcggcccugggggacaccgccugggacuucggcagcaucgggggcguguucaacuccaucggccgggccguccaccagguguucgggggcgccuuccgcacccucuucgggggcaugagcuggaucacccaggggcugaugggcgcgcugcuccuguggaugggggugaacgcccgggaccgcuccaucgcccuggccuuccucgcgacgggcggcguccugguguuccuggccaccaacgugcacgcc

SEQ ID NO: 113 - RNA, 303 nt, Artificial Sequence
  derived and/or modified CDS sequence (opt1) from JEV__AF495589.1__C terminus_JEV-E/JEV
ggcagcacccuggggaaggccuucuccaccacgcucaagggcgcccagcgccuggcggcccugggggacaccgccugggacuucggcagcaucgggggcguguucaacuccaucggccgggccguccaccagguguucgggggcgccuuccgcacccucuucgggggcaugagcuggaucacccaggggcugaugggcgcgcugcuccuguggaugggcgugaacgcccgggaccgcuccaucgcccuggccuuccucgcgaccgggggcguccugguguuccuggccacgaacgugcacgcc

SEQ ID NO: 114 - RNA, 303 nt, Artificial Sequence
  derived and/or modified CDS sequence (opt2) from JEV__AF495589.1__C terminus_JEV-E/JEV
ggcuccacccucggcaaggccuucuccaccacccucaagggcgcccagcgccucgccgcccucggcgacaccgccugggacuucggcuccaucggcggcgucuucaacuccaucggccgcgccguccaccaggucuucggcggcgccuuccgcacccucuucggcggcauguccuggaucacccagggccucaugggcgcccuccuccucuggaugggcgucaacgcccgcgaccgcuccaucgcccucgccuuccucgccaccggcggcguccucgucuuccucgccaccaacguccacgcc

SEQ ID NO: 115 - RNA, 303 nt, Artificial Sequence
  derived and/or modified CDS sequence (opt3) from JEV__AF495589.1__C terminus_JEV-E/JEV
ggcagcacccuggggaaggccuucuccacaacucucaaaggagcucagagacuugcagcccugggugacacggcgugggauuuuggcucuaucgggggaguguucaacucaauuggcagggcuguccaccaaguuuuugguggggccuuccggaccuuguuuggaggcaugaguuggauaacacagggcuuaaugggggcacugcuacucuggaugggagugaaugcccgcgaccgaagcaucgcucuggcauuccuugccacugguggcguacugguguuuuuggcuaccaacguccaugcc

SEQ ID NO: 116 - RNA, 303 nt, Artificial Sequence
  derived and/or modified CDS sequence (opt4) from JEV__AF495589.1__C terminus_JEV-E/JEV
ggcagcacccugggcaaggccuucagcaccacccugaagggcgcccagagacuggccgcccugggcgacaccgccugggacuucggcagcaucggcggcguguucaacagcaucggcagagccgugcaccagguguucggcggcgccuucagaacccuguucggcggcaugagcuggaucacccagggccugaugggcgcccugcugcuguggaugggcgugaacgccagagacagaagcaucgcccuggccuuccuggccaccggcggcgugcugguguuccuggccaccaacgugcacgcc

SEQ ID NO: 117 - RNA, 303 nt, Artificial Sequence
  derived and/or modified CDS sequence (opt5) from JEV__AF495589.1__C terminus_JEV-E/JEV
ggcagcacccuggggaaggccuucuccacaacgcucaaaggagcucagagacuggccgcgcuuggcgacaccgcuugggauuuugggucuaucggaggcguguucaacagcauugggcgggccguccaccaaguuuuuggaggcgccuuccgcacacuguuuggcgggauguccuggaucacccagggacucaugggcgcucugcuucuguggaugggggugaaugccagagaccggucuauugcucucgccuuccuggcgacaggaggcgugcuggucuuucucgccaccaacgugcaugcu

SEQ ID NO: 118 - RNA, 303 nt, Artificial Sequence
  derived and/or modified CDS sequence (opt6) from JEV__AF495589.1__C terminus_JEV-E/JEV
ggaaguacacuaggaaaagcauuuaguacaacauuaaaaggagcacaaagauuagcagcauuaggagauacagcaugggauuuuggaagcauaggaggaguauuuaauaguauagguagagcaguacaucaaguauuuggaggagcauuuagaacauuauuuggaggaaugaguuggauaacacaaggauuaaugggagcauuauuauuauggaugggaguaaaugcaagagauagaaguauagcauuagcauuuuuagcaacaggaggaguauuaguauuuuuagcaacaaauguacaugca

SEQ ID NO: 119 - RNA, 303 nt, Artificial Sequence
  derived and/or modified CDS sequence (opt11) from JEV__AF495589.1__C terminus_JEV-E/JEV
gggagcacgcucgggaaagcguucucgaccacgcucaagggcgcgcaaaggcucgcggccuugggcgauaccgcgugggauuucgggagcauaggcggggucuuuaacucgaucgggcgcgcgguccaucaaguguucgggggcgcguucaggaccuuguucgggggcaugagcuggaucacgcaagggcucaugggcgcgcucuugcucuggaugggggucaaugccagggacaggagcauagccuuggccuuucucgcgaccgggggcgugcucguguucuuggccacgaacgugcacgcg

SEQ ID NO: 120 - protein, 3411 aa, Artificial Sequence
  derived and/or modified protein sequence (wt) from YFV__NC_002031.1__complete polyprotein
MSGRKAQGKTLGVNMVRRGVRSLSNKIKQKTKQIGNRPGPSRGVQGFIFFFLFNILTGKKITAHLKRLWKMLDPRQGLAVLRKVKRVVASLMRGLSSRKRRSHDVLTVQFLILGMLLMTGGVTLVRKNRWLLLNVTSEDLGKTFSVGTGNCTTNILEAKYWCPDSMEYNCPNLSPREEPDDIDCWCYGVENVRVAYGKCDSAGRSRRSRRAIDLPTHENHGLKTRQEKWMTGRMGERQLQKIERWFVRNPFFAVTALTIAYLVGSNMTQRVVIALLVLAVGPAYSAHCIGITDRDFIEGVHGGTWVSATLEQDKCVTVMAPDKPSLDISLETVAIDRPAEVRKVCYNAVLTHVKINDKCPSTGEAHLAEENEGDNACKRTYSDRGWGNGCGLFGKGSIVACAKFTCAKSMSLFEVDQTKIQYVIRAQLHVGAKQENWNTDIKTLKFDALSGSQEVEFIGYGKATLECQVQTAVDFGNSYIAEMETESWIVDRQWAQDLTLPWQSGSGGVWREMHHLVEFEPPHAATIRVLALGNQEGSLKTALTGAMRVTKDTNDNNLYKLHGGHVSCRVKLSALTLKGTSYKICTDKMFFVKNPTDTGHGTVVMQVKVSKGAPCRIPVIVADDLTAAINKGILVTVNPIASTNDDEVLIEVNPPFGDSYIIVGRGDSRLTYQWHKEGSSIGKLFTQTMKGVERLAVMGDTAWDFSSAGGFFTSVGKGIHTVFGSAFQGLFGGLNWITKVIMGAVLIWVGINTRNMTMSMSMILVGVIMMFLSLGVGADQGCAINFGKRELKCGDGIFIFRDSDDWLNKYSYYPEDPVKLASIVKASFEEGKCGLNSVDSLEHEMWRSRADEINAIFEENEVDISVVVQDPKNVYQRGTHPFSRIRDGLQYGWKTWGKNLVFSPGRKNGSFIIDGKSRKECPFSNRVWNSFQIEEFGTGVFTTRVYMDAVFEYTIDCDGSILGAAVNGKKSAHGSPTFWMGSHEVNGTWMIHTLEALDYKECEWPLTHTIGTSVEESEMFMPRSIGGPVSSHNHIPGYKVQTNGPWMQVPLEVKREACPGTSVIIDGNCDGRGKSTRSTTDSGKVIPEWCCRSCTMPPVSFHGSDGCWYPMEIRPRKTHESHLVRSWVTAGEIHAVPFGLVSMMIAMEVVLRKRQGPKQMLVGGVVLLGAMLVGQVTLLDLLKLTVAVGLHFHEMNNGGDAMYMALIAAFSIRPGLLIGFGLRTLWSPRERLVLTLGAAMVEIALGGVMGGLWKYLNAVSLCILTINAVASRKASNTILPLMALLTPVTMAEVRLAAMFFCAVVIIGVLHQNFKDTSMQKTIPLVALTLTSYLGLTQPFLGLCAFLATRIFGRRSIPVNEALAAAGLVGVLAGLAFQEMENFLGPIAVGGLLMMLVSVAGRVDGLELKKLGEVSWEEEAEISGSSARYDVALSEQGEFKLLSEEKVPWDQVVMTSLALVGAALHPFALLLVLAGWLFHVRGARRSGDVLWDIPTPKIIEECEHLEDGIYGIFQSTFLGASQRGVGVAQGGVFHTMWHVTRGAFLVRNGKKLIPSWASVKEDLVAYGGSWKLEGRWDGEEEVQLIAAVPGKNVVNVQTKPSLFKVRNGGEIGAVALDYPSGTSGSPIVNRNGEVIGLYGNGILVGDNSFVSAISQTEVKEEGKEELQEIPTMLKKGMTTVLDFHPGAGKTRRFLPQILAECARRRLRTLVLAPTRVVLSEMKEAFHGLDVKFHTQAFSAHGSGREVIDAMCHATLTYRMLEPTRVVNWEVIIMDEAHFLDPASIAARGWAAHRARANESATILMTATPPGTSDEFPHSNGEIEDVQTDIPSEPWNTGHDWILADKRPTAWFLPSIRAANVMAASLRKAGKSVVVLNRKTFEREYPTIKQKKPDFILATDIAEMGANLCVERVLDCRTAFKPVLVDEGRKVAIKGPLRISASSAAQRRGRIGRNPNRDGDSYYYSEPTSENNAHHVCWLEASMLLDNMEVRGGMVAPLYGVEGTKTPVSPGEMRLRDDQRKVFRELVRNCDLPVWLSWQVAKAGLKTNDRKWCFEGPEEHEILNDSGETVKCRAPGGAKKPLRPRWCDERVSSDQSALSEFIKFAEGRRGAAEVLVVLSELPDFLAKKGGEAMDTISVFLHSEEGSRAYRNALSMMPEAMTIVMLFILAGLLTSGMVIFFMSPKGISRMSMAMGTMAGCGYLMFLGGVKPTHISYVMLIFFVLMVVVIPEPGQQRSIQDNQVAYLIIGILTLVSAVAANELGMLEKTKEDLFGKKNLIPSSASPWSWPDLDLKPGAAWTVYVGIVTMLSPMLHHWIKVEYGNLSLSGIAQSASVLSFMDKGIPFMKMNISVIMLLVSGWNSITVMPLLCGIGCAMLHWSLILPGIKAQQSKLAQRRVFHGVAENPVVDGNPTVDIEEAPEMPALYEKKLALYLLLALSLASVAMCRTPFSLAEGIVLASAALGPLIEGNTSLLWNGPMAVSMTGVMRGNHYAFVGVMYNLWKMKTGRRGSANGKTLGEVWKRELNLLDKRQFELYKRTDIVEVDRDTARRHLAEGKVDTGVAVSRGTAKLRWFHERGYVKLEGRVIDLGCGRGGWCYYAAAQKEVSGVKGFTLGRDGHEKPMNVQSLGWNIITFKDKTDIHRLEPVKCDTLLCDIGESSSSSVTEGERTVRVLDTVEKWLACGVDNFCVKVLAPYMPDVLEKLELLQRRFGGTVIRNPLSRNSTHEMYYVSGARSNVTFTVNQTSRLLMRRMRRPTGKVTLEADVILPIGTRSVETDKGPLDKEAIEERVERIKSEYMTSWFYDNDNPYRTWHYCGSYVTKTSGSAASMVNGVIKILTYPWDRIEEVTRMAMTDTTPFGQQRVFKEKVDTRAKDPPAGTRKIMKVVNRWLFRHLAREKNPRLCTKEEFIAKVRSHAAIGAYLEEQEQWKTANEAVQDPKFWELVDEERKLHQQGRCRTCVYNMMGKREKKLSEFGKAKGSRAIWYMWLGARYLEFEALGFLNEDHWASRENSGGGVEGIGLQYLGYVIRDLAAMDGGGFYADDTAGWDTRITEADLDDEQEILNYMSPHHKKLAQAVMEMTYKNKVVKVLRPAPGGKAYMDVISRRDQRGSGQVVTYALNTITNLKVQLIRMAEAEMVIHHQHVQDCDESVLTRLEAWLTEHGCDRLKRMAVSGDDCVVRPIDDRFGLALSHLNAMSKVRKDISEWQPSKGWNDWENVPFCSHHFHELQLKDGRRIVVPCREQDELIGRGRVSPGNGWMIKETACLSKAYANMWSLMYFHKRDMRLLSLAVSSAVPTSWVPQGRTTWSIHGKGEWMTTEDMLEVWNRVWITNNPHMQDKTMVKKWRDVPYLTKRQDKLCGSLIGMTNRATWASHIHLVIHRIRTLIGQEKYTDYLTVMDRYSVDADLQLGELI

SEQ ID NO: 121 - protein, 697 aa, Artificial Sequence
  derived and/or modified protein sequence (wt) from YFV__NC_002031.1__X-SS-prME-XX (polyprotein: aa92-788)
MRGLSSRKRRSHDVLTVQFLILGMLLMTGGVTLVRKNRWLLLNVTSEDLGKTFSVGTGNCTTNILEAKYWCPDSMEYNCPNLSPREEPDDIDCWCYGVENVRVAYGKCDSAGRSRRSRRAIDLPTHENHGLKTRQEKWMTGRMGERQLQKIERWFVRNPFFAVTALTIAYLVGSNMTQRVVIALLVLAVGPAYSAHCIGITDRDFIEGVHGGTWVSATLEQDKCVTVMAPDKPSLDISLETVAIDRPAEVRKVCYNAVLTHVKINDKCPSTGEAHLAEENEGDNACKRTYSDRGWGNGCGLFGKGSIVACAKFTCAKSMSLFEVDQTKIQYVIRAQLHVGAKQENWNTDIKTLKFDALSGSQEVEFIGYGKATLECQVQTAVDFGNSYIAEMETESWIVDRQWAQDLTLPWQSGSGGVWREMHHLVEFEPPHAATIRVLALGNQEGSLKTALTGAMRVTKDTNDNNLYKLHGGHVSCRVKLSALTLKGTSYKICTDKMFFVKNPTDTGHGTVVMQVKVSKGAPCRIPVIVADDLTAAINKGILVTVNPIASTNDDEVLIEVNPPFGDSYIIVGRGDSRLTYQWHKEGSSIGKLFTQTMKGVERLAVMGDTAWDFSSAGGFFTSVGKGIHTVFGSAFQGLFGGLNWITKVIMGAVLIWVGINTRNMTMSMSMILVGVIMMFLSLGVGADQGCAINFGK

SEQ ID NO: 122 - protein, 687 aa, Artificial Sequence
  derived and/or modified protein sequence (wt) from YFV__NC_002031.1__X-SS-prME (polyprotein: aa92-778)
MRGLSSRKRRSHDVLTVQFLILGMLLMTGGVTLVRKNRWLLLNVTSEDLGKTFSVGTGNCTTNILEAKYWCPDSMEYNCPNLSPREEPDDIDCWCYGVENVRVAYGKCDSAGRSRRSRRAIDLPTHENHGLKTRQEKWMTGRMGERQLQKIERWFVRNPFFAVTALTIAYLVGSNMTQRVVIALLVLAVGPAYSAHCIGITDRDFIEGVHGGTWVSATLEQDKCVTVMAPDKPSLDISLETVAIDRPAEVRKVCYNAVLTHVKINDKCPSTGEAHLAEENEGDNACKRTYSDRGWGNGCGLFGKGSIVACAKFTCAKSMSLFEVDQTKIQYVIRAQLHVGAKQENWNTDIKTLKFDALSGSQEVEFIGYGKATLECQVQTAVDFGNSYIAEMETESWIVDRQWAQDLTLPWQSGSGGVWREMHHLVEFEPPHAATIRVLALGNQEGSLKTALTGAMRVTKDTNDNNLYKLHGGHVSCRVKLSALTLKGTSYKICTDKMFFVKNPTDTGHGTVVMQVKVSKGAPCRIPVIVADDLTAAINKGILVTVNPIASTNDDEVLIEVNPPFGDSYIIVGRGDSRLTYQWHKEGSSIGKLFTQTMKGVERLAVMGDTAWDFSSAGGFFTSVGKGIHTVFGSAFQGLFGGLNWITKVIMGAVLIWVGINTRNMTMSMSMILVGVIMMFLSLGVGA

SEQ ID NO: 123 - protein, 688 aa, Artificial Sequence
  derived and/or modified protein sequence (wt) from YFV__NC_002031.1__SS-prME-XX (polyprotein: M,aa102-788)
MSHDVLTVQFLILGMLLMTGGVTLVRKNRWLLLNVTSEDLGKTFSVGTGNCTTNILEAKYWCPDSMEYNCPNLSPREEPDDIDCWCYGVENVRVAYGKCDSAGRSRRSRRAIDLPTHENHGLKTRQEKWMTGRMGERQLQKIERWFVRNPFFAVTALTIAYLVGSNMTQRVVIALLVLAVGPAYSAHCIGITDRDFIEGVHGGTWVSATLEQDKCVTVMAPDKPSLDISLETVAIDRPAEVRKVCYNAVLTHVKINDKCPSTGEAHLAEENEGDNACKRTYSDRGWGNGCGLFGKGSIVACAKFTCAKSMSLFEVDQTKIQYVIRAQLHVGAKQENWNTDIKTLKFDALSGSQEVEFIGYGKATLECQVQTAVDFGNSYIAEMETESWIVDRQWAQDLTLPWQSGSGGVWREMHHLVEFEPPHAATIRVLALGNQEGSLKTALTGAMRVTKDTNDNNLYKLHGGHVSCRVKLSALTLKGTSYKICTDKMFFVKNPTDTGHGTVVMQVKVSKGAPCRIPVIVADDLTAAINKGILVTVNPIASTNDDEVLIEVNPPFGDSYIIVGRGDSRLTYQWHKEGSSIGKLFTQTMKGVERLAVMGDTAWDFSSAGGFFTSVGKGIHTVFGSAFQGLFGGLNWITKVIMGAVLIWVGINTRNMTMSMSMILVGVIMMFLSLGVGADQGCAINFGK

SEQ ID NO: 124 - protein, 686 aa, Artificial Sequence
  derived and/or modified protein sequence (wt) from YFV__NC_002031.1__SS-prME-XX (polyprotein: M,aa104-788)
MDVLTVQFLILGMLLMTGGVTLVRKNRWLLLNVTSEDLGKTFSVGTGNCTTNILEAKYWCPDSMEYNCPNLSPREEPDDIDCWCYGVENVRVAYGKCDSAGRSRRSRRAIDLPTHENHGLKTRQEKWMTGRMGERQLQKIERWFVRNPFFAVTALTIAYLVGSNMTQRVVIALLVLAVGPAYSAHCIGITDRDFIEGVHGGTWVSATLEQDKCVTVMAPDKPSLDISLETVAIDRPAEVRKVCYNAVLTHVKINDKCPSTGEAHLAEENEGDNACKRTYSDRGWGNGCGLFGKGSIVACAKFTCAKSMSLFEVDQTKIQYVIRAQLHVGAKQENWNTDIKTLKFDALSGSQEVEFIGYGKATLECQVQTAVDFGNSYIAEMETESWIVDRQWAQDLTLPWQSGSGGVWREMHHLVEFEPPHAATIRVLALGNQEGSLKTALTGAMRVTKDTNDNNLYKLHGGHVSCRVKLSALTLKGTSYKICTDKMFFVKNPTDTGHGTVVMQVKVSKGAPCRIPVIVADDLTAAINKGILVTVNPIASTNDDEVLIEVNPPFGDSYIIVGRGDSRLTYQWHKEGSSIGKLFTQTMKGVERLAVMGDTAWDFSSAGGFFTSVGKGIHTVFGSAFQGLFGGLNWITKVIMGAVLIWVGINTRNMTMSMSMILVGVIMMFLSLGVGADQGCAINFGK

SEQ ID NO: 125 - protein, 678 aa, Artificial Sequence
  derived and/or modified protein sequence (wt) from YFV__NC_002031.1__SS-prME (polyprotein: M,aa102-778)
MSHDVLTVQFLILGMLLMTGGVTLVRKNRWLLLNVTSEDLGKTFSVGTGNCTTNILEAKYWCPDSMEYNCPNLSPREEPDDIDCWCYGVENVRVAYGKCDSAGRSRRSRRAIDLPTHENHGLKTRQEKWMTGRMGERQLQKIERWFVRNPFFAVTALTIAYLVGSNMTQRVVIALLVLAVGPAYSAHCIGITDRDFIEGVHGGTWVSATLEQDKCVTVMAPDKPSLDISLETVAIDRPAEVRKVCYNAVLTHVKINDKCPSTGEAHLAEENEGDNACKRTYSDRGWGNGCGLFGKGSIVACAKFTCAKSMSLFEVDQTKIQYVIRAQLHVGAKQENWNTDIKTLKFDALSGSQEVEFIGYGKATLECQVQTAVDFGNSYIAEMETESWIVDRQWAQDLTLPWQSGSGGVWREMHHLVEFEPPHAATIRVLALGNQEGSLKTALTGAMRVTKDTNDNNLYKLHGGHVSCRVKLSALTLKGTSYKICTDKMFFVKNPTDTGHGTVVMQVKVSKGAPCRIPVIVADDLTAAINKGILVTVNPIASTNDDEVLIEVNPPFGDSYIIVGRGDSRLTYQWHKEGSSIGKLFTQTMKGVERLAVMGDTAWDFSSAGGFFTSVGKGIHTVFGSAFQGLFGGLNWITKVIMGAVLIWVGINTRNMTMSMSMILVGVIMMFLSLGVGA

SEQ ID NO: 126 - protein, 676 aa, Artificial Sequence
  derived and/or modified protein sequence (wt) from YFV__NC_002031.1__SS-prME (polyprotein: M,aa104-778)
MDVLTVQFLILGMLLMTGGVTLVRKNRWLLLNVTSEDLGKTFSVGTGNCTTNILEAKYWCPDSMEYNCPNLSPREEPDDIDCWCYGVENVRVAYGKCDSAGRSRRSRRAIDLPTHENHGLKTRQEKWMTGRMGERQLQKIERWFVRNPFFAVTALTIAYLVGSNMTQRVVIALLVLAVGPAYSAHCIGITDRDFIEGVHGGTWVSATLEQDKCVTVMAPDKPSLDISLETVAIDRPAEVRKVCYNAVLTHVKINDKCPSTGEAHLAEENEGDNACKRTYSDRGWGNGCGLFGKGSIVACAKFTCAKSMSLFEVDQTKIQYVIRAQLHVGAKQENWNTDIKTLKFDALSGSQEVEFIGYGKATLECQVQTAVDFGNSYIAEMETESWIVDRQWAQDLTLPWQSGSGGVWREMHHLVEFEPPHAATIRVLALGNQEGSLKTALTGAMRVTKDTNDNNLYKLHGGHVSCRVKLSALTLKGTSYKICTDKMFFVKNPTDTGHGTVVMQVKVSKGAPCRIPVIVADDLTAAINKGILVTVNPIASTNDDEVLIEVNPPFGDSYIIVGRGDSRLTYQWHKEGSSIGKLFTQTMKGVERLAVMGDTAWDFSSAGGFFTSVGKGIHTVFGSAFQGLFGGLNWITKVIMGAVLIWVGINTRNMTMSMSMILVGVIMMFLSLGVGA

SEQ ID NO: 127 - protein, 690 aa, Artificial Sequence
  derived and/or modified protein sequence (wt) from YFV__NC_002031.1__X-SS-prMEdelstem_TM-JEV (polyprotein: aa92-680)
MRGLSSRKRRSHDVLTVQFLILGMLLMTGGVTLVRKNRWLLLNVTSEDLGKTFSVGTGNCTTNILEAKYWCPDSMEYNCPNLSPREEPDDIDCWCYGVENVRVAYGKCDSAGRSRRSRRAIDLPTHENHGLKTRQEKWMTGRMGERQLQKIERWFVRNPFFAVTALTIAYLVGSNMTQRVVIALLVLAVGPAYSAHCIGITDRDFIEGVHGGTWVSATLEQDKCVTVMAPDKPSLDISLETVAIDRPAEVRKVCYNAVLTHVKINDKCPSTGEAHLAEENEGDNACKRTYSDRGWGNGCGLFGKGSIVACAKFTCAKSMSLFEVDQTKIQYVIRAQLHVGAKQENWNTDIKTLKFDALSGSQEVEFIGYGKATLECQVQTAVDFGNSYIAEMETESWIVDRQWAQDLTLPWQSGSGGVWREMHHLVEFEPPHAATIRVLALGNQEGSLKTALTGAMRVTKDTNDNNLYKLHGGHVSCRVKLSALTLKGTSYKICTDKMFFVKNPTDTGHGTVVMQVKVSKGAPCRIPVIVADDLTAAINKGILVTVNPIASTNDDEVLIEVNPPFGDSYIIVGRGDSRLTYQWHKEGSSGSTLGKAFSTTLKGAQRLAALGDTAWDFGSIGGVFNSIGRAVHQVFGGAFRTLFGGMSWITQGLMGALLLWMGVNARDRSIALAFLATGGVLVFLATNVHA

SEQ ID NO: 128 - protein, 681 aa, Artificial Sequence
  derived and/or modified protein sequence (wt) from YFV__NC_002031.1__SS-prMEdelstem_TM-JEV (polyprotein: M,aa102-680)
MSHDVLTVQFLILGMLLMTGGVTLVRKNRWLLLNVTSEDLGKTFSVGTGNCTTNILEAKYWCPDSMEYNCPNLSPREEPDDIDCWCYGVENVRVAYGKCDSAGRSRRSRRAIDLPTHENHGLKTRQEKWMTGRMGERQLQKIERWFVRNPFFAVTALTIAYLVGSNMTQRVVIALLVLAVGPAYSAHCIGITDRDFIEGVHGGTWVSATLEQDKCVTVMAPDKPSLDISLETVAIDRPAEVRKVCYNAVLTHVKINDKCPSTGEAHLAEENEGDNACKRTYSDRGWGNGCGLFGKGSIVACAKFTCAKSMSLFEVDQTKIQYVIRAQLHVGAKQENWNTDIKTLKFDALSGSQEVEFIGYGKATLECQVQTAVDFGNSYIAEMETESWIVDRQWAQDLTLPWQSGSGGVWREMHHLVEFEPPHAATIRVLALGNQEGSLKTALTGAMRVTKDTNDNNLYKLHGGHVSCRVKLSALTLKGTSYKICTDKMFFVKNPTDTGHGTVVMQVKVSKGAPCRIPVIVADDLTAAINKGILVTVNPIASTNDDEVLIEVNPPFGDSYIIVGRGDSRLTYQWHKEGSSGSTLGKAFSTTLKGAQRLAALGDTAWDFGSIGGVFNSIGRAVHQVFGGAFRTLFGGMSWITQGLMGALLLWMGVNARDRSIALAFLATGGVLVFLATNVHA

SEQ ID NO: 129 - protein, 679 aa, Artificial Sequence
  derived and/or modified protein sequence (wt) from YFV__NC_002031.1__SS-prMEdelstem_TM-JEV (polyprotein: M,aa104-680)
MDVLTVQFLILGMLLMTGGVTLVRKNRWLLLNVTSEDLGKTFSVGTGNCTTNILEAKYWCPDSMEYNCPNLSPREEPDDIDCWCYGVENVRVAYGKCDSAGRSRRSRRAIDLPTHENHGLKTRQEKWMTGRMGERQLQKIERWFVRNPFFAVTALTIAYLVGSNMTQRVVIALLVLAVGPAYSAHCIGITDRDFIEGVHGGTWVSATLEQDKCVTVMAPDKPSLDISLETVAIDRPAEVRKVCYNAVLTHVKINDKCPSTGEAHLAEENEGDNACKRTYSDRGWGNGCGLFGKGSIVACAKFTCAKSMSLFEVDQTKIQYVIRAQLHVGAKQENWNTDIKTLKFDALSGSQEVEFIGYGKATLECQVQTAVDFGNSYIAEMETESWIVDRQWAQDLTLPWQSGSGGVWREMHHLVEFEPPHAATIRVLALGNQEGSLKTALTGAMRVTKDTNDNNLYKLHGGHVSCRVKLSALTLKGTSYKICTDKMFFVKNPTDTGHGTVVMQVKVSKGAPCRIPVIVADDLTAAINKGILVTVNPIASTNDDEVLIEVNPPFGDSYIIVGRGDSRLTYQWHKEGSSGSTLGKAFSTTLKGAQRLAALGDTAWDFGSIGGVFNSIGRAVHQVFGGAFRTLFGGMSWITQGLMGALLLWMGVNARDRSIALAFLATGGVLVFLATNVHA

SEQ ID NO: 130 - protein, 685 aa, Artificial Sequence
  derived and/or modified protein sequence (wt) from YFV__NC_002031.1__SSIgE-prME-XX (polyprotein: aa122-788)
MDWTWILFLVAAATRVHSVTLVRKNRWLLLNVTSEDLGKTFSVGTGNCTTNILEAKYWCPDSMEYNCPNLSPREEPDDIDCWCYGVENVRVAYGKCDSAGRSRRSRRAIDLPTHENHGLKTRQEKWMTGRMGERQLQKIERWFVRNPFFAVTALTIAYLVGSNMTQRVVIALLVLAVGPAYSAHCIGITDRDFIEGVHGGTWVSATLEQDKCVTVMAPDKPSLDISLETVAIDRPAEVRKVCYNAVLTHVKINDKCPSTGEAHLAEENEGDNACKRTYSDRGWGNGCGLFGKGSIVACAKFTCAKSMSLFEVDQTKIQYVIRAQLHVGAKQENWNTDIKTLKFDALSGSQEVEFIGYGKATLECQVQTAVDFGNSYIAEMETESWIVDRQWAQDLTLPWQSGSGGVWREMHHLVEFEPPHAATIRVLALGNQEGSLKTALTGAMRVTKDTNDNNLYKLHGGHVSCRVKLSALTLKGTSYKICTDKMFFVKNPTDTGHGTVVMQVKVSKGAPCRIPVIVADDLTAAINKGILVTVNPIASTNDDEVLIEVNPPFGDSYIIVGRGDSRLTYQWHKEGSSIGKLFTQTMKGVERLAVMGDTAWDFSSAGGFFTSVGKGIHTVFGSAFQGLFGGLNWITKVIMGAVLIWVGINTRNMTMSMSMILVGVIMMFLSLGVGADQGCAINFGK

SEQ ID NO: 131 - protein, 681 aa, Artificial Sequence
  derived and/or modified protein sequence (wt) from YFV__NC_002031.1__SSIgE-prME-XX (polyprotein: aa126-788)
MDWTWILFLVAAATRVHSRKNRWLLLNVTSEDLGKTFSVGTGNCTTNILEAKYWCPDSMEYNCPNLSPREEPDDIDCWCYGVENVRVAYGKCDSAGRSRRSRRAIDLPTHENHGLKTRQEKWMTGRMGERQLQKIERWFVRNPFFAVTALTIAYLVGSNMTQRVVIALLVLAVGPAYSAHCIGITDRDFIEGVHGGTWVSATLEQDKCVTVMAPDKPSLDISLETVAIDRPAEVRKVCYNAVLTHVKINDKCPSTGEAHLAEENEGDNACKRTYSDRGWGNGCGLFGKGSIVACAKFTCAKSMSLFEVDQTKIQYVIRAQLHVGAKQENWNTDIKTLKFDALSGSQEVEFIGYGKATLECQVQTAVDFGNSYIAEMETESWIVDRQWAQDLTLPWQSGSGGVWREMHHLVEFEPPHAATIRVLALGNQEGSLKTALTGAMRVTKDTNDNNLYKLHGGHVSCRVKLSALTLKGTSYKICTDKMFFVKNPTDTGHGTVVMQVKVSKGAPCRIPVIVADDLTAAINKGILVTVNPIASTNDDEVLIEVNPPFGDSYIIVGRGDSRLTYQWHKEGSSIGKLFTQTMKGVERLAVMGDTAWDFSSAGGFFTSVGKGIHTVFGSAFQGLFGGLNWITKVIMGAVLIWVGINTRNMTMSMSMILVGVIMMFLSLGVGADQGCAINFGK

SEQ ID NO: 132 - protein, 675 aa, Artificial Sequence
  derived and/or modified protein sequence (wt) from YFV__NC_002031.1__SSIgE-prME (polyprotein: aa122-778)
MDWTWILFLVAAATRVHSVTLVRKNRWLLLNVTSEDLGKTFSVGTGNCTTNILEAKYWCPDSMEYNCPNLSPREEPDDIDCWCYGVENVRVAYGKCDSAGRSRRSRRAIDLPTHENHGLKTRQEKWMTGRMGERQLQKIERWFVRNPFFAVTALTIAYLVGSNMTQRVVIALLVLAVGPAYSAHCIGITDRDFIEGVHGGTWVSATLEQDKCVTVMAPDKPSLDISLETVAIDRPAEVRKVCYNAVLTHVKINDKCPSTGEAHLAEENEGDNACKRTYSDRGWGNGCGLFGKGSIVACAKFTCAKSMSLFEVDQTKIQYVIRAQLHVGAKQENWNTDIKTLKFDALSGSQEVEFIGYGKATLECQVQTAVDFGNSYIAEMETESWIVDRQWAQDLTLPWQSGSGGVWREMHHLVEFEPPHAATIRVLALGNQEGSLKTALTGAMRVTKDTNDNNLYKLHGGHVSCRVKLSALTLKGTSYKICTDKMFFVKNPTDTGHGTVVMQVKVSKGAPCRIPVIVADDLTAAINKGILVTVNPIASTNDDEVLIEVNPPFGDSYIIVGRGDSRLTYQWHKEGSSIGKLFTQTMKGVERLAVMGDTAWDFSSAGGFFTSVGKGIHTVFGSAFQGLFGGLNWITKVIMGAVLIWVGINTRNMTMSMSMILVGVIMMFLSLGVGA

SEQ ID NO: 133 - protein, 671 aa, Artificial Sequence
  derived and/or modified protein sequence (wt) from YFV__NC_002031.1__SSIgE-prME (polyprotein: aa126-778)
MDWTWILFLVAAATRVHSRKNRWLLLNVTSEDLGKTFSVGTGNCTTNILEAKYWCPDSMEYNCPNLSPREEPDDIDCWCYGVENVRVAYGKCDSAGRSRRSRRAIDLPTHENHGLKTRQEKWMTGRMGERQLQKIERWFVRNPFFAVTALTIAYLVGSNMTQRVVIALLVLAVGPAYSAHCIGITDRDFIEGVHGGTWVSATLEQDKCVTVMAPDKPSLDISLETVAIDRPAEVRKVCYNAVLTHVKINDKCPSTGEAHLAEENEGDNACKRTYSDRGWGNGCGLFGKGSIVACAKFTCAKSMSLFEVDQTKIQYVIRAQLHVGAKQENWNTDIKTLKFDALSGSQEVEFIGYGKATLECQVQTAVDFGNSYIAEMETESWIVDRQWAQDLTLPWQSGSGGVWREMHHLVEFEPPHAATIRVLALGNQEGSLKTALTGAMRVTKDTNDNNLYKLHGGHVSCRVKLSALTLKGTSYKICTDKMFFVKNPTDTGHGTVVMQVKVSKGAPCRIPVIVADDLTAAINKGILVTVNPIASTNDDEVLIEVNPPFGDSYIIVGRGDSRLTYQWHKEGSSIGKLFTQTMKGVERLAVMGDTAWDFSSAGGFFTSVGKGIHTVFGSAFQGLFGGLNWITKVIMGAVLIWVGINTRNMTMSMSMILVGVIMMFLSLGVGA

SEQ ID NO: 134 - protein, 691 aa, Artificial Sequence
  derived and/or modified protein sequence (wt) from YFV__NC_002031.1__SSjev-prME-XX (polyprotein: aa122-788)
MGKRSAGSIMWLASLAVVIACAGAVTLVRKNRWLLLNVTSEDLGKTFSVGTGNCTTNILEAKYWCPDSMEYNCPNLSPREEPDDIDCWCYGVENVRVAYGKCDSAGRSRRSRRAIDLPTHENHGLKTRQEKWMTGRMGERQLQKIERWFVRNPFFAVTALTIAYLVGSNMTQRVVIALLVLAVGPAYSAHCIGITDRDFIEGVHGGTWVSATLEQDKCVTVMAPDKPSLDISLETVAIDRPAEVRKVCYNAVLTHVKINDKCPSTGEAHLAEENEGDNACKRTYSDRGWGNGCGLFGKGSIVACAKFTCAKSMSLFEVDQTKIQYVIRAQLHVGAKQENWNTDIKTLKFDALSGSQEVEFIGYGKATLECQVQTAVDFGNSYIAEMETESWIVDRQWAQDLTLPWQSGSGGVWREMHHLVEFEPPHAATIRVLALGNQEGSLKTALTGAMRVTKDTNDNNLYKLHGGHVSCRVKLSALTLKGTSYKICTDKMFFVKNPTDTGHGTVVMQVKVSKGAPCRIPVIVADDLTAAINKGILVTVNPIASTNDDEVLIEVNPPFGDSYIIVGRGDSRLTYQWHKEGSSIGKLFTQTMKGVERLAVMGDTAWDFSSAGGFFTSVGKGIHTVFGSAFQGLFGGLNWITKVIMGAVLIWVGINTRNMTMSMSMILVGVIMMFLSLGVGADQGCAINFGK

SEQ ID NO: 135 - protein, 687 aa, Artificial Sequence
  derived and/or modified protein sequence (wt) from YFV__NC_002031.1__SSjev-prME-XX (polyprotein: aa126-788)
MGKRSAGSIMWLASLAVVIACAGARKNRWLLLNVTSEDLGKTFSVGTGNCTTNILEAKYWCPDSMEYNCPNLSPREEPDDIDCWCYGVENVRVAYGKCDSAGRSRRSRRAIDLPTHENHGLKTRQEKWMTGRMGERQLQKIERWFVRNPFFAVTALTIAYLVGSNMTQRVVIALLVLAVGPAYSAHCIGITDRDFIEGVHGGTWVSATLEQDKCVTVMAPDKPSLDISLETVAIDRPAEVRKVCYNAVLTHVKINDKCPSTGEAHLAEENEGDNACKRTYSDRGWGNGCGLFGKGSIVACAKFTCAKSMSLFEVDQTKIQYVIRAQLHVGAKQENWNTDIKTLKFDALSGSQEVEFIGYGKATLECQVQTAVDFGNSYIAEMETESWIVDRQWAQDLTLPWQSGSGGVWREMHHLVEFEPPHAATIRVLALGNQEGSLKTALTGAMRVTKDTNDNNLYKLHGGHVSCRVKLSALTLKGTSYKICTDKMFFVKNPTDTGHGTVVMQVKVSKGAPCRIPVIVADDLTAAINKGILVTVNPIASTNDDEVLIEVNPPFGDSYIIVGRGDSRLTYQWHKEGSSIGKLFTQTMKGVERLAVMGDTAWDFSSAGGFFTSVGKGIHTVFGSAFQGLFGGLNWITKVIMGAVLIWVGINTRNMTMSMSMILVGVIMMFLSLGVGADQGCAINFGK

SEQ ID NO: 136 - protein, 681 aa, Artificial Sequence
  derived and/or modified protein sequence (wt) from YFV__NC_002031.1__SSjev-prME (polyprotein: aa122-778)
MGKRSAGSIMWLASLAVVIACAGAVTLVRKNRWLLLNVTSEDLGKTFSVGTGNCTTNILEAKYWCPDSMEYNCPNLSPREEPDDIDCWCYGVENVRVAYGKCDSAGRSRRSRRAIDLPTHENHGLKTRQEKWMTGRMGERQLQKIERWFVRNPFFAVTALTIAYLVGSNMTQRVVIALLVLAVGPAYSAHCIGITDRDFIEGVHGGTWVSATLEQDKCVTVMAPDKPSLDISLETVAIDRPAEVRKVCYNAVLTHVKINDKCPSTGEAHLAEENEGDNACKRTYSDRGWGNGCGLFGKGSIVACAKFTCAKSMSLFEVDQTKIQYVIRAQLHVGAKQENWNTDIKTLKFDALSGSQEVEFIGYGKATLECQVQTAVDFGNSYIAEMETESWIVDRQWAQDLTLPWQSGSGGVWREMHHLVEFEPPHAATIRVLALGNQEGSLKTALTGAMRVTKDTNDNNLYKLHGGHVSCRVKLSALTLKGTSYKICTDKMFFVKNPTDTGHGTVVMQVKVSKGAPCRIPVIVADDLTAAINKGILVTVNPIASTNDDEVLIEVNPPFGDSYIIVGRGDSRLTYQWHKEGSSIGKLFTQTMKGVERLAVMGDTAWDFSSAGGFFTSVGKGIHTVFGSAFQGLFGGLNWITKVIMGAVLIWVGINTRNMTMSMSMILVGVIMMFLSLGVGA

SEQ ID NO: 137 - protein, 677 aa, Artificial Sequence
  derived and/or modified protein sequence (wt) from YFV__NC_002031.1__SSjev-prME (polyprotein: aa126-778)
MGKRSAGSIMWLASLAVVIACAGARKNRWLLLNVTSEDLGKTFSVGTGNCTTNILEAKYWCPDSMEYNCPNLSPREEPDDIDCWCYGVENVRVAYGKCDSAGRSRRSRRAIDLPTHENHGLKTRQEKWMTGRMGERQLQKIERWFVRNPFFAVTALTIAYLVGSNMTQRVVIALLVLAVGPAYSAHCIGITDRDFIEGVHGGTWVSATLEQDKCVTVMAPDKPSLDISLETVAIDRPAEVRKVCYNAVLTHVKINDKCPSTGEAHLAEENEGDNACKRTYSDRGWGNGCGLFGKGSIVACAKFTCAKSMSLFEVDQTKIQYVIRAQLHVGAKQENWNTDIKTLKFDALSGSQEVEFIGYGKATLECQVQTAVDFGNSYIAEMETESWIVDRQWAQDLTLPWQSGSGGVWREMHHLVEFEPPHAATIRVLALGNQEGSLKTALTGAMRVTKDTNDNNLYKLHGGHVSCRVKLSALTLKGTSYKICTDKMFFVKNPTDTGHGTVVMQVKVSKGAPCRIPVIVADDLTAAINKGILVTVNPIASTNDDEVLIEVNPPFGDSYIIVGRGDSRLTYQWHKEGSSIGKLFTQTMKGVERLAVMGDTAWDFSSAGGFFTSVGKGIHTVFGSAFQGLFGGLNWITKVIMGAVLIWVGINTRNMTMSMSMILVGVIMMFLSLGVGA

SEQ ID NO: 138 - protein, 697 aa, Artificial Sequence
  derived and/or modified protein sequence (wt) from YFV__NC_002031.1__SSjev(V2)-prME-XX (polyprotein: aa122-788)
MGRKQNKRGGNEGSIMWLASLAVVIACAGAVTLVRKNRWLLLNVTSEDLGKTFSVGTGNCTTNILEAKYWCPDSMEYNCPNLSPREEPDDIDCWCYGVENVRVAYGKCDSAGRSRRSRRAIDLPTHENHGLKTRQEKWMTGRMGERQLQKIERWFVRNPFFAVTALTIAYLVGSNMTQRVVIALLVLAVGPAYSAHCIGITDRDFIEGVHGGTWVSATLEQDKCVTVMAPDKPSLDISLETVAIDRPAEVRKVCYNAVLTHVKINDKCPSTGEAHLAEENEGDNACKRTYSDRGWGNGCGLFGKGSIVACAKFTCAKSMSLFEVDQTKIQYVIRAQLHVGAKQENWNTDIKTLKFDALSGSQEVEFIGYGKATLECQVQTAVDFGNSYIAEMETESWIVDRQWAQDLTLPWQSGSGGVWREMHHLVEFEPPHAATIRVLALGNQEGSLKTALTGAMRVTKDTNDNNLYKLHGGHVSCRVKLSALTLKGTSYKICTDKMFFVKNPTDTGHGTVVMQVKVSKGAPCRIPVIVADDLTAAINKGILVTVNPIASTNDDEVLIEVNPPFGDSYIIVGRGDSRLTYQWHKEGSSIGKLFTQTMKGVERLAVMGDTAWDFSSAGGFFTSVGKGIHTVFGSAFQGLFGGLNWITKVIMGAVLIWVGINTRNMTMSMSMILVGVIMMFLSLGVGADQGCAINFGK

SEQ ID NO: 139 - protein, 693 aa, Artificial Sequence
  derived and/or modified protein sequence (wt) from YFV__NC_002031.1__SSjev(V2)-prME-XX (polyprotein: aa126-788)
MGRKQNKRGGNEGSIMWLASLAVVIACAGARKNRWLLLNVTSEDLGKTFSVGTGNCTTNILEAKYWCPDSMEYNCPNLSPREEPDDIDCWCYGVENVRVAYGKCDSAGRSRRSRRAIDLPTHENHGLKTRQEKWMTGRMGERQLQKIERWFVRNPFFAVTALTIAYLVGSNMTQRVVIALLVLAVGPAYSAHCIGITDRDFIEGVHGGTWVSATLEQDKCVTVMAPDKPSLDISLETVAIDRPAEVRKVCYNAVLTHVKINDKCPSTGEAHLAEENEGDNACKRTYSDRGWGNGCGLFGKGSIVACAKFTCAKSMSLFEVDQTKIQYVIRAQLHVGAKQENWNTDIKTLKFDALSGSQEVEFIGYGKATLECQVQTAVDFGNSYIAEMETESWIVDRQWAQDLTLPWQSGSGGVWREMHHLVEFEPPHAATIRVLALGNQEGSLKTALTGAMRVTKDTNDNNLYKLHGGHVSCRVKLSALTLKGTSYKICTDKMFFVKNPTDTGHGTVVMQVKVSKGAPCRIPVIVADDLTAAINKGILVTVNPIASTNDDEVLIEVNPPFGDSYIIVGRGDSRLTYQWHKEGSSIGKLFTQTMKGVERLAVMGDTAWDFSSAGGFFTSVGKGIHTVFGSAFQGLFGGLNWITKVIMGAVLIWVGINTRNMTMSMSMILVGVIMMFLSLGVGADQGCAINFGK

SEQ ID NO: 140 - protein, 687 aa, Artificial Sequence
  derived and/or modified protein sequence (wt) from YFV__NC_002031.1__SSjev(V2)-prME (polyprotein: aa122-778)
MGRKQNKRGGNEGSIMWLASLAVVIACAGAVTLVRKNRWLLLNVTSEDLGKTFSVGTGNCTTNILEAKYWCPDSMEYNCPNLSPREEPDDIDCWCYGVENVRVAYGKCDSAGRSRRSRRAIDLPTHENHGLKTRQEKWMTGRMGERQLQKIERWFVRNPFFAVTALTIAYLVGSNMTQRVVIALLVLAVGPAYSAHCIGITDRDFIEGVHGGTWVSATLEQDKCVTVMAPDKPSLDISLETVAIDRPAEVRKVCYNAVLTHVKINDKCPSTGEAHLAEENEGDNACKRTYSDRGWGNGCGLFGKGSIVACAKFTCAKSMSLFEVDQTKIQYVIRAQLHVGAKQENWNTDIKTLKFDALSGSQEVEFIGYGKATLECQVQTAVDFGNSYIAEMETESWIVDRQWAQDLTLPWQSGSGGVWREMHHLVEFEPPHAATIRVLALGNQEGSLKTALTGAMRVTKDTNDNNLYKLHGGHVSCRVKLSALTLKGTSYKICTDKMFFVKNPTDTGHGTVVMQVKVSKGAPCRIPVIVADDLTAAINKGILVTVNPIASTNDDEVLIEVNPPFGDSYIIVGRGDSRLTYQWHKEGSSIGKLFTQTMKGVERLAVMGDTAWDFSSAGGFFTSVGKGIHTVFGSAFQGLFGGLNWITKVIMGAVLIWVGINTRNMTMSMSMILVGVIMMFLSLGVGA

SEQ ID NO: 141 - protein, 683 aa, Artificial Sequence
  derived and/or modified protein sequence (wt) from YFV__NC_002031.1__SSjev(V2)-prME (polyprotein: aa126-778)
MGRKQNKRGGNEGSIMWLASLAVVIACAGARKNRWLLLNVTSEDLGKTFSVGTGNCTTNILEAKYWCPDSMEYNCPNLSPREEPDDIDCWCYGVENVRVAYGKCDSAGRSRRSRRAIDLPTHENHGLKTRQEKWMTGRMGERQLQKIERWFVRNPFFAVTALTIAYLVGSNMTQRVVIALLVLAVGPAYSAHCIGITDRDFIEGVHGGTWVSATLEQDKCVTVMAPDKPSLDISLETVAIDRPAEVRKVCYNAVLTHVKINDKCPSTGEAHLAEENEGDNACKRTYSDRGWGNGCGLFGKGSIVACAKFTCAKSMSLFEVDQTKIQYVIRAQLHVGAKQENWNTDIKTLKFDALSGSQEVEFIGYGKATLECQVQTAVDFGNSYIAEMETESWIVDRQWAQDLTLPWQSGSGGVWREMHHLVEFEPPHAATIRVLALGNQEGSLKTALTGAMRVTKDTNDNNLYKLHGGHVSCRVKLSALTLKGTSYKICTDKMFFVKNPTDTGHGTVVMQVKVSKGAPCRIPVIVADDLTAAINKGILVTVNPIASTNDDEVLIEVNPPFGDSYIIVGRGDSRLTYQWHKEGSSIGKLFTQTMKGVERLAVMGDTAWDFSSAGGFFTSVGKGIHTVFGSAFQGLFGGLNWITKVIMGAVLIWVGINTRNMTMSMSMILVGVIMMFLSLGVGA

SEQ ID NO: 142 - protein, 688 aa, Artificial Sequence
  derived and/or modified protein sequence (wt) from YFV__NC_002031.1__SSjev(V3)-prME-XX (polyprotein: aa122-788)
MNEGSIMWLASLAVVIACAGAVTLVRKNRWLLLNVTSEDLGKTFSVGTGNCTTNILEAKYWCPDSMEYNCPNLSPREEPDDIDCWCYGVENVRVAYGKCDSAGRSRRSRRAIDLPTHENHGLKTRQEKWMTGRMGERQLQKIERWFVRNPFFAVTALTIAYLVGSNMTQRVVIALLVLAVGPAYSAHCIGITDRDFIEGVHGGTWVSATLEQDKCVTVMAPDKPSLDISLETVAIDRPAEVRKVCYNAVLTHVKINDKCPSTGEAHLAEENEGDNACKRTYSDRGWGNGCGLFGKGSIVACAKFTCAKSMSLFEVDQTKIQYVIRAQLHVGAKQENWNTDIKTLKFDALSGSQEVEFIGYGKATLECQVQTAVDFGNSYIAEMETESWIVDRQWAQDLTLPWQSGSGGVWREMHHLVEFEPPHAATIRVLALGNQEGSLKTALTGAMRVTKDTNDNNLYKLHGGHVSCRVKLSALTLKGTSYKICTDKMFFVKNPTDTGHGTVVMQVKVSKGAPCRIPVIVADDLTAAINKGILVTVNPIASTNDDEVLIEVNPPFGDSYIIVGRGDSRLTYQWHKEGSSIGKLFTQTMKGVERLAVMGDTAWDFSSAGGFFTSVGKGIHTVFGSAFQGLFGGLNWITKVIMGAVLIWVGINTRNMTMSMSMILVGVIMMFLSLGVGADQGCAINFGK

SEQ ID NO: 143 - protein, 684 aa, Artificial Sequence
  derived and/or modified protein sequence (wt) from YFV__NC_002031.1__SSjev(V3)-prME-XX (polyprotein: aa126-788)
MNEGSIMWLASLAVVIACAGARKNRWLLLNVTSEDLGKTFSVGTGNCTTNILEAKYWCPDSMEYNCPNLSPREEPDDIDCWCYGVENVRVAYGKCDSAGRSRRSRRAIDLPTHENHGLKTRQEKWMTGRMGERQLQKIERWFVRNPFFAVTALTIAYLVGSNMTQRVVIALLVLAVGPAYSAHCIGITDRDFIEGVHGGTWVSATLEQDKCVTVMAPDKPSLDISLETVAIDRPAEVRKVCYNAVLTHVKINDKCPSTGEAHLAEENEGDNACKRTYSDRGWGNGCGLFGKGSIVACAKFTCAKSMSLFEVDQTKIQYVIRAQLHVGAKQENWNTDIKTLKFDALSGSQEVEFIGYGKATLECQVQTAVDFGNSYIAEMETESWIVDRQWAQDLTLPWQSGSGGVWREMHHLVEFEPPHAATIRVLALGNQEGSLKTALTGAMRVTKDTNDNNLYKLHGGHVSCRVKLSALTLKGTSYKICTDKMFFVKNPTDTGHGTVVMQVKVSKGAPCRIPVIVADDLTAAINKGILVTVNPIASTNDDEVLIEVNPPFGDSYIIVGRGDSRLTYQWHKEGSSIGKLFTQTMKGVERLAVMGDTAWDFSSAGGFFTSVGKGIHTVFGSAFQGLFGGLNWITKVIMGAVLIWVGINTRNMTMSMSMILVGVIMMFLSLGVGADQGCAINFGK

SEQ ID NO: 144 - protein, 678 aa, Artificial Sequence
  derived and/or modified protein sequence (wt) from YFV__NC_002031.1__SSjev(V3)-prME (polyprotein: aa122-778)
MNEGSIMWLASLAVVIACAGAVTLVRKNRWLLLNVTSEDLGKTFSVGTGNCTTNILEAKYWCPDSMEYNCPNLSPREEPDDIDCWCYGVENVRVAYGKCDSAGRSRRSRRAIDLPTHENHGLKTRQEKWMTGRMGERQLQKIERWFVRNPFFAVTALTIAYLVGSNMTQRVVIALLVLAVGPAYSAHCIGITDRDFIEGVHGGTWVSATLEQDKCVTVMAPDKPSLDISLETVAIDRPAEVRKVCYNAVLTHVKINDKCPSTGEAHLAEENEGDNACKRTYSDRGWGNGCGLFGKGSIVACAKFTCAKSMSLFEVDQTKIQYVIRAQLHVGAKQENWNTDIKTLKFDALSGSQEVEFIGYGKATLECQVQTAVDFGNSYIAEMETESWIVDRQWAQDLTLPWQSGSGGVWREMHHLVEFEPPHAATIRVLALGNQEGSLKTALTGAMRVTKDTNDNNLYKLHGGHVSCRVKLSALTLKGTSYKICTDKMFFVKNPTDTGHGTVVMQVKVSKGAPCRIPVIVADDLTAAINKGILVTVNPIASTNDDEVLIEVNPPFGDSYIIVGRGDSRLTYQWHKEGSSIGKLFTQTMKGVERLAVMGDTAWDFSSAGGFFTSVGKGIHTVFGSAFQGLFGGLNWITKVIMGAVLIWVGINTRNMTMSMSMILVGVIMMFLSLGVGA

SEQ ID NO: 145 - protein, 674 aa, Artificial Sequence
  derived and/or modified protein sequence (wt) from YFV__NC_002031.1__SSjev(V3)-prME (polyprotein: aa126-778)
MNEGSIMWLASLAVVIACAGARKNRWLLLNVTSEDLGKTFSVGTGNCTTNILEAKYWCPDSMEYNCPNLSPREEPDDIDCWCYGVENVRVAYGKCDSAGRSRRSRRAIDLPTHENHGLKTRQEKWMTGRMGERQLQKIERWFVRNPFFAVTALTIAYLVGSNMTQRVVIALLVLAVGPAYSAHCIGITDRDFIEGVHGGTWVSATLEQDKCVTVMAPDKPSLDISLETVAIDRPAEVRKVCYNAVLTHVKINDKCPSTGEAHLAEENEGDNACKRTYSDRGWGNGCGLFGKGSIVACAKFTCAKSMSLFEVDQTKIQYVIRAQLHVGAKQENWNTDIKTLKFDALSGSQEVEFIGYGKATLECQVQTAVDFGNSYIAEMETESWIVDRQWAQDLTLPWQSGSGGVWREMHHLVEFEPPHAATIRVLALGNQEGSLKTALTGAMRVTKDTNDNNLYKLHGGHVSCRVKLSALTLKGTSYKICTDKMFFVKNPTDTGHGTVVMQVKVSKGAPCRIPVIVADDLTAAINKGILVTVNPIASTNDDEVLIEVNPPFGDSYIIVGRGDSRLTYQWHKEGSSIGKLFTQTMKGVERLAVMGDTAWDFSSAGGFFTSVGKGIHTVFGSAFQGLFGGLNWITKVIMGAVLIWVGINTRNMTMSMSMILVGVIMMFLSLGVGA

SEQ ID NO: 146 - protein, 691 aa, Artificial Sequence
  derived and/or modified protein sequence (wt) from YFV__NC_002031.1__SSjev(V4)-prME-XX (polyprotein: aa122-788)
MLGSNSGQRVVFTILLLLVAPAYSVTLVRKNRWLLLNVTSEDLGKTFSVGTGNCTTNILEAKYWCPDSMEYNCPNLSPREEPDDIDCWCYGVENVRVAYGKCDSAGRSRRSRRAIDLPTHENHGLKTRQEKWMTGRMGERQLQKIERWFVRNPFFAVTALTIAYLVGSNMTQRVVIALLVLAVGPAYSAHCIGITDRDFIEGVHGGTWVSATLEQDKCVTVMAPDKPSLDISLETVAIDRPAEVRKVCYNAVLTHVKINDKCPSTGEAHLAEENEGDNACKRTYSDRGWGNGCGLFGKGSIVACAKFTCAKSMSLFEVDQTKIQYVIRAQLHVGAKQENWNTDIKTLKFDALSGSQEVEFIGYGKATLECQVQTAVDFGNSYIAEMETESWIVDRQWAQDLTLPWQSGSGGVWREMHHLVEFEPPHAATIRVLALGNQEGSLKTALTGAMRVTKDTNDNNLYKLHGGHVSCRVKLSALTLKGTSYKICTDKMFFVKNPTDTGHGTVVMQVKVSKGAPCRIPVIVADDLTAAINKGILVTVNPIASTNDDEVLIEVNPPFGDSYIIVGRGDSRLTYQWHKEGSSIGKLFTQTMKGVERLAVMGDTAWDFSSAGGFFTSVGKGIHTVFGSAFQGLFGGLNWITKVIMGAVLIWVGINTRNMTMSMSMILVGVIMMFLSLGVGADQGCAINFGK

SEQ ID NO: 147 - protein, 687 aa, Artificial Sequence
  derived and/or modified protein sequence (wt) from YFV__NC_002031.1__SSjev(V4)-prME-XX (polyprotein: aa126-788)
MLGSNSGQRVVFTILLLLVAPAYSRKNRWLLLNVTSEDLGKTFSVGTGNCTTNILEAKYWCPDSMEYNCPNLSPREEPDDIDCWCYGVENVRVAYGKCDSAGRSRRSRRAIDLPTHENHGLKTRQEKWMTGRMGERQLQKIERWFVRNPFFAVTALTIAYLVGSNMTQRVVIALLVLAVGPAYSAHCIGITDRDFIEGVHGGTWVSATLEQDKCVTVMAPDKPSLDISLETVAIDRPAEVRKVCYNAVLTHVKINDKCPSTGEAHLAEENEGDNACKRTYSDRGWGNGCGLFGKGSIVACAKFTCAKSMSLFEVDQTKIQYVIRAQLHVGAKQENWNTDIKTLKFDALSGSQEVEFIGYGKATLECQVQTAVDFGNSYIAEMETESWIVDRQWAQDLTLPWQSGSGGVWREMHHLVEFEPPHAATIRVLALGNQEGSLKTALTGAMRVTKDTNDNNLYKLHGGHVSCRVKLSALTLKGTSYKICTDKMFFVKNPTDTGHGTVVMQVKVSKGAPCRIPVIVADDLTAAINKGILVTVNPIASTNDDEVLIEVNPPFGDSYIIVGRGDSRLTYQWHKEGSSIGKLFTQTMKGVERLAVMGDTAWDFSSAGGFFTSVGKGIHTVFGSAFQGLFGGLNWITKVIMGAVLIWVGINTRNMTMSMSMILVGVIMMFLSLGVGADQGCAINFGK

SEQ ID NO: 148 - protein, 681 aa, Artificial Sequence
  derived and/or modified protein sequence (wt) from YFV__NC_002031.1__SSjev(V4)-prME (polyprotein: aa122-778)
MLGSNSGQRVVFTILLLLVAPAYSVTLVRKNRWLLLNVTSEDLGKTFSVGTGNCTTNILEAKYWCPDSMEYNCPNLSPREEPDDIDCWCYGVENVRVAYGKCDSAGRSRRSRRAIDLPTHENHGLKTRQEKWMTGRMGERQLQKIERWFVRNPFFAVTALTIAYLVGSNMTQRVVIALLVLAVGPAYSAHCIGITDRDFIEGVHGGTWVSATLEQDKCVTVMAPDKPSLDISLETVAIDRPAEVRKVCYNAVLTHVKINDKCPSTGEAHLAEENEGDNACKRTYSDRGWGNGCGLFGKGSIVACAKFTCAKSMSLFEVDQTKIQYVIRAQLHVGAKQENWNTDIKTLKFDALSGSQEVEFIGYGKATLECQVQTAVDFGNSYIAEMETESWIVDRQWAQDLTLPWQSGSGGVWREMHHLVEFEPPHAATIRVLALGNQEGSLKTALTGAMRVTKDTNDNNLYKLHGGHVSCRVKLSALTLKGTSYKICTDKMFFVKNPTDTGHGTVVMQVKVSKGAPCRIPVIVADDLTAAINKGILVTVNPIASTNDDEVLIEVNPPFGDSYIIVGRGDSRLTYQWHKEGSSIGKLFTQTMKGVERLAVMGDTAWDFSSAGGFFTSVGKGIHTVFGSAFQGLFGGLNWITKVIMGAVLIWVGINTRNMTMSMSMILVGVIMMFLSLGVGA

SEQ ID NO: 149 - protein, 677 aa, Artificial Sequence
  derived and/or modified protein sequence (wt) from YFV__NC_002031.1__SSjev(V4)-prME (polyprotein: aa126-778)
MLGSNSGQRVVFTILLLLVAPAYSRKNRWLLLNVTSEDLGKTFSVGTGNCTTNILEAKYWCPDSMEYNCPNLSPREEPDDIDCWCYGVENVRVAYGKCDSAGRSRRSRRAIDLPTHENHGLKTRQEKWMTGRMGERQLQKIERWFVRNPFFAVTALTIAYLVGSNMTQRVVIALLVLAVGPAYSAHCIGITDRDFIEGVHGGTWVSATLEQDKCVTVMAPDKPSLDISLETVAIDRPAEVRKVCYNAVLTHVKINDKCPSTGEAHLAEENEGDNACKRTYSDRGWGNGCGLFGKGSIVACAKFTCAKSMSLFEVDQTKIQYVIRAQLHVGAKQENWNTDIKTLKFDALSGSQEVEFIGYGKATLECQVQTAVDFGNSYIAEMETESWIVDRQWAQDLTLPWQSGSGGVWREMHHLVEFEPPHAATIRVLALGNQEGSLKTALTGAMRVTKDTNDNNLYKLHGGHVSCRVKLSALTLKGTSYKICTDKMFFVKNPTDTGHGTVVMQVKVSKGAPCRIPVIVADDLTAAINKGILVTVNPIASTNDDEVLIEVNPPFGDSYIIVGRGDSRLTYQWHKEGSSIGKLFTQTMKGVERLAVMGDTAWDFSSAGGFFTSVGKGIHTVFGSAFQGLFGGLNWITKVIMGAVLIWVGINTRNMTMSMSMILVGVIMMFLSLGVGA

SEQ ID NO: 150 - protein, 682 aa, Artificial Sequence
  derived and/or modified protein sequence (wt) from YFV__NC_002031.1__SSjev(V5)-prME-XX (polyprotein: aa122-788)
MWLVSLAIVTACAGAVTLVRKNRWLLLNVTSEDLGKTFSVGTGNCTTNILEAKYWCPDSMEYNCPNLSPREEPDDIDCWCYGVENVRVAYGKCDSAGRSRRSRRAIDLPTHENHGLKTRQEKWMTGRMGERQLQKIERWFVRNPFFAVTALTIAYLVGSNMTQRVVIALLVLAVGPAYSAHCIGITDRDFIEGVHGGTWVSATLEQDKCVTVMAPDKPSLDISLETVAIDRPAEVRKVCYNAVLTHVKINDKCPSTGEAHLAEENEGDNACKRTYSDRGWGNGCGLFGKGSIVACAKFTCAKSMSLFEVDQTKIQYVIRAQLHVGAKQENWNTDIKTLKFDALSGSQEVEFIGYGKATLECQVQTAVDFGNSYIAEMETESWIVDRQWAQDLTLPWQSGSGGVWREMHHLVEFEPPHAATIRVLALGNQEGSLKTALTGAMRVTKDTNDNNLYKLHGGHVSCRVKLSALTLKGTSYKICTDKMFFVKNPTDTGHGTVVMQVKVSKGAPCRIPVIVADDLTAAINKGILVTVNPIASTNDDEVLIEVNPPFGDSYIIVGRGDSRLTYQWHKEGSSIGKLFTQTMKGVERLAVMGDTAWDFSSAGGFFTSVGKGIHTVFGSAFQGLFGGLNWITKVIMGAVLIWVGINTRNMTMSMSMILVGVIMMFLSLGVGADQGCAINFGK

SEQ ID NO: 151 - protein, 678 aa, Artificial Sequence
  derived and/or modified protein sequence (wt) from YFV__NC_002031.1__SSjev(V5)-prME-XX (polyprotein: aa126-788)
MWLVSLAIVTACAGARKNRWLLLNVTSEDLGKTFSVGTGNCTTNILEAKYWCPDSMEYNCPNLSPREEPDDIDCWCYGVENVRVAYGKCDSAGRSRRSRRAIDLPTHENHGLKTRQEKWMTGRMGERQLQKIERWFVRNPFFAVTALTIAYLVGSNMTQRVVIALLVLAVGPAYSAHCIGITDRDFIEGVHGGTWVSATLEQDKCVTVMAPDKPSLDISLETVAIDRPAEVRKVCYNAVLTHVKINDKCPSTGEAHLAEENEGDNACKRTYSDRGWGNGCGLFGKGSIVACAKFTCAKSMSLFEVDQTKIQYVIRAQLHVGAKQENWNTDIKTLKFDALSGSQEVEFIGYGKATLECQVQTAVDFGNSYIAEMETESWIVDRQWAQDLTLPWQSGSGGVWREMHHLVEFEPPHAATIRVLALGNQEGSLKTALTGAMRVTKDTNDNNLYKLHGGHVSCRVKLSALTLKGTSYKICTDKMFFVKNPTDTGHGTVVMQVKVSKGAPCRIPVIVADDLTAAINKGILVTVNPIASTNDDEVLIEVNPPFGDSYIIVGRGDSRLTYQWHKEGSSIGKLFTQTMKGVERLAVMGDTAWDFSSAGGFFTSVGKGIHTVFGSAFQGLFGGLNWITKVIMGAVLIWVGINTRNMTMSMSMILVGVIMMFLSLGVGADQGCAINFGK

SEQ ID NO: 152 - protein, 672 aa, Artificial Sequence
  derived and/or modified protein sequence (wt) from YFV__NC_002031.1__SSjev(V5)-prME (polyprotein: aa122-778)
MWLVSLAIVTACAGAVTLVRKNRWLLLNVTSEDLGKTFSVGTGNCTTNILEAKYWCPDSMEYNCPNLSPREEPDDIDCWCYGVENVRVAYGKCDSAGRSRRSRRAIDLPTHENHGLKTRQEKWMTGRMGERQLQKIERWFVRNPFFAVTALTIAYLVGSNMTQRVVIALLVLAVGPAYSAHCIGITDRDFIEGVHGGTWVSATLEQDKCVTVMAPDKPSLDISLETVAIDRPAEVRKVCYNAVLTHVKINDKCPSTGEAHLAEENEGDNACKRTYSDRGWGNGCGLFGKGSIVACAKFTCAKSMSLFEVDQTKIQYVIRAQLHVGAKQENWNTDIKTLKFDALSGSQEVEFIGYGKATLECQVQTAVDFGNSYIAEMETESWIVDRQWAQDLTLPWQSGSGGVWREMHHLVEFEPPHAATIRVLALGNQEGSLKTALTGAMRVTKDTNDNNLYKLHGGHVSCRVKLSALTLKGTSYKICTDKMFFVKNPTDTGHGTVVMQVKVSKGAPCRIPVIVADDLTAAINKGILVTVNPIASTNDDEVLIEVNPPFGDSYIIVGRGDSRLTYQWHKEGSSIGKLFTQTMKGVERLAVMGDTAWDFSSAGGFFTSVGKGIHTVFGSAFQGLFGGLNWITKVIMGAVLIWVGINTRNMTMSMSMILVGVIMMFLSLGVGA

SEQ ID NO: 153 - protein, 668 aa, Artificial Sequence
  derived and/or modified protein sequence (wt) from YFV__NC_002031.1__SSjev(V5)-prME (polyprotein: aa126-778)
MWLVSLAIVTACAGARKNRWLLLNVTSEDLGKTFSVGTGNCTTNILEAKYWCPDSMEYNCPNLSPREEPDDIDCWCYGVENVRVAYGKCDSAGRSRRSRRAIDLPTHENHGLKTRQEKWMTGRMGERQLQKIERWFVRNPFFAVTALTIAYLVGSNMTQRVVIALLVLAVGPAYSAHCIGITDRDFIEGVHGGTWVSATLEQDKCVTVMAPDKPSLDISLETVAIDRPAEVRKVCYNAVLTHVKINDKCPSTGEAHLAEENEGDNACKRTYSDRGWGNGCGLFGKGSIVACAKFTCAKSMSLFEVDQTKIQYVIRAQLHVGAKQENWNTDIKTLKFDALSGSQEVEFIGYGKATLECQVQTAVDFGNSYIAEMETESWIVDRQWAQDLTLPWQSGSGGVWREMHHLVEFEPPHAATIRVLALGNQEGSLKTALTGAMRVTKDTNDNNLYKLHGGHVSCRVKLSALTLKGTSYKICTDKMFFVKNPTDTGHGTVVMQVKVSKGAPCRIPVIVADDLTAAINKGILVTVNPIASTNDDEVLIEVNPPFGDSYIIVGRGDSRLTYQWHKEGSSIGKLFTQTMKGVERLAVMGDTAWDFSSAGGFFTSVGKGIHTVFGSAFQGLFGGLNWITKVIMGAVLIWVGINTRNMTMSMSMILVGVIMMFLSLGVGA

SEQ ID NO: 154 - protein, 678 aa, Artificial Sequence
  derived and/or modified protein sequence (wt) from YFV__NC_002031.1__SSIgE-prMEdelstem_TM-JEV (polyprotein: aa122-680)
MDWTWILFLVAAATRVHSVTLVRKNRWLLLNVTSEDLGKTFSVGTGNCTTNILEAKYWCPDSMEYNCPNLSPREEPDDIDCWCYGVENVRVAYGKCDSAGRSRRSRRAIDLPTHENHGLKTRQEKWMTGRMGERQLQKIERWFVRNPFFAVTALTIAYLVGSNMTQRVVIALLVLAVGPAYSAHCIGITDRDFIEGVHGGTWVSATLEQDKCVTVMAPDKPSLDISLETVAIDRPAEVRKVCYNAVLTHVKINDKCPSTGEAHLAEENEGDNACKRTYSDRGWGNGCGLFGKGSIVACAKFTCAKSMSLFEVDQTKIQYVIRAQLHVGAKQENWNTDIKTLKFDALSGSQEVEFIGYGKATLECQVQTAVDFGNSYIAEMETESWIVDRQWAQDLTLPWQSGSGGVWREMHHLVEFEPPHAATIRVLALGNQEGSLKTALTGAMRVTKDTNDNNLYKLHGGHVSCRVKLSALTLKGTSYKICTDKMFFVKNPTDTGHGTVVMQVKVSKGAPCRIPVIVADDLTAAINKGILVTVNPIASTNDDEVLIEVNPPFGDSYIIVGRGDSRLTYQWHKEGSSGSTLGKAFSTTLKGAQRLAALGDTAWDFGSIGGVFNSIGRAVHQVFGGAFRTLFGGMSWITQGLMGALLLWMGVNARDRSIALAFLATGGVLVFLATNVHA

SEQ ID NO: 155 - protein, 674 aa, Artificial Sequence
  derived and/or modified protein sequence (wt) from YFV__NC_002031.1__SSIgE-prMEdelstem_TM-JEV (polyprotein: aa126-680)
MDWTWILFLVAAATRVHSRKNRWLLLNVTSEDLGKTFSVGTGNCTTNILEAKYWCPDSMEYNCPNLSPREEPDDIDCWCYGVENVRVAYGKCDSAGRSRRSRRAIDLPTHENHGLKTRQEKWMTGRMGERQLQKIERWFVRNPFFAVTALTIAYLVGSNMTQRVVIALLVLAVGPAYSAHCIGITDRDFIEGVHGGTWVSATLEQDKCVTVMAPDKPSLDISLETVAIDRPAEVRKVCYNAVLTHVKINDKCPSTGEAHLAEENEGDNACKRTYSDRGWGNGCGLFGKGSIVACAKFTCAKSMSLFEVDQTKIQYVIRAQLHVGAKQENWNTDIKTLKFDALSGSQEVEFIGYGKATLECQVQTAVDFGNSYIAEMETESWIVDRQWAQDLTLPWQSGSGGVWREMHHLVEFEPPHAATIRVLALGNQEGSLKTALTGAMRVTKDTNDNNLYKLHGGHVSCRVKLSALTLKGTSYKICTDKMFFVKNPTDTGHGTVVMQVKVSKGAPCRIPVIVADDLTAAINKGILVTVNPIASTNDDEVLIEVNPPFGDSYIIVGRGDSRLTYQWHKEGSSGSTLGKAFSTTLKGAQRLAALGDTAWDFGSIGGVFNSIGRAVHQVFGGAFRTLFGGMSWITQGLMGALLLWMGVNARDRSIALAFLATGGVLVFLATNVHA

SEQ ID NO: 156 - protein, 684 aa, Artificial Sequence
  derived and/or modified protein sequence (wt) from YFV__NC_002031.1__SSjev-prMEdelstem_TM-JEV (polyprotein: aa122-680)
MGKRSAGSIMWLASLAVVIACAGAVTLVRKNRWLLLNVTSEDLGKTFSVGTGNCTTNILEAKYWCPDSMEYNCPNLSPREEPDDIDCWCYGVENVRVAYGKCDSAGRSRRSRRAIDLPTHENHGLKTRQEKWMTGRMGERQLQKIERWFVRNPFFAVTALTIAYLVGSNMTQRVVIALLVLAVGPAYSAHCIGITDRDFIEGVHGGTWVSATLEQDKCVTVMAPDKPSLDISLETVAIDRPAEVRKVCYNAVLTHVKINDKCPSTGEAHLAEENEGDNACKRTYSDRGWGNGCGLFGKGSIVACAKFTCAKSMSLFEVDQTKIQYVIRAQLHVGAKQENWNTDIKTLKFDALSGSQEVEFIGYGKATLECQVQTAVDFGNSYIAEMETESWIVDRQWAQDLTLPWQSGSGGVWREMHHLVEFEPPHAATIRVLALGNQEGSLKTALTGAMRVTKDTNDNNLYKLHGGHVSCRVKLSALTLKGTSYKICTDKMFFVKNPTDTGHGTVVMQVKVSKGAPCRIPVIVADDLTAAINKGILVTVNPIASTNDDEVLIEVNPPFGDSYIIVGRGDSRLTYQWHKEGSSGSTLGKAFSTTLKGAQRLAALGDTAWDFGSIGGVFNSIGRAVHQVFGGAFRTLFGGMSWITQGLMGALLLWMGVNARDRSIALAFLATGGVLVFLATNVHA

SEQ ID NO: 157 - protein, 680 aa, Artificial Sequence
  derived and/or modified protein sequence (wt) from YFV__NC_002031.1__SSjev-prMEdelstem_TM-JEV (polyprotein: aa126-680)
MGKRSAGSIMWLASLAVVIACAGARKNRWLLLNVTSEDLGKTFSVGTGNCTTNILEAKYWCPDSMEYNCPNLSPREEPDDIDCWCYGVENVRVAYGKCDSAGRSRRSRRAIDLPTHENHGLKTRQEKWMTGRMGERQLQKIERWFVRNPFFAVTALTIAYLVGSNMTQRVVIALLVLAVGPAYSAHCIGITDRDFIEGVHGGTWVSATLEQDKCVTVMAPDKPSLDISLETVAIDRPAEVRKVCYNAVLTHVKINDKCPSTGEAHLAEENEGDNACKRTYSDRGWGNGCGLFGKGSIVACAKFTCAKSMSLFEVDQTKIQYVIRAQLHVGAKQENWNTDIKTLKFDALSGSQEVEFIGYGKATLECQVQTAVDFGNSYIAEMETESWIVDRQWAQDLTLPWQSGSGGVWREMHHLVEFEPPHAATIRVLALGNQEGSLKTALTGAMRVTKDTNDNNLYKLHGGHVSCRVKLSALTLKGTSYKICTDKMFFVKNPTDTGHGTVVMQVKVSKGAPCRIPVIVADDLTAAINKGILVTVNPIASTNDDEVLIEVNPPFGDSYIIVGRGDSRLTYQWHKEGSSGSTLGKAFSTTLKGAQRLAALGDTAWDFGSIGGVFNSIGRAVHQVFGGAFRTLFGGMSWITQGLMGALLLWMGVNARDRSIALAFLATGGVLVFLATNVHA

SEQ ID NO: 158 - RNA, 2094 nt, Artificial Sequence
  derived and/or modified CDS sequence (wt) from YFV__NC_002031.1__X-SS-prME-XX (polyprotein: aa92-788)
augagaggauuguccucaaggaaacgccguucccaugauguucugacugugcaauuccuaauuuugggaaugcuguugaugacggguggagugaccuuggugcggaaaaacagaugguugcuccuaaaugugacaucugaggaccucgggaaaacauucucugugggcacaggcaacugcacaacaaacauuuuggaagccaaguacuggugcccagacucaauggaauacaacugucccaaucucaguccaagagaggagccagaugacauugauugcuggugcuaugggguggaaaacguuagagucgcauaugguaagugugacucagcaggcaggucuaggaggucaagaagggccauugacuugccuacgcaugaaaaccaugguuugaagacccggcaagaaaaauggaugacuggaagaaugggugaaaggcaacuccaaaagauugagagaugguucgugaggaaccccuuuuuugcagugacggcucugaccauugccuaccuugugggaagcaacaugacgcaacgagucgugauugcccuacuggucuuggcuguugguccggccuacucagcucacugcauuggaauuacugacagggauuucauugagggggugcauggaggaacuuggguuucagcuacccuggagcaagacaagugugucacuguuauggccccugacaagccuucauuggacaucucacuagagacaguagccauugauagaccugcugaggugaggaaaguguguuacaaugcaguucucacucaugugaagauuaaugacaagugccccagcacuggagaggcccaccuagcugaagagaacgaaggggacaaugcgugcaagcgcacuuauucugauagaggcuggggcaauggcuguggccuauuugggaaagggagcauuguggcaugcgccaaauucacuugugccaaauccaugaguuuguuugagguugaucagaccaaaauucaguaugucaucagagcacaauugcauguaggggccaagcaggaaaauuggaauaccgacauuaagacucucaaguuugaugcccugucaggcucccaggaagucgaguucauuggguauggaaaagcuacacuggaaugccaggugcaaacugcgguggacuuugguaacaguuacaucgcugagauggaaacagagagcuggauaguggacagacagugggcccaggacuugacccugccauggcagaguggaaguggcgggguguggagagagaugcaucaucuugucgaauuugaaccuccgcaugccgccacuaucagaguacuggcccugggaaaccaggaaggcuccuugaaaacagcucuuacuggcgcaaugaggguuacaaaggacacaaaugacaacaaccuuuacaaacuacaugguggacauguuucuugcagagugaaauugucagcuuugacacucaaggggacauccuacaaaauaugcacugacaaaauguuuuuugucaagaacccaacugacacuggccauggcacuguugugaugcaggugaaagugucaaaaggagcccccugcaggauuccagugauaguagcugaugaucuuacagcggcaaucaauaaaggcauuuugguuacaguuaaccccaucgccucaaccaaugaugaugaagugcugauugaggugaacccaccuuuuggagacagcuacauuaucguugggagaggagauucacgucucacuuaccaguggcacaaagagggaagcucaauaggaaaguuguucacucagaccaugaaaggcguggaacgccuggccgucaugggagacaccgccugggauuucagcuccgcuggaggguucuucacuucgguugggaaaggaauccauacgguguuuggcucugccuuucaggggcuauuuggcggcuugaacuggauaacaaaggucaucaugggggcgguacuuauauggguuggcaucaacacaagaaacaugacaauguccaugagcaugaucuugguaggagugaucaugauguuuuugucucuaggaguuggggcggaucaaggaugcgccaucaacuuuggcaaguaa

SEQ ID NO: 159 - RNA, 2064 nt, Artificial Sequence
  derived and/or modified CDS sequence (wt) from YFV__NC_002031.1__X-SS-prME (polyprotein: aa92-778)
augagaggauuguccucaaggaaacgccguucccaugauguucugacugugcaauuccuaauuuugggaaugcuguugaugacggguggagugaccuuggugcggaaaaacagaugguugcuccuaaaugugacaucugaggaccucgggaaaacauucucugugggcacaggcaacugcacaacaaacauuuuggaagccaaguacuggugcccagacucaauggaauacaacugucccaaucucaguccaagagaggagccagaugacauugauugcuggugcuaugggguggaaaacguuagagucgcauaugguaagugugacucagcaggcaggucuaggaggucaagaagggccauugacuugccuacgcaugaaaaccaugguuugaagacccggcaagaaaaauggaugacuggaagaaugggugaaaggcaacuccaaaagauugagagaugguucgugaggaaccccuuuuuugcagugacggcucugaccauugccuaccuugugggaagcaacaugacgcaacgagucgugauugcccuacuggucuuggcuguugguccggccuacucagcucacugcauuggaauuacugacagggauuucauugagggggugcauggaggaacuuggguuucagcuacccuggagcaagacaagugugucacuguuauggccccugacaagccuucauuggacaucucacuagagacaguagccauugauagaccugcugaggugaggaaaguguguuacaaugcaguucucacucaugugaagauuaaugacaagugccccagcacuggagaggcccaccuagcugaagagaacgaaggggacaaugcgugcaagcgcacuuauucugauagaggcuggggcaauggcuguggccuauuugggaaagggagcauuguggcaugcgccaaauucacuugugccaaauccaugaguuuguuugagguugaucagaccaaaauucaguaugucaucagagcacaauugcauguaggggccaagcaggaaaauuggaauaccgacauuaagacucucaaguuugaugcccugucaggcucccaggaagucgaguucauuggguauggaaaagcuacacuggaaugccaggugcaaacugcgguggacuuugguaacaguuacaucgcugagauggaaacagagagcuggauaguggacagacagugggcccaggacuugacccugccauggcagaguggaaguggcgggguguggagagagaugcaucaucuugucgaauuugaaccuccgcaugccgccacuaucagaguacuggcccugggaaaccaggaaggcuccuugaaaacagcucuuacuggcgcaaugaggguuacaaaggacacaaaugacaacaaccuuuacaaacuacaugguggacauguuucuugcagagugaaauugucagcuuugacacucaaggggacauccuacaaaauaugcacugacaaaauguuuuuugucaagaacccaacugacacuggccauggcacuguugugaugcaggugaaagugucaaaaggagcccccugcaggauuccagugauaguagcugaugaucuuacagcggcaaucaauaaaggcauuuugguuacaguuaaccccaucgccucaaccaaugaugaugaagugcugauugaggugaacccaccuuuuggagacagcuacauuaucguugggagaggagauucacgucucacuuaccaguggcacaaagagggaagcucaauaggaaaguuguucacucagaccaugaaaggcguggaacgccuggccgucaugggagacaccgccugggauuucagcuccgcuggaggguucuucacuucgguugggaaaggaauccauacgguguuuggcucugccuuucaggggcuauuuggcggcuugaacuggauaacaaaggucaucaugggggcgguacuuauauggguuggcaucaacacaagaaacaugacaauguccaugagcaugaucuugguaggagugaucaugauguuuuugucucuaggaguuggggcguaa

SEQ ID NO: 160 - RNA, 2067 nt, Artificial Sequence
  derived and/or modified CDS sequence (wt) from YFV__NC_002031.1__SS-prME-XX (polyprotein: M,aa102-788)
augucccaugauguucugacugugcaauuccuaauuuugggaaugcuguugaugacggguggagugaccuuggugcggaaaaacagaugguugcuccuaaaugugacaucugaggaccucgggaaaacauucucugugggcacaggcaacugcacaacaaacauuuuggaagccaaguacuggugcccagacucaauggaauacaacugucccaaucucaguccaagagaggagccagaugacauugauugcuggugcuaugggguggaaaacguuagagucgcauaugguaagugugacucagcaggcaggucuaggaggucaagaagggccauugacuugccuacgcaugaaaaccaugguuugaagacccggcaagaaaaauggaugacuggaagaaugggugaaaggcaacuccaaaagauugagagaugguucgugaggaaccccuuuuuugcagugacggcucugaccauugccuaccuugugggaagcaacaugacgcaacgagucgugauugcccuacuggucuuggcuguugguccggccuacucagcucacugcauuggaauuacugacagggauuucauugagggggugcauggaggaacuuggguuucagcuacccuggagcaagacaagugugucacuguuauggccccugacaagccuucauuggacaucucacuagagacaguagccauugauagaccugcugaggugaggaaaguguguuacaaugcaguucucacucaugugaagauuaaugacaagugccccagcacuggagaggcccaccuagcugaagagaacgaaggggacaaugcgugcaagcgcacuuauucugauagaggcuggggcaauggcuguggccuauuugggaaagggagcauuguggcaugcgccaaauucacuugugccaaauccaugaguuuguuugagguugaucagaccaaaauucaguaugucaucagagcacaauugcauguaggggccaagcaggaaaauuggaauaccgacauuaagacucucaaguuugaugcccugucaggcucccaggaagucgaguucauuggguauggaaaagcuacacuggaaugccaggugcaaacugcgguggacuuugguaacaguuacaucgcugagauggaaacagagagcuggauaguggacagacagugggcccaggacuugacccugccauggcagaguggaaguggcgggguguggagagagaugcaucaucuugucgaauuugaaccuccgcaugccgccacuaucagaguacuggcccugggaaaccaggaaggcuccuugaaaacagcucuuacuggcgcaaugaggguuacaaaggacacaaaugacaacaaccuuuacaaacuacaugguggacauguuucuugcagagugaaauugucagcuuugacacucaaggggacauccuacaaaauaugcacugacaaaauguuuuuugucaagaacccaacugacacuggccauggcacuguugugaugcaggugaaagugucaaaaggagcccccugcaggauuccagugauaguagcugaugaucuuacagcggcaaucaauaaaggcauuuugguuacaguuaaccccaucgccucaaccaaugaugaugaagugcugauugaggugaacccaccuuuuggagacagcuacauuaucguugggagaggagauucacgucucacuuaccaguggcacaaagagggaagcucaauaggaaaguuguucacucagaccaugaaaggcguggaacgccuggccgucaugggagacaccgccugggauuucagcuccgcuggaggguucuucacuucgguugggaaaggaauccauacgguguuuggcucugccuuucaggggcuauuuggcggcuugaacuggauaacaaaggucaucaugggggcgguacuuauauggguuggcaucaacacaagaaacaugacaauguccaugagcaugaucuugguaggagugaucaugauguuuuugucucuaggaguuggggcggaucaaggaugcgccaucaacuuuggcaaguaa

SEQ ID NO: 161 - RNA, 2061 nt, Artificial Sequence
  derived and/or modified CDS sequence (wt) from YFV__NC_002031.1__SS-prME-XX (polyprotein: M,aa104-788)
auggauguucugacugugcaauuccuaauuuugggaaugcuguugaugacggguggagugaccuuggugcggaaaaacagaugguugcuccuaaaugugacaucugaggaccucgggaaaacauucucugugggcacaggcaacugcacaacaaacauuuuggaagccaaguacuggugcccagacucaauggaauacaacugucccaaucucaguccaagagaggagccagaugacauugauugcuggugcuaugggguggaaaacguuagagucgcauaugguaagugugacucagcaggcaggucuaggaggucaagaagggccauugacuugccuacgcaugaaaaccaugguuugaagacccggcaagaaaaauggaugacuggaagaaugggugaaaggcaacuccaaaagauugagagaugguucgugaggaaccccuuuuuugcagugacggcucugaccauugccuaccuugugggaagcaacaugacgcaacgagucgugauugcccuacuggucuuggcuguugguccggccuacucagcucacugcauuggaauuacugacagggauuucauugagggggugcauggaggaacuuggguuucagcuacccuggagcaagacaagugugucacuguuauggccccugacaagccuucauuggacaucucacuagagacaguagccauugauagaccugcugaggugaggaaaguguguuacaaugcaguucucacucaugugaagauuaaugacaagugccccagcacuggagaggcccaccuagcugaagagaacgaaggggacaaugcgugcaagcgcacuuauucugauagaggcuggggcaauggcuguggccuauuugggaaagggagcauuguggcaugcgccaaauucacuugugccaaauccaugaguuuguuugagguugaucagaccaaaauucaguaugucaucagagcacaauugcauguaggggccaagcaggaaaauuggaauaccgacauuaagacucucaaguuugaugcccugucaggcucccaggaagucgaguucauuggguauggaaaagcuacacuggaaugccaggugcaaacugcgguggacuuugguaacaguuacaucgcugagauggaaacagagagcuggauaguggacagacagugggcccaggacuugacccugccauggcagaguggaaguggcgggguguggagagagaugcaucaucuugucgaauuugaaccuccgcaugccgccacuaucagaguacuggcccugggaaaccaggaaggcuccuugaaaacagcucuuacuggcgcaaugaggguuacaaaggacacaaaugacaacaaccuuuacaaacuacaugguggacauguuucuugcagagugaaauugucagcuuugacacucaaggggacauccuacaaaauaugcacugacaaaauguuuuuugucaagaacccaacugacacuggccauggcacuguugugaugcaggugaaagugucaaaaggagcccccugcaggauuccagugauaguagcugaugaucuuacagcggcaaucaauaaaggcauuuugguuacaguuaaccccaucgccucaaccaaugaugaugaagugcugauugaggugaacccaccuuuuggagacagcuacauuaucguugggagaggagauucacgucucacuuaccaguggcacaaagagggaagcucaauaggaaaguuguucacucagaccaugaaaggcguggaacgccuggccgucaugggagacaccgccugggauuucagcuccgcuggaggguucuucacuucgguugggaaaggaauccauacgguguuuggcucugccuuucaggggcuauuuggcggcuugaacuggauaacaaaggucaucaugggggcgguacuuauauggguuggcaucaacacaagaaacaugacaauguccaugagcaugaucuugguaggagugaucaugauguuuuugucucuaggaguuggggcggaucaaggaugcgccaucaacuuuggcaaguaa

SEQ ID NO: 162 - RNA, 2037 nt, Artificial Sequence
  derived and/or modified CDS sequence (wt) from YFV__NC_002031.1__SS-prME (polyprotein: M,aa102-778)
augucccaugauguucugacugugcaauuccuaauuuugggaaugcuguugaugacggguggagugaccuuggugcggaaaaacagaugguugcuccuaaaugugacaucugaggaccucgggaaaacauucucugugggcacaggcaacugcacaacaaacauuuuggaagccaaguacuggugcccagacucaauggaauacaacugucccaaucucaguccaagagaggagccagaugacauugauugcuggugcuaugggguggaaaacguuagagucgcauaugguaagugugacucagcaggcaggucuaggaggucaagaagggccauugacuugccuacgcaugaaaaccaugguuugaagacccggcaagaaaaauggaugacuggaagaaugggugaaaggcaacuccaaaagauugagagaugguucgugaggaaccccuuuuuugcagugacggcucugaccauugccuaccuugugggaagcaacaugacgcaacgagucgugauugcccuacuggucuuggcuguugguccggccuacucagcucacugcauuggaauuacugacagggauuucauugagggggugcauggaggaacuuggguuucagcuacccuggagcaagacaagugugucacuguuauggccccugacaagccuucauuggacaucucacuagagacaguagccauugauagaccugcugaggugaggaaaguguguuacaaugcaguucucacucaugugaagauuaaugacaagugccccagcacuggagaggcccaccuagcugaagagaacgaaggggacaaugcgugcaagcgcacuuauucugauagaggcuggggcaauggcuguggccuauuugggaaagggagcauuguggcaugcgccaaauucacuugugccaaauccaugaguuuguuugagguugaucagaccaaaauucaguaugucaucagagcacaauugcauguaggggccaagcaggaaaauuggaauaccgacauuaagacucucaaguuugaugcccugucaggcucccaggaagucgaguucauuggguauggaaaagcuacacuggaaugccaggugcaaacugcgguggacuuugguaacaguuacaucgcugagauggaaacagagagcuggauaguggacagacagugggcccaggacuugacccugccauggcagaguggaaguggcgggguguggagagagaugcaucaucuugucgaauuugaaccuccgcaugccgccacuaucagaguacuggcccugggaaaccaggaaggcuccuugaaaacagcucuuacuggcgcaaugaggguuacaaaggacacaaaugacaacaaccuuuacaaacuacaugguggacauguuucuugcagagugaaauugucagcuuugacacucaaggggacauccuacaaaauaugcacugacaaaauguuuuuugucaagaacccaacugacacuggccauggcacuguugugaugcaggugaaagugucaaaaggagcccccugcaggauuccagugauaguagcugaugaucuuacagcggcaaucaauaaaggcauuuugguuacaguuaaccccaucgccucaaccaaugaugaugaagugcugauugaggugaacccaccuuuuggagacagcuacauuaucguugggagaggagauucacgucucacuuaccaguggcacaaagagggaagcucaauaggaaaguuguucacucagaccaugaaaggcguggaacgccuggccgucaugggagacaccgccugggauuucagcuccgcuggaggguucuucacuucgguugggaaaggaauucauacgguguuuggcucugccuuucaggggcuauuuggcggcuugaacuggauaacaaaggucaucaugggggcgguacuuauauggguuggcaucaacacaagaaacaugacaauguccaugagcaugaucuugguaggagugaucaugauguuuuugucucuaggaguuggggcguaa

SEQ ID NO: 163 - RNA, 2031 nt, Artificial Sequence
  derived and/or modified CDS sequence (wt) from YFV__NC_002031.1__SS-prME (polyprotein: M,aa104-778)
auggauguucugacugugcaauuccuaauuuugggaaugcuguugaugacggguggagugaccuuggugcggaaaaacagaugguugcuccuaaaugugacaucugaggaccucgggaaaacauucucugugggcacaggcaacugcacaacaaacauuuuggaagccaaguacuggugcccagacucaauggaauacaacugucccaaucucaguccaagagaggagccagaugacauugauugcuggugcuaugggguggaaaacguuagagucgcauaugguaagugugacucagcaggcaggucuaggaggucaagaagggccauugacuugccuacgcaugaaaaccaugguuugaagacccggcaagaaaaauggaugacuggaagaaugggugaaaggcaacuccaaaagauugagagaugguucgugaggaaccccuuuuuugcagugacggcucugaccauugccuaccuugugggaagcaacaugacgcaacgagucgugauugcccuacuggucuuggcuguugguccggccuacucagcucacugcauuggaauuacugacagggauuucauugagggggugcauggaggaacuuggguuucagcuacccuggagcaagacaagugugucacuguuauggccccugacaagccuucauuggacaucucacuagagacaguagccauugauagaccugcugaggugaggaaaguguguuacaaugcaguucucacucaugugaagauuaaugacaagugccccagcacuggagaggcccaccuagcugaagagaacgaaggggacaaugcgugcaagcgcacuuauucugauagaggcuggggcaauggcuguggccuauuugggaaagggagcauuguggcaugcgccaaauucacuugugccaaauccaugaguuuguuugagguugaucagaccaaaauucaguaugucaucagagcacaauugcauguaggggccaagcaggaaaauuggaauaccgacauuaagacucucaaguuugaugcccugucaggcucccaggaagucgaguucauuggguauggaaaagcuacacuggaaugccaggugcaaacugcgguggacuuugguaacaguuacaucgcugagauggaaacagagagcuggauaguggacagacagugggcccaggacuugacccugccauggcagaguggaaguggcgggguguggagagagaugcaucaucuugucgaauuugaaccuccgcaugccgccacuaucagaguacuggcccugggaaaccaggaaggcuccuugaaaacagcucuuacuggcgcaaugaggguuacaaaggacacaaaugacaacaaccuuuacaaacuacaugguggacauguuucuugcagagugaaauugucagcuuugacacucaaggggacauccuacaaaauaugcacugacaaaauguuuuuugucaagaacccaacugacacuggccauggcacuguugugaugcaggugaaagugucaaaaggagcccccugcaggauuccagugauaguagcugaugaucuuacagcggcaaucaauaaaggcauuuugguuacaguuaaccccaucgccucaaccaaugaugaugaagugcugauugaggugaacccaccuuuuggagacagcuacauuaucguugggagaggagauucacgucucacuuaccaguggcacaaagagggaagcucaauaggaaaguuguucacucagaccaugaaaggcguggaacgccuggccgucaugggagacaccgccugggauuucagcuccgcuggaggguucuucacuucgguugggaaagggauucauacgguguuuggcucugccuuucaggggcuauuuggcggcuugaacuggauaacaaaggucaucaugggggcgguacuuauauggguuggcaucaacacaagaaacaugacaauguccaugagcaugaucuugguaggagugaucaugauguuuuugucucuaggaguuggggcguaa

SEQ ID NO: 164 - RNA, 2073 nt, Artificial Sequence
  derived and/or modified CDS sequence (wt) from YFV__NC_002031.1__X-SS-prMEdelstem_TM-JEV (polyprotein: aa92-680)
augagaggauuguccucaaggaaacgccguucccaugauguucugacugugcaauuccuaauuuugggaaugcuguugaugacggguggagugaccuuggugcggaaaaacagaugguugcuccuaaaugugacaucugaggaccucgggaaaacauucucugugggcacaggcaacugcacaacaaacauuuuggaagccaaguacuggugcccagacucaauggaauacaacugucccaaucucaguccaagagaggagccagaugacauugauugcuggugcuaugggguggaaaacguuagagucgcauaugguaagugugacucagcaggcaggucuaggaggucaagaagggccauugacuugccuacgcaugaaaaccaugguuugaagacccggcaagaaaaauggaugacuggaagaaugggugaaaggcaacuccaaaagauugagagaugguucgugaggaaccccuuuuuugcagugacggcucugaccauugccuaccuugugggaagcaacaugacgcaacgagucgugauugcccuacuggucuuggcuguugguccggccuacucagcucacugcauuggaauuacugacagggauuucauugagggggugcauggaggaacuuggguuucagcuacccuggagcaagacaagugugucacuguuauggccccugacaagccuucauuggacaucucacuagagacaguagccauugauagaccugcugaggugaggaaaguguguuacaaugcaguucucacucaugugaagauuaaugacaagugccccagcacuggagaggcccaccuagcugaagagaacgaaggggacaaugcgugcaagcgcacuuauucugauagaggcuggggcaauggcuguggccuauuugggaaagggagcauuguggcaugcgccaaauucacuugugccaaauccaugaguuuguuugagguugaucagaccaaaauucaguaugucaucagagcacaauugcauguaggggccaagcaggaaaauuggaauaccgacauuaagacucucaaguuugaugcccugucaggcucccaggaagucgaguucauuggguauggaaaagcuacacuggaaugccaggugcaaacugcgguggacuuugguaacaguuacaucgcugagauggaaacagagagcuggauaguggacagacagugggcccaggacuugacccugccauggcagaguggaaguggcgggguguggagagagaugcaucaucuugucgaauuugaaccuccgcaugccgccacuaucagaguacuggcccugggaaaccaggaaggcuccuugaaaacagcucuuacuggcgcaaugaggguuacaaaggacacaaaugacaacaaccuuuacaaacuacaugguggacauguuucuugcagagugaaauugucagcuuugacacucaaggggacauccuacaaaauaugcacugacaaaauguuuuuugucaagaacccaacugacacuggccauggcacuguugugaugcaggugaaagugucaaaaggagcccccugcaggauuccagugauaguagcugaugaucuuacagcggcaaucaauaaaggcauuuugguuacaguuaaccccaucgccucaaccaaugaugaugaagugcugauugaggugaacccaccuuuuggagacagcuacauuaucguugggagaggagauucacgucucacuuaccaguggcacaaagagggaagcucaggcagcacgcugggcaaggccuuuucaacaacuuugaagggagcucaaagacuggcagcguugggcgacacagccugggacuuuggcucuauuggaggggucuucaacuccauaggaagagccguucaccaaguguuugguggugccuucagaacacucuuugggggaaugucuuggaucacacaagggcuaaugggugcccuacugcucuggaugggcgucaacgcacgagaccgaucaauugcuuuggccuucuuagccacaggaggugugcucguguucuuagcgaccaaugugcacgccuaa

SEQ ID NO: 165 - RNA, 2046 nt, Artificial Sequence
  derived and/or modified CDS sequence (wt) from YFV__NC_002031.1__SS-prMEdelstem_TM-JEV (polyprotein: M,aa102-680)
augucccaugauguucugacugugcaauuccuaauuuugggaaugcuguugaugacggguggagugaccuuggugcggaaaaacagaugguugcuccuaaaugugacaucugaggaccucgggaaaacauucucugugggcacaggcaacugcacaacaaacauuuuggaagccaaguacuggugcccagacucaauggaauacaacugucccaaucucaguccaagagaggagccagaugacauugauugcuggugcuaugggguggaaaacguuagagucgcauaugguaagugugacucagcaggcaggucuaggaggucaagaagggccauugacuugccuacgcaugaaaaccaugguuugaagacccggcaagaaaaauggaugacuggaagaaugggugaaaggcaacuccaaaagauugagagaugguucgugaggaaccccuuuuuugcagugacggcucugaccauugccuaccuugugggaagcaacaugacgcaacgagucgugauugcccuacuggucuuggcuguugguccggccuacucagcucacugcauuggaauuacugacagggauuucauugagggggugcauggaggaacuuggguuucagcuacccuggagcaagacaagugugucacuguuauggccccugacaagccuucauuggacaucucacuagagacaguagccauugauagaccugcugaggugaggaaaguguguuacaaugcaguucucacucaugugaagauuaaugacaagugccccagcacuggagaggcccaccuagcugaagagaacgaaggggacaaugcgugcaagcgcacuuauucugauagaggcuggggcaauggcuguggccuauuugggaaagggagcauuguggcaugcgccaaauucacuugugccaaauccaugaguuuguuugagguugaucagaccaaaauucaguaugucaucagagcacaauugcauguaggggccaagcaggaaaauuggaauaccgacauuaagacucucaaguuugaugcccugucaggcucccaggaagucgaguucauuggguauggaaaagcuacacuggaaugccaggugcaaacugcgguggacuuugguaacaguuacaucgcugagauggaaacagagagcuggauaguggacagacagugggcccaggacuugacccugccauggcagaguggaaguggcgggguguggagagagaugcaucaucuugucgaauuugaaccuccgcaugccgccacuaucagaguacuggcccugggaaaccaggaaggcuccuugaaaacagcucuuacuggcgcaaugaggguuacaaaggacacaaaugacaacaaccuuuacaaacuacaugguggacauguuucuugcagagugaaauugucagcuuugacacucaaggggacauccuacaaaauaugcacugacaaaauguuuuuugucaagaacccaacugacacuggccauggcacuguugugaugcaggugaaagugucaaaaggagcccccugcaggauuccagugauaguagcugaugaucuuacagcggcaaucaauaaaggcauuuugguuacaguuaaccccaucgccucaaccaaugaugaugaagugcugauugaggugaacccaccuuuuggagacagcuacauuaucguugggagaggagauucacgucucacuuaccaguggcacaaagagggaagcucaggcagcacgcugggcaaggccuuuucaacaacuuugaagggagcucaaagacuggcagcguugggcgacacagccugggacuuuggcucuauuggaggggucuucaacuccauaggaagagccguucaccaaguguuugguggugccuucagaacacucuuugggggaaugucuuggaucacacaagggcuaaugggugcccuacugcucuggaugggcgucaacgcacgagaccgaucaauugcuuuggccuucuuagccacaggaggugugcucguguucuuagcgaccaaugugcacgccuaa

SEQ ID NO: 166 - RNA, 2040 nt, Artificial Sequence
  derived and/or modified CDS sequence (wt) from YFV__NC_002031.1__SS-prMEdelstem_TM-JEV (polyprotein: M,aa104-680)
auggauguucugacugugcaauuccuaauuuugggaaugcuguugaugacggguggagugaccuuggugcggaaaaacagaugguugcuccuaaaugugacaucugaggaccucgggaaaacauucucugugggcacaggcaacugcacaacaaacauuuuggaagccaaguacuggugcccagacucaauggaauacaacugucccaaucucaguccaagagaggagccagaugacauugauugcuggugcuaugggguggaaaacguuagagucgcauaugguaagugugacucagcaggcaggucuaggaggucaagaagggccauugacuugccuacgcaugaaaaccaugguuugaagacccggcaagaaaaauggaugacuggaagaaugggugaaaggcaacuccaaaagauugagagaugguucgugaggaaccccuuuuuugcagugacggcucugaccauugccuaccuugugggaagcaacaugacgcaacgagucgugauugcccuacuggucuuggcuguugguccggccuacucagcucacugcauuggaauuacugacagggauuucauugagggggugcauggaggaacuuggguuucagcuacccuggagcaagacaagugugucacuguuauggccccugacaagccuucauuggacaucucacuagagacaguagccauugauagaccugcugaggugaggaaaguguguuacaaugcaguucucacucaugugaagauuaaugacaagugccccagcacuggagaggcccaccuagcugaagagaacgaaggggacaaugcgugcaagcgcacuuauucugauagaggcuggggcaauggcuguggccuauuugggaaagggagcauuguggcaugcgccaaauucacuugugccaaauccaugaguuuguuugagguugaucagaccaaaauucaguaugucaucagagcacaauugcauguaggggccaagcaggaaaauuggaauaccgacauuaagacucucaaguuugaugcccugucaggcucccaggaagucgaguucauuggguauggaaaagcuacacuggaaugccaggugcaaacugcgguggacuuugguaacaguuacaucgcugagauggaaacagagagcuggauaguggacagacagugggcccaggacuugacccugccauggcagaguggaaguggcgggguguggagagagaugcaucaucuugucgaauuugaaccuccgcaugccgccacuaucagaguacuggcccugggaaaccaggaaggcuccuugaaaacagcucuuacuggcgcaaugaggguuacaaaggacacaaaugacaacaaccuuuacaaacuacaugguggacauguuucuugcagagugaaauugucagcuuugacacucaaggggacauccuacaaaauaugcacugacaaaauguuuuuugucaagaacccaacugacacuggccauggcacuguugugaugcaggugaaagugucaaaaggagcccccugcaggauuccagugauaguagcugaugaucuuacagcggcaaucaauaaaggcauuuugguuacaguuaaccccaucgccucaaccaaugaugaugaagugcugauugaggugaacccaccuuuuggagacagcuacauuaucguugggagaggagauucacgucucacuuaccaguggcacaaagagggaagcucaggcagcacgcugggcaaggccuuuucaacaacuuugaagggagcucaaagacuggcagcguugggcgacacagccugggacuuuggcucuauuggaggggucuucaacuccauaggaagagccguucaccaaguguuugguggugccuucagaacacucuuugggggaaugucuuggaucacacaagggcuaaugggugcccuacugcucuggaugggcgucaacgcacgagaccgaucaauugcuuuggccuucuuagccacaggaggugugcucguguucuuagcgaccaaugugcacgccuaa

SEQ ID NO: 167 - RNA, 2058 nt, Artificial Sequence
  derived and/or modified CDS sequence (wt) from YFV__NC_002031.1__SSIgE-prME-XX (polyprotein: aa122-788)
auggacuggaccuggauccuguuccucguggccgccgcgacccgcguccacagcgugaccuuggugcggaaaaacagaugguugcuccuaaaugugacaucugaggaccucgggaaaacauucucugugggcacaggcaacugcacaacaaacauuuuggaagccaaguacuggugcccagacucaauggaauacaacugucccaaucucaguccaagagaggagccagaugacauugauugcuggugcuaugggguggaaaacguuagagucgcauaugguaagugugacucagcaggcaggucuaggaggucaagaagggccauugacuugccuacgcaugaaaaccaugguuugaagacccggcaagaaaaauggaugacuggaagaaugggugaaaggcaacuccaaaagauugagagaugguucgugaggaaccccuuuuuugcagugacggcucugaccauugccuaccuugugggaagcaacaugacgcaacgagucgugauugcccuacuggucuuggcuguugguccggccuacucagcucacugcauuggaauuacugacagggauuucauugagggggugcauggaggaacuuggguuucagcuacccuggagcaagacaagugugucacuguuauggccccugacaagccuucauuggacaucucacuagagacaguagccauugauagaccugcugaggugaggaaaguguguuacaaugcaguucucacucaugugaagauuaaugacaagugccccagcacuggagaggcccaccuagcugaagagaacgaaggggacaaugcgugcaagcgcacuuauucugauagaggcuggggcaauggcuguggccuauuugggaaagggagcauuguggcaugcgccaaauucacuugugccaaauccaugaguuuguuugagguugaucagaccaaaauucaguaugucaucagagcacaauugcauguaggggccaagcaggaaaauuggaauaccgacauuaagacucucaaguuugaugcccugucaggcucccaggaagucgaguucauuggguauggaaaagcuacacuggaaugccaggugcaaacugcgguggacuuugguaacaguuacaucgcugagauggaaacagagagcuggauaguggacagacagugggcccaggacuugacccugccauggcagaguggaaguggcgggguguggagagagaugcaucaucuugucgaauuugaaccuccgcaugccgccacuaucagaguacuggcccugggaaaccaggaaggcuccuugaaaacagcucuuacuggcgcaaugaggguuacaaaggacacaaaugacaacaaccuuuacaaacuacaugguggacauguuucuugcagagugaaauugucagcuuugacacucaaggggacauccuacaaaauaugcacugacaaaauguuuuuugucaagaacccaacugacacuggccauggcacuguugugaugcaggugaaagugucaaaaggagcccccugcaggauuccagugauaguagcugaugaucuuacagcggcaaucaauaaaggcauuuugguuacaguuaaccccaucgccucaaccaaugaugaugaagugcugauugaggugaacccaccuuuuggagacagcuacauuaucguugggagaggagauucacgucucacuuaccaguggcacaaagagggaagcucaauaggaaaguuguucacucagaccaugaaaggcguggaacgccuggccgucaugggagacaccgccugggauuucagcuccgcuggaggguucuucacuucgguugggaaaggaauccauacgguguuuggcucugccuuucaggggcuauuuggcggcuugaacuggauaacaaaggucaucaugggggcgguacuuauauggguuggcaucaacacaagaaacaugacaauguccaugagcaugaucuugguaggagugaucaugauguuuuugucucuaggaguuggggcggaucaaggaugcgccaucaacuuuggcaaguaa

SEQ ID NO: 168 - RNA, 2046 nt, Artificial Sequence
  derived and/or modified CDS sequence (wt) from YFV__NC_002031.1__SSIgE-prME-XX (polyprotein: aa126-788)
auggacuggaccuggauccuguuccucguggccgccgcgacccgcguccacagccggaaaaacagaugguugcuccuaaaugugacaucugaggaccucgggaaaacauucucugugggcacaggcaacugcacaacaaacauuuuggaagccaaguacuggugcccagacucaauggaauacaacugucccaaucucaguccaagagaggagccagaugacauugauugcuggugcuaugggguggaaaacguuagagucgcauaugguaagugugacucagcaggcaggucuaggaggucaagaagggccauugacuugccuacgcaugaaaaccaugguuugaagacccggcaagaaaaauggaugacuggaagaaugggugaaaggcaacuccaaaagauugagagaugguucgugaggaaccccuuuuuugcagugacggcucugaccauugccuaccuugugggaagcaacaugacgcaacgagucgugauugcccuacuggucuuggcuguugguccggccuacucagcucacugcauuggaauuacugacagggauuucauugagggggugcauggaggaacuuggguuucagcuacccuggagcaagacaagugugucacuguuauggccccugacaagccuucauuggacaucucacuagagacaguagccauugauagaccugcugaggugaggaaaguguguuacaaugcaguucucacucaugugaagauuaaugacaagugccccagcacuggagaggcccaccuagcugaagagaacgaaggggacaaugcgugcaagcgcacuuauucugauagaggcuggggcaauggcuguggccuauuugggaaagggagcauuguggcaugcgccaaauucacuugugccaaauccaugaguuuguuugagguugaucagaccaaaauucaguaugucaucagagcacaauugcauguaggggccaagcaggaaaauuggaauaccgacauuaagacucucaaguuugaugcccugucaggcucccaggaagucgaguucauuggguauggaaaagcuacacuggaaugccaggugcaaacugcgguggacuuugguaacaguuacaucgcugagauggaaacagagagcuggauaguggacagacagugggcccaggacuugacccugccauggcagaguggaaguggcgggguguggagagagaugcaucaucuugucgaauuugaaccuccgcaugccgccacuaucagaguacuggcccugggaaaccaggaaggcuccuugaaaacagcucuuacuggcgcaaugaggguuacaaaggacacaaaugacaacaaccuuuacaaacuacaugguggacauguuucuugcagagugaaauugucagcuuugacacucaaggggacauccuacaaaauaugcacugacaaaauguuuuuugucaagaacccaacugacacuggccauggcacuguugugaugcaggugaaagugucaaaaggagcccccugcaggauuccagugauaguagcugaugaucuuacagcggcaaucaauaaaggcauuuugguuacaguuaaccccaucgccucaaccaaugaugaugaagugcugauugaggugaacccaccuuuuggagacagcuacauuaucguugggagaggagauucacgucucacuuaccaguggcacaaagagggaagcucaauaggaaaguuguucacucagaccaugaaaggcguggaacgccuggccgucaugggagacaccgccugggauuucagcuccgcuggaggguucuucacuucgguugggaaaggaauccauacgguguuuggcucugccuuucaggggcuauuuggcggcuugaacuggauaacaaaggucaucaugggggcgguacuuauauggguuggcaucaacacaagaaacaugacaauguccaugagcaugaucuugguaggagugaucaugauguuuuugucucuaggaguuggggcggaucaaggaugcgccaucaacuuuggcaaguaa

SEQ ID NO: 169 - RNA, 2028 nt, Artificial Sequence
  derived and/or modified CDS sequence (wt) from YFV__NC_002031.1__SSIgE-prME (polyprotein: aa122-778)
auggacuggaccuggauccuguuccucguggccgccgcgacccgcguccacagcgugaccuuggugcggaaaaacagaugguugcuccuaaaugugacaucugaggaccucgggaaaacauucucugugggcacaggcaacugcacaacaaacauuuuggaagccaaguacuggugcccagacucaauggaauacaacugucccaaucucaguccaagagaggagccagaugacauugauugcuggugcuaugggguggaaaacguuagagucgcauaugguaagugugacucagcaggcaggucuaggaggucaagaagggccauugacuugccuacgcaugaaaaccaugguuugaagacccggcaagaaaaauggaugacuggaagaaugggugaaaggcaacuccaaaagauugagagaugguucgugaggaaccccuuuuuugcagugacggcucugaccauugccuaccuugugggaagcaacaugacgcaacgagucgugauugcccuacuggucuuggcuguugguccggccuacucagcucacugcauuggaauuacugacagggauuucauugagggggugcauggaggaacuuggguuucagcuacccuggagcaagacaagugugucacuguuauggccccugacaagccuucauuggacaucucacuagagacaguagccauugauagaccugcugaggugaggaaaguguguuacaaugcaguucucacucaugugaagauuaaugacaagugccccagcacuggagaggcccaccuagcugaagagaacgaaggggacaaugcgugcaagcgcacuuauucugauagaggcuggggcaauggcuguggccuauuugggaaagggagcauuguggcaugcgccaaauucacuugugccaaauccaugaguuuguuugagguugaucagaccaaaauucaguaugucaucagagcacaauugcauguaggggccaagcaggaaaauuggaauaccgacauuaagacucucaaguuugaugcccugucaggcucccaggaagucgaguucauuggguauggaaaagcuacacuggaaugccaggugcaaacugcgguggacuuugguaacaguuacaucgcugagauggaaacagagagcuggauaguggacagacagugggcccaggacuugacccugccauggcagaguggaaguggcgggguguggagagagaugcaucaucuugucgaauuugaaccuccgcaugccgccacuaucagaguacuggcccugggaaaccaggaaggcuccuugaaaacagcucuuacuggcgcaaugaggguuacaaaggacacaaaugacaacaaccuuuacaaacuacaugguggacauguuucuugcagagugaaauugucagcuuugacacucaaggggacauccuacaaaauaugcacugacaaaauguuuuuugucaagaacccaacugacacuggccauggcacuguugugaugcaggugaaagugucaaaaggagcccccugcaggauuccagugauaguagcugaugaucuuacagcggcaaucaauaaaggcauuuugguuacaguuaaccccaucgccucaaccaaugaugaugaagugcugauugaggugaacccaccuuuuggagacagcuacauuaucguugggagaggagauucacgucucacuuaccaguggcacaaagagggaagcucaauaggaaaguuguucacucagaccaugaaaggcguggaacgccuggccgucaugggagacaccgccugggauuucagcuccgcuggaggguucuucacuucgguugggaaaggaauucauacgguguuuggcucugccuuucaggggcuauuuggcggcuugaacuggauaacaaaggucaucaugggggcgguacuuauauggguuggcaucaacacaagaaacaugacaauguccaugagcaugaucuugguaggagugaucaugauguuuuugucucuaggaguuggggcguaa

SEQ ID NO: 170 - RNA, 2016 nt, Artificial Sequence
  derived and/or modified CDS sequence (wt) from YFV__NC_002031.1__SSIgE-prME (polyprotein: aa126-778)
auggacuggaccuggauccuguuccucguggccgccgcgacccgcguccacagccggaaaaacagaugguugcuccuaaaugugacaucugaggaccucgggaaaacauucucugugggcacaggcaacugcacaacaaacauuuuggaagccaaguacuggugcccagacucaauggaauacaacugucccaaucucaguccaagagaggagccagaugacauugauugcuggugcuaugggguggaaaacguuagagucgcauaugguaagugugacucagcaggcaggucuaggaggucaagaagggccauugacuugccuacgcaugaaaaccaugguuugaagacccggcaagaaaaauggaugacuggaagaaugggugaaaggcaacuccaaaagauugagagaugguucgugaggaaccccuuuuuugcagugacggcucugaccauugccuaccuugugggaagcaacaugacgcaacgagucgugauugcccuacuggucuuggcuguugguccggccuacucagcucacugcauuggaauuacugacagggauuucauugagggggugcauggaggaacuuggguuucagcuacccuggagcaagacaagugugucacuguuauggccccugacaagccuucauuggacaucucacuagagacaguagccauugauagaccugcugaggugaggaaaguguguuacaaugcaguucucacucaugugaagauuaaugacaagugccccagcacuggagaggcccaccuagcugaagagaacgaaggggacaaugcgugcaagcgcacuuauucugauagaggcuggggcaauggcuguggccuauuugggaaagggagcauuguggcaugcgccaaauucacuugugccaaauccaugaguuuguuugagguugaucagaccaaaauucaguaugucaucagagcacaauugcauguaggggccaagcaggaaaauuggaauaccgacauuaagacucucaaguuugaugcccugucaggcucccaggaagucgaguucauuggguauggaaaagcuacacuggaaugccaggugcaaacugcgguggacuuugguaacaguuacaucgcugagauggaaacagagagcuggauaguggacagacagugggcccaggacuugacccugccauggcagaguggaaguggcgggguguggagagagaugcaucaucuugucgaauuugaaccuccgcaugccgccacuaucagaguacuggcccugggaaaccaggaaggcuccuugaaaacagcucuuacuggcgcaaugaggguuacaaaggacacaaaugacaacaaccuuuacaaacuacaugguggacauguuucuugcagagugaaauugucagcuuugacacucaaggggacauccuacaaaauaugcacugacaaaauguuuuuugucaagaacccaacugacacuggccauggcacuguugugaugcaggugaaagugucaaaaggagcccccugcaggauuccagugauaguagcugaugaucuuacagcggcaaucaauaaaggcauuuugguuacaguuaaccccaucgccucaaccaaugaugaugaagugcugauugaggugaacccaccuuuuggagacagcuacauuaucguugggagaggagauucacgucucacuuaccaguggcacaaagagggaagcucaauaggaaaguuguucacucagaccaugaaaggcguggaacgccuggccgucaugggagacaccgccugggauuucagcuccgcuggaggguucuucacuucgguugggaaaggaauucauacgguguuuggcucugccuuucaggggcuauuuggcggcuugaacuggauaacaaaggucaucaugggggcgguacuuauauggguuggcaucaacacaagaaacaugacaauguccaugagcaugaucuugguaggagugaucaugauguuuuugucucuaggaguuggggcguaa

SEQ ID NO: 171 - RNA, 2076 nt, Artificial Sequence
  derived and/or modified CDS sequence (wt) from YFV__NC_002031.1__SSjev-prME-XX (polyprotein: aa122-788)
auggguaaacggagcgcuggcucaaucauguggcucgcgagcuuggcaguugucauagcuugugcaggagccgugaccuuggugcggaaaaacagaugguugcuccuaaaugugacaucugaggaccucgggaaaacauucucugugggcacaggcaacugcacaacaaacauuuuggaagccaaguacuggugcccagacucaauggaauacaacugucccaaucucaguccaagagaggagccagaugacauugauugcuggugcuaugggguggaaaacguuagagucgcauaugguaagugugacucagcaggcaggucuaggaggucaagaagggccauugacuugccuacgcaugaaaaccaugguuugaagacccggcaagaaaaauggaugacuggaagaaugggugaaaggcaacuccaaaagauugagagaugguucgugaggaaccccuuuuuugcagugacggcucugaccauugccuaccuugugggaagcaacaugacgcaacgagucgugauugcccuacuggucuuggcuguugguccggccuacucagcucacugcauuggaauuacugacagggauuucauugagggggugcauggaggaacuuggguuucagcuacccuggagcaagacaagugugucacuguuauggccccugacaagccuucauuggacaucucacuagagacaguagccauugauagaccugcugaggugaggaaaguguguuacaaugcaguucucacucaugugaagauuaaugacaagugccccagcacuggagaggcccaccuagcugaagagaacgaaggggacaaugcgugcaagcgcacuuauucugauagaggcuggggcaauggcuguggccuauuugggaaagggagcauuguggcaugcgccaaauucacuugugccaaauccaugaguuuguuugagguugaucagaccaaaauucaguaugucaucagagcacaauugcauguaggggccaagcaggaaaauuggaauaccgacauuaagacucucaaguuugaugcccugucaggcucccaggaagucgaguucauuggguauggaaaagcuacacuggaaugccaggugcaaacugcgguggacuuugguaacaguuacaucgcugagauggaaacagagagcuggauaguggacagacagugggcccaggacuugacccugccauggcagaguggaaguggcgggguguggagagagaugcaucaucuugucgaauuugaaccuccgcaugccgccacuaucagaguacuggcccugggaaaccaggaaggcuccuugaaaacagcucuuacuggcgcaaugaggguuacaaaggacacaaaugacaacaaccuuuacaaacuacaugguggacauguuucuugcagagugaaauugucagcuuugacacucaaggggacauccuacaaaauaugcacugacaaaauguuuuuugucaagaacccaacugacacuggccauggcacuguugugaugcaggugaaagugucaaaaggagcccccugcaggauuccagugauaguagcugaugaucuuacagcggcaaucaauaaaggcauuuugguuacaguuaaccccaucgccucaaccaaugaugaugaagugcugauugaggugaacccaccuuuuggagacagcuacauuaucguugggagaggagauucacgucucacuuaccaguggcacaaagagggaagcucaauaggaaaguuguucacucagaccaugaaaggcguggaacgccuggccgucaugggagacaccgccugggauuucagcuccgcuggaggguucuucacuucgguugggaaaggaauccauacgguguuuggcucugccuuucaggggcuauuuggcggcuugaacuggauaacaaaggucaucaugggggcgguacuuauauggguuggcaucaacacaagaaacaugacaauguccaugagcaugaucuugguaggagugaucaugauguuuuugucucuaggaguuggggcggaucaaggaugcgccaucaacuuuggcaaguaa

SEQ ID NO: 172 - RNA, 2064 nt, Artificial Sequence
  derived and/or modified CDS sequence (wt) from YFV__NC_002031.1__SSjev-prME-XX (polyprotein: aa126-788)
auggguaaacggagcgcuggcucaaucauguggcucgcgagcuuggcaguugucauagcuugugcaggagcccggaaaaacagaugguugcuccuaaaugugacaucugaggaccucgggaaaacauucucugugggcacaggcaacugcacaacaaacauuuuggaagccaaguacuggugcccagacucaauggaauacaacugucccaaucucaguccaagagaggagccagaugacauugauugcuggugcuaugggguggaaaacguuagagucgcauaugguaagugugacucagcaggcaggucuaggaggucaagaagggccauugacuugccuacgcaugaaaaccaugguuugaagacccggcaagaaaaauggaugacuggaagaaugggugaaaggcaacuccaaaagauugagagaugguucgugaggaaccccuuuuuugcagugacggcucugaccauugccuaccuugugggaagcaacaugacgcaacgagucgugauugcccuacuggucuuggcuguugguccggccuacucagcucacugcauuggaauuacugacagggauuucauugagggggugcauggaggaacuuggguuucagcuacccuggagcaagacaagugugucacuguuauggccccugacaagccuucauuggacaucucacuagagacaguagccauugauagaccugcugaggugaggaaaguguguuacaaugcaguucucacucaugugaagauuaaugacaagugccccagcacuggagaggcccaccuagcugaagagaacgaaggggacaaugcgugcaagcgcacuuauucugauagaggcuggggcaauggcuguggccuauuugggaaagggagcauuguggcaugcgccaaauucacuugugccaaauccaugaguuuguuugagguugaucagaccaaaauucaguaugucaucagagcacaauugcauguaggggccaagcaggaaaauuggaauaccgacauuaagacucucaaguuugaugcccugucaggcucccaggaagucgaguucauuggguauggaaaagcuacacuggaaugccaggugcaaacugcgguggacuuugguaacaguuacaucgcugagauggaaacagagagcuggauaguggacagacagugggcccaggacuugacccugccauggcagaguggaaguggcgggguguggagagagaugcaucaucuugucgaauuugaaccuccgcaugccgccacuaucagaguacuggcccugggaaaccaggaaggcuccuugaaaacagcucuuacuggcgcaaugaggguuacaaaggacacaaaugacaacaaccuuuacaaacuacaugguggacauguuucuugcagagugaaauugucagcuuugacacucaaggggacauccuacaaaauaugcacugacaaaauguuuuuugucaagaacccaacugacacuggccauggcacuguugugaugcaggugaaagugucaaaaggagcccccugcaggauuccagugauaguagcugaugaucuuacagcggcaaucaauaaaggcauuuugguuacaguuaaccccaucgccucaaccaaugaugaugaagugcugauugaggugaacccaccuuuuggagacagcuacauuaucguugggagaggagauucacgucucacuuaccaguggcacaaagagggaagcucaauaggaaaguuguucacucagaccaugaaaggcguggaacgccuggccgucaugggagacaccgccugggauuucagcuccgcuggaggguucuucacuucgguugggaaaggaauccauacgguguuuggcucugccuuucaggggcuauuuggcggcuugaacuggauaacaaaggucaucaugggggcgguacuuauauggguuggcaucaacacaagaaacaugacaauguccaugagcaugaucuugguaggagugaucaugauguuuuugucucuaggaguuggggcggaucaaggaugcgccaucaacuuuggcaaguaa

SEQ ID NO: 173 - RNA, 2046 nt, Artificial Sequence
  derived and/or modified CDS sequence (wt) from YFV__NC_002031.1__SSjev-prME (polyprotein: aa122-778)
auggguaaacggagcgcuggcucaaucauguggcucgcgagcuuggcaguugucauagcuugugcaggagccgugaccuuggugcggaaaaacagaugguugcuccuaaaugugacaucugaggaccucgggaaaacauucucugugggcacaggcaacugcacaacaaacauuuuggaagccaaguacuggugcccagacucaauggaauacaacugucccaaucucaguccaagagaggagccagaugacauugauugcuggugcuaugggguggaaaacguuagagucgcauaugguaagugugacucagcaggcaggucuaggaggucaagaagggccauugacuugccuacgcaugaaaaccaugguuugaagacccggcaagaaaaauggaugacuggaagaaugggugaaaggcaacuccaaaagauugagagaugguucgugaggaaccccuuuuuugcagugacggcucugaccauugccuaccuugugggaagcaacaugacgcaacgagucgugauugcccuacuggucuuggcuguugguccggccuacucagcucacugcauuggaauuacugacagggauuucauugagggggugcauggaggaacuuggguuucagcuacccuggagcaagacaagugugucacuguuauggccccugacaagccuucauuggacaucucacuagagacaguagccauugauagaccugcugaggugaggaaaguguguuacaaugcaguucucacucaugugaagauuaaugacaagugccccagcacuggagaggcccaccuagcugaagagaacgaaggggacaaugcgugcaagcgcacuuauucugauagaggcuggggcaauggcuguggccuauuugggaaagggagcauuguggcaugcgccaaauucacuugugccaaauccaugaguuuguuugagguugaucagaccaaaauucaguaugucaucagagcacaauugcauguaggggccaagcaggaaaauuggaauaccgacauuaagacucucaaguuugaugcccugucaggcucccaggaagucgaguucauuggguauggaaaagcuacacuggaaugccaggugcaaacugcgguggacuuugguaacaguuacaucgcugagauggaaacagagagcuggauaguggacagacagugggcccaggacuugacccugccauggcagaguggaaguggcgggguguggagagagaugcaucaucuugucgaauuugaaccuccgcaugccgccacuaucagaguacuggcccugggaaaccaggaaggcuccuugaaaacagcucuuacuggcgcaaugaggguuacaaaggacacaaaugacaacaaccuuuacaaacuacaugguggacauguuucuugcagagugaaauugucagcuuugacacucaaggggacauccuacaaaauaugcacugacaaaauguuuuuugucaagaacccaacugacacuggccauggcacuguugugaugcaggugaaagugucaaaaggagcccccugcaggauuccagugauaguagcugaugaucuuacagcggcaaucaauaaaggcauuuugguuacaguuaaccccaucgccucaaccaaugaugaugaagugcugauugaggugaacccaccuuuuggagacagcuacauuaucguugggagaggagauucacgucucacuuaccaguggcacaaagagggaagcucaauaggaaaguuguucacucagaccaugaaaggcguggaacgccuggccgucaugggagacaccgccugggauuucagcuccgcuggaggguucuucacuucgguugggaaaggaauucauacgguguuuggcucugccuuucaggggcuauuuggcggcuugaacuggauaacaaaggucaucaugggggcgguacuuauauggguuggcaucaacacaagaaacaugacaauguccaugagcaugaucuugguaggagugaucaugauguuuuugucucuaggaguuggggcguaa

SEQ ID NO: 174 - RNA, 2034 nt, Artificial Sequence
  derived and/or modified CDS sequence (wt) from YFV__NC_002031.1__SSjev-prME (polyprotein: aa126-778)
auggguaaacggagcgcuggcucaaucauguggcucgcgagcuuggcaguugucauagcuugugcaggagcccggaaaaacagaugguugcuccuaaaugugacaucugaggaccucgggaaaacauucucugugggcacaggcaacugcacaacaaacauuuuggaagccaaguacuggugcccagacucaauggaauacaacugucccaaucucaguccaagagaggagccagaugacauugauugcuggugcuaugggguggaaaacguuagagucgcauaugguaagugugacucagcaggcaggucuaggaggucaagaagggccauugacuugccuacgcaugaaaaccaugguuugaagacccggcaagaaaaauggaugacuggaagaaugggugaaaggcaacuccaaaagauugagagaugguucgugaggaaccccuuuuuugcagugacggcucugaccauugccuaccuugugggaagcaacaugacgcaacgagucgugauugcccuacuggucuuggcuguugguccggccuacucagcucacugcauuggaauuacugacagggauuucauugagggggugcauggaggaacuuggguuucagcuacccuggagcaagacaagugugucacuguuauggccccugacaagccuucauuggacaucucacuagagacaguagccauugauagaccugcugaggugaggaaaguguguuacaaugcaguucucacucaugugaagauuaaugacaagugccccagcacuggagaggcccaccuagcugaagagaacgaaggggacaaugcgugcaagcgcacuuauucugauagaggcuggggcaauggcuguggccuauuugggaaagggagcauuguggcaugcgccaaauucacuugugccaaauccaugaguuuguuugagguugaucagaccaaaauucaguaugucaucagagcacaauugcauguaggggccaagcaggaaaauuggaauaccgacauuaagacucucaaguuugaugcccugucaggcucccaggaagucgaguucauuggguauggaaaagcuacacuggaaugccaggugcaaacugcgguggacuuugguaacaguuacaucgcugagauggaaacagagagcuggauaguggacagacagugggcccaggacuugacccugccauggcagaguggaaguggcgggguguggagagagaugcaucaucuugucgaauuugaaccuccgcaugccgccacuaucagaguacuggcccugggaaaccaggaaggcuccuugaaaacagcucuuacuggcgcaaugaggguuacaaaggacacaaaugacaacaaccuuuacaaacuacaugguggacauguuucuugcagagugaaauugucagcuuugacacucaaggggacauccuacaaaauaugcacugacaaaauguuuuuugucaagaacccaacugacacuggccauggcacuguugugaugcaggugaaagugucaaaaggagcccccugcaggauuccagugauaguagcugaugaucuuacagcggcaaucaauaaaggcauuuugguuacaguuaaccccaucgccucaaccaaugaugaugaagugcugauugaggugaacccaccuuuuggagacagcuacauuaucguugggagaggagauucacgucucacuuaccaguggcacaaagagggaagcucaauaggaaaguuguucacucagaccaugaaaggcguggaacgccuggccgucaugggagacaccgccugggauuucagcuccgcuggaggguucuucacuucgguugggaaaggaauucauacgguguuuggcucugccuuucaggggcuauuuggcggcuugaacuggauaacaaaggucaucaugggggcgguacuuauauggguuggcaucaacacaagaaacaugacaauguccaugagcaugaucuugguaggagugaucaugauguuuuugucucuaggaguuggggcguaa

SEQ ID NO: 175 - RNA, 2094 nt, Artificial Sequence
  derived and/or modified CDS sequence (wt) from YFV__NC_002031.1__SSjev(V2)-prME-XX (polyprotein: aa122-788)
augggcagaaagcaaaacaaaagaggaggaaaugaaggcucaaucauguggcucgcgagcuuggcaguugucauagcuugugcaggagccgugaccuuggugcggaaaaacagaugguugcuccuaaaugugacaucugaggaccucgggaaaacauucucugugggcacaggcaacugcacaacaaacauuuuggaagccaaguacuggugcccagacucaauggaauacaacugucccaaucucaguccaagagaggagccagaugacauugauugcuggugcuaugggguggaaaacguuagagucgcauaugguaagugugacucagcaggcaggucuaggaggucaagaagggccauugacuugccuacgcaugaaaaccaugguuugaagacccggcaagaaaaauggaugacuggaagaaugggugaaaggcaacuccaaaagauugagagaugguucgugaggaaccccuuuuuugcagugacggcucugaccauugccuaccuugugggaagcaacaugacgcaacgagucgugauugcccuacuggucuuggcuguugguccggccuacucagcucacugcauuggaauuacugacagggauuucauugagggggugcauggaggaacuuggguuucagcuacccuggagcaagacaagugugucacuguuauggccccugacaagccuucauuggacaucucacuagagacaguagccauugauagaccugcugaggugaggaaaguguguuacaaugcaguucucacucaugugaagauuaaugacaagugccccagcacuggagaggcccaccuagcugaagagaacgaaggggacaaugcgugcaagcgcacuuauucugauagaggcuggggcaauggcuguggccuauuugggaaagggagcauuguggcaugcgccaaauucacuugugccaaauccaugaguuuguuugagguugaucagaccaaaauucaguaugucaucagagcacaauugcauguaggggccaagcaggaaaauuggaauaccgacauuaagacucucaaguuugaugcccugucaggcucccaggaagucgaguucauuggguauggaaaagcuacacuggaaugccaggugcaaacugcgguggacuuugguaacaguuacaucgcugagauggaaacagagagcuggauaguggacagacagugggcccaggacuugacccugccauggcagaguggaaguggcgggguguggagagagaugcaucaucuugucgaauuugaaccuccgcaugccgccacuaucagaguacuggcccugggaaaccaggaaggcuccuugaaaacagcucuuacuggcgcaaugaggguuacaaaggacacaaaugacaacaaccuuuacaaacuacaugguggacauguuucuugcagagugaaauugucagcuuugacacucaaggggacauccuacaaaauaugcacugacaaaauguuuuuugucaagaacccaacugacacuggccauggcacuguugugaugcaggugaaagugucaaaaggagcccccugcaggauuccagugauaguagcugaugaucuuacagcggcaaucaauaaaggcauuuugguuacaguuaaccccaucgccucaaccaaugaugaugaagugcugauugaggugaacccaccuuuuggagacagcuacauuaucguugggagaggagauucacgucucacuuaccaguggcacaaagagggaagcucaauaggaaaguuguucacucagaccaugaaaggcguggaacgccuggccgucaugggagacaccgccugggauuucagcuccgcuggaggguucuucacuucgguugggaaaggaauccauacgguguuuggcucugccuuucaggggcuauuuggcggcuugaacuggauaacaaaggucaucaugggggcgguacuuauauggguuggcaucaacacaagaaacaugacaauguccaugagcaugaucuugguaggagugaucaugauguuuuugucucuaggaguuggggcggaucaaggaugcgccaucaacuuuggcaaguaa

SEQ ID NO: 176 - RNA, 2082 nt, Artificial Sequence
  derived and/or modified CDS sequence (wt) from YFV__NC_002031.1__SSjev(V2)-prME-XX (polyprotein: aa126-788)
augggcagaaagcaaaacaaaagaggaggaaaugaaggcucaaucauguggcucgcgagcuuggcaguugucauagcuugugcaggagcccggaaaaacagaugguugcuccuaaaugugacaucugaggaccucgggaaaacauucucugugggcacaggcaacugcacaacaaacauuuuggaagccaaguacuggugcccagacucaauggaauacaacugucccaaucucaguccaagagaggagccagaugacauugauugcuggugcuaugggguggaaaacguuagagucgcauaugguaagugugacucagcaggcaggucuaggaggucaagaagggccauugacuugccuacgcaugaaaaccaugguuugaagacccggcaagaaaaauggaugacuggaagaaugggugaaaggcaacuccaaaagauugagagaugguucgugaggaaccccuuuuuugcagugacggcucugaccauugccuaccuugugggaagcaacaugacgcaacgagucgugauugcccuacuggucuuggcuguugguccggccuacucagcucacugcauuggaauuacugacagggauuucauugagggggugcauggaggaacuuggguuucagcuacccuggagcaagacaagugugucacuguuauggccccugacaagccuucauuggacaucucacuagagacaguagccauugauagaccugcugaggugaggaaaguguguuacaaugcaguucucacucaugugaagauuaaugacaagugccccagcacuggagaggcccaccuagcugaagagaacgaaggggacaaugcgugcaagcgcacuuauucugauagaggcuggggcaauggcuguggccuauuugggaaagggagcauuguggcaugcgccaaauucacuugugccaaauccaugaguuuguuugagguugaucagaccaaaauucaguaugucaucagagcacaauugcauguaggggccaagcaggaaaauuggaauaccgacauuaagacucucaaguuugaugcccugucaggcucccaggaagucgaguucauuggguauggaaaagcuacacuggaaugccaggugcaaacugcgguggacuuugguaacaguuacaucgcugagauggaaacagagagcuggauaguggacagacagugggcccaggacuugacccugccauggcagaguggaaguggcgggguguggagagagaugcaucaucuugucgaauuugaaccuccgcaugccgccacuaucagaguacuggcccugggaaaccaggaaggcuccuugaaaacagcucuuacuggcgcaaugaggguuacaaaggacacaaaugacaacaaccuuuacaaacuacaugguggacauguuucuugcagagugaaauugucagcuuugacacucaaggggacauccuacaaaauaugcacugacaaaauguuuuuugucaagaacccaacugacacuggccauggcacuguugugaugcaggugaaagugucaaaaggagcccccugcaggauuccagugauaguagcugaugaucuuacagcggcaaucaauaaaggcauuuugguuacaguuaaccccaucgccucaaccaaugaugaugaagugcugauugaggugaacccaccuuuuggagacagcuacauuaucguugggagaggagauucacgucucacuuaccaguggcacaaagagggaagcucaauaggaaaguuguucacucagaccaugaaaggcguggaacgccuggccgucaugggagacaccgccugggauuucagcuccgcuggaggguucuucacuucgguugggaaaggaauccauacgguguuuggcucugccuuucaggggcuauuuggcggcuugaacuggauaacaaaggucaucaugggggcgguacuuauauggguuggcaucaacacaagaaacaugacaauguccaugagcaugaucuugguaggagugaucaugauguuuuugucucuaggaguuggggcggaucaaggaugcgccaucaacuuuggcaaguaa

SEQ ID NO: 177 - RNA, 2064 nt, Artificial Sequence
  derived and/or modified CDS sequence (wt) from YFV__NC_002031.1__SSjev(V2)-prME (polyprotein: aa122-778)
augggcagaaagcaaaacaaaagaggaggaaaugaaggcucaaucauguggcucgcgagcuuggcaguugucauagcuugugcaggagccgugaccuuggugcggaaaaacagaugguugcuccuaaaugugacaucugaggaccucgggaaaacauucucugugggcacaggcaacugcacaacaaacauuuuggaagccaaguacuggugcccagacucaauggaauacaacugucccaaucucaguccaagagaggagccagaugacauugauugcuggugcuaugggguggaaaacguuagagucgcauaugguaagugugacucagcaggcaggucuaggaggucaagaagggccauugacuugccuacgcaugaaaaccaugguuugaagacccggcaagaaaaauggaugacuggaagaaugggugaaaggcaacuccaaaagauugagagaugguucgugaggaaccccuuuuuugcagugacggcucugaccauugccuaccuugugggaagcaacaugacgcaacgagucgugauugcccuacuggucuuggcuguugguccggccuacucagcucacugcauuggaauuacugacagggauuucauugagggggugcauggaggaacuuggguuucagcuacccuggagcaagacaagugugucacuguuauggccccugacaagccuucauuggacaucucacuagagacaguagccauugauagaccugcugaggugaggaaaguguguuacaaugcaguucucacucaugugaagauuaaugacaagugccccagcacuggagaggcccaccuagcugaagagaacgaaggggacaaugcgugcaagcgcacuuauucugauagaggcuggggcaauggcuguggccuauuugggaaagggagcauuguggcaugcgccaaauucacuugugccaaauccaugaguuuguuugagguugaucagaccaaaauucaguaugucaucagagcacaauugcauguaggggccaagcaggaaaauuggaauaccgacauuaagacucucaaguuugaugcccugucaggcucccaggaagucgaguucauuggguauggaaaagcuacacuggaaugccaggugcaaacugcgguggacuuugguaacaguuacaucgcugagauggaaacagagagcuggauaguggacagacagugggcccaggacuugacccugccauggcagaguggaaguggcgggguguggagagagaugcaucaucuugucgaauuugaaccuccgcaugccgccacuaucagaguacuggcccugggaaaccaggaaggcuccuugaaaacagcucuuacuggcgcaaugaggguuacaaaggacacaaaugacaacaaccuuuacaaacuacaugguggacauguuucuugcagagugaaauugucagcuuugacacucaaggggacauccuacaaaauaugcacugacaaaauguuuuuugucaagaacccaacugacacuggccauggcacuguugugaugcaggugaaagugucaaaaggagcccccugcaggauuccagugauaguagcugaugaucuuacagcggcaaucaauaaaggcauuuugguuacaguuaaccccaucgccucaaccaaugaugaugaagugcugauugaggugaacccaccuuuuggagacagcuacauuaucguugggagaggagauucacgucucacuuaccaguggcacaaagagggaagcucaauaggaaaguuguucacucagaccaugaaaggcguggaacgccuggccgucaugggagacaccgccugggauuucagcuccgcuggaggguucuucacuucgguugggaaaggaauucauacgguguuuggcucugccuuucaggggcuauuuggcggcuugaacuggauaacaaaggucaucaugggggcgguacuuauauggguuggcaucaacacaagaaacaugacaauguccaugagcaugaucuugguaggagugaucaugauguuuuugucucuaggaguuggggcguaa

SEQ ID NO: 178 - RNA, 2052 nt, Artificial Sequence
  derived and/or modified CDS sequence (wt) from YFV__NC_002031.1__SSjev(V2)-prME (polyprotein: aa126-778)
augggcagaaagcaaaacaaaagaggaggaaaugaaggcucaaucauguggcucgcgagcuuggcaguugucauagcuugugcaggagcccggaaaaacagaugguugcuccuaaaugugacaucugaggaccucgggaaaacauucucugugggcacaggcaacugcacaacaaacauuuuggaagccaaguacuggugcccagacucaauggaauacaacugucccaaucucaguccaagagaggagccagaugacauugauugcuggugcuaugggguggaaaacguuagagucgcauaugguaagugugacucagcaggcaggucuaggaggucaagaagggccauugacuugccuacgcaugaaaaccaugguuugaagacccggcaagaaaaauggaugacuggaagaaugggugaaaggcaacuccaaaagauugagagaugguucgugaggaaccccuuuuuugcagugacggcucugaccauugccuaccuugugggaagcaacaugacgcaacgagucgugauugcccuacuggucuuggcuguugguccggccuacucagcucacugcauuggaauuacugacagggauuucauugagggggugcauggaggaacuuggguuucagcuacccuggagcaagacaagugugucacuguuauggccccugacaagccuucauuggacaucucacuagagacaguagccauugauagaccugcugaggugaggaaaguguguuacaaugcaguucucacucaugugaagauuaaugacaagugccccagcacuggagaggcccaccuagcugaagagaacgaaggggacaaugcgugcaagcgcacuuauucugauagaggcuggggcaauggcuguggccuauuugggaaagggagcauuguggcaugcgccaaauucacuugugccaaauccaugaguuuguuugagguugaucagaccaaaauucaguaugucaucagagcacaauugcauguaggggccaagcaggaaaauuggaauaccgacauuaagacucucaaguuugaugcccugucaggcucccaggaagucgaguucauuggguauggaaaagcuacacuggaaugccaggugcaaacugcgguggacuuugguaacaguuacaucgcugagauggaaacagagagcuggauaguggacagacagugggcccaggacuugacccugccauggcagaguggaaguggcgggguguggagagagaugcaucaucuugucgaauuugaaccuccgcaugccgccacuaucagaguacuggcccugggaaaccaggaaggcuccuugaaaacagcucuuacuggcgcaaugaggguuacaaaggacacaaaugacaacaaccuuuacaaacuacaugguggacauguuucuugcagagugaaauugucagcuuugacacucaaggggacauccuacaaaauaugcacugacaaaauguuuuuugucaagaacccaacugacacuggccauggcacuguugugaugcaggugaaagugucaaaaggagcccccugcaggauuccagugauaguagcugaugaucuuacagcggcaaucaauaaaggcauuuugguuacaguuaaccccaucgccucaaccaaugaugaugaagugcugauugaggugaacccaccuuuuggagacagcuacauuaucguugggagaggagauucacgucucacuuaccaguggcacaaagagggaagcucaauaggaaaguuguucacucagaccaugaaaggcguggaacgccuggccgucaugggagacaccgccugggauuucagcuccgcuggaggguucuucacuucgguugggaaaggaauucauacgguguuuggcucugccuuucaggggcuauuuggcggcuugaacuggauaacaaaggucaucaugggggcgguacuuauauggguuggcaucaacacaagaaacaugacaauguccaugagcaugaucuugguaggagugaucaugauguuuuugucucuaggaguuggggcguaa

SEQ ID NO: 179 - RNA, 2067 nt, Artificial Sequence
  derived and/or modified CDS sequence (wt) from YFV__NC_002031.1__SSjev(V3)-prME-XX (polyprotein: aa122-788)
augaaugaaggcucaaucauguggcucgcgagcuuggcaguugucauagcuugugcaggagccgugaccuuggugcggaaaaacagaugguugcuccuaaaugugacaucugaggaccucgggaaaacauucucugugggcacaggcaacugcacaacaaacauuuuggaagccaaguacuggugcccagacucaauggaauacaacugucccaaucucaguccaagagaggagccagaugacauugauugcuggugcuaugggguggaaaacguuagagucgcauaugguaagugugacucagcaggcaggucuaggaggucaagaagggccauugacuugccuacgcaugaaaaccaugguuugaagacccggcaagaaaaauggaugacuggaagaaugggugaaaggcaacuccaaaagauugagagaugguucgugaggaaccccuuuuuugcagugacggcucugaccauugccuaccuugugggaagcaacaugacgcaacgagucgugauugcccuacuggucuuggcuguugguccggccuacucagcucacugcauuggaauuacugacagggauuucauugagggggugcauggaggaacuuggguuucagcuacccuggagcaagacaagugugucacuguuauggccccugacaagccuucauuggacaucucacuagagacaguagccauugauagaccugcugaggugaggaaaguguguuacaaugcaguucucacucaugugaagauuaaugacaagugccccagcacuggagaggcccaccuagcugaagagaacgaaggggacaaugcgugcaagcgcacuuauucugauagaggcuggggcaauggcuguggccuauuugggaaagggagcauuguggcaugcgccaaauucacuugugccaaauccaugaguuuguuugagguugaucagaccaaaauucaguaugucaucagagcacaauugcauguaggggccaagcaggaaaauuggaauaccgacauuaagacucucaaguuugaugcccugucaggcucccaggaagucgaguucauuggguauggaaaagcuacacuggaaugccaggugcaaacugcgguggacuuugguaacaguuacaucgcugagauggaaacagagagcuggauaguggacagacagugggcccaggacuugacccugccauggcagaguggaaguggcgggguguggagagagaugcaucaucuugucgaauuugaaccuccgcaugccgccacuaucagaguacuggcccugggaaaccaggaaggcuccuugaaaacagcucuuacuggcgcaaugaggguuacaaaggacacaaaugacaacaaccuuuacaaacuacaugguggacauguuucuugcagagugaaauugucagcuuugacacucaaggggacauccuacaaaauaugcacugacaaaauguuuuuugucaagaacccaacugacacuggccauggcacuguugugaugcaggugaaagugucaaaaggagcccccugcaggauuccagugauaguagcugaugaucuuacagcggcaaucaauaaaggcauuuugguuacaguuaaccccaucgccucaaccaaugaugaugaagugcugauugaggugaacccaccuuuuggagacagcuacauuaucguugggagaggagauucacgucucacuuaccaguggcacaaagagggaagcucaauaggaaaguuguucacucagaccaugaaaggcguggaacgccuggccgucaugggagacaccgccugggauuucagcuccgcuggaggguucuucacuucgguugggaaaggaauccauacgguguuuggcucugccuuucaggggcuauuuggcggcuugaacuggauaacaaaggucaucaugggggcgguacuuauauggguuggcaucaacacaagaaacaugacaauguccaugagcaugaucuugguaggagugaucaugauguuuuugucucuaggaguuggggcggaucaaggaugcgccaucaacuuuggcaaguaa

SEQ ID NO: 180 - RNA, 2055 nt, Artificial Sequence
  derived and/or modified CDS sequence (wt) from YFV__NC_002031.1__SSjev(V3)-prME-XX (polyprotein: aa126-788)
augaaugaaggcucaaucauguggcucgcgagcuuggcaguugucauagcuugugcaggagcccggaaaaacagaugguugcuccuaaaugugacaucugaggaccucgggaaaacauucucugugggcacaggcaacugcacaacaaacauuuuggaagccaaguacuggugcccagacucaauggaauacaacugucccaaucucaguccaagagaggagccagaugacauugauugcuggugcuaugggguggaaaacguuagagucgcauaugguaagugugacucagcaggcaggucuaggaggucaagaagggccauugacuugccuacgcaugaaaaccaugguuugaagacccggcaagaaaaauggaugacuggaagaaugggugaaaggcaacuccaaaagauugagagaugguucgugaggaaccccuuuuuugcagugacggcucugaccauugccuaccuugugggaagcaacaugacgcaacgagucgugauugcccuacuggucuuggcuguugguccggccuacucagcucacugcauuggaauuacugacagggauuucauugagggggugcauggaggaacuuggguuucagcuacccuggagcaagacaagugugucacuguuauggccccugacaagccuucauuggacaucucacuagagacaguagccauugauagaccugcugaggugaggaaaguguguuacaaugcaguucucacucaugugaagauuaaugacaagugccccagcacuggagaggcccaccuagcugaagagaacgaaggggacaaugcgugcaagcgcacuuauucugauagaggcuggggcaauggcuguggccuauuugggaaagggagcauuguggcaugcgccaaauucacuugugccaaauccaugaguuuguuugagguugaucagaccaaaauucaguaugucaucagagcacaauugcauguaggggccaagcaggaaaauuggaauaccgacauuaagacucucaaguuugaugcccugucaggcucccaggaagucgaguucauuggguauggaaaagcuacacuggaaugccaggugcaaacugcgguggacuuugguaacaguuacaucgcugagauggaaacagagagcuggauaguggacagacagugggcccaggacuugacccugccauggcagaguggaaguggcgggguguggagagagaugcaucaucuugucgaauuugaaccuccgcaugccgccacuaucagaguacuggcccugggaaaccaggaaggcuccuugaaaacagcucuuacuggcgcaaugaggguuacaaaggacacaaaugacaacaaccuuuacaaacuacaugguggacauguuucuugcagagugaaauugucagcuuugacacucaaggggacauccuacaaaauaugcacugacaaaauguuuuuugucaagaacccaacugacacuggccauggcacuguugugaugcaggugaaagugucaaaaggagcccccugcaggauuccagugauaguagcugaugaucuuacagcggcaaucaauaaaggcauuuugguuacaguuaaccccaucgccucaaccaaugaugaugaagugcugauugaggugaacccaccuuuuggagacagcuacauuaucguugggagaggagauucacgucucacuuaccaguggcacaaagagggaagcucaauaggaaaguuguucacucagaccaugaaaggcguggaacgccuggccgucaugggagacaccgccugggauuucagcuccgcuggaggguucuucacuucgguugggaaaggaauccauacgguguuuggcucugccuuucaggggcuauuuggcggcuugaacuggauaacaaaggucaucaugggggcgguacuuauauggguuggcaucaacacaagaaacaugacaauguccaugagcaugaucuugguaggagugaucaugauguuuuugucucuaggaguuggggcggaucaaggaugcgccaucaacuuuggcaaguaa

SEQ ID NO: 181 - RNA, 2037 nt, Artificial Sequence
  derived and/or modified CDS sequence (wt) from YFV__NC_002031.1__SSjev(V3)-prME (polyprotein: aa122-778)
augaaugaaggcucaaucauguggcucgcgagcuuggcaguugucauagcuugugcaggagccgugaccuuggugcggaaaaacagaugguugcuccuaaaugugacaucugaggaccucgggaaaacauucucugugggcacaggcaacugcacaacaaacauuuuggaagccaaguacuggugcccagacucaauggaauacaacugucccaaucucaguccaagagaggagccagaugacauugauugcuggugcuaugggguggaaaacguuagagucgcauaugguaagugugacucagcaggcaggucuaggaggucaagaagggccauugacuugccuacgcaugaaaaccaugguuugaagacccggcaagaaaaauggaugacuggaagaaugggugaaaggcaacuccaaaagauugagagaugguucgugaggaaccccuuuuuugcagugacggcucugaccauugccuaccuugugggaagcaacaugacgcaacgagucgugauugcccuacuggucuuggcuguugguccggccuacucagcucacugcauuggaauuacugacagggauuucauugagggggugcauggaggaacuuggguuucagcuacccuggagcaagacaagugugucacuguuauggccccugacaagccuucauuggacaucucacuagagacaguagccauugauagaccugcugaggugaggaaaguguguuacaaugcaguucucacucaugugaagauuaaugacaagugccccagcacuggagaggcccaccuagcugaagagaacgaaggggacaaugcgugcaagcgcacuuauucugauagaggcuggggcaauggcuguggccuauuugggaaagggagcauuguggcaugcgccaaauucacuugugccaaauccaugaguuuguuugagguugaucagaccaaaauucaguaugucaucagagcacaauugcauguaggggccaagcaggaaaauuggaauaccgacauuaagacucucaaguuugaugcccugucaggcucccaggaagucgaguucauuggguauggaaaagcuacacuggaaugccaggugcaaacugcgguggacuuugguaacaguuacaucgcugagauggaaacagagagcuggauaguggacagacagugggcccaggacuugacccugccauggcagaguggaaguggcgggguguggagagagaugcaucaucuugucgaauuugaaccuccgcaugccgccacuaucagaguacuggcccugggaaaccaggaaggcuccuugaaaacagcucuuacuggcgcaaugaggguuacaaaggacacaaaugacaacaaccuuuacaaacuacaugguggacauguuucuugcagagugaaauugucagcuuugacacucaaggggacauccuacaaaauaugcacugacaaaauguuuuuugucaagaacccaacugacacuggccauggcacuguugugaugcaggugaaagugucaaaaggagcccccugcaggauuccagugauaguagcugaugaucuuacagcggcaaucaauaaaggcauuuugguuacaguuaaccccaucgccucaaccaaugaugaugaagugcugauugaggugaacccaccuuuuggagacagcuacauuaucguugggagaggagauucacgucucacuuaccaguggcacaaagagggaagcucaauaggaaaguuguucacucagaccaugaaaggcguggaacgccuggccgucaugggagacaccgccugggauuucagcuccgcuggaggguucuucacuucgguugggaaaggaauucauacgguguuuggcucugccuuucaggggcuauuuggcggcuugaacuggauaacaaaggucaucaugggggcgguacuuauauggguuggcaucaacacaagaaacaugacaauguccaugagcaugaucuugguaggagugaucaugauguuuuugucucuaggaguuggggcguaa

SEQ ID NO: 182 - RNA, 2025 nt, Artificial Sequence
  derived and/or modified CDS sequence (wt) from YFV__NC_002031.1__SSjev(V3)-prME (polyprotein: aa126-778)
augaaugaaggcucaaucauguggcucgcgagcuuggcaguugucauagcuugugcaggagcccggaaaaacagaugguugcuccuaaaugugacaucugaggaccucgggaaaacauucucugugggcacaggcaacugcacaacaaacauuuuggaagccaaguacuggugcccagacucaauggaauacaacugucccaaucucaguccaagagaggagccagaugacauugauugcuggugcuaugggguggaaaacguuagagucgcauaugguaagugugacucagcaggcaggucuaggaggucaagaagggccauugacuugccuacgcaugaaaaccaugguuugaagacccggcaagaaaaauggaugacuggaagaaugggugaaaggcaacuccaaaagauugagagaugguucgugaggaaccccuuuuuugcagugacggcucugaccauugccuaccuugugggaagcaacaugacgcaacgagucgugauugcccuacuggucuuggcuguugguccggccuacucagcucacugcauuggaauuacugacagggauuucauugagggggugcauggaggaacuuggguuucagcuacccuggagcaagacaagugugucacuguuauggccccugacaagccuucauuggacaucucacuagagacaguagccauugauagaccugcugaggugaggaaaguguguuacaaugcaguucucacucaugugaagauuaaugacaagugccccagcacuggagaggcccaccuagcugaagagaacgaaggggacaaugcgugcaagcgcacuuauucugauagaggcuggggcaauggcuguggccuauuugggaaagggagcauuguggcaugcgccaaauucacuugugccaaauccaugaguuuguuugagguugaucagaccaaaauucaguaugucaucagagcacaauugcauguaggggccaagcaggaaaauuggaauaccgacauuaagacucucaaguuugaugcccugucaggcucccaggaagucgaguucauuggguauggaaaagcuacacuggaaugccaggugcaaacugcgguggacuuugguaacaguuacaucgcugagauggaaacagagagcuggauaguggacagacagugggcccaggacuugacccugccauggcagaguggaaguggcgggguguggagagagaugcaucaucuugucgaauuugaaccuccgcaugccgccacuaucagaguacuggcccugggaaaccaggaaggcuccuugaaaacagcucuuacuggcgcaaugaggguuacaaaggacacaaaugacaacaaccuuuacaaacuacaugguggacauguuucuugcagagugaaauugucagcuuugacacucaaggggacauccuacaaaauaugcacugacaaaauguuuuuugucaagaacccaacugacacuggccauggcacuguugugaugcaggugaaagugucaaaaggagcccccugcaggauuccagugauaguagcugaugaucuuacagcggcaaucaauaaaggcauuuugguuacaguuaaccccaucgccucaaccaaugaugaugaagugcugauugaggugaacccaccuuuuggagacagcuacauuaucguugggagaggagauucacgucucacuuaccaguggcacaaagagggaagcucaauaggaaaguuguucacucagaccaugaaaggcguggaacgccuggccgucaugggagacaccgccugggauuucagcuccgcuggaggguucuucacuucgguugggaaaggaauucauacgguguuuggcucugccuuucaggggcuauuuggcggcuugaacuggauaacaaaggucaucaugggggcgguacuuauauggguuggcaucaacacaagaaacaugacaauguccaugagcaugaucuugguaggagugaucaugauguuuuugucucuaggaguuggggcguaa

SEQ ID NO: 183 - RNA, 2076 nt, Artificial Sequence
  derived and/or modified CDS sequence (wt) from YFV__NC_002031.1__SSjev(V4)-prME-XX (polyprotein: aa122-788)
augcuuggcagcaacaguggccaacgugugguguucacuauucucuugcuguuggucgcuccggcuuacagugugaccuuggugcggaaaaacagaugguugcuccuaaaugugacaucugaggaccucgggaaaacauucucugugggcacaggcaacugcacaacaaacauuuuggaagccaaguacuggugcccagacucaauggaauacaacugucccaaucucaguccaagagaggagccagaugacauugauugcuggugcuaugggguggaaaacguuagagucgcauaugguaagugugacucagcaggcaggucuaggaggucaagaagggccauugacuugccuacgcaugaaaaccaugguuugaagacccggcaagaaaaauggaugacuggaagaaugggugaaaggcaacuccaaaagauugagagaugguucgugaggaaccccuuuuuugcagugacggcucugaccauugccuaccuugugggaagcaacaugacgcaacgagucgugauugcccuacuggucuuggcuguugguccggccuacucagcucacugcauuggaauuacugacagggauuucauugagggggugcauggaggaacuuggguuucagcuacccuggagcaagacaagugugucacuguuauggccccugacaagccuucauuggacaucucacuagagacaguagccauugauagaccugcugaggugaggaaaguguguuacaaugcaguucucacucaugugaagauuaaugacaagugccccagcacuggagaggcccaccuagcugaagagaacgaaggggacaaugcgugcaagcgcacuuauucugauagaggcuggggcaauggcuguggccuauuugggaaagggagcauuguggcaugcgccaaauucacuugugccaaauccaugaguuuguuugagguugaucagaccaaaauucaguaugucaucagagcacaauugcauguaggggccaagcaggaaaauuggaauaccgacauuaagacucucaaguuugaugcccugucaggcucccaggaagucgaguucauuggguauggaaaagcuacacuggaaugccaggugcaaacugcgguggacuuugguaacaguuacaucgcugagauggaaacagagagcuggauaguggacagacagugggcccaggacuugacccugccauggcagaguggaaguggcgggguguggagagagaugcaucaucuugucgaauuugaaccuccgcaugccgccacuaucagaguacuggcccugggaaaccaggaaggcuccuugaaaacagcucuuacuggcgcaaugaggguuacaaaggacacaaaugacaacaaccuuuacaaacuacaugguggacauguuucuugcagagugaaauugucagcuuugacacucaaggggacauccuacaaaauaugcacugacaaaauguuuuuugucaagaacccaacugacacuggccauggcacuguugugaugcaggugaaagugucaaaaggagcccccugcaggauuccagugauaguagcugaugaucuuacagcggcaaucaauaaaggcauuuugguuacaguuaaccccaucgccucaaccaaugaugaugaagugcugauugaggugaacccaccuuuuggagacagcuacauuaucguugggagaggagauucacgucucacuuaccaguggcacaaagagggaagcucaauaggaaaguuguucacucagaccaugaaaggcguggaacgccuggccgucaugggagacaccgccugggauuucagcuccgcuggaggguucuucacuucgguugggaaaggaauccauacgguguuuggcucugccuuucaggggcuauuuggcggcuugaacuggauaacaaaggucaucaugggggcgguacuuauauggguuggcaucaacacaagaaacaugacaauguccaugagcaugaucuugguaggagugaucaugauguuuuugucucuaggaguuggggcggaucaaggaugcgccaucaacuuuggcaaguaa

SEQ ID NO: 184 - RNA, 2064 nt, Artificial Sequence
  derived and/or modified CDS sequence (wt) from YFV__NC_002031.1__SSjev(V4)-prME-XX (polyprotein: aa126-788)
augcuuggcagcaacaguggccaacgugugguguucacuauucucuugcuguuggucgcuccggcuuacagucggaaaaacagaugguugcuccuaaaugugacaucugaggaccucgggaaaacauucucugugggcacaggcaacugcacaacaaacauuuuggaagccaaguacuggugcccagacucaauggaauacaacugucccaaucucaguccaagagaggagccagaugacauugauugcuggugcuaugggguggaaaacguuagagucgcauaugguaagugugacucagcaggcaggucuaggaggucaagaagggccauugacuugccuacgcaugaaaaccaugguuugaagacccggcaagaaaaauggaugacuggaagaaugggugaaaggcaacuccaaaagauugagagaugguucgugaggaaccccuuuuuugcagugacggcucugaccauugccuaccuugugggaagcaacaugacgcaacgagucgugauugcccuacuggucuuggcuguugguccggccuacucagcucacugcauuggaauuacugacagggauuucauugagggggugcauggaggaacuuggguuucagcuacccuggagcaagacaagugugucacuguuauggccccugacaagccuucauuggacaucucacuagagacaguagccauugauagaccugcugaggugaggaaaguguguuacaaugcaguucucacucaugugaagauuaaugacaagugccccagcacuggagaggcccaccuagcugaagagaacgaaggggacaaugcgugcaagcgcacuuauucugauagaggcuggggcaauggcuguggccuauuugggaaagggagcauuguggcaugcgccaaauucacuugugccaaauccaugaguuuguuugagguugaucagaccaaaauucaguaugucaucagagcacaauugcauguaggggccaagcaggaaaauuggaauaccgacauuaagacucucaaguuugaugcccugucaggcucccaggaagucgaguucauuggguauggaaaagcuacacuggaaugccaggugcaaacugcgguggacuuugguaacaguuacaucgcugagauggaaacagagagcuggauaguggacagacagugggcccaggacuugacccugccauggcagaguggaaguggcgggguguggagagagaugcaucaucuugucgaauuugaaccuccgcaugccgccacuaucagaguacuggcccugggaaaccaggaaggcuccuugaaaacagcucuuacuggcgcaaugaggguuacaaaggacacaaaugacaacaaccuuuacaaacuacaugguggacauguuucuugcagagugaaauugucagcuuugacacucaaggggacauccuacaaaauaugcacugacaaaauguuuuuugucaagaacccaacugacacuggccauggcacuguugugaugcaggugaaagugucaaaaggagcccccugcaggauuccagugauaguagcugaugaucuuacagcggcaaucaauaaaggcauuuugguuacaguuaaccccaucgccucaaccaaugaugaugaagugcugauugaggugaacccaccuuuuggagacagcuacauuaucguugggagaggagauucacgucucacuuaccaguggcacaaagagggaagcucaauaggaaaguuguucacucagaccaugaaaggcguggaacgccuggccgucaugggagacaccgccugggauuucagcuccgcuggaggguucuucacuucgguugggaaaggaauccauacgguguuuggcucugccuuucaggggcuauuuggcggcuugaacuggauaacaaaggucaucaugggggcgguacuuauauggguuggcaucaacacaagaaacaugacaauguccaugagcaugaucuugguaggagugaucaugauguuuuugucucuaggaguuggggcggaucaaggaugcgccaucaacuuuggcaaguaa

SEQ ID NO: 185 - RNA, 2046 nt, Artificial Sequence
  derived and/or modified CDS sequence (wt) from YFV__NC_002031.1__SSjev(V4)-prME (polyprotein: aa122-778)
augcuuggcagcaacaguggccaacgugugguguucacuauucucuugcuguuggucgcuccggcuuacagugugaccuuggugcggaaaaacagaugguugcuccuaaaugugacaucugaggaccucgggaaaacauucucugugggcacaggcaacugcacaacaaacauuuuggaagccaaguacuggugcccagacucaauggaauacaacugucccaaucucaguccaagagaggagccagaugacauugauugcuggugcuaugggguggaaaacguuagagucgcauaugguaagugugacucagcaggcaggucuaggaggucaagaagggccauugacuugccuacgcaugaaaaccaugguuugaagacccggcaagaaaaauggaugacuggaagaaugggugaaaggcaacuccaaaagauugagagaugguucgugaggaaccccuuuuuugcagugacggcucugaccauugccuaccuugugggaagcaacaugacgcaacgagucgugauugcccuacuggucuuggcuguugguccggccuacucagcucacugcauuggaauuacugacagggauuucauugagggggugcauggaggaacuuggguuucagcuacccuggagcaagacaagugugucacuguuauggccccugacaagccuucauuggacaucucacuagagacaguagccauugauagaccugcugaggugaggaaaguguguuacaaugcaguucucacucaugugaagauuaaugacaagugccccagcacuggagaggcccaccuagcugaagagaacgaaggggacaaugcgugcaagcgcacuuauucugauagaggcuggggcaauggcuguggccuauuugggaaagggagcauuguggcaugcgccaaauucacuugugccaaauccaugaguuuguuugagguugaucagaccaaaauucaguaugucaucagagcacaauugcauguaggggccaagcaggaaaauuggaauaccgacauuaagacucucaaguuugaugcccugucaggcucccaggaagucgaguucauuggguauggaaaagcuacacuggaaugccaggugcaaacugcgguggacuuugguaacaguuacaucgcugagauggaaacagagagcuggauaguggacagacagugggcccaggacuugacccugccauggcagaguggaaguggcgggguguggagagagaugcaucaucuugucgaauuugaaccuccgcaugccgccacuaucagaguacuggcccugggaaaccaggaaggcuccuugaaaacagcucuuacuggcgcaaugaggguuacaaaggacacaaaugacaacaaccuuuacaaacuacaugguggacauguuucuugcagagugaaauugucagcuuugacacucaaggggacauccuacaaaauaugcacugacaaaauguuuuuugucaagaacccaacugacacuggccauggcacuguugugaugcaggugaaagugucaaaaggagcccccugcaggauuccagugauaguagcugaugaucuuacagcggcaaucaauaaaggcauuuugguuacaguuaaccccaucgccucaaccaaugaugaugaagugcugauugaggugaacccaccuuuuggagacagcuacauuaucguugggagaggagauucacgucucacuuaccaguggcacaaagagggaagcucaauaggaaaguuguucacucagaccaugaaaggcguggaacgccuggccgucaugggagacaccgccugggauuucagcuccgcuggaggguucuucacuucgguugggaaaggaauucauacgguguuuggcucugccuuucaggggcuauuuggcggcuugaacuggauaacaaaggucaucaugggggcgguacuuauauggguuggcaucaacacaagaaacaugacaauguccaugagcaugaucuugguaggagugaucaugauguuuuugucucuaggaguuggggcguaa

SEQ ID NO: 186 - RNA, 2034 nt, Artificial Sequence
  derived and/or modified CDS sequence (wt) from YFV__NC_002031.1__SSjev(V4)-prME (polyprotein: aa126-778)
augcuuggcagcaacaguggccaacgugugguguucacuauucucuugcuguuggucgcuccggcuuacagucggaaaaacagaugguugcuccuaaaugugacaucugaggaccucgggaaaacauucucugugggcacaggcaacugcacaacaaacauuuuggaagccaaguacuggugcccagacucaauggaauacaacugucccaaucucaguccaagagaggagccagaugacauugauugcuggugcuaugggguggaaaacguuagagucgcauaugguaagugugacucagcaggcaggucuaggaggucaagaagggccauugacuugccuacgcaugaaaaccaugguuugaagacccggcaagaaaaauggaugacuggaagaaugggugaaaggcaacuccaaaagauugagagaugguucgugaggaaccccuuuuuugcagugacggcucugaccauugccuaccuugugggaagcaacaugacgcaacgagucgugauugcccuacuggucuuggcuguugguccggccuacucagcucacugcauuggaauuacugacagggauuucauugagggggugcauggaggaacuuggguuucagcuacccuggagcaagacaagugugucacuguuauggccccugacaagccuucauuggacaucucacuagagacaguagccauugauagaccugcugaggugaggaaaguguguuacaaugcaguucucacucaugugaagauuaaugacaagugccccagcacuggagaggcccaccuagcugaagagaacgaaggggacaaugcgugcaagcgcacuuauucugauagaggcuggggcaauggcuguggccuauuugggaaagggagcauuguggcaugcgccaaauucacuugugccaaauccaugaguuuguuugagguugaucagaccaaaauucaguaugucaucagagcacaauugcauguaggggccaagcaggaaaauuggaauaccgacauuaagacucucaaguuugaugcccugucaggcucccaggaagucgaguucauuggguauggaaaagcuacacuggaaugccaggugcaaacugcgguggacuuugguaacaguuacaucgcugagauggaaacagagagcuggauaguggacagacagugggcccaggacuugacccugccauggcagaguggaaguggcgggguguggagagagaugcaucaucuugucgaauuugaaccuccgcaugccgccacuaucagaguacuggcccugggaaaccaggaaggcuccuugaaaacagcucuuacuggcgcaaugaggguuacaaaggacacaaaugacaacaaccuuuacaaacuacaugguggacauguuucuugcagagugaaauugucagcuuugacacucaaggggacauccuacaaaauaugcacugacaaaauguuuuuugucaagaacccaacugacacuggccauggcacuguugugaugcaggugaaagugucaaaaggagcccccugcaggauuccagugauaguagcugaugaucuuacagcggcaaucaauaaaggcauuuugguuacaguuaaccccaucgccucaaccaaugaugaugaagugcugauugaggugaacccaccuuuuggagacagcuacauuaucguugggagaggagauucacgucucacuuaccaguggcacaaagagggaagcucaauaggaaaguuguucacucagaccaugaaaggcguggaacgccuggccgucaugggagacaccgccugggauuucagcuccgcuggaggguucuucacuucgguugggaaaggaauucauacgguguuuggcucugccuuucaggggcuauuuggcggcuugaacuggauaacaaaggucaucaugggggcgguacuuauauggguuggcaucaacacaagaaacaugacaauguccaugagcaugaucuugguaggagugaucaugauguuuuugucucuaggaguuggggcguaa

SEQ ID NO: 187 - RNA, 2049 nt, Artificial Sequence
  derived and/or modified CDS sequence (wt) from YFV__NC_002031.1__SSjev(V5)-prME-XX (polyprotein: aa122-788)
auguggcuugucagcuuggcaaucguaacagcuugugccggagcugugaccuuggugcggaaaaacagaugguugcuccuaaaugugacaucugaggaccucgggaaaacauucucugugggcacaggcaacugcacaacaaacauuuuggaagccaaguacuggugcccagacucaauggaauacaacugucccaaucucaguccaagagaggagccagaugacauugauugcuggugcuaugggguggaaaacguuagagucgcauaugguaagugugacucagcaggcaggucuaggaggucaagaagggccauugacuugccuacgcaugaaaaccaugguuugaagacccggcaagaaaaauggaugacuggaagaaugggugaaaggcaacuccaaaagauugagagaugguucgugaggaaccccuuuuuugcagugacggcucugaccauugccuaccuugugggaagcaacaugacgcaacgagucgugauugcccuacuggucuuggcuguugguccggccuacucagcucacugcauuggaauuacugacagggauuucauugagggggugcauggaggaacuuggguuucagcuacccuggagcaagacaagugugucacuguuauggccccugacaagccuucauuggacaucucacuagagacaguagccauugauagaccugcugaggugaggaaaguguguuacaaugcaguucucacucaugugaagauuaaugacaagugccccagcacuggagaggcccaccuagcugaagagaacgaaggggacaaugcgugcaagcgcacuuauucugauagaggcuggggcaauggcuguggccuauuugggaaagggagcauuguggcaugcgccaaauucacuugugccaaauccaugaguuuguuugagguugaucagaccaaaauucaguaugucaucagagcacaauugcauguaggggccaagcaggaaaauuggaauaccgacauuaagacucucaaguuugaugcccugucaggcucccaggaagucgaguucauuggguauggaaaagcuacacuggaaugccaggugcaaacugcgguggacuuugguaacaguuacaucgcugagauggaaacagagagcuggauaguggacagacagugggcccaggacuugacccugccauggcagaguggaaguggcgggguguggagagagaugcaucaucuugucgaauuugaaccuccgcaugccgccacuaucagaguacuggcccugggaaaccaggaaggcuccuugaaaacagcucuuacuggcgcaaugaggguuacaaaggacacaaaugacaacaaccuuuacaaacuacaugguggacauguuucuugcagagugaaauugucagcuuugacacucaaggggacauccuacaaaauaugcacugacaaaauguuuuuugucaagaacccaacugacacuggccauggcacuguugugaugcaggugaaagugucaaaaggagcccccugcaggauuccagugauaguagcugaugaucuuacagcggcaaucaauaaaggcauuuugguuacaguuaaccccaucgccucaaccaaugaugaugaagugcugauugaggugaacccaccuuuuggagacagcuacauuaucguugggagaggagauucacgucucacuuaccaguggcacaaagagggaagcucaauaggaaaguuguucacucagaccaugaaaggcguggaacgccuggccgucaugggagacaccgccugggauuucagcuccgcuggaggguucuucacuucgguugggaaaggaauccauacgguguuuggcucugccuuucaggggcuauuuggcggcuugaacuggauaacaaaggucaucaugggggcgguacuuauauggguuggcaucaacacaagaaacaugacaauguccaugagcaugaucuugguaggagugaucaugauguuuuugucucuaggaguuggggcggaucaaggaugcgccaucaacuuuggcaaguaa

SEQ ID NO: 188 - RNA, 2037 nt, Artificial Sequence
  derived and/or modified CDS sequence (wt) from YFV__NC_002031.1__SSjev(V5)-prME-XX (polyprotein: aa126-788)
auguggcuugucagcuuggcaaucguaacagcuugugccggagcucggaaaaacagaugguugcuccuaaaugugacaucugaggaccucgggaaaacauucucugugggcacaggcaacugcacaacaaacauuuuggaagccaaguacuggugcccagacucaauggaauacaacugucccaaucucaguccaagagaggagccagaugacauugauugcuggugcuaugggguggaaaacguuagagucgcauaugguaagugugacucagcaggcaggucuaggaggucaagaagggccauugacuugccuacgcaugaaaaccaugguuugaagacccggcaagaaaaauggaugacuggaagaaugggugaaaggcaacuccaaaagauugagagaugguucgugaggaaccccuuuuuugcagugacggcucugaccauugccuaccuugugggaagcaacaugacgcaacgagucgugauugcccuacuggucuuggcuguugguccggccuacucagcucacugcauuggaauuacugacagggauuucauugagggggugcauggaggaacuuggguuucagcuacccuggagcaagacaagugugucacuguuauggccccugacaagccuucauuggacaucucacuagagacaguagccauugauagaccugcugaggugaggaaaguguguuacaaugcaguucucacucaugugaagauuaaugacaagugccccagcacuggagaggcccaccuagcugaagagaacgaaggggacaaugcgugcaagcgcacuuauucugauagaggcuggggcaauggcuguggccuauuugggaaagggagcauuguggcaugcgccaaauucacuugugccaaauccaugaguuuguuugagguugaucagaccaaaauucaguaugucaucagagcacaauugcauguaggggccaagcaggaaaauuggaauaccgacauuaagacucucaaguuugaugcccugucaggcucccaggaagucgaguucauuggguauggaaaagcuacacuggaaugccaggugcaaacugcgguggacuuugguaacaguuacaucgcugagauggaaacagagagcuggauaguggacagacagugggcccaggacuugacccugccauggcagaguggaaguggcgggguguggagagagaugcaucaucuugucgaauuugaaccuccgcaugccgccacuaucagaguacuggcccugggaaaccaggaaggcuccuugaaaacagcucuuacuggcgcaaugaggguuacaaaggacacaaaugacaacaaccuuuacaaacuacaugguggacauguuucuugcagagugaaauugucagcuuugacacucaaggggacauccuacaaaauaugcacugacaaaauguuuuuugucaagaacccaacugacacuggccauggcacuguugugaugcaggugaaagugucaaaaggagcccccugcaggauuccagugauaguagcugaugaucuuacagcggcaaucaauaaaggcauuuugguuacaguuaaccccaucgccucaaccaaugaugaugaagugcugauugaggugaacccaccuuuuggagacagcuacauuaucguugggagaggagauucacgucucacuuaccaguggcacaaagagggaagcucaauaggaaaguuguucacucagaccaugaaaggcguggaacgccuggccgucaugggagacaccgccugggauuucagcuccgcuggaggguucuucacuucgguugggaaaggaauccauacgguguuuggcucugccuuucaggggcuauuuggcggcuugaacuggauaacaaaggucaucaugggggcgguacuuauauggguuggcaucaacacaagaaacaugacaauguccaugagcaugaucuugguaggagugaucaugauguuuuugucucuaggaguuggggcggaucaaggaugcgccaucaacuuuggcaaguaa

SEQ ID NO: 189 - RNA, 2019 nt, Artificial Sequence
  derived and/or modified CDS sequence (wt) from YFV__NC_002031.1__SSjev(V5)-prME (polyprotein: aa122-778)
auguggcuugucagcuuggcaaucguaacagcuugugccggagcugugaccuuggugcggaaaaacagaugguugcuccuaaaugugacaucugaggaccucgggaaaacauucucugugggcacaggcaacugcacaacaaacauuuuggaagccaaguacuggugcccagacucaauggaauacaacugucccaaucucaguccaagagaggagccagaugacauugauugcuggugcuaugggguggaaaacguuagagucgcauaugguaagugugacucagcaggcaggucuaggaggucaagaagggccauugacuugccuacgcaugaaaaccaugguuugaagacccggcaagaaaaauggaugacuggaagaaugggugaaaggcaacuccaaaagauugagagaugguucgugaggaaccccuuuuuugcagugacggcucugaccauugccuaccuugugggaagcaacaugacgcaacgagucgugauugcccuacuggucuuggcuguugguccggccuacucagcucacugcauuggaauuacugacagggauuucauugagggggugcauggaggaacuuggguuucagcuacccuggagcaagacaagugugucacuguuauggccccugacaagccuucauuggacaucucacuagagacaguagccauugauagaccugcugaggugaggaaaguguguuacaaugcaguucucacucaugugaagauuaaugacaagugccccagcacuggagaggcccaccuagcugaagagaacgaaggggacaaugcgugcaagcgcacuuauucugauagaggcuggggcaauggcuguggccuauuugggaaagggagcauuguggcaugcgccaaauucacuugugccaaauccaugaguuuguuugagguugaucagaccaaaauucaguaugucaucagagcacaauugcauguaggggccaagcaggaaaauuggaauaccgacauuaagacucucaaguuugaugcccugucaggcucccaggaagucgaguucauuggguauggaaaagcuacacuggaaugccaggugcaaacugcgguggacuuugguaacaguuacaucgcugagauggaaacagagagcuggauaguggacagacagugggcccaggacuugacccugccauggcagaguggaaguggcgggguguggagagagaugcaucaucuugucgaauuugaaccuccgcaugccgccacuaucagaguacuggcccugggaaaccaggaaggcuccuugaaaacagcucuuacuggcgcaaugaggguuacaaaggacacaaaugacaacaaccuuuacaaacuacaugguggacauguuucuugcagagugaaauugucagcuuugacacucaaggggacauccuacaaaauaugcacugacaaaauguuuuuugucaagaacccaacugacacuggccauggcacuguugugaugcaggugaaagugucaaaaggagcccccugcaggauuccagugauaguagcugaugaucuuacagcggcaaucaauaaaggcauuuugguuacaguuaaccccaucgccucaaccaaugaugaugaagugcugauugaggugaacccaccuuuuggagacagcuacauuaucguugggagaggagauucacgucucacuuaccaguggcacaaagagggaagcucaauaggaaaguuguucacucagaccaugaaaggcguggaacgccuggccgucaugggagacaccgccugggauuucagcuccgcuggaggguucuucacuucgguugggaaaggaauucauacgguguuuggcucugccuuucaggggcuauuuggcggcuugaacuggauaacaaaggucaucaugggggcgguacuuauauggguuggcaucaacacaagaaacaugacaauguccaugagcaugaucuugguaggagugaucaugauguuuuugucucuaggaguuggggcguaa

SEQ ID NO: 190 - RNA, 2007 nt, Artificial Sequence
  derived and/or modified CDS sequence (wt) from YFV__NC_002031.1__SSjev(V5)-prME (polyprotein: aa126-778)
auguggcuugucagcuuggcaaucguaacagcuugugccggagcucggaaaaacagaugguugcuccuaaaugugacaucugaggaccucgggaaaacauucucugugggcacaggcaacugcacaacaaacauuuuggaagccaaguacuggugcccagacucaauggaauacaacugucccaaucucaguccaagagaggagccagaugacauugauugcuggugcuaugggguggaaaacguuagagucgcauaugguaagugugacucagcaggcaggucuaggaggucaagaagggccauugacuugccuacgcaugaaaaccaugguuugaagacccggcaagaaaaauggaugacuggaagaaugggugaaaggcaacuccaaaagauugagagaugguucgugaggaaccccuuuuuugcagugacggcucugaccauugccuaccuugugggaagcaacaugacgcaacgagucgugauugcccuacuggucuuggcuguugguccggccuacucagcucacugcauuggaauuacugacagggauuucauugagggggugcauggaggaacuuggguuucagcuacccuggagcaagacaagugugucacuguuauggccccugacaagccuucauuggacaucucacuagagacaguagccauugauagaccugcugaggugaggaaaguguguuacaaugcaguucucacucaugugaagauuaaugacaagugccccagcacuggagaggcccaccuagcugaagagaacgaaggggacaaugcgugcaagcgcacuuauucugauagaggcuggggcaauggcuguggccuauuugggaaagggagcauuguggcaugcgccaaauucacuugugccaaauccaugaguuuguuugagguugaucagaccaaaauucaguaugucaucagagcacaauugcauguaggggccaagcaggaaaauuggaauaccgacauuaagacucucaaguuugaugcccugucaggcucccaggaagucgaguucauuggguauggaaaagcuacacuggaaugccaggugcaaacugcgguggacuuugguaacaguuacaucgcugagauggaaacagagagcuggauaguggacagacagugggcccaggacuugacccugccauggcagaguggaaguggcgggguguggagagagaugcaucaucuugucgaauuugaaccuccgcaugccgccacuaucagaguacuggcccugggaaaccaggaaggcuccuugaaaacagcucuuacuggcgcaaugaggguuacaaaggacacaaaugacaacaaccuuuacaaacuacaugguggacauguuucuugcagagugaaauugucagcuuugacacucaaggggacauccuacaaaauaugcacugacaaaauguuuuuugucaagaacccaacugacacuggccauggcacuguugugaugcaggugaaagugucaaaaggagcccccugcaggauuccagugauaguagcugaugaucuuacagcggcaaucaauaaaggcauuuugguuacaguuaaccccaucgccucaaccaaugaugaugaagugcugauugaggugaacccaccuuuuggagacagcuacauuaucguugggagaggagauucacgucucacuuaccaguggcacaaagagggaagcucaauaggaaaguuguucacucagaccaugaaaggcguggaacgccuggccgucaugggagacaccgccugggauuucagcuccgcuggaggguucuucacuucgguugggaaaggaauucauacgguguuuggcucugccuuucaggggcuauuuggcggcuugaacuggauaacaaaggucaucaugggggcgguacuuauauggguuggcaucaacacaagaaacaugacaauguccaugagcaugaucuugguaggagugaucaugauguuuuugucucuaggaguuggggcguaa

SEQ ID NO: 191 - RNA, 2037 nt, Artificial Sequence
  derived and/or modified CDS sequence (wt) from YFV__NC_002031.1__SSIgE-prMEdelstem_TM-JEV (polyprotein: aa122-680)
auggacuggaccuggauccuguuccucguggccgccgcgacccgcguccacagcgugaccuuggugcggaaaaacagaugguugcuccuaaaugugacaucugaggaccucgggaaaacauucucugugggcacaggcaacugcacaacaaacauuuuggaagccaaguacuggugcccagacucaauggaauacaacugucccaaucucaguccaagagaggagccagaugacauugauugcuggugcuaugggguggaaaacguuagagucgcauaugguaagugugacucagcaggcaggucuaggaggucaagaagggccauugacuugccuacgcaugaaaaccaugguuugaagacccggcaagaaaaauggaugacuggaagaaugggugaaaggcaacuccaaaagauugagagaugguucgugaggaaccccuuuuuugcagugacggcucugaccauugccuaccuugugggaagcaacaugacgcaacgagucgugauugcccuacuggucuuggcuguugguccggccuacucagcucacugcauuggaauuacugacagggauuucauugagggggugcauggaggaacuuggguuucagcuacccuggagcaagacaagugugucacuguuauggccccugacaagccuucauuggacaucucacuagagacaguagccauugauagaccugcugaggugaggaaaguguguuacaaugcaguucucacucaugugaagauuaaugacaagugccccagcacuggagaggcccaccuagcugaagagaacgaaggggacaaugcgugcaagcgcacuuauucugauagaggcuggggcaauggcuguggccuauuugggaaagggagcauuguggcaugcgccaaauucacuugugccaaauccaugaguuuguuugagguugaucagaccaaaauucaguaugucaucagagcacaauugcauguaggggccaagcaggaaaauuggaauaccgacauuaagacucucaaguuugaugcccugucaggcucccaggaagucgaguucauuggguauggaaaagcuacacuggaaugccaggugcaaacugcgguggacuuugguaacaguuacaucgcugagauggaaacagagagcuggauaguggacagacagugggcccaggacuugacccugccauggcagaguggaaguggcgggguguggagagagaugcaucaucuugucgaauuugaaccuccgcaugccgccacuaucagaguacuggcccugggaaaccaggaaggcuccuugaaaacagcucuuacuggcgcaaugaggguuacaaaggacacaaaugacaacaaccuuuacaaacuacaugguggacauguuucuugcagagugaaauugucagcuuugacacucaaggggacauccuacaaaauaugcacugacaaaauguuuuuugucaagaacccaacugacacuggccauggcacuguugugaugcaggugaaagugucaaaaggagcccccugcaggauuccagugauaguagcugaugaucuuacagcggcaaucaauaaaggcauuuugguuacaguuaaccccaucgccucaaccaaugaugaugaagugcugauugaggugaacccaccuuuuggagacagcuacauuaucguugggagaggagauucacgucucacuuaccaguggcacaaagagggaagcucaggcagcacgcugggcaaggccuuuucaacaacuuugaagggagcucaaagacuggcagcguugggcgacacagccugggacuuuggcucuauuggaggggucuucaacuccauaggaagagccguucaccaaguguuugguggugccuucagaacacucuuugggggaaugucuuggaucacacaagggcuaaugggugcccuacugcucuggaugggcgucaacgcacgagaccgaucaauugcuuuggccuucuuagccacaggaggugugcucguguucuuagcgaccaaugugcacgccuaa

SEQ ID NO: 192 - RNA, 2025 nt, Artificial Sequence
  derived and/or modified CDS sequence (wt) from YFV__NC_002031.1__SSIgE-prMEdelstem_TM-JEV (polyprotein: aa126-680)
auggacuggaccuggauccuguuccucguggccgccgcgacccgcguccacagccggaaaaacagaugguugcuccuaaaugugacaucugaggaccucgggaaaacauucucugugggcacaggcaacugcacaacaaacauuuuggaagccaaguacuggugcccagacucaauggaauacaacugucccaaucucaguccaagagaggagccagaugacauugauugcuggugcuaugggguggaaaacguuagagucgcauaugguaagugugacucagcaggcaggucuaggaggucaagaagggccauugacuugccuacgcaugaaaaccaugguuugaagacccggcaagaaaaauggaugacuggaagaaugggugaaaggcaacuccaaaagauugagagaugguucgugaggaaccccuuuuuugcagugacggcucugaccauugccuaccuugugggaagcaacaugacgcaacgagucgugauugcccuacuggucuuggcuguugguccggccuacucagcucacugcauuggaauuacugacagggauuucauugagggggugcauggaggaacuuggguuucagcuacccuggagcaagacaagugugucacuguuauggccccugacaagccuucauuggacaucucacuagagacaguagccauugauagaccugcugaggugaggaaaguguguuacaaugcaguucucacucaugugaagauuaaugacaagugccccagcacuggagaggcccaccuagcugaagagaacgaaggggacaaugcgugcaagcgcacuuauucugauagaggcuggggcaauggcuguggccuauuugggaaagggagcauuguggcaugcgccaaauucacuugugccaaauccaugaguuuguuugagguugaucagaccaaaauucaguaugucaucagagcacaauugcauguaggggccaagcaggaaaauuggaauaccgacauuaagacucucaaguuugaugcccugucaggcucccaggaagucgaguucauuggguauggaaaagcuacacuggaaugccaggugcaaacugcgguggacuuugguaacaguuacaucgcugagauggaaacagagagcuggauaguggacagacagugggcccaggacuugacccugccauggcagaguggaaguggcgggguguggagagagaugcaucaucuugucgaauuugaaccuccgcaugccgccacuaucagaguacuggcccugggaaaccaggaaggcuccuugaaaacagcucuuacuggcgcaaugaggguuacaaaggacacaaaugacaacaaccuuuacaaacuacaugguggacauguuucuugcagagugaaauugucagcuuugacacucaaggggacauccuacaaaauaugcacugacaaaauguuuuuugucaagaacccaacugacacuggccauggcacuguugugaugcaggugaaagugucaaaaggagcccccugcaggauuccagugauaguagcugaugaucuuacagcggcaaucaauaaaggcauuuugguuacaguuaaccccaucgccucaaccaaugaugaugaagugcugauugaggugaacccaccuuuuggagacagcuacauuaucguugggagaggagauucacgucucacuuaccaguggcacaaagagggaagcucaggcagcacgcugggcaaggccuuuucaacaacuuugaagggagcucaaagacuggcagcguugggcgacacagccugggacuuuggcucuauuggaggggucuucaacuccauaggaagagccguucaccaaguguuugguggugccuucagaacacucuuugggggaaugucuuggaucacacaagggcuaaugggugcccuacugcucuggaugggcgucaacgcacgagaccgaucaauugcuuuggccuucuuagccacaggaggugugcucguguucuuagcgaccaaugugcacgccuaa

SEQ ID NO: 193 - RNA, 2055 nt, Artificial Sequence
  derived and/or modified CDS sequence (wt) from YFV__NC_002031.1__SSjev-prMEdelstem_TM-JEV (polyprotein: aa122-680)
auggguaaacggagcgcuggcucaaucauguggcucgcgagcuuggcaguugucauagcuugugcaggagccgugaccuuggugcggaaaaacagaugguugcuccuaaaugugacaucugaggaccucgggaaaacauucucugugggcacaggcaacugcacaacaaacauuuuggaagccaaguacuggugcccagacucaauggaauacaacugucccaaucucaguccaagagaggagccagaugacauugauugcuggugcuaugggguggaaaacguuagagucgcauaugguaagugugacucagcaggcaggucuaggaggucaagaagggccauugacuugccuacgcaugaaaaccaugguuugaagacccggcaagaaaaauggaugacuggaagaaugggugaaaggcaacuccaaaagauugagagaugguucgugaggaaccccuuuuuugcagugacggcucugaccauugccuaccuugugggaagcaacaugacgcaacgagucgugauugcccuacuggucuuggcuguugguccggccuacucagcucacugcauuggaauuacugacagggauuucauugagggggugcauggaggaacuuggguuucagcuacccuggagcaagacaagugugucacuguuauggccccugacaagccuucauuggacaucucacuagagacaguagccauugauagaccugcugaggugaggaaaguguguuacaaugcaguucucacucaugugaagauuaaugacaagugccccagcacuggagaggcccaccuagcugaagagaacgaaggggacaaugcgugcaagcgcacuuauucugauagaggcuggggcaauggcuguggccuauuugggaaagggagcauuguggcaugcgccaaauucacuugugccaaauccaugaguuuguuugagguugaucagaccaaaauucaguaugucaucagagcacaauugcauguaggggccaagcaggaaaauuggaauaccgacauuaagacucucaaguuugaugcccugucaggcucccaggaagucgaguucauuggguauggaaaagcuacacuggaaugccaggugcaaacugcgguggacuuugguaacaguuacaucgcugagauggaaacagagagcuggauaguggacagacagugggcccaggacuugacccugccauggcagaguggaaguggcgggguguggagagagaugcaucaucuugucgaauuugaaccuccgcaugccgccacuaucagaguacuggcccugggaaaccaggaaggcuccuugaaaacagcucuuacuggcgcaaugaggguuacaaaggacacaaaugacaacaaccuuuacaaacuacaugguggacauguuucuugcagagugaaauugucagcuuugacacucaaggggacauccuacaaaauaugcacugacaaaauguuuuuugucaagaacccaacugacacuggccauggcacuguugugaugcaggugaaagugucaaaaggagcccccugcaggauuccagugauaguagcugaugaucuuacagcggcaaucaauaaaggcauuuugguuacaguuaaccccaucgccucaaccaaugaugaugaagugcugauugaggugaacccaccuuuuggagacagcuacauuaucguugggagaggagauucacgucucacuuaccaguggcacaaagagggaagcucaggcagcacgcugggcaaggccuuuucaacaacuuugaagggagcucaaagacuggcagcguugggcgacacagccugggacuuuggcucuauuggaggggucuucaacuccauaggaagagccguucaccaaguguuugguggugccuucagaacacucuuugggggaaugucuuggaucacacaagggcuaaugggugcccuacugcucuggaugggcgucaacgcacgagaccgaucaauugcuuuggccuucuuagccacaggaggugugcucguguucuuagcgaccaaugugcacgccuaa

SEQ ID NO: 194 - RNA, 2043 nt, Artificial Sequence
  derived and/or modified CDS sequence (wt) from YFV__NC_002031.1__SSjev-prMEdelstem_TM-JEV (polyprotein: aa126-680)
auggguaaacggagcgcuggcucaaucauguggcucgcgagcuuggcaguugucauagcuugugcaggagcccggaaaaacagaugguugcuccuaaaugugacaucugaggaccucgggaaaacauucucugugggcacaggcaacugcacaacaaacauuuuggaagccaaguacuggugcccagacucaauggaauacaacugucccaaucucaguccaagagaggagccagaugacauugauugcuggugcuaugggguggaaaacguuagagucgcauaugguaagugugacucagcaggcaggucuaggaggucaagaagggccauugacuugccuacgcaugaaaaccaugguuugaagacccggcaagaaaaauggaugacuggaagaaugggugaaaggcaacuccaaaagauugagagaugguucgugaggaaccccuuuuuugcagugacggcucugaccauugccuaccuugugggaagcaacaugacgcaacgagucgugauugcccuacuggucuuggcuguugguccggccuacucagcucacugcauuggaauuacugacagggauuucauugagggggugcauggaggaacuuggguuucagcuacccuggagcaagacaagugugucacuguuauggccccugacaagccuucauuggacaucucacuagagacaguagccauugauagaccugcugaggugaggaaaguguguuacaaugcaguucucacucaugugaagauuaaugacaagugccccagcacuggagaggcccaccuagcugaagagaacgaaggggacaaugcgugcaagcgcacuuauucugauagaggcuggggcaauggcuguggccuauuugggaaagggagcauuguggcaugcgccaaauucacuugugccaaauccaugaguuuguuugagguugaucagaccaaaauucaguaugucaucagagcacaauugcauguaggggccaagcaggaaaauuggaauaccgacauuaagacucucaaguuugaugcccugucaggcucccaggaagucgaguucauuggguauggaaaagcuacacuggaaugccaggugcaaacugcgguggacuuugguaacaguuacaucgcugagauggaaacagagagcuggauaguggacagacagugggcccaggacuugacccugccauggcagaguggaaguggcgggguguggagagagaugcaucaucuugucgaauuugaaccuccgcaugccgccacuaucagaguacuggcccugggaaaccaggaaggcuccuugaaaacagcucuuacuggcgcaaugaggguuacaaaggacacaaaugacaacaaccuuuacaaacuacaugguggacauguuucuugcagagugaaauugucagcuuugacacucaaggggacauccuacaaaauaugcacugacaaaauguuuuuugucaagaacccaacugacacuggccauggcacuguugugaugcaggugaaagugucaaaaggagcccccugcaggauuccagugauaguagcugaugaucuuacagcggcaaucaauaaaggcauuuugguuacaguuaaccccaucgccucaaccaaugaugaugaagugcugauugaggugaacccaccuuuuggagacagcuacauuaucguugggagaggagauucacgucucacuuaccaguggcacaaagagggaagcucaggcagcacgcugggcaaggccuuuucaacaacuuugaagggagcucaaagacuggcagcguugggcgacacagccugggacuuuggcucuauuggaggggucuucaacuccauaggaagagccguucaccaaguguuugguggugccuucagaacacucuuugggggaaugucuuggaucacacaagggcuaaugggugcccuacugcucuggaugggcgucaacgcacgagaccgaucaauugcuuuggccuucuuagccacaggaggugugcucguguucuuagcgaccaaugugcacgccuaa

SEQ ID NO: 195 - RNA, 2094 nt, Artificial Sequence
  derived and/or modified CDS sequence (opt1) from YFV__NC_002031.1__X-SS-prME-XX (polyprotein: aa92-788)
augcggggccugagcucccgcaagcggcgcagccacgacgugcucaccguccaguuccugauccuggggaugcuccugaugaccggcggggugacgcuggugcggaagaaccgcuggcuccugcugaacgucaccuccgaggaccucggcaagaccuucagcguggggaccggcaacugcacgaccaacauccuggaggccaaguacuggugccccgacuccauggaguacaacugcccgaaccugagcccccgggaggagcccgacgacaucgacugcuggugcuacggcguggagaacguccgcguggccuacgggaagugcgacuccgcgggccggagccgccggucccgccgggccaucgaccuccccacccacgagaaccacgggcugaagacccgccaggagaaguggaugacgggccggaugggggagcgccagcugcagaagaucgagcggugguucgugcgcaacccguucuucgccgucaccgcccucaccaucgccuaccuggugggcagcaacaugacccagcggguggucaucgcgcugcucgugcuggccgugggccccgccuacuccgcccacugcaucgggaucacggaccgcgacuucaucgagggcguccacgggggcaccugggugagcgcgacccuggagcaggacaagugcgugaccgucauggcccccgacaagcccucccucgacaucagccuggagacgguggccaucgaccggccggccgaggugcgcaaggucugcuacaacgccgugcugacccacgugaagaucaacgacaagugccccuccaccggcgaggcgcaccucgccgaggagaacgagggggacaacgccugcaagcggaccuacagcgaccggggcugggggaacggcugcgggcuguucggcaagggcuccaucgucgccugcgccaaguucacgugcgcgaagagcaugucccuguucgagguggaccagaccaagauccaguacgucauccgcgcccagcuccacgugggggccaagcaggagaacuggaacaccgacaucaagacccugaaguucgacgcccugagcggcagccaggagguggaguucaucggguacggcaaggccacgcucgagugccagguccagaccgcgguggacuucgggaacuccuacaucgccgagauggagaccgagagcuggaucguggaccggcagugggcccaggaccugacccugcccuggcaguccggcagcggcggggucuggcgcgagaugcaccaccucguggaguucgagcccccgcacgccgccacgauccgggugcuggcgcugggcaaccaggaggggucccucaagaccgcccugaccggcgccaugcgcgucaccaaggacacgaacgacaacaaccuguacaagcuccacgggggccacgugagcugccgggugaagcuguccgcccugacccucaagggcaccagcuacaagaucugcaccgacaagauguucuucgucaagaaccccacggacaccgggcacggcaccguggugaugcaggucaagguguccaagggggcgcccugccgcaucccggugaucgucgccgacgaccugaccgccgccaucaacaagggcauccuggugaccgugaacccgaucgccagcacgaacgacgacgagguccucaucgaggugaacccccccuucggcgacuccuacaucaucguggggcggggcgacagccgccugaccuaccaguggcacaaggagggguccagcaucggcaagcuguucacccagaccaugaagggggucgagcggcuggcggugaugggcgacacggccugggacuucuccagcgccggcggguucuucaccuccgugggcaaggggauccacaccgucuucggcagcgccuuccaggggcucuucggcggccugaacuggaucaccaaggugaucaugggggccgugcugaucugggucggcaucaacacgcgcaacaugaccauguccaugagcaugauccucgugggggugaucaugauguuccugagccugggcgucggggcggaccagggcugcgccaucaacuucggcaaguga

SEQ ID NO: 196 - RNA, 2064 nt, Artificial Sequence
  derived and/or modified CDS sequence (opt1) from YFV__NC_002031.1__X-SS-prME (polyprotein: aa92-778)
augcggggccugagcucccgcaagcggcgcagccacgacgugcucaccguccaguuccugauccuggggaugcuccugaugaccggcggggugacgcuggugcggaagaaccgcuggcuccugcugaacgucaccuccgaggaccucggcaagaccuucagcguggggaccggcaacugcacgaccaacauccuggaggccaaguacuggugccccgacuccauggaguacaacugcccgaaccugagcccccgggaggagcccgacgacaucgacugcuggugcuacggcguggagaacguccgcguggccuacgggaagugcgacuccgcgggccggagccgccggucccgccgggccaucgaccuccccacccacgagaaccacgggcugaagacccgccaggagaaguggaugacgggccggaugggggagcgccagcugcagaagaucgagcggugguucgugcgcaacccguucuucgccgucaccgcccucaccaucgccuaccuggugggcagcaacaugacccagcggguggucaucgcgcugcucgugcuggccgugggccccgccuacuccgcccacugcaucgggaucacggaccgcgacuucaucgagggcguccacgggggcaccugggugagcgcgacccuggagcaggacaagugcgugaccgucauggcccccgacaagcccucccucgacaucagccuggagacgguggccaucgaccggccggccgaggugcgcaaggucugcuacaacgccgugcugacccacgugaagaucaacgacaagugccccuccaccggcgaggcgcaccucgccgaggagaacgagggggacaacgccugcaagcggaccuacagcgaccggggcugggggaacggcugcgggcuguucggcaagggcuccaucgucgccugcgccaaguucacgugcgcgaagagcaugucccuguucgagguggaccagaccaagauccaguacgucauccgcgcccagcuccacgugggggccaagcaggagaacuggaacaccgacaucaagacccugaaguucgacgcccugagcggcagccaggagguggaguucaucggguacggcaaggccacgcucgagugccagguccagaccgcgguggacuucgggaacuccuacaucgccgagauggagaccgagagcuggaucguggaccggcagugggcccaggaccugacccugcccuggcaguccggcagcggcggggucuggcgcgagaugcaccaccucguggaguucgagcccccgcacgccgccacgauccgggugcuggcgcugggcaaccaggaggggucccucaagaccgcccugaccggcgccaugcgcgucaccaaggacacgaacgacaacaaccuguacaagcuccacgggggccacgugagcugccgggugaagcuguccgcccugacccucaagggcaccagcuacaagaucugcaccgacaagauguucuucgucaagaaccccacggacaccgggcacggcaccguggugaugcaggucaagguguccaagggggcgcccugccgcaucccggugaucgucgccgacgaccugaccgccgccaucaacaagggcauccuggugaccgugaacccgaucgccagcacgaacgacgacgagguccucaucgaggugaacccccccuucggcgacuccuacaucaucguggggcggggcgacagccgccugaccuaccaguggcacaaggagggguccagcaucggcaagcuguucacccagaccaugaagggggucgagcggcuggcggugaugggcgacacggccugggacuucuccagcgccggcggguucuucaccuccgugggcaaggggauccacaccgucuucggcagcgccuuccaggggcucuucggcggccugaacuggaucaccaaggugaucaugggggccgugcugaucugggucggcaucaacacgcgcaacaugaccauguccaugagcaugauccucgugggggugaucaugauguuccugagccugggcgucggggcguga

SEQ ID NO: 197 - RNA, 2067 nt, Artificial Sequence
  derived and/or modified CDS sequence (opt1) from YFV__NC_002031.1__SS-prME-XX (polyprotein: M,aa102-788)
augagccacgacgugcucaccguccaguuccugauccuggggaugcuccugaugaccggcggggugacgcuggugcggaagaaccgcuggcuccugcugaacgucaccuccgaggaccucggcaagaccuucagcguggggaccggcaacugcacgaccaacauccuggaggccaaguacuggugccccgacuccauggaguacaacugcccgaaccugagcccccgggaggagcccgacgacaucgacugcuggugcuacggcguggagaacguccgcguggccuacgggaagugcgacuccgcgggccggagccgccggucccgccgggccaucgaccuccccacccacgagaaccacgggcugaagacccgccaggagaaguggaugacgggccggaugggggagcgccagcugcagaagaucgagcggugguucgugcgcaacccguucuucgccgucaccgcccucaccaucgccuaccuggugggcagcaacaugacccagcggguggucaucgcgcugcucgugcuggccgugggccccgccuacuccgcccacugcaucgggaucacggaccgcgacuucaucgagggcguccacgggggcaccugggugagcgcgacccuggagcaggacaagugcgugaccgucauggcccccgacaagcccucccucgacaucagccuggagacgguggccaucgaccggccggccgaggugcgcaaggucugcuacaacgccgugcugacccacgugaagaucaacgacaagugccccuccaccggcgaggcgcaccucgccgaggagaacgagggggacaacgccugcaagcggaccuacagcgaccggggcugggggaacggcugcgggcuguucggcaagggcuccaucgucgccugcgccaaguucacgugcgcgaagagcaugucccuguucgagguggaccagaccaagauccaguacgucauccgcgcccagcuccacgugggggccaagcaggagaacuggaacaccgacaucaagacccugaaguucgacgcccugagcggcagccaggagguggaguucaucggguacggcaaggccacgcucgagugccagguccagaccgcgguggacuucgggaacuccuacaucgccgagauggagaccgagagcuggaucguggaccggcagugggcccaggaccugacccugcccuggcaguccggcagcggcggggucuggcgcgagaugcaccaccucguggaguucgagcccccgcacgccgccacgauccgggugcuggcgcugggcaaccaggaggggucccucaagaccgcccugaccggcgccaugcgcgucaccaaggacacgaacgacaacaaccuguacaagcuccacgggggccacgugagcugccgggugaagcuguccgcccugacccucaagggcaccagcuacaagaucugcaccgacaagauguucuucgucaagaaccccacggacaccgggcacggcaccguggugaugcaggucaagguguccaagggggcgcccugccgcaucccggugaucgucgccgacgaccugaccgccgccaucaacaagggcauccuggugaccgugaacccgaucgccagcacgaacgacgacgagguccucaucgaggugaacccccccuucggcgacuccuacaucaucguggggcggggcgacagccgccugaccuaccaguggcacaaggagggguccagcaucggcaagcuguucacccagaccaugaagggggucgagcggcuggcggugaugggcgacacggccugggacuucuccagcgccggcggguucuucaccuccgugggcaaggggauccacaccgucuucggcagcgccuuccaggggcucuucggcggccugaacuggaucaccaaggugaucaugggggccgugcugaucugggucggcaucaacacgcgcaacaugaccauguccaugagcaugauccucgugggggugaucaugauguuccugagccugggcgucggggcggaccagggcugcgccaucaacuucggcaaguga

SEQ ID NO: 198 - RNA, 2061 nt, Artificial Sequence
  derived and/or modified CDS sequence (opt1) from YFV__NC_002031.1__SS-prME-XX (polyprotein: M,aa104-788)
auggacgugcucaccguccaguuccugauccuggggaugcuccugaugaccggcggggugacgcuggugcggaagaaccgcuggcuccugcugaacgucaccuccgaggaccucggcaagaccuucagcguggggaccggcaacugcacgaccaacauccuggaggccaaguacuggugccccgacuccauggaguacaacugcccgaaccugagcccccgggaggagcccgacgacaucgacugcuggugcuacggcguggagaacguccgcguggccuacgggaagugcgacuccgcgggccggagccgccggucccgccgggccaucgaccuccccacccacgagaaccacgggcugaagacccgccaggagaaguggaugacgggccggaugggggagcgccagcugcagaagaucgagcggugguucgugcgcaacccguucuucgccgucaccgcccucaccaucgccuaccuggugggcagcaacaugacccagcggguggucaucgcgcugcucgugcuggccgugggccccgccuacuccgcccacugcaucgggaucacggaccgcgacuucaucgagggcguccacgggggcaccugggugagcgcgacccuggagcaggacaagugcgugaccgucauggcccccgacaagcccucccucgacaucagccuggagacgguggccaucgaccggccggccgaggugcgcaaggucugcuacaacgccgugcugacccacgugaagaucaacgacaagugccccuccaccggcgaggcgcaccucgccgaggagaacgagggggacaacgccugcaagcggaccuacagcgaccggggcugggggaacggcugcgggcuguucggcaagggcuccaucgucgccugcgccaaguucacgugcgcgaagagcaugucccuguucgagguggaccagaccaagauccaguacgucauccgcgcccagcuccacgugggggccaagcaggagaacuggaacaccgacaucaagacccugaaguucgacgcccugagcggcagccaggagguggaguucaucggguacggcaaggccacgcucgagugccagguccagaccgcgguggacuucgggaacuccuacaucgccgagauggagaccgagagcuggaucguggaccggcagugggcccaggaccugacccugcccuggcaguccggcagcggcggggucuggcgcgagaugcaccaccucguggaguucgagcccccgcacgccgccacgauccgggugcuggcgcugggcaaccaggaggggucccucaagaccgcccugaccggcgccaugcgcgucaccaaggacacgaacgacaacaaccuguacaagcuccacgggggccacgugagcugccgggugaagcuguccgcccugacccucaagggcaccagcuacaagaucugcaccgacaagauguucuucgucaagaaccccacggacaccgggcacggcaccguggugaugcaggucaagguguccaagggggcgcccugccgcaucccggugaucgucgccgacgaccugaccgccgccaucaacaagggcauccuggugaccgugaacccgaucgccagcacgaacgacgacgagguccucaucgaggugaacccccccuucggcgacuccuacaucaucguggggcggggcgacagccgccugaccuaccaguggcacaaggagggguccagcaucggcaagcuguucacccagaccaugaagggggucgagcggcuggcggugaugggcgacacggccugggacuucuccagcgccggcggguucuucaccuccgugggcaaggggauccacaccgucuucggcagcgccuuccaggggcucuucggcggccugaacuggaucaccaaggugaucaugggggccgugcugaucugggucggcaucaacacgcgcaacaugaccauguccaugagcaugauccucgugggggugaucaugauguuccugagccugggcgucggggcggaccagggcugcgccaucaacuucggcaaguga

SEQ ID NO: 199 - RNA, 2037 nt, Artificial Sequence
  derived and/or modified CDS sequence (opt1) from YFV__NC_002031.1__SS-prME (polyprotein: M,aa102-778)
augagccacgacgugcugaccguccaguuccucauccugggcaugcugcucaugaccgggggcgugacgcuggugcgcaagaaccgguggcugcuccugaacgucaccuccgaggaccuggggaagaccuucagcgugggcaccgggaacugcacgaccaacauccucgaggccaaguacuggugccccgacuccauggaguacaacugccccaaccugagcccccgcgaggagcccgacgacaucgacugcuggugcuacggcguggagaacguccggguggccuacggcaagugcgacuccgcggggcgcagccggcgcucccggcgcgccaucgaccugcccacccacgagaaccacggccucaagacccggcaggagaaguggaugacggggcgcaugggcgagcggcagcugcagaagaucgagcgcugguucgugcggaacccguucuucgccgucaccgcccugaccaucgccuaccucguggggagcaacaugacccagcgcguggucaucgcgcugcuggugcucgccgugggccccgccuacuccgcccacugcaucggcaucacggaccgggacuucaucgaggggguccacggcgggaccugggugagcgcgacccuggagcaggacaagugcgugaccgucauggcccccgacaagcccucccuggacaucagccucgagacgguggccaucgaccgcccggccgaggugcggaaggucugcuacaacgccgugcugacccacgugaagaucaacgacaagugccccuccaccggcgaggcgcaccuggccgaggagaacgagggcgacaacgccugcaagcgcaccuacagcgaccggggguggggcaacgggugcggccucuucgggaagggcuccaucgucgccugcgccaaguucacgugcgcgaagagcaugucccuguucgagguggaccagaccaagauccaguacgucauccgcgcccagcugcacgugggcgccaagcaggagaacuggaacaccgacaucaagacccucaaguucgacgcccugagcgggucccaggagguggaguucaucggcuacgggaaggccacgcuggagugccagguccagaccgcgguggacuucggcaacagcuacaucgccgagauggagaccgagagcuggaucguggaccggcagugggcccaggaccucacccugcccuggcaguccgggagcggcggcgucuggcgcgagaugcaccaccugguggaguucgagcccccgcacgccgccacgauccgcgugcucgcgcuggggaaccaggagggcucccugaagaccgcccucaccggggccaugcgggucaccaaggacacgaacgacaacaaccuguacaagcugcacggcgggcacgugagcugccgcgugaagcucuccgcccugacccugaagggcaccagcuacaagaucugcaccgacaagauguucuucgucaagaaccccacggacaccggccacgggaccguggugaugcaggucaagguguccaagggcgcgcccugccggaucccggugaucgucgccgacgaccucaccgccgccaucaacaaggggauccuggugaccgugaacccgaucgccagcacgaacgacgacgagguccugaucgaggugaacccgcccuucggcgacuccuacaucaucgugggccgcggggacagccggcucaccuaccaguggcacaaggagggcuccagcaucgggaagcuguucacccagaccaugaagggcgucgagcgccuggcggugaugggggacacggccugggacuucuccagcgccggcggcuucuucaccuccguggggaagggcauccacaccgucuucgggagcgccuuccagggccuguucgggggccucaacuggaucaccaaggugaucaugggcgccgugcugaucugggucgggaucaacacgcggaacaugaccauguccaugagcaugauccuggugggcgugaucaugauguuccucucccugggggucggcgcguga

SEQ ID NO: 200 - RNA, 2031 nt, Artificial Sequence
  derived and/or modified CDS sequence (opt1) from YFV__NC_002031.1__SS-prME (polyprotein: M,aa104-778)
auggacgugcugaccguccaguuccucauccugggcaugcugcucaugaccgggggcgugacccugguccggaagaaccgcuggcuccugcugaacgugaccagcgaggaccucggcaagacguucuccguggggaccggcaacugcaccaccaacauccuggaggccaaguacuggugccccgacagcauggaguacaacugccccaaccuguccccgcgggaggagcccgacgacaucgacugcuggugcuacggggucgagaacgugcgcguggccuacggcaagugcgacagcgcggggcggucccgccggagccgccgggccaucgaccugcccacccacgagaaccacggccucaagacccggcaggagaaguggaugacggggcgcaugggcgagcggcagcugcagaagaucgagcgcugguucgugcggaacccguucuucgccgucaccgcgcugaccaucgccuaccucguggggagcaacaugacccagcgcguggucaucgcccugcuggugcucgccgugggccccgccuacuccgcgcacugcaucgggaucacggaccgggacuucaucgagggcguccacggcgggaccugggugagcgccacccuggagcaggacaagugcgugaccgucauggcccccgacaagcccucccuggacaucagccucgagacgguggccaucgaccgcccggcggaggugcggaaggucugcuacaacgccgugcugacccacgugaagaucaacgacaagugccccuccaccggcgaggcccaccuggccgaggagaacgagggggacaacgccugcaagcgcaccuacagcgaccggggcugggggaacggcugcggccucuucgggaagggcuccaucgucgcgugcgccaaguucacgugcgccaagagcaugucccuguucgagguggaccagaccaagauccaguacgugauccgcgcccagcugcacgucggggccaagcaggagaacuggaacaccgacaucaagacccucaaguucgacgcgcugagcggcucccaggagguggaguucaucggcuacgggaaggccacgcuggagugccaggugcagaccgccgucgacuucggcaacagcuacaucgccgagauggagaccgaguccuggaucguggaccggcagugggcccaggaccucacccugcccuggcagagcggguccggcgggguguggcgcgagaugcaccaccuggucgaguucgagcccccgcacgcggccacgauccgggugcucgcccugggcaaccaggagggcagccugaagaccgcccucaccggggccaugcgcgucaccaaggacacgaacgacaacaaccuguacaagcugcacggcgggcacguguccugccgggugaagcucagcgcgcugacccugaagggcaccuccuacaagaucugcaccgacaagauguucuucgucaagaaccccacggacaccgggcacggcaccguggugaugcaggucaaggugagcaagggcgcccccugccgcaucccggugaucgucgccgacgaccucaccgccgcgaucaacaaggggauccuggugacggugaaccccaucgccagcaccaacgacgacgagguccugaucgaggugaacccgcccuucggcgacuccuacaucaucguggggcggggcgacagccgccucaccuaccaguggcacaaggagggguccagcaucggcaagcuguucacccagacgaugaagggcgucgagcggcuggccgugaugggggacaccgccugggacuucuccagcgccggcggguucuucaccuccgugggcaagggcauccacaccgucuucgggagcgcguuccagggccucuucgggggccugaacuggaucaccaaggugaucaugggggccgugcugaucugggucggcaucaacacgcgcaacaugaccauguccaugagcaugauccucgugggcgugaucaugauguuccugucccugggggucggcgccuga

SEQ ID NO: 201 - RNA, 2073 nt, Artificial Sequence
  derived and/or modified CDS sequence (opt1) from YFV__NC_002031.1__X-SS-prMEdelstem_TM-JEV (polyprotein: aa92-680)
augcggggccugagcucccgcaagcggcgcagccacgacgugcucaccguccaguuccugauccuggggaugcuccugaugaccggcggggugacgcuggugcggaagaaccgcuggcuccugcugaacgucaccuccgaggaccucggcaagaccuucagcguggggaccggcaacugcacgaccaacauccuggaggccaaguacuggugccccgacuccauggaguacaacugcccgaaccugagcccccgggaggagcccgacgacaucgacugcuggugcuacggcguggagaacguccgcguggccuacgggaagugcgacuccgcgggccggagccgccggucccgccgggccaucgaccuccccacccacgagaaccacgggcugaagacccgccaggagaaguggaugacgggccggaugggggagcgccagcugcagaagaucgagcggugguucgugcgcaacccguucuucgccgucaccgcccucaccaucgccuaccuggugggcagcaacaugacccagcggguggucaucgcgcugcucgugcuggccgugggccccgccuacuccgcccacugcaucgggaucacggaccgcgacuucaucgagggcguccacgggggcaccugggugagcgcgacccuggagcaggacaagugcgugaccgucauggcccccgacaagcccucccucgacaucagccuggagacgguggccaucgaccggccggccgaggugcgcaaggucugcuacaacgccgugcugacccacgugaagaucaacgacaagugccccuccaccggcgaggcgcaccucgccgaggagaacgagggggacaacgccugcaagcggaccuacagcgaccggggcugggggaacggcugcgggcuguucggcaagggcuccaucgucgccugcgccaaguucacgugcgcgaagagcaugucccuguucgagguggaccagaccaagauccaguacgucauccgcgcccagcuccacgugggggccaagcaggagaacuggaacaccgacaucaagacccugaaguucgacgcccugagcggcagccaggagguggaguucaucggguacggcaaggccacgcucgagugccagguccagaccgcgguggacuucgggaacuccuacaucgccgagauggagaccgagagcuggaucguggaccggcagugggcccaggaccugacccugcccuggcaguccggcagcggcggggucuggcgcgagaugcaccaccucguggaguucgagcccccgcacgccgccacgauccgggugcuggcgcugggcaaccaggaggggucccucaagaccgcccugaccggcgccaugcgcgucaccaaggacacgaacgacaacaaccuguacaagcuccacgggggccacgugagcugccgggugaagcuguccgcccugacccucaagggcaccagcuacaagaucugcaccgacaagauguucuucgucaagaaccccacggacaccgggcacggcaccguggugaugcaggucaagguguccaagggggcgcccugccgcaucccggugaucgucgccgacgaccugaccgccgccaucaacaagggcauccuggugaccgugaacccgaucgccagcacgaacgacgacgagguccucaucgaggugaacccccccuucggcgacuccuacaucaucguggggcggggcgacagccgccugaccuaccaguggcacaaggagggguccagcggcagcacccuggggaaggccuucuccaccacgcucaagggcgcccagcgccuggcggcccugggggacaccgccugggacuucggcagcaucgggggcguguucaacuccaucggccgggccguccaccagguguucgggggcgccuuccgcacccucuucgggggcaugagcuggaucacccaggggcugaugggcgcgcugcuccuguggaugggggugaacgcccgggaccgcuccaucgcccuggccuuccucgcgacgggcggcguccugguguuccuggccaccaacgugcacgccuga

SEQ ID NO: 202 - RNA, 2046 nt, Artificial Sequence
  derived and/or modified CDS sequence (opt1) from YFV__NC_002031.1__SS-prMEdelstem_TM-JEV (polyprotein: M,aa102-680)
augagccacgacgugcugaccguccaguuccucauccugggcaugcugcucaugaccgggggcgugacgcuggugcgcaagaaccgguggcugcuccugaacgucaccuccgaggaccuggggaagaccuucagcgugggcaccgggaacugcacgaccaacauccucgaggccaaguacuggugccccgacuccauggaguacaacugccccaaccugagcccccgcgaggagcccgacgacaucgacugcuggugcuacggcguggagaacguccggguggccuacggcaagugcgacuccgcggggcgcagccggcgcucccggcgcgccaucgaccugcccacccacgagaaccacggccucaagacccggcaggagaaguggaugacggggcgcaugggcgagcggcagcugcagaagaucgagcgcugguucgugcggaacccguucuucgccgucaccgcccugaccaucgccuaccucguggggagcaacaugacccagcgcguggucaucgcgcugcuggugcucgccgugggccccgccuacuccgcccacugcaucggcaucacggaccgggacuucaucgaggggguccacggcgggaccugggugagcgcgacccuggagcaggacaagugcgugaccgucauggcccccgacaagcccucccuggacaucagccucgagacgguggccaucgaccgcccggccgaggugcggaaggucugcuacaacgccgugcugacccacgugaagaucaacgacaagugccccuccaccggcgaggcgcaccuggccgaggagaacgagggcgacaacgccugcaagcgcaccuacagcgaccggggguggggcaacgggugcggccucuucgggaagggcuccaucgucgccugcgccaaguucacgugcgcgaagagcaugucccuguucgagguggaccagaccaagauccaguacgucauccgcgcccagcugcacgugggcgccaagcaggagaacuggaacaccgacaucaagacccucaaguucgacgcccugagcgggucccaggagguggaguucaucggcuacgggaaggccacgcuggagugccagguccagaccgcgguggacuucggcaacagcuacaucgccgagauggagaccgagagcuggaucguggaccggcagugggcccaggaccucacccugcccuggcaguccgggagcggcggcgucuggcgcgagaugcaccaccugguggaguucgagcccccgcacgccgccacgauccgcgugcucgcgcuggggaaccaggagggcucccugaagaccgcccucaccggggccaugcgggucaccaaggacacgaacgacaacaaccuguacaagcugcacggcgggcacgugagcugccgcgugaagcucuccgcccugacccugaagggcaccagcuacaagaucugcaccgacaagauguucuucgucaagaaccccacggacaccggccacgggaccguggugaugcaggucaagguguccaagggcgcgcccugccggaucccggugaucgucgccgacgaccucaccgccgccaucaacaaggggauccuggugaccgugaacccgaucgccagcacgaacgacgacgagguccugaucgaggugaacccgcccuucggcgacuccuacaucaucgugggccgcggggacagccggcucaccuaccaguggcacaaggagggcuccagcggcagcacccuggggaaggccuucuccaccacgcucaagggcgcccagcgccuggcggcccugggggacaccgccugggacuucggcagcaucgggggcguguucaacuccaucggccgggccguccaccagguguucgggggcgccuuccgcacccucuucgggggcaugagcuggaucacccaggggcugaugggcgcgcugcuccuguggaugggggugaacgcccgggaccgcuccaucgcccuggccuuccucgcgacgggcggcguccugguguuccuggccaccaacgugcacgccuga

SEQ ID NO: 203 - RNA, 2040 nt, Artificial Sequence
  derived and/or modified CDS sequence (opt1) from YFV__NC_002031.1__SS-prMEdelstem_TM-JEV (polyprotein: M,aa104-680)
auggacgugcugaccguccaguuccucauccugggcaugcugcucaugaccgggggcgugacccugguccggaagaaccgcuggcuccugcugaacgugaccagcgaggaccucggcaagacguucuccguggggaccggcaacugcaccaccaacauccuggaggccaaguacuggugccccgacagcauggaguacaacugccccaaccuguccccgcgggaggagcccgacgacaucgacugcuggugcuacggggucgagaacgugcgcguggccuacggcaagugcgacagcgcggggcggucccgccggagccgccgggccaucgaccugcccacccacgagaaccacggccucaagacccggcaggagaaguggaugacggggcgcaugggcgagcggcagcugcagaagaucgagcgcugguucgugcggaacccguucuucgccgucaccgcgcugaccaucgccuaccucguggggagcaacaugacccagcgcguggucaucgcccugcuggugcucgccgugggccccgccuacuccgcgcacugcaucgggaucacggaccgggacuucaucgagggcguccacggcgggaccugggugagcgccacccuggagcaggacaagugcgugaccgucauggcccccgacaagcccucccuggacaucagccucgagacgguggccaucgaccgcccggcggaggugcggaaggucugcuacaacgccgugcugacccacgugaagaucaacgacaagugccccuccaccggcgaggcccaccuggccgaggagaacgagggggacaacgccugcaagcgcaccuacagcgaccggggcugggggaacggcugcggccucuucgggaagggcuccaucgucgcgugcgccaaguucacgugcgccaagagcaugucccuguucgagguggaccagaccaagauccaguacgugauccgcgcccagcugcacgucggggccaagcaggagaacuggaacaccgacaucaagacccucaaguucgacgcgcugagcggcucccaggagguggaguucaucggcuacgggaaggccacgcuggagugccaggugcagaccgccgucgacuucggcaacagcuacaucgccgagauggagaccgaguccuggaucguggaccggcagugggcccaggaccucacccugcccuggcagagcggguccggcgggguguggcgcgagaugcaccaccuggucgaguucgagcccccgcacgcggccacgauccgggugcucgcccugggcaaccaggagggcagccugaagaccgcccucaccggggccaugcgcgucaccaaggacacgaacgacaacaaccuguacaagcugcacggcgggcacguguccugccgggugaagcucagcgcgcugacccugaagggcaccuccuacaagaucugcaccgacaagauguucuucgucaagaaccccacggacaccgggcacggcaccguggugaugcaggucaaggugagcaagggcgcccccugccgcaucccggugaucgucgccgacgaccucaccgccgcgaucaacaaggggauccuggugacggugaaccccaucgccagcaccaacgacgacgagguccugaucgaggugaacccgcccuucggcgacuccuacaucaucguggggcggggcgacagccgccucaccuaccaguggcacaaggagggguccagcggcagcacccuggggaaggccuucuccaccacgcucaagggcgcccagcgccuggcggcccugggggacaccgccugggacuucggcagcaucgggggcguguucaacuccaucggccgggccguccaccagguguucgggggcgccuuccgcacccucuucgggggcaugagcuggaucacccaggggcugaugggcgcgcugcuccuguggaugggggugaacgcccgggaccgcuccaucgcccuggccuuccucgcgacgggcggcguccugguguuccuggccaccaacgugcacgccuga

SEQ ID NO: 204 - RNA, 2058 nt, Artificial Sequence
  derived and/or modified CDS sequence (opt1) from YFV__NC_002031.1__SSIgE-prME-XX (polyprotein: aa122-788)
auggacuggaccuggauccuguuccucguggccgccgcgacccgcguccacagcgugacgcuggugcggaagaaccgcuggcuccugcugaacgucaccuccgaggaccucggcaagaccuucagcguggggaccggcaacugcacgaccaacauccuggaggccaaguacuggugccccgacuccauggaguacaacugcccgaaccugagcccccgggaggagcccgacgacaucgacugcuggugcuacggcguggagaacguccgcguggccuacgggaagugcgacuccgcgggccggagccgccggucccgccgggccaucgaccuccccacccacgagaaccacgggcugaagacccgccaggagaaguggaugacgggccggaugggggagcgccagcugcagaagaucgagcggugguucgugcgcaacccguucuucgccgucaccgcccucaccaucgccuaccuggugggcagcaacaugacccagcggguggucaucgcgcugcucgugcuggccgugggccccgccuacuccgcccacugcaucgggaucacggaccgcgacuucaucgagggcguccacgggggcaccugggugagcgcgacccuggagcaggacaagugcgugaccgucauggcccccgacaagcccucccucgacaucagccuggagacgguggccaucgaccggccggccgaggugcgcaaggucugcuacaacgccgugcugacccacgugaagaucaacgacaagugccccuccaccggcgaggcgcaccucgccgaggagaacgagggggacaacgccugcaagcggaccuacagcgaccggggcugggggaacggcugcgggcuguucggcaagggcuccaucgucgccugcgccaaguucacgugcgcgaagagcaugucccuguucgagguggaccagaccaagauccaguacgucauccgcgcccagcuccacgugggggccaagcaggagaacuggaacaccgacaucaagacccugaaguucgacgcccugagcggcagccaggagguggaguucaucggguacggcaaggccacgcucgagugccagguccagaccgcgguggacuucgggaacuccuacaucgccgagauggagaccgagagcuggaucguggaccggcagugggcccaggaccugacccugcccuggcaguccggcagcggcggggucuggcgcgagaugcaccaccucguggaguucgagcccccgcacgccgccacgauccgggugcuggcgcugggcaaccaggaggggucccucaagaccgcccugaccggcgccaugcgcgucaccaaggacacgaacgacaacaaccuguacaagcuccacgggggccacgugagcugccgggugaagcuguccgcccugacccucaagggcaccagcuacaagaucugcaccgacaagauguucuucgucaagaaccccacggacaccgggcacggcaccguggugaugcaggucaagguguccaagggggcgcccugccgcaucccggugaucgucgccgacgaccugaccgccgccaucaacaagggcauccuggugaccgugaacccgaucgccagcacgaacgacgacgagguccucaucgaggugaacccccccuucggcgacuccuacaucaucguggggcggggcgacagccgccugaccuaccaguggcacaaggagggguccagcaucggcaagcuguucacccagaccaugaagggggucgagcggcuggcggugaugggcgacacggccugggacuucuccagcgccggcggguucuucaccuccgugggcaaggggauccacaccgucuucggcagcgccuuccaggggcucuucggcggccugaacuggaucaccaaggugaucaugggggccgugcugaucugggucggcaucaacacgcgcaacaugaccauguccaugagcaugauccucgugggggugaucaugauguuccugagccugggcgucggggcggaccagggcugcgccaucaacuucggcaaguga

SEQ ID NO: 205 - RNA, 2046 nt, Artificial Sequence
  derived and/or modified CDS sequence (opt1) from YFV__NC_002031.1__SSIgE-prME-XX (polyprotein: aa126-788)
auggacuggaccuggauccuguuccucguggccgccgcgacccgcguccacagccggaagaaccgcuggcuccugcugaacgucaccuccgaggaccucggcaagaccuucagcguggggaccggcaacugcacgaccaacauccuggaggccaaguacuggugccccgacuccauggaguacaacugcccgaaccugagcccccgggaggagcccgacgacaucgacugcuggugcuacggcguggagaacguccgcguggccuacgggaagugcgacuccgcgggccggagccgccggucccgccgggccaucgaccuccccacccacgagaaccacgggcugaagacccgccaggagaaguggaugacgggccggaugggggagcgccagcugcagaagaucgagcggugguucgugcgcaacccguucuucgccgucaccgcccucaccaucgccuaccuggugggcagcaacaugacccagcggguggucaucgcgcugcucgugcuggccgugggccccgccuacuccgcccacugcaucgggaucacggaccgcgacuucaucgagggcguccacgggggcaccugggugagcgcgacccuggagcaggacaagugcgugaccgucauggcccccgacaagcccucccucgacaucagccuggagacgguggccaucgaccggccggccgaggugcgcaaggucugcuacaacgccgugcugacccacgugaagaucaacgacaagugccccuccaccggcgaggcgcaccucgccgaggagaacgagggggacaacgccugcaagcggaccuacagcgaccggggcugggggaacggcugcgggcuguucggcaagggcuccaucgucgccugcgccaaguucacgugcgcgaagagcaugucccuguucgagguggaccagaccaagauccaguacgucauccgcgcccagcuccacgugggggccaagcaggagaacuggaacaccgacaucaagacccugaaguucgacgcccugagcggcagccaggagguggaguucaucggguacggcaaggccacgcucgagugccagguccagaccgcgguggacuucgggaacuccuacaucgccgagauggagaccgagagcuggaucguggaccggcagugggcccaggaccugacccugcccuggcaguccggcagcggcggggucuggcgcgagaugcaccaccucguggaguucgagcccccgcacgccgccacgauccgggugcuggcgcugggcaaccaggaggggucccucaagaccgcccugaccggcgccaugcgcgucaccaaggacacgaacgacaacaaccuguacaagcuccacgggggccacgugagcugccgggugaagcuguccgcccugacccucaagggcaccagcuacaagaucugcaccgacaagauguucuucgucaagaaccccacggacaccgggcacggcaccguggugaugcaggucaagguguccaagggggcgcccugccgcaucccggugaucgucgccgacgaccugaccgccgccaucaacaagggcauccuggugaccgugaacccgaucgccagcacgaacgacgacgagguccucaucgaggugaacccccccuucggcgacuccuacaucaucguggggcggggcgacagccgccugaccuaccaguggcacaaggagggguccagcaucggcaagcuguucacccagaccaugaagggggucgagcggcuggcggugaugggcgacacggccugggacuucuccagcgccggcggguucuucaccuccgugggcaaggggauccacaccgucuucggcagcgccuuccaggggcucuucggcggccugaacuggaucaccaaggugaucaugggggccgugcugaucugggucggcaucaacacgcgcaacaugaccauguccaugagcaugauccucgugggggugaucaugauguuccugagccugggcgucggggcggaccagggcugcgccaucaacuucggcaaguga

SEQ ID NO: 206 - RNA, 2028 nt, Artificial Sequence
  derived and/or modified CDS sequence (opt1) from YFV__NC_002031.1__SSIgE-prME (polyprotein: aa122-778)
auggacuggaccuggauccuguuccucguggccgccgcgacccgcguccacagcgugacccugguccgcaagaaccgguggcuccugcugaacgugaccagcgaggaccucggcaagacguucuccguggggaccggcaacugcaccaccaacauccuggaggccaaguacuggugccccgacagcauggaguacaacugcccgaaccuguccccgcgcgaggagcccgacgacaucgacugcuggugcuacggggucgagaacgugcggguggccuacggcaagugcgacagcgcggggcgcucccggcgcagccggcgcgccaucgaccuccccacgcacgagaaccacggccugaagacccggcaggagaaguggaugaccggccgcaugggggagcggcagcugcagaagaucgagcgcugguucguccggaaccccuucuucgccgugaccgcccucacgaucgccuaccuggugggcuccaacaugacccagcgcgucgugaucgcgcugcucgugcuggccgucgggcccgccuacagcgcccacugcaucggcaucaccgaccgggacuucaucgagggggugcacggcggcaccuggguguccgcgacgcuggagcaggacaagugcgucaccgugauggcccccgacaagcccagccucgacaucucccuggagaccguggccaucgaccgcccggccgagguccggaaggugugcuacaacgccgugcugacccacgucaagaucaacgacaagugccccagcacgggggaggcgcaccucgccgaggagaacgagggcgacaacgccugcaagcgcaccuacuccgaccggggguggggcaacggcugcgggcuguucggcaaggggagcaucguggccugcgccaaguucaccugcgcgaaguccaugagccuguucgagguggaccagaccaagauccaguacgucauccgcgcccagcuccacgugggcgccaagcaggagaacuggaacacggacaucaagacccugaaguucgacgcccuguccgggagccaggaggucgaguucaucggcuacggcaaggccacccucgagugccaggugcagaccgcgguggacuucgggaacuccuacaucgccgagauggagacggagagcuggaucgucgaccggcagugggcccaggaccugacccugcccuggcagagcggcuccgggggcguguggcgcgagaugcaccaccucguggaguucgagcccccgcacgccgccaccauccgcguccuggcgcuggggaaccaggagggcagccucaagaccgcccugacgggcgccaugcgggugaccaaggacaccaacgacaacaaccuguacaagcuccacgggggccacguguccugccgcgucaagcugagcgcccugacccucaaggggacguccuacaagaucugcaccgacaagauguucuucgugaagaaccccaccgacaccggccacgggacgguggucaugcaggugaaggugagcaagggcgcgcccugccggauccccgucaucguggccgacgaccugaccgccgccaucaacaagggcauccuggugaccgucaacccgaucgccuccaccaacgacgacgaggugcucaucgaggugaacccgcccuucggggacagcuacaucaucgucggccgcggggacucccggcugaccuaccaguggcacaaggagggcagcuccaucggcaagcuguucacgcagaccaugaaggggguggagcgccucgcggugaugggcgacaccgccugggacuucagcuccgccgggggcuucuucaccagcgucgggaagggcauccacacgguguucggcuccgccuuccaggggcuguucggcgggcugaacuggaucaccaaggugaucaugggcgccguccucaucuggguggggaucaacacccggaacaugaccaugagcauguccaugauccuggugggcgucaucaugauguuccugagccugggcgugggggcguga

SEQ ID NO: 207 - RNA, 2016 nt, Artificial Sequence
  derived and/or modified CDS sequence (opt1) from YFV__NC_002031.1__SSIgE-prME (polyprotein: aa126-778)
auggacuggaccuggauccuguuccucguggccgccgcgacccgcguccacagccgcaagaaccgguggcuccugcugaacgugaccagcgaggaccucggcaagacguucuccguggggaccggcaacugcaccaccaacauccuggaggccaaguacuggugccccgacagcauggaguacaacugcccgaaccuguccccgcgcgaggagcccgacgacaucgacugcuggugcuacggggucgagaacgugcggguggccuacggcaagugcgacagcgcggggcgcucccggcgcagccggcgcgccaucgaccuccccacgcacgagaaccacggccugaagacccggcaggagaaguggaugaccggccgcaugggggagcggcagcugcagaagaucgagcgcugguucguccggaaccccuucuucgccgugaccgcccucacgaucgccuaccuggugggcuccaacaugacccagcgcgucgugaucgcgcugcucgugcuggccgucgggcccgccuacagcgcccacugcaucggcaucaccgaccgggacuucaucgagggggugcacggcggcaccuggguguccgcgacgcuggagcaggacaagugcgucaccgugauggcccccgacaagcccagccucgacaucucccuggagaccguggccaucgaccgcccggccgagguccggaaggugugcuacaacgccgugcugacccacgucaagaucaacgacaagugccccagcacgggggaggcgcaccucgccgaggagaacgagggcgacaacgccugcaagcgcaccuacuccgaccggggguggggcaacggcugcgggcuguucggcaaggggagcaucguggccugcgccaaguucaccugcgcgaaguccaugagccuguucgagguggaccagaccaagauccaguacgucauccgcgcccagcuccacgugggcgccaagcaggagaacuggaacacggacaucaagacccugaaguucgacgcccuguccgggagccaggaggucgaguucaucggcuacggcaaggccacccucgagugccaggugcagaccgcgguggacuucgggaacuccuacaucgccgagauggagacggagagcuggaucgucgaccggcagugggcccaggaccugacccugcccuggcagagcggcuccgggggcguguggcgcgagaugcaccaccucguggaguucgagcccccgcacgccgccaccauccgcguccuggcgcuggggaaccaggagggcagccucaagaccgcccugacgggcgccaugcgggugaccaaggacaccaacgacaacaaccuguacaagcuccacgggggccacguguccugccgcgucaagcugagcgcccugacccucaaggggacguccuacaagaucugcaccgacaagauguucuucgugaagaaccccaccgacaccggccacgggacgguggucaugcaggugaaggugagcaagggcgcgcccugccggauccccgucaucguggccgacgaccugaccgccgccaucaacaagggcauccuggugaccgucaacccgaucgccuccaccaacgacgacgaggugcucaucgaggugaacccgcccuucggggacagcuacaucaucgucggccgcggggacucccggcugaccuaccaguggcacaaggagggcagcuccaucggcaagcuguucacgcagaccaugaaggggguggagcgccucgcggugaugggcgacaccgccugggacuucagcuccgccgggggcuucuucaccagcgucgggaagggcauccacacgguguucggcuccgccuuccaggggcuguucggcgggcugaacuggaucaccaaggugaucaugggcgccguccucaucuggguggggaucaacacccggaacaugaccaugagcauguccaugauccuggugggcgucaucaugauguuccugagccugggcgugggggcguga

SEQ ID NO: 208 - RNA, 2076 nt, Artificial Sequence
  derived and/or modified CDS sequence (opt1) from YFV__NC_002031.1__SSjev-prME-XX (polyprotein: aa122-788)
augggcaagcgcagcgccggguccaucauguggcuggccagccucgcgguggucaucgccugcgccggcgccgugacgcuggugcggaagaaccgcuggcuccugcugaacgucaccuccgaggaccucggcaagaccuucagcguggggaccggcaacugcacgaccaacauccuggaggccaaguacuggugccccgacuccauggaguacaacugcccgaaccugagcccccgggaggagcccgacgacaucgacugcuggugcuacggcguggagaacguccgcguggccuacgggaagugcgacuccgcgggccggagccgccggucccgccgggccaucgaccuccccacccacgagaaccacgggcugaagacccgccaggagaaguggaugacgggccggaugggggagcgccagcugcagaagaucgagcggugguucgugcgcaacccguucuucgccgucaccgcccucaccaucgccuaccuggugggcagcaacaugacccagcggguggucaucgcgcugcucgugcuggccgugggccccgccuacuccgcccacugcaucgggaucacggaccgcgacuucaucgagggcguccacgggggcaccugggugagcgcgacccuggagcaggacaagugcgugaccgucauggcccccgacaagcccucccucgacaucagccuggagacgguggccaucgaccggccggccgaggugcgcaaggucugcuacaacgccgugcugacccacgugaagaucaacgacaagugccccuccaccggcgaggcgcaccucgccgaggagaacgagggggacaacgccugcaagcggaccuacagcgaccggggcugggggaacggcugcgggcuguucggcaagggcuccaucgucgccugcgccaaguucacgugcgcgaagagcaugucccuguucgagguggaccagaccaagauccaguacgucauccgcgcccagcuccacgugggggccaagcaggagaacuggaacaccgacaucaagacccugaaguucgacgcccugagcggcagccaggagguggaguucaucggguacggcaaggccacgcucgagugccagguccagaccgcgguggacuucgggaacuccuacaucgccgagauggagaccgagagcuggaucguggaccggcagugggcccaggaccugacccugcccuggcaguccggcagcggcggggucuggcgcgagaugcaccaccucguggaguucgagcccccgcacgccgccacgauccgggugcuggcgcugggcaaccaggaggggucccucaagaccgcccugaccggcgccaugcgcgucaccaaggacacgaacgacaacaaccuguacaagcuccacgggggccacgugagcugccgggugaagcuguccgcccugacccucaagggcaccagcuacaagaucugcaccgacaagauguucuucgucaagaaccccacggacaccgggcacggcaccguggugaugcaggucaagguguccaagggggcgcccugccgcaucccggugaucgucgccgacgaccugaccgccgccaucaacaagggcauccuggugaccgugaacccgaucgccagcacgaacgacgacgagguccucaucgaggugaacccccccuucggcgacuccuacaucaucguggggcggggcgacagccgccugaccuaccaguggcacaaggagggguccagcaucggcaagcuguucacccagaccaugaagggggucgagcggcuggcggugaugggcgacacggccugggacuucuccagcgccggcggguucuucaccuccgugggcaaggggauccacaccgucuucggcagcgccuuccaggggcucuucggcggccugaacuggaucaccaaggugaucaugggggccgugcugaucugggucggcaucaacacgcgcaacaugaccauguccaugagcaugauccucgugggggugaucaugauguuccugagccugggcgucggggcggaccagggcugcgccaucaacuucggcaaguga

SEQ ID NO: 209 - RNA, 2064 nt, Artificial Sequence
  derived and/or modified CDS sequence (opt1) from YFV__NC_002031.1__SSjev-prME-XX (polyprotein: aa126-788)
augggcaagcgcagcgccggguccaucauguggcuggccagccucgcgguggucaucgccugcgccggcgcccggaagaaccgcuggcuccugcugaacgucaccuccgaggaccucggcaagaccuucagcguggggaccggcaacugcacgaccaacauccuggaggccaaguacuggugccccgacuccauggaguacaacugcccgaaccugagcccccgggaggagcccgacgacaucgacugcuggugcuacggcguggagaacguccgcguggccuacgggaagugcgacuccgcgggccggagccgccggucccgccgggccaucgaccuccccacccacgagaaccacgggcugaagacccgccaggagaaguggaugacgggccggaugggggagcgccagcugcagaagaucgagcggugguucgugcgcaacccguucuucgccgucaccgcccucaccaucgccuaccuggugggcagcaacaugacccagcggguggucaucgcgcugcucgugcuggccgugggccccgccuacuccgcccacugcaucgggaucacggaccgcgacuucaucgagggcguccacgggggcaccugggugagcgcgacccuggagcaggacaagugcgugaccgucauggcccccgacaagcccucccucgacaucagccuggagacgguggccaucgaccggccggccgaggugcgcaaggucugcuacaacgccgugcugacccacgugaagaucaacgacaagugccccuccaccggcgaggcgcaccucgccgaggagaacgagggggacaacgccugcaagcggaccuacagcgaccggggcugggggaacggcugcgggcuguucggcaagggcuccaucgucgccugcgccaaguucacgugcgcgaagagcaugucccuguucgagguggaccagaccaagauccaguacgucauccgcgcccagcuccacgugggggccaagcaggagaacuggaacaccgacaucaagacccugaaguucgacgcccugagcggcagccaggagguggaguucaucggguacggcaaggccacgcucgagugccagguccagaccgcgguggacuucgggaacuccuacaucgccgagauggagaccgagagcuggaucguggaccggcagugggcccaggaccugacccugcccuggcaguccggcagcggcggggucuggcgcgagaugcaccaccucguggaguucgagcccccgcacgccgccacgauccgggugcuggcgcugggcaaccaggaggggucccucaagaccgcccugaccggcgccaugcgcgucaccaaggacacgaacgacaacaaccuguacaagcuccacgggggccacgugagcugccgggugaagcuguccgcccugacccucaagggcaccagcuacaagaucugcaccgacaagauguucuucgucaagaaccccacggacaccgggcacggcaccguggugaugcaggucaagguguccaagggggcgcccugccgcaucccggugaucgucgccgacgaccugaccgccgccaucaacaagggcauccuggugaccgugaacccgaucgccagcacgaacgacgacgagguccucaucgaggugaacccccccuucggcgacuccuacaucaucguggggcggggcgacagccgccugaccuaccaguggcacaaggagggguccagcaucggcaagcuguucacccagaccaugaagggggucgagcggcuggcggugaugggcgacacggccugggacuucuccagcgccggcggguucuucaccuccgugggcaaggggauccacaccgucuucggcagcgccuuccaggggcucuucggcggccugaacuggaucaccaaggugaucaugggggccgugcugaucugggucggcaucaacacgcgcaacaugaccauguccaugagcaugauccucgugggggugaucaugauguuccugagccugggcgucggggcggaccagggcugcgccaucaacuucggcaaguga

SEQ ID NO: 210 - RNA, 2046 nt, Artificial Sequence
  derived and/or modified CDS sequence (opt1) from YFV__NC_002031.1__SSjev-prME (polyprotein: aa122-778)
augggcaagcgcagcgccggguccaucauguggcuggccagccucgcgguggucaucgccugcgccggcgccgugacccugguccgcaagaaccgguggcuccugcugaacgugaccagcgaggaccucggcaagacguucuccguggggaccggcaacugcaccaccaacauccuggaggccaaguacuggugccccgacagcauggaguacaacugcccgaaccuguccccgcgcgaggagcccgacgacaucgacugcuggugcuacggggucgagaacgugcggguggccuacggcaagugcgacagcgcggggcgcucccggcgcagccggcgcgccaucgaccuccccacgcacgagaaccacggccugaagacccggcaggagaaguggaugaccggccgcaugggggagcggcagcugcagaagaucgagcgcugguucguccggaaccccuucuucgccgugaccgcccucacgaucgccuaccuggugggcuccaacaugacccagcgcgucgugaucgcgcugcucgugcuggccgucgggcccgccuacagcgcccacugcaucggcaucaccgaccgggacuucaucgagggggugcacggcggcaccuggguguccgcgacgcuggagcaggacaagugcgucaccgugauggcccccgacaagcccagccucgacaucucccuggagaccguggccaucgaccgcccggccgagguccggaaggugugcuacaacgccgugcugacccacgucaagaucaacgacaagugccccagcacgggggaggcgcaccucgccgaggagaacgagggcgacaacgccugcaagcgcaccuacuccgaccggggguggggcaacggcugcgggcuguucggcaaggggagcaucguggccugcgccaaguucaccugcgcgaaguccaugagccuguucgagguggaccagaccaagauccaguacgucauccgcgcccagcuccacgugggcgccaagcaggagaacuggaacacggacaucaagacccugaaguucgacgcccuguccgggagccaggaggucgaguucaucggcuacggcaaggccacccucgagugccaggugcagaccgcgguggacuucgggaacuccuacaucgccgagauggagacggagagcuggaucgucgaccggcagugggcccaggaccugacccugcccuggcagagcggcuccgggggcguguggcgcgagaugcaccaccucguggaguucgagcccccgcacgccgccaccauccgcguccuggcgcuggggaaccaggagggcagccucaagaccgcccugacgggcgccaugcgggugaccaaggacaccaacgacaacaaccuguacaagcuccacgggggccacguguccugccgcgucaagcugagcgcccugacccucaaggggacguccuacaagaucugcaccgacaagauguucuucgugaagaaccccaccgacaccggccacgggacgguggucaugcaggugaaggugagcaagggcgcgcccugccggauccccgucaucguggccgacgaccugaccgccgccaucaacaagggcauccuggugaccgucaacccgaucgccuccaccaacgacgacgaggugcucaucgaggugaacccgcccuucggggacagcuacaucaucgucggccgcggggacucccggcugaccuaccaguggcacaaggagggcagcuccaucggcaagcuguucacgcagaccaugaaggggguggagcgccucgcggugaugggcgacaccgccugggacuucagcuccgccgggggcuucuucaccagcgucgggaagggcauccacacgguguucggcuccgccuuccaggggcuguucggcgggcugaacuggaucaccaaggugaucaugggcgccguccucaucuggguggggaucaacacccggaacaugaccaugagcauguccaugauccuggugggcgucaucaugauguuccugagccugggcgugggggcguga

SEQ ID NO: 211 - RNA, 2034 nt, Artificial Sequence
  derived and/or modified CDS sequence (opt1) from YFV__NC_002031.1__SSjev-prME (polyprotein: aa126-778)
augggcaagcgcagcgccggguccaucauguggcuggccagccucgcgguggucaucgccugcgccggcgcccgcaagaaccgguggcuccugcugaacgugaccagcgaggaccucggcaagacguucuccguggggaccggcaacugcaccaccaacauccuggaggccaaguacuggugccccgacagcauggaguacaacugcccgaaccuguccccgcgcgaggagcccgacgacaucgacugcuggugcuacggggucgagaacgugcggguggccuacggcaagugcgacagcgcggggcgcucccggcgcagccggcgcgccaucgaccuccccacgcacgagaaccacggccugaagacccggcaggagaaguggaugaccggccgcaugggggagcggcagcugcagaagaucgagcgcugguucguccggaaccccuucuucgccgugaccgcccucacgaucgccuaccuggugggcuccaacaugacccagcgcgucgugaucgcgcugcucgugcuggccgucgggcccgccuacagcgcccacugcaucggcaucaccgaccgggacuucaucgagggggugcacggcggcaccuggguguccgcgacgcuggagcaggacaagugcgucaccgugauggcccccgacaagcccagccucgacaucucccuggagaccguggccaucgaccgcccggccgagguccggaaggugugcuacaacgccgugcugacccacgucaagaucaacgacaagugccccagcacgggggaggcgcaccucgccgaggagaacgagggcgacaacgccugcaagcgcaccuacuccgaccggggguggggcaacggcugcgggcuguucggcaaggggagcaucguggccugcgccaaguucaccugcgcgaaguccaugagccuguucgagguggaccagaccaagauccaguacgucauccgcgcccagcuccacgugggcgccaagcaggagaacuggaacacggacaucaagacccugaaguucgacgcccuguccgggagccaggaggucgaguucaucggcuacggcaaggccacccucgagugccaggugcagaccgcgguggacuucgggaacuccuacaucgccgagauggagacggagagcuggaucgucgaccggcagugggcccaggaccugacccugcccuggcagagcggcuccgggggcguguggcgcgagaugcaccaccucguggaguucgagcccccgcacgccgccaccauccgcguccuggcgcuggggaaccaggagggcagccucaagaccgcccugacgggcgccaugcgggugaccaaggacaccaacgacaacaaccuguacaagcuccacgggggccacguguccugccgcgucaagcugagcgcccugacccucaaggggacguccuacaagaucugcaccgacaagauguucuucgugaagaaccccaccgacaccggccacgggacgguggucaugcaggugaaggugagcaagggcgcgcccugccggauccccgucaucguggccgacgaccugaccgccgccaucaacaagggcauccuggugaccgucaacccgaucgccuccaccaacgacgacgaggugcucaucgaggugaacccgcccuucggggacagcuacaucaucgucggccgcggggacucccggcugaccuaccaguggcacaaggagggcagcuccaucggcaagcuguucacgcagaccaugaaggggguggagcgccucgcggugaugggcgacaccgccugggacuucagcuccgccgggggcuucuucaccagcgucgggaagggcauccacacgguguucggcuccgccuuccaggggcuguucggcgggcugaacuggaucaccaaggugaucaugggcgccguccucaucuggguggggaucaacacccggaacaugaccaugagcauguccaugauccuggugggcgucaucaugauguuccugagccugggcgugggggcguga

SEQ ID NO: 212 - RNA, 2094 nt, Artificial Sequence
  derived and/or modified CDS sequence (opt1) from YFV__NC_002031.1__SSjev(V2)-prME-XX (polyprotein: aa122-788)
augggccggaagcagaacaagcgcgggggcaacgaggggagcaucauguggcuggccucccucgccguggucaucgcgugcgccggcgccgugacgcuggugcggaagaaccgcuggcuccugcugaacgucaccuccgaggaccucggcaagaccuucagcguggggaccggcaacugcacgaccaacauccuggaggccaaguacuggugccccgacuccauggaguacaacugcccgaaccugagcccccgggaggagcccgacgacaucgacugcuggugcuacggcguggagaacguccgcguggccuacgggaagugcgacuccgcgggccggagccgccggucccgccgggccaucgaccuccccacccacgagaaccacgggcugaagacccgccaggagaaguggaugacgggccggaugggggagcgccagcugcagaagaucgagcggugguucgugcgcaacccguucuucgccgucaccgcccucaccaucgccuaccuggugggcagcaacaugacccagcggguggucaucgcgcugcucgugcuggccgugggccccgccuacuccgcccacugcaucgggaucacggaccgcgacuucaucgagggcguccacgggggcaccugggugagcgcgacccuggagcaggacaagugcgugaccgucauggcccccgacaagcccucccucgacaucagccuggagacgguggccaucgaccggccggccgaggugcgcaaggucugcuacaacgccgugcugacccacgugaagaucaacgacaagugccccuccaccggcgaggcgcaccucgccgaggagaacgagggggacaacgccugcaagcggaccuacagcgaccggggcugggggaacggcugcgggcuguucggcaagggcuccaucgucgccugcgccaaguucacgugcgcgaagagcaugucccuguucgagguggaccagaccaagauccaguacgucauccgcgcccagcuccacgugggggccaagcaggagaacuggaacaccgacaucaagacccugaaguucgacgcccugagcggcagccaggagguggaguucaucggguacggcaaggccacgcucgagugccagguccagaccgcgguggacuucgggaacuccuacaucgccgagauggagaccgagagcuggaucguggaccggcagugggcccaggaccugacccugcccuggcaguccggcagcggcggggucuggcgcgagaugcaccaccucguggaguucgagcccccgcacgccgccacgauccgggugcuggcgcugggcaaccaggaggggucccucaagaccgcccugaccggcgccaugcgcgucaccaaggacacgaacgacaacaaccuguacaagcuccacgggggccacgugagcugccgggugaagcuguccgcccugacccucaagggcaccagcuacaagaucugcaccgacaagauguucuucgucaagaaccccacggacaccgggcacggcaccguggugaugcaggucaagguguccaagggggcgcccugccgcaucccggugaucgucgccgacgaccugaccgccgccaucaacaagggcauccuggugaccgugaacccgaucgccagcacgaacgacgacgagguccucaucgaggugaacccccccuucggcgacuccuacaucaucguggggcggggcgacagccgccugaccuaccaguggcacaaggagggguccagcaucggcaagcuguucacccagaccaugaagggggucgagcggcuggcggugaugggcgacacggccugggacuucuccagcgccggcggguucuucaccuccgugggcaaggggauccacaccgucuucggcagcgccuuccaggggcucuucggcggccugaacuggaucaccaaggugaucaugggggccgugcugaucugggucggcaucaacacgcgcaacaugaccauguccaugagcaugauccucgugggggugaucaugauguuccugagccugggcgucggggcggaccagggcugcgccaucaacuucggcaaguga

SEQ ID NO: 213 - RNA, 2082 nt, Artificial Sequence
  derived and/or modified CDS sequence (opt1) from YFV__NC_002031.1__SSjev(V2)-prME-XX (polyprotein: aa126-788)
augggccggaagcagaacaagcgcgggggcaacgaggggagcaucauguggcuggccucccucgccguggucaucgcgugcgccggcgcccggaagaaccgcuggcuccugcugaacgucaccuccgaggaccucggcaagaccuucagcguggggaccggcaacugcacgaccaacauccuggaggccaaguacuggugccccgacuccauggaguacaacugcccgaaccugagcccccgggaggagcccgacgacaucgacugcuggugcuacggcguggagaacguccgcguggccuacgggaagugcgacuccgcgggccggagccgccggucccgccgggccaucgaccuccccacccacgagaaccacgggcugaagacccgccaggagaaguggaugacgggccggaugggggagcgccagcugcagaagaucgagcggugguucgugcgcaacccguucuucgccgucaccgcccucaccaucgccuaccuggugggcagcaacaugacccagcggguggucaucgcgcugcucgugcuggccgugggccccgccuacuccgcccacugcaucgggaucacggaccgcgacuucaucgagggcguccacgggggcaccugggugagcgcgacccuggagcaggacaagugcgugaccgucauggcccccgacaagcccucccucgacaucagccuggagacgguggccaucgaccggccggccgaggugcgcaaggucugcuacaacgccgugcugacccacgugaagaucaacgacaagugccccuccaccggcgaggcgcaccucgccgaggagaacgagggggacaacgccugcaagcggaccuacagcgaccggggcugggggaacggcugcgggcuguucggcaagggcuccaucgucgccugcgccaaguucacgugcgcgaagagcaugucccuguucgagguggaccagaccaagauccaguacgucauccgcgcccagcuccacgugggggccaagcaggagaacuggaacaccgacaucaagacccugaaguucgacgcccugagcggcagccaggagguggaguucaucggguacggcaaggccacgcucgagugccagguccagaccgcgguggacuucgggaacuccuacaucgccgagauggagaccgagagcuggaucguggaccggcagugggcccaggaccugacccugcccuggcaguccggcagcggcggggucuggcgcgagaugcaccaccucguggaguucgagcccccgcacgccgccacgauccgggugcuggcgcugggcaaccaggaggggucccucaagaccgcccugaccggcgccaugcgcgucaccaaggacacgaacgacaacaaccuguacaagcuccacgggggccacgugagcugccgggugaagcuguccgcccugacccucaagggcaccagcuacaagaucugcaccgacaagauguucuucgucaagaaccccacggacaccgggcacggcaccguggugaugcaggucaagguguccaagggggcgcccugccgcaucccggugaucgucgccgacgaccugaccgccgccaucaacaagggcauccuggugaccgugaacccgaucgccagcacgaacgacgacgagguccucaucgaggugaacccccccuucggcgacuccuacaucaucguggggcggggcgacagccgccugaccuaccaguggcacaaggagggguccagcaucggcaagcuguucacccagaccaugaagggggucgagcggcuggcggugaugggcgacacggccugggacuucuccagcgccggcggguucuucaccuccgugggcaaggggauccacaccgucuucggcagcgccuuccaggggcucuucggcggccugaacuggaucaccaaggugaucaugggggccgugcugaucugggucggcaucaacacgcgcaacaugaccauguccaugagcaugauccucgugggggugaucaugauguuccugagccugggcgucggggcggaccagggcugcgccaucaacuucggcaaguga

SEQ ID NO: 214 - RNA, 2064 nt, Artificial Sequence
  derived and/or modified CDS sequence (opt1) from YFV__NC_002031.1__SSjev(V2)-prME (polyprotein: aa122-778)
augggccggaagcagaacaagcgcgggggcaacgaggggagcaucauguggcuggccucccucgccguggucaucgcgugcgccggcgccgugacccugguccgcaagaaccgguggcuccugcugaacgugaccagcgaggaccucggcaagacguucuccguggggaccggcaacugcaccaccaacauccuggaggccaaguacuggugccccgacagcauggaguacaacugcccgaaccuguccccgcgcgaggagcccgacgacaucgacugcuggugcuacggggucgagaacgugcggguggccuacggcaagugcgacagcgcggggcgcucccggcgcagccggcgcgccaucgaccuccccacgcacgagaaccacggccugaagacccggcaggagaaguggaugaccggccgcaugggggagcggcagcugcagaagaucgagcgcugguucguccggaaccccuucuucgccgugaccgcccucacgaucgccuaccuggugggcuccaacaugacccagcgcgucgugaucgcgcugcucgugcuggccgucgggcccgccuacagcgcccacugcaucggcaucaccgaccgggacuucaucgagggggugcacggcggcaccuggguguccgcgacgcuggagcaggacaagugcgucaccgugauggcccccgacaagcccagccucgacaucucccuggagaccguggccaucgaccgcccggccgagguccggaaggugugcuacaacgccgugcugacccacgucaagaucaacgacaagugccccagcacgggggaggcgcaccucgccgaggagaacgagggcgacaacgccugcaagcgcaccuacuccgaccggggguggggcaacggcugcgggcuguucggcaaggggagcaucguggccugcgccaaguucaccugcgcgaaguccaugagccuguucgagguggaccagaccaagauccaguacgucauccgcgcccagcuccacgugggcgccaagcaggagaacuggaacacggacaucaagacccugaaguucgacgcccuguccgggagccaggaggucgaguucaucggcuacggcaaggccacccucgagugccaggugcagaccgcgguggacuucgggaacuccuacaucgccgagauggagacggagagcuggaucgucgaccggcagugggcccaggaccugacccugcccuggcagagcggcuccgggggcguguggcgcgagaugcaccaccucguggaguucgagcccccgcacgccgccaccauccgcguccuggcgcuggggaaccaggagggcagccucaagaccgcccugacgggcgccaugcgggugaccaaggacaccaacgacaacaaccuguacaagcuccacgggggccacguguccugccgcgucaagcugagcgcccugacccucaaggggacguccuacaagaucugcaccgacaagauguucuucgugaagaaccccaccgacaccggccacgggacgguggucaugcaggugaaggugagcaagggcgcgcccugccggauccccgucaucguggccgacgaccugaccgccgccaucaacaagggcauccuggugaccgucaacccgaucgccuccaccaacgacgacgaggugcucaucgaggugaacccgcccuucggggacagcuacaucaucgucggccgcggggacucccggcugaccuaccaguggcacaaggagggcagcuccaucggcaagcuguucacgcagaccaugaaggggguggagcgccucgcggugaugggcgacaccgccugggacuucagcuccgccgggggcuucuucaccagcgucgggaagggcauccacacgguguucggcuccgccuuccaggggcuguucggcgggcugaacuggaucaccaaggugaucaugggcgccguccucaucuggguggggaucaacacccggaacaugaccaugagcauguccaugauccuggugggcgucaucaugauguuccugagccugggcgugggggcguga

SEQ ID NO: 215 - RNA, 2052 nt, Artificial Sequence
  derived and/or modified CDS sequence (opt1) from YFV__NC_002031.1__SSjev(V2)-prME (polyprotein: aa126-778)
augggccggaagcagaacaagcgcgggggcaacgaggggagcaucauguggcuggccucccucgccguggucaucgcgugcgccggcgcccgcaagaaccgguggcuccugcugaacgugaccagcgaggaccucggcaagacguucuccguggggaccggcaacugcaccaccaacauccuggaggccaaguacuggugccccgacagcauggaguacaacugcccgaaccuguccccgcgcgaggagcccgacgacaucgacugcuggugcuacggggucgagaacgugcggguggccuacggcaagugcgacagcgcggggcgcucccggcgcagccggcgcgccaucgaccuccccacgcacgagaaccacggccugaagacccggcaggagaaguggaugaccggccgcaugggggagcggcagcugcagaagaucgagcgcugguucguccggaaccccuucuucgccgugaccgcccucacgaucgccuaccuggugggcuccaacaugacccagcgcgucgugaucgcgcugcucgugcuggccgucgggcccgccuacagcgcccacugcaucggcaucaccgaccgggacuucaucgagggggugcacggcggcaccuggguguccgcgacgcuggagcaggacaagugcgucaccgugauggcccccgacaagcccagccucgacaucucccuggagaccguggccaucgaccgcccggccgagguccggaaggugugcuacaacgccgugcugacccacgucaagaucaacgacaagugccccagcacgggggaggcgcaccucgccgaggagaacgagggcgacaacgccugcaagcgcaccuacuccgaccggggguggggcaacggcugcgggcuguucggcaaggggagcaucguggccugcgccaaguucaccugcgcgaaguccaugagccuguucgagguggaccagaccaagauccaguacgucauccgcgcccagcuccacgugggcgccaagcaggagaacuggaacacggacaucaagacccugaaguucgacgcccuguccgggagccaggaggucgaguucaucggcuacggcaaggccacccucgagugccaggugcagaccgcgguggacuucgggaacuccuacaucgccgagauggagacggagagcuggaucgucgaccggcagugggcccaggaccugacccugcccuggcagagcggcuccgggggcguguggcgcgagaugcaccaccucguggaguucgagcccccgcacgccgccaccauccgcguccuggcgcuggggaaccaggagggcagccucaagaccgcccugacgggcgccaugcgggugaccaaggacaccaacgacaacaaccuguacaagcuccacgggggccacguguccugccgcgucaagcugagcgcccugacccucaaggggacguccuacaagaucugcaccgacaagauguucuucgugaagaaccccaccgacaccggccacgggacgguggucaugcaggugaaggugagcaagggcgcgcccugccggauccccgucaucguggccgacgaccugaccgccgccaucaacaagggcauccuggugaccgucaacccgaucgccuccaccaacgacgacgaggugcucaucgaggugaacccgcccuucggggacagcuacaucaucgucggccgcggggacucccggcugaccuaccaguggcacaaggagggcagcuccaucggcaagcuguucacgcagaccaugaaggggguggagcgccucgcggugaugggcgacaccgccugggacuucagcuccgccgggggcuucuucaccagcgucgggaagggcauccacacgguguucggcuccgccuuccaggggcuguucggcgggcugaacuggaucaccaaggugaucaugggcgccguccucaucuggguggggaucaacacccggaacaugaccaugagcauguccaugauccuggugggcgucaucaugauguuccugagccugggcgugggggcguga

SEQ ID NO: 216 - RNA, 2067 nt, Artificial Sequence
  derived and/or modified CDS sequence (opt1) from YFV__NC_002031.1__SSjev(V3)-prME-XX (polyprotein: aa122-788)
augaacgagggcagcaucauguggcuggccucccucgccguggucaucgcgugcgccggggccgugacgcuggugcggaagaaccgcuggcuccugcugaacgucaccuccgaggaccucggcaagaccuucagcguggggaccggcaacugcacgaccaacauccuggaggccaaguacuggugccccgacuccauggaguacaacugcccgaaccugagcccccgggaggagcccgacgacaucgacugcuggugcuacggcguggagaacguccgcguggccuacgggaagugcgacuccgcgggccggagccgccggucccgccgggccaucgaccuccccacccacgagaaccacgggcugaagacccgccaggagaaguggaugacgggccggaugggggagcgccagcugcagaagaucgagcggugguucgugcgcaacccguucuucgccgucaccgcccucaccaucgccuaccuggugggcagcaacaugacccagcggguggucaucgcgcugcucgugcuggccgugggccccgccuacuccgcccacugcaucgggaucacggaccgcgacuucaucgagggcguccacgggggcaccugggugagcgcgacccuggagcaggacaagugcgugaccgucauggcccccgacaagcccucccucgacaucagccuggagacgguggccaucgaccggccggccgaggugcgcaaggucugcuacaacgccgugcugacccacgugaagaucaacgacaagugccccuccaccggcgaggcgcaccucgccgaggagaacgagggggacaacgccugcaagcggaccuacagcgaccggggcugggggaacggcugcgggcuguucggcaagggcuccaucgucgccugcgccaaguucacgugcgcgaagagcaugucccuguucgagguggaccagaccaagauccaguacgucauccgcgcccagcuccacgugggggccaagcaggagaacuggaacaccgacaucaagacccugaaguucgacgcccugagcggcagccaggagguggaguucaucggguacggcaaggccacgcucgagugccagguccagaccgcgguggacuucgggaacuccuacaucgccgagauggagaccgagagcuggaucguggaccggcagugggcccaggaccugacccugcccuggcaguccggcagcggcggggucuggcgcgagaugcaccaccucguggaguucgagcccccgcacgccgccacgauccgggugcuggcgcugggcaaccaggaggggucccucaagaccgcccugaccggcgccaugcgcgucaccaaggacacgaacgacaacaaccuguacaagcuccacgggggccacgugagcugccgggugaagcuguccgcccugacccucaagggcaccagcuacaagaucugcaccgacaagauguucuucgucaagaaccccacggacaccgggcacggcaccguggugaugcaggucaagguguccaagggggcgcccugccgcaucccggugaucgucgccgacgaccugaccgccgccaucaacaagggcauccuggugaccgugaacccgaucgccagcacgaacgacgacgagguccucaucgaggugaacccccccuucggcgacuccuacaucaucguggggcggggcgacagccgccugaccuaccaguggcacaaggagggguccagcaucggcaagcuguucacccagaccaugaagggggucgagcggcuggcggugaugggcgacacggccugggacuucuccagcgccggcggguucuucaccuccgugggcaaggggauccacaccgucuucggcagcgccuuccaggggcucuucggcggccugaacuggaucaccaaggugaucaugggggccgugcugaucugggucggcaucaacacgcgcaacaugaccauguccaugagcaugauccucgugggggugaucaugauguuccugagccugggcgucggggcggaccagggcugcgccaucaacuucggcaaguga

SEQ ID NO: 217 - RNA, 2055 nt, Artificial Sequence
  derived and/or modified CDS sequence (opt1) from YFV__NC_002031.1__SSjev(V3)-prME-XX (polyprotein: aa126-788)
augaacgagggcagcaucauguggcuggccucccucgccguggucaucgcgugcgccggggcccggaagaaccgcuggcuccugcugaacgucaccuccgaggaccucggcaagaccuucagcguggggaccggcaacugcacgaccaacauccuggaggccaaguacuggugccccgacuccauggaguacaacugcccgaaccugagcccccgggaggagcccgacgacaucgacugcuggugcuacggcguggagaacguccgcguggccuacgggaagugcgacuccgcgggccggagccgccggucccgccgggccaucgaccuccccacccacgagaaccacgggcugaagacccgccaggagaaguggaugacgggccggaugggggagcgccagcugcagaagaucgagcggugguucgugcgcaacccguucuucgccgucaccgcccucaccaucgccuaccuggugggcagcaacaugacccagcggguggucaucgcgcugcucgugcuggccgugggccccgccuacuccgcccacugcaucgggaucacggaccgcgacuucaucgagggcguccacgggggcaccugggugagcgcgacccuggagcaggacaagugcgugaccgucauggcccccgacaagcccucccucgacaucagccuggagacgguggccaucgaccggccggccgaggugcgcaaggucugcuacaacgccgugcugacccacgugaagaucaacgacaagugccccuccaccggcgaggcgcaccucgccgaggagaacgagggggacaacgccugcaagcggaccuacagcgaccggggcugggggaacggcugcgggcuguucggcaagggcuccaucgucgccugcgccaaguucacgugcgcgaagagcaugucccuguucgagguggaccagaccaagauccaguacgucauccgcgcccagcuccacgugggggccaagcaggagaacuggaacaccgacaucaagacccugaaguucgacgcccugagcggcagccaggagguggaguucaucggguacggcaaggccacgcucgagugccagguccagaccgcgguggacuucgggaacuccuacaucgccgagauggagaccgagagcuggaucguggaccggcagugggcccaggaccugacccugcccuggcaguccggcagcggcggggucuggcgcgagaugcaccaccucguggaguucgagcccccgcacgccgccacgauccgggugcuggcgcugggcaaccaggaggggucccucaagaccgcccugaccggcgccaugcgcgucaccaaggacacgaacgacaacaaccuguacaagcuccacgggggccacgugagcugccgggugaagcuguccgcccugacccucaagggcaccagcuacaagaucugcaccgacaagauguucuucgucaagaaccccacggacaccgggcacggcaccguggugaugcaggucaagguguccaagggggcgcccugccgcaucccggugaucgucgccgacgaccugaccgccgccaucaacaagggcauccuggugaccgugaacccgaucgccagcacgaacgacgacgagguccucaucgaggugaacccccccuucggcgacuccuacaucaucguggggcggggcgacagccgccugaccuaccaguggcacaaggagggguccagcaucggcaagcuguucacccagaccaugaagggggucgagcggcuggcggugaugggcgacacggccugggacuucuccagcgccggcggguucuucaccuccgugggcaaggggauccacaccgucuucggcagcgccuuccaggggcucuucggcggccugaacuggaucaccaaggugaucaugggggccgugcugaucugggucggcaucaacacgcgcaacaugaccauguccaugagcaugauccucgugggggugaucaugauguuccugagccugggcgucggggcggaccagggcugcgccaucaacuucggcaaguga

SEQ ID NO: 218 - RNA, 2037 nt, Artificial Sequence
  derived and/or modified CDS sequence (opt1) from YFV__NC_002031.1__SSjev(V3)-prME (polyprotein: aa122-778)
augaacgagggcagcaucauguggcuggccucccucgccguggucaucgcgugcgccggggccgugacccugguccgcaagaaccgguggcuccugcugaacgugaccagcgaggaccucggcaagacguucuccguggggaccggcaacugcaccaccaacauccuggaggccaaguacuggugccccgacagcauggaguacaacugcccgaaccuguccccgcgcgaggagcccgacgacaucgacugcuggugcuacggggucgagaacgugcggguggccuacggcaagugcgacagcgcggggcgcucccggcgcagccggcgcgccaucgaccuccccacgcacgagaaccacggccugaagacccggcaggagaaguggaugaccggccgcaugggggagcggcagcugcagaagaucgagcgcugguucguccggaaccccuucuucgccgugaccgcccucacgaucgccuaccuggugggcuccaacaugacccagcgcgucgugaucgcgcugcucgugcuggccgucgggcccgccuacagcgcccacugcaucggcaucaccgaccgggacuucaucgagggggugcacggcggcaccuggguguccgcgacgcuggagcaggacaagugcgucaccgugauggcccccgacaagcccagccucgacaucucccuggagaccguggccaucgaccgcccggccgagguccggaaggugugcuacaacgccgugcugacccacgucaagaucaacgacaagugccccagcacgggggaggcgcaccucgccgaggagaacgagggcgacaacgccugcaagcgcaccuacuccgaccggggguggggcaacggcugcgggcuguucggcaaggggagcaucguggccugcgccaaguucaccugcgcgaaguccaugagccuguucgagguggaccagaccaagauccaguacgucauccgcgcccagcuccacgugggcgccaagcaggagaacuggaacacggacaucaagacccugaaguucgacgcccuguccgggagccaggaggucgaguucaucggcuacggcaaggccacccucgagugccaggugcagaccgcgguggacuucgggaacuccuacaucgccgagauggagacggagagcuggaucgucgaccggcagugggcccaggaccugacccugcccuggcagagcggcuccgggggcguguggcgcgagaugcaccaccucguggaguucgagcccccgcacgccgccaccauccgcguccuggcgcuggggaaccaggagggcagccucaagaccgcccugacgggcgccaugcgggugaccaaggacaccaacgacaacaaccuguacaagcuccacgggggccacguguccugccgcgucaagcugagcgcccugacccucaaggggacguccuacaagaucugcaccgacaagauguucuucgugaagaaccccaccgacaccggccacgggacgguggucaugcaggugaaggugagcaagggcgcgcccugccggauccccgucaucguggccgacgaccugaccgccgccaucaacaagggcauccuggugaccgucaacccgaucgccuccaccaacgacgacgaggugcucaucgaggugaacccgcccuucggggacagcuacaucaucgucggccgcggggacucccggcugaccuaccaguggcacaaggagggcagcuccaucggcaagcuguucacgcagaccaugaaggggguggagcgccucgcggugaugggcgacaccgccugggacuucagcuccgccgggggcuucuucaccagcgucgggaagggcauccacacgguguucggcuccgccuuccaggggcuguucggcgggcugaacuggaucaccaaggugaucaugggcgccguccucaucuggguggggaucaacacccggaacaugaccaugagcauguccaugauccuggugggcgucaucaugauguuccugagccugggcgugggggcguga

SEQ ID NO: 219 - RNA, 2025 nt, Artificial Sequence
  derived and/or modified CDS sequence (opt1) from YFV__NC_002031.1__SSjev(V3)-prME (polyprotein: aa126-778)
augaacgagggcagcaucauguggcuggccucccucgccguggucaucgcgugcgccggggcccgcaagaaccgguggcuccugcugaacgugaccagcgaggaccucggcaagacguucuccguggggaccggcaacugcaccaccaacauccuggaggccaaguacuggugccccgacagcauggaguacaacugcccgaaccuguccccgcgcgaggagcccgacgacaucgacugcuggugcuacggggucgagaacgugcggguggccuacggcaagugcgacagcgcggggcgcucccggcgcagccggcgcgccaucgaccuccccacgcacgagaaccacggccugaagacccggcaggagaaguggaugaccggccgcaugggggagcggcagcugcagaagaucgagcgcugguucguccggaaccccuucuucgccgugaccgcccucacgaucgccuaccuggugggcuccaacaugacccagcgcgucgugaucgcgcugcucgugcuggccgucgggcccgccuacagcgcccacugcaucggcaucaccgaccgggacuucaucgagggggugcacggcggcaccuggguguccgcgacgcuggagcaggacaagugcgucaccgugauggcccccgacaagcccagccucgacaucucccuggagaccguggccaucgaccgcccggccgagguccggaaggugugcuacaacgccgugcugacccacgucaagaucaacgacaagugccccagcacgggggaggcgcaccucgccgaggagaacgagggcgacaacgccugcaagcgcaccuacuccgaccggggguggggcaacggcugcgggcuguucggcaaggggagcaucguggccugcgccaaguucaccugcgcgaaguccaugagccuguucgagguggaccagaccaagauccaguacgucauccgcgcccagcuccacgugggcgccaagcaggagaacuggaacacggacaucaagacccugaaguucgacgcccuguccgggagccaggaggucgaguucaucggcuacggcaaggccacccucgagugccaggugcagaccgcgguggacuucgggaacuccuacaucgccgagauggagacggagagcuggaucgucgaccggcagugggcccaggaccugacccugcccuggcagagcggcuccgggggcguguggcgcgagaugcaccaccucguggaguucgagcccccgcacgccgccaccauccgcguccuggcgcuggggaaccaggagggcagccucaagaccgcccugacgggcgccaugcgggugaccaaggacaccaacgacaacaaccuguacaagcuccacgggggccacguguccugccgcgucaagcugagcgcccugacccucaaggggacguccuacaagaucugcaccgacaagauguucuucgugaagaaccccaccgacaccggccacgggacgguggucaugcaggugaaggugagcaagggcgcgcccugccggauccccgucaucguggccgacgaccugaccgccgccaucaacaagggcauccuggugaccgucaacccgaucgccuccaccaacgacgacgaggugcucaucgaggugaacccgcccuucggggacagcuacaucaucgucggccgcggggacucccggcugaccuaccaguggcacaaggagggcagcuccaucggcaagcuguucacgcagaccaugaaggggguggagcgccucgcggugaugggcgacaccgccugggacuucagcuccgccgggggcuucuucaccagcgucgggaagggcauccacacgguguucggcuccgccuuccaggggcuguucggcgggcugaacuggaucaccaaggugaucaugggcgccguccucaucuggguggggaucaacacccggaacaugaccaugagcauguccaugauccuggugggcgucaucaugauguuccugagccugggcgugggggcguga

SEQ ID NO: 220 - RNA, 2076 nt, Artificial Sequence
  derived and/or modified CDS sequence (opt1) from YFV__NC_002031.1__SSjev(V4)-prME-XX (polyprotein: aa122-788)
augcugggcagcaacuccgggcagcgcguggucuucaccauccuccugcugcucguggcccccgccuacagcgugacgcuggugcggaagaaccgcuggcuccugcugaacgucaccuccgaggaccucggcaagaccuucagcguggggaccggcaacugcacgaccaacauccuggaggccaaguacuggugccccgacuccauggaguacaacugcccgaaccugagcccccgggaggagcccgacgacaucgacugcuggugcuacggcguggagaacguccgcguggccuacgggaagugcgacuccgcgggccggagccgccggucccgccgggccaucgaccuccccacccacgagaaccacgggcugaagacccgccaggagaaguggaugacgggccggaugggggagcgccagcugcagaagaucgagcggugguucgugcgcaacccguucuucgccgucaccgcccucaccaucgccuaccuggugggcagcaacaugacccagcggguggucaucgcgcugcucgugcuggccgugggccccgccuacuccgcccacugcaucgggaucacggaccgcgacuucaucgagggcguccacgggggcaccugggugagcgcgacccuggagcaggacaagugcgugaccgucauggcccccgacaagcccucccucgacaucagccuggagacgguggccaucgaccggccggccgaggugcgcaaggucugcuacaacgccgugcugacccacgugaagaucaacgacaagugccccuccaccggcgaggcgcaccucgccgaggagaacgagggggacaacgccugcaagcggaccuacagcgaccggggcugggggaacggcugcgggcuguucggcaagggcuccaucgucgccugcgccaaguucacgugcgcgaagagcaugucccuguucgagguggaccagaccaagauccaguacgucauccgcgcccagcuccacgugggggccaagcaggagaacuggaacaccgacaucaagacccugaaguucgacgcccugagcggcagccaggagguggaguucaucggguacggcaaggccacgcucgagugccagguccagaccgcgguggacuucgggaacuccuacaucgccgagauggagaccgagagcuggaucguggaccggcagugggcccaggaccugacccugcccuggcaguccggcagcggcggggucuggcgcgagaugcaccaccucguggaguucgagcccccgcacgccgccacgauccgggugcuggcgcugggcaaccaggaggggucccucaagaccgcccugaccggcgccaugcgcgucaccaaggacacgaacgacaacaaccuguacaagcuccacgggggccacgugagcugccgggugaagcuguccgcccugacccucaagggcaccagcuacaagaucugcaccgacaagauguucuucgucaagaaccccacggacaccgggcacggcaccguggugaugcaggucaagguguccaagggggcgcccugccgcaucccggugaucgucgccgacgaccugaccgccgccaucaacaagggcauccuggugaccgugaacccgaucgccagcacgaacgacgacgagguccucaucgaggugaacccccccuucggcgacuccuacaucaucguggggcggggcgacagccgccugaccuaccaguggcacaaggagggguccagcaucggcaagcuguucacccagaccaugaagggggucgagcggcuggcggugaugggcgacacggccugggacuucuccagcgccggcggguucuucaccuccgugggcaaggggauccacaccgucuucggcagcgccuuccaggggcucuucggcggccugaacuggaucaccaaggugaucaugggggccgugcugaucugggucggcaucaacacgcgcaacaugaccauguccaugagcaugauccucgugggggugaucaugauguuccugagccugggcgucggggcggaccagggcugcgccaucaacuucggcaaguga

SEQ ID NO: 221 - RNA, 2064 nt, Artificial Sequence
  derived and/or modified CDS sequence (opt1) from YFV__NC_002031.1__SSjev(V4)-prME-XX (polyprotein: aa126-788)
augcugggcagcaacuccgggcagcgcguggucuucaccauccuccugcugcucguggcccccgccuacagccggaagaaccgcuggcuccugcugaacgucaccuccgaggaccucggcaagaccuucagcguggggaccggcaacugcacgaccaacauccuggaggccaaguacuggugccccgacuccauggaguacaacugcccgaaccugagcccccgggaggagcccgacgacaucgacugcuggugcuacggcguggagaacguccgcguggccuacgggaagugcgacuccgcgggccggagccgccggucccgccgggccaucgaccuccccacccacgagaaccacgggcugaagacccgccaggagaaguggaugacgggccggaugggggagcgccagcugcagaagaucgagcggugguucgugcgcaacccguucuucgccgucaccgcccucaccaucgccuaccuggugggcagcaacaugacccagcggguggucaucgcgcugcucgugcuggccgugggccccgccuacuccgcccacugcaucgggaucacggaccgcgacuucaucgagggcguccacgggggcaccugggugagcgcgacccuggagcaggacaagugcgugaccgucauggcccccgacaagcccucccucgacaucagccuggagacgguggccaucgaccggccggccgaggugcgcaaggucugcuacaacgccgugcugacccacgugaagaucaacgacaagugccccuccaccggcgaggcgcaccucgccgaggagaacgagggggacaacgccugcaagcggaccuacagcgaccggggcugggggaacggcugcgggcuguucggcaagggcuccaucgucgccugcgccaaguucacgugcgcgaagagcaugucccuguucgagguggaccagaccaagauccaguacgucauccgcgcccagcuccacgugggggccaagcaggagaacuggaacaccgacaucaagacccugaaguucgacgcccugagcggcagccaggagguggaguucaucggguacggcaaggccacgcucgagugccagguccagaccgcgguggacuucgggaacuccuacaucgccgagauggagaccgagagcuggaucguggaccggcagugggcccaggaccugacccugcccuggcaguccggcagcggcggggucuggcgcgagaugcaccaccucguggaguucgagcccccgcacgccgccacgauccgggugcuggcgcugggcaaccaggaggggucccucaagaccgcccugaccggcgccaugcgcgucaccaaggacacgaacgacaacaaccuguacaagcuccacgggggccacgugagcugccgggugaagcuguccgcccugacccucaagggcaccagcuacaagaucugcaccgacaagauguucuucgucaagaaccccacggacaccgggcacggcaccguggugaugcaggucaagguguccaagggggcgcccugccgcaucccggugaucgucgccgacgaccugaccgccgccaucaacaagggcauccuggugaccgugaacccgaucgccagcacgaacgacgacgagguccucaucgaggugaacccccccuucggcgacuccuacaucaucguggggcggggcgacagccgccugaccuaccaguggcacaaggagggguccagcaucggcaagcuguucacccagaccaugaagggggucgagcggcuggcggugaugggcgacacggccugggacuucuccagcgccggcggguucuucaccuccgugggcaaggggauccacaccgucuucggcagcgccuuccaggggcucuucggcggccugaacuggaucaccaaggugaucaugggggccgugcugaucugggucggcaucaacacgcgcaacaugaccauguccaugagcaugauccucgugggggugaucaugauguuccugagccugggcgucggggcggaccagggcugcgccaucaacuucggcaaguga

SEQ ID NO: 222 - RNA, 2046 nt, Artificial Sequence
  derived and/or modified CDS sequence (opt1) from YFV__NC_002031.1__SSjev(V4)-prME (polyprotein: aa122-778)
augcugggcagcaacuccgggcagcgcguggucuucaccauccuccugcugcucguggcccccgccuacagcgugacccugguccgcaagaaccgguggcuccugcugaacgugaccagcgaggaccucggcaagacguucuccguggggaccggcaacugcaccaccaacauccuggaggccaaguacuggugccccgacagcauggaguacaacugcccgaaccuguccccgcgcgaggagcccgacgacaucgacugcuggugcuacggggucgagaacgugcggguggccuacggcaagugcgacagcgcggggcgcucccggcgcagccggcgcgccaucgaccuccccacgcacgagaaccacggccugaagacccggcaggagaaguggaugaccggccgcaugggggagcggcagcugcagaagaucgagcgcugguucguccggaaccccuucuucgccgugaccgcccucacgaucgccuaccuggugggcuccaacaugacccagcgcgucgugaucgcgcugcucgugcuggccgucgggcccgccuacagcgcccacugcaucggcaucaccgaccgggacuucaucgagggggugcacggcggcaccuggguguccgcgacgcuggagcaggacaagugcgucaccgugauggcccccgacaagcccagccucgacaucucccuggagaccguggccaucgaccgcccggccgagguccggaaggugugcuacaacgccgugcugacccacgucaagaucaacgacaagugccccagcacgggggaggcgcaccucgccgaggagaacgagggcgacaacgccugcaagcgcaccuacuccgaccggggguggggcaacggcugcgggcuguucggcaaggggagcaucguggccugcgccaaguucaccugcgcgaaguccaugagccuguucgagguggaccagaccaagauccaguacgucauccgcgcccagcuccacgugggcgccaagcaggagaacuggaacacggacaucaagacccugaaguucgacgcccuguccgggagccaggaggucgaguucaucggcuacggcaaggccacccucgagugccaggugcagaccgcgguggacuucgggaacuccuacaucgccgagauggagacggagagcuggaucgucgaccggcagugggcccaggaccugacccugcccuggcagagcggcuccgggggcguguggcgcgagaugcaccaccucguggaguucgagcccccgcacgccgccaccauccgcguccuggcgcuggggaaccaggagggcagccucaagaccgcccugacgggcgccaugcgggugaccaaggacaccaacgacaacaaccuguacaagcuccacgggggccacguguccugccgcgucaagcugagcgcccugacccucaaggggacguccuacaagaucugcaccgacaagauguucuucgugaagaaccccaccgacaccggccacgggacgguggucaugcaggugaaggugagcaagggcgcgcccugccggauccccgucaucguggccgacgaccugaccgccgccaucaacaagggcauccuggugaccgucaacccgaucgccuccaccaacgacgacgaggugcucaucgaggugaacccgcccuucggggacagcuacaucaucgucggccgcggggacucccggcugaccuaccaguggcacaaggagggcagcuccaucggcaagcuguucacgcagaccaugaaggggguggagcgccucgcggugaugggcgacaccgccugggacuucagcuccgccgggggcuucuucaccagcgucgggaagggcauccacacgguguucggcuccgccuuccaggggcuguucggcgggcugaacuggaucaccaaggugaucaugggcgccguccucaucuggguggggaucaacacccggaacaugaccaugagcauguccaugauccuggugggcgucaucaugauguuccugagccugggcgugggggcguga

SEQ ID NO: 223 - RNA, 2034 nt, Artificial Sequence
  derived and/or modified CDS sequence (opt1) from YFV__NC_002031.1__SSjev(V4)-prME (polyprotein: aa126-778)
augcugggcagcaacuccgggcagcgcguggucuucaccauccuccugcugcucguggcccccgccuacagccgcaagaaccgguggcuccugcugaacgugaccagcgaggaccucggcaagacguucuccguggggaccggcaacugcaccaccaacauccuggaggccaaguacuggugccccgacagcauggaguacaacugcccgaaccuguccccgcgcgaggagcccgacgacaucgacugcuggugcuacggggucgagaacgugcggguggccuacggcaagugcgacagcgcggggcgcucccggcgcagccggcgcgccaucgaccuccccacgcacgagaaccacggccugaagacccggcaggagaaguggaugaccggccgcaugggggagcggcagcugcagaagaucgagcgcugguucguccggaaccccuucuucgccgugaccgcccucacgaucgccuaccuggugggcuccaacaugacccagcgcgucgugaucgcgcugcucgugcuggccgucgggcccgccuacagcgcccacugcaucggcaucaccgaccgggacuucaucgagggggugcacggcggcaccuggguguccgcgacgcuggagcaggacaagugcgucaccgugauggcccccgacaagcccagccucgacaucucccuggagaccguggccaucgaccgcccggccgagguccggaaggugugcuacaacgccgugcugacccacgucaagaucaacgacaagugccccagcacgggggaggcgcaccucgccgaggagaacgagggcgacaacgccugcaagcgcaccuacuccgaccggggguggggcaacggcugcgggcuguucggcaaggggagcaucguggccugcgccaaguucaccugcgcgaaguccaugagccuguucgagguggaccagaccaagauccaguacgucauccgcgcccagcuccacgugggcgccaagcaggagaacuggaacacggacaucaagacccugaaguucgacgcccuguccgggagccaggaggucgaguucaucggcuacggcaaggccacccucgagugccaggugcagaccgcgguggacuucgggaacuccuacaucgccgagauggagacggagagcuggaucgucgaccggcagugggcccaggaccugacccugcccuggcagagcggcuccgggggcguguggcgcgagaugcaccaccucguggaguucgagcccccgcacgccgccaccauccgcguccuggcgcuggggaaccaggagggcagccucaagaccgcccugacgggcgccaugcgggugaccaaggacaccaacgacaacaaccuguacaagcuccacgggggccacguguccugccgcgucaagcugagcgcccugacccucaaggggacguccuacaagaucugcaccgacaagauguucuucgugaagaaccccaccgacaccggccacgggacgguggucaugcaggugaaggugagcaagggcgcgcccugccggauccccgucaucguggccgacgaccugaccgccgccaucaacaagggcauccuggugaccgucaacccgaucgccuccaccaacgacgacgaggugcucaucgaggugaacccgcccuucggggacagcuacaucaucgucggccgcggggacucccggcugaccuaccaguggcacaaggagggcagcuccaucggcaagcuguucacgcagaccaugaaggggguggagcgccucgcggugaugggcgacaccgccugggacuucagcuccgccgggggcuucuucaccagcgucgggaagggcauccacacgguguucggcuccgccuuccaggggcuguucggcgggcugaacuggaucaccaaggugaucaugggcgccguccucaucuggguggggaucaacacccggaacaugaccaugagcauguccaugauccuggugggcgucaucaugauguuccugagccugggcgugggggcguga

SEQ ID NO: 224 - RNA, 2049 nt, Artificial Sequence
  derived and/or modified CDS sequence (opt1) from YFV__NC_002031.1__SSjev(V5)-prME-XX (polyprotein: aa122-788)
auguggcuggugagccucgccaucgucaccgccugcgcgggcgccgugacgcuggugcggaagaaccgcuggcuccugcugaacgucaccuccgaggaccucggcaagaccuucagcguggggaccggcaacugcacgaccaacauccuggaggccaaguacuggugccccgacuccauggaguacaacugcccgaaccugagcccccgggaggagcccgacgacaucgacugcuggugcuacggcguggagaacguccgcguggccuacgggaagugcgacuccgcgggccggagccgccggucccgccgggccaucgaccuccccacccacgagaaccacgggcugaagacccgccaggagaaguggaugacgggccggaugggggagcgccagcugcagaagaucgagcggugguucgugcgcaacccguucuucgccgucaccgcccucaccaucgccuaccuggugggcagcaacaugacccagcggguggucaucgcgcugcucgugcuggccgugggccccgccuacuccgcccacugcaucgggaucacggaccgcgacuucaucgagggcguccacgggggcaccugggugagcgcgacccuggagcaggacaagugcgugaccgucauggcccccgacaagcccucccucgacaucagccuggagacgguggccaucgaccggccggccgaggugcgcaaggucugcuacaacgccgugcugacccacgugaagaucaacgacaagugccccuccaccggcgaggcgcaccucgccgaggagaacgagggggacaacgccugcaagcggaccuacagcgaccggggcugggggaacggcugcgggcuguucggcaagggcuccaucgucgccugcgccaaguucacgugcgcgaagagcaugucccuguucgagguggaccagaccaagauccaguacgucauccgcgcccagcuccacgugggggccaagcaggagaacuggaacaccgacaucaagacccugaaguucgacgcccugagcggcagccaggagguggaguucaucggguacggcaaggccacgcucgagugccagguccagaccgcgguggacuucgggaacuccuacaucgccgagauggagaccgagagcuggaucguggaccggcagugggcccaggaccugacccugcccuggcaguccggcagcggcggggucuggcgcgagaugcaccaccucguggaguucgagcccccgcacgccgccacgauccgggugcuggcgcugggcaaccaggaggggucccucaagaccgcccugaccggcgccaugcgcgucaccaaggacacgaacgacaacaaccuguacaagcuccacgggggccacgugagcugccgggugaagcuguccgcccugacccucaagggcaccagcuacaagaucugcaccgacaagauguucuucgucaagaaccccacggacaccgggcacggcaccguggugaugcaggucaagguguccaagggggcgcccugccgcaucccggugaucgucgccgacgaccugaccgccgccaucaacaagggcauccuggugaccgugaacccgaucgccagcacgaacgacgacgagguccucaucgaggugaacccccccuucggcgacuccuacaucaucguggggcggggcgacagccgccugaccuaccaguggcacaaggagggguccagcaucggcaagcuguucacccagaccaugaagggggucgagcggcuggcggugaugggcgacacggccugggacuucuccagcgccggcggguucuucaccuccgugggcaaggggauccacaccgucuucggcagcgccuuccaggggcucuucggcggccugaacuggaucaccaaggugaucaugggggccgugcugaucugggucggcaucaacacgcgcaacaugaccauguccaugagcaugauccucgugggggugaucaugauguuccugagccugggcgucggggcggaccagggcugcgccaucaacuucggcaaguga

SEQ ID NO: 225 - RNA, 2037 nt, Artificial Sequence
  derived and/or modified CDS sequence (opt1) from YFV__NC_002031.1__SSjev(V5)-prME-XX (polyprotein: aa126-788)
auguggcuggugagccucgccaucgucaccgccugcgcgggcgcccggaagaaccgcuggcuccugcugaacgucaccuccgaggaccucggcaagaccuucagcguggggaccggcaacugcacgaccaacauccuggaggccaaguacuggugccccgacuccauggaguacaacugcccgaaccugagcccccgggaggagcccgacgacaucgacugcuggugcuacggcguggagaacguccgcguggccuacgggaagugcgacuccgcgggccggagccgccggucccgccgggccaucgaccuccccacccacgagaaccacgggcugaagacccgccaggagaaguggaugacgggccggaugggggagcgccagcugcagaagaucgagcggugguucgugcgcaacccguucuucgccgucaccgcccucaccaucgccuaccuggugggcagcaacaugacccagcggguggucaucgcgcugcucgugcuggccgugggccccgccuacuccgcccacugcaucgggaucacggaccgcgacuucaucgagggcguccacgggggcaccugggugagcgcgacccuggagcaggacaagugcgugaccgucauggcccccgacaagcccucccucgacaucagccuggagacgguggccaucgaccggccggccgaggugcgcaaggucugcuacaacgccgugcugacccacgugaagaucaacgacaagugccccuccaccggcgaggcgcaccucgccgaggagaacgagggggacaacgccugcaagcggaccuacagcgaccggggcugggggaacggcugcgggcuguucggcaagggcuccaucgucgccugcgccaaguucacgugcgcgaagagcaugucccuguucgagguggaccagaccaagauccaguacgucauccgcgcccagcuccacgugggggccaagcaggagaacuggaacaccgacaucaagacccugaaguucgacgcccugagcggcagccaggagguggaguucaucggguacggcaaggccacgcucgagugccagguccagaccgcgguggacuucgggaacuccuacaucgccgagauggagaccgagagcuggaucguggaccggcagugggcccaggaccugacccugcccuggcaguccggcagcggcggggucuggcgcgagaugcaccaccucguggaguucgagcccccgcacgccgccacgauccgggugcuggcgcugggcaaccaggaggggucccucaagaccgcccugaccggcgccaugcgcgucaccaaggacacgaacgacaacaaccuguacaagcuccacgggggccacgugagcugccgggugaagcuguccgcccugacccucaagggcaccagcuacaagaucugcaccgacaagauguucuucgucaagaaccccacggacaccgggcacggcaccguggugaugcaggucaagguguccaagggggcgcccugccgcaucccggugaucgucgccgacgaccugaccgccgccaucaacaagggcauccuggugaccgugaacccgaucgccagcacgaacgacgacgagguccucaucgaggugaacccccccuucggcgacuccuacaucaucguggggcggggcgacagccgccugaccuaccaguggcacaaggagggguccagcaucggcaagcuguucacccagaccaugaagggggucgagcggcuggcggugaugggcgacacggccugggacuucuccagcgccggcggguucuucaccuccgugggcaaggggauccacaccgucuucggcagcgccuuccaggggcucuucggcggccugaacuggaucaccaaggugaucaugggggccgugcugaucugggucggcaucaacacgcgcaacaugaccauguccaugagcaugauccucgugggggugaucaugauguuccugagccugggcgucggggcggaccagggcugcgccaucaacuucggcaaguga

SEQ ID NO: 226 - RNA, 2019 nt, Artificial Sequence
  derived and/or modified CDS sequence (opt1) from YFV__NC_002031.1__SSjev(V5)-prME (polyprotein: aa122-778)
auguggcuggugagccucgccaucgucaccgccugcgcgggcgccgugacccugguccgcaagaaccgguggcuccugcugaacgugaccagcgaggaccucggcaagacguucuccguggggaccggcaacugcaccaccaacauccuggaggccaaguacuggugccccgacagcauggaguacaacugcccgaaccuguccccgcgcgaggagcccgacgacaucgacugcuggugcuacggggucgagaacgugcggguggccuacggcaagugcgacagcgcggggcgcucccggcgcagccggcgcgccaucgaccuccccacgcacgagaaccacggccugaagacccggcaggagaaguggaugaccggccgcaugggggagcggcagcugcagaagaucgagcgcugguucguccggaaccccuucuucgccgugaccgcccucacgaucgccuaccuggugggcuccaacaugacccagcgcgucgugaucgcgcugcucgugcuggccgucgggcccgccuacagcgcccacugcaucggcaucaccgaccgggacuucaucgagggggugcacggcggcaccuggguguccgcgacgcuggagcaggacaagugcgucaccgugauggcccccgacaagcccagccucgacaucucccuggagaccguggccaucgaccgcccggccgagguccggaaggugugcuacaacgccgugcugacccacgucaagaucaacgacaagugccccagcacgggggaggcgcaccucgccgaggagaacgagggcgacaacgccugcaagcgcaccuacuccgaccggggguggggcaacggcugcgggcuguucggcaaggggagcaucguggccugcgccaaguucaccugcgcgaaguccaugagccuguucgagguggaccagaccaagauccaguacgucauccgcgcccagcuccacgugggcgccaagcaggagaacuggaacacggacaucaagacccugaaguucgacgcccuguccgggagccaggaggucgaguucaucggcuacggcaaggccacccucgagugccaggugcagaccgcgguggacuucgggaacuccuacaucgccgagauggagacggagagcuggaucgucgaccggcagugggcccaggaccugacccugcccuggcagagcggcuccgggggcguguggcgcgagaugcaccaccucguggaguucgagcccccgcacgccgccaccauccgcguccuggcgcuggggaaccaggagggcagccucaagaccgcccugacgggcgccaugcgggugaccaaggacaccaacgacaacaaccuguacaagcuccacgggggccacguguccugccgcgucaagcugagcgcccugacccucaaggggacguccuacaagaucugcaccgacaagauguucuucgugaagaaccccaccgacaccggccacgggacgguggucaugcaggugaaggugagcaagggcgcgcccugccggauccccgucaucguggccgacgaccugaccgccgccaucaacaagggcauccuggugaccgucaacccgaucgccuccaccaacgacgacgaggugcucaucgaggugaacccgcccuucggggacagcuacaucaucgucggccgcggggacucccggcugaccuaccaguggcacaaggagggcagcuccaucggcaagcuguucacgcagaccaugaaggggguggagcgccucgcggugaugggcgacaccgccugggacuucagcuccgccgggggcuucuucaccagcgucgggaagggcauccacacgguguucggcuccgccuuccaggggcuguucggcgggcugaacuggaucaccaaggugaucaugggcgccguccucaucuggguggggaucaacacccggaacaugaccaugagcauguccaugauccuggugggcgucaucaugauguuccugagccugggcgugggggcguga

SEQ ID NO: 227 - RNA, 2007 nt, Artificial Sequence
  derived and/or modified CDS sequence (opt1) from YFV__NC_002031.1__SSjev(V5)-prME (polyprotein: aa126-778)
auguggcuggugagccucgccaucgucaccgccugcgcgggcgcccgcaagaaccgguggcuccugcugaacgugaccagcgaggaccucggcaagacguucuccguggggaccggcaacugcaccaccaacauccuggaggccaaguacuggugccccgacagcauggaguacaacugcccgaaccuguccccgcgcgaggagcccgacgacaucgacugcuggugcuacggggucgagaacgugcggguggccuacggcaagugcgacagcgcggggcgcucccggcgcagccggcgcgccaucgaccuccccacgcacgagaaccacggccugaagacccggcaggagaaguggaugaccggccgcaugggggagcggcagcugcagaagaucgagcgcugguucguccggaaccccuucuucgccgugaccgcccucacgaucgccuaccuggugggcuccaacaugacccagcgcgucgugaucgcgcugcucgugcuggccgucgggcccgccuacagcgcccacugcaucggcaucaccgaccgggacuucaucgagggggugcacggcggcaccuggguguccgcgacgcuggagcaggacaagugcgucaccgugauggcccccgacaagcccagccucgacaucucccuggagaccguggccaucgaccgcccggccgagguccggaaggugugcuacaacgccgugcugacccacgucaagaucaacgacaagugccccagcacgggggaggcgcaccucgccgaggagaacgagggcgacaacgccugcaagcgcaccuacuccgaccggggguggggcaacggcugcgggcuguucggcaaggggagcaucguggccugcgccaaguucaccugcgcgaaguccaugagccuguucgagguggaccagaccaagauccaguacgucauccgcgcccagcuccacgugggcgccaagcaggagaacuggaacacggacaucaagacccugaaguucgacgcccuguccgggagccaggaggucgaguucaucggcuacggcaaggccacccucgagugccaggugcagaccgcgguggacuucgggaacuccuacaucgccgagauggagacggagagcuggaucgucgaccggcagugggcccaggaccugacccugcccuggcagagcggcuccgggggcguguggcgcgagaugcaccaccucguggaguucgagcccccgcacgccgccaccauccgcguccuggcgcuggggaaccaggagggcagccucaagaccgcccugacgggcgccaugcgggugaccaaggacaccaacgacaacaaccuguacaagcuccacgggggccacguguccugccgcgucaagcugagcgcccugacccucaaggggacguccuacaagaucugcaccgacaagauguucuucgugaagaaccccaccgacaccggccacgggacgguggucaugcaggugaaggugagcaagggcgcgcccugccggauccccgucaucguggccgacgaccugaccgccgccaucaacaagggcauccuggugaccgucaacccgaucgccuccaccaacgacgacgaggugcucaucgaggugaacccgcccuucggggacagcuacaucaucgucggccgcggggacucccggcugaccuaccaguggcacaaggagggcagcuccaucggcaagcuguucacgcagaccaugaaggggguggagcgccucgcggugaugggcgacaccgccugggacuucagcuccgccgggggcuucuucaccagcgucgggaagggcauccacacgguguucggcuccgccuuccaggggcuguucggcgggcugaacuggaucaccaaggugaucaugggcgccguccucaucuggguggggaucaacacccggaacaugaccaugagcauguccaugauccuggugggcgucaucaugauguuccugagccugggcgugggggcguga

SEQ ID NO: 228 - RNA, 2037 nt, Artificial Sequence
  derived and/or modified CDS sequence (opt1) from YFV__NC_002031.1__SSIgE-prMEdelstem_TM-JEV (polyprotein: aa122-680)
auggacuggaccuggauccuguuccucguggccgccgcgacccgcguccacagcgugacccugguccgcaagaaccgguggcuccugcugaacgugaccagcgaggaccucggcaagacguucuccguggggaccggcaacugcaccaccaacauccuggaggccaaguacuggugccccgacagcauggaguacaacugcccgaaccuguccccgcgcgaggagcccgacgacaucgacugcuggugcuacggggucgagaacgugcggguggccuacggcaagugcgacagcgcggggcgcucccggcgcagccggcgcgccaucgaccuccccacgcacgagaaccacggccugaagacccggcaggagaaguggaugaccggccgcaugggggagcggcagcugcagaagaucgagcgcugguucguccggaaccccuucuucgccgugaccgcccucacgaucgccuaccuggugggcuccaacaugacccagcgcgucgugaucgcgcugcucgugcuggccgucgggcccgccuacagcgcccacugcaucggcaucaccgaccgggacuucaucgagggggugcacggcggcaccuggguguccgcgacgcuggagcaggacaagugcgucaccgugauggcccccgacaagcccagccucgacaucucccuggagaccguggccaucgaccgcccggccgagguccggaaggugugcuacaacgccgugcugacccacgucaagaucaacgacaagugccccagcacgggggaggcgcaccucgccgaggagaacgagggcgacaacgccugcaagcgcaccuacuccgaccggggguggggcaacggcugcgggcuguucggcaaggggagcaucguggccugcgccaaguucaccugcgcgaaguccaugagccuguucgagguggaccagaccaagauccaguacgucauccgcgcccagcuccacgugggcgccaagcaggagaacuggaacacggacaucaagacccugaaguucgacgcccuguccgggagccaggaggucgaguucaucggcuacggcaaggccacccucgagugccaggugcagaccgcgguggacuucgggaacuccuacaucgccgagauggagacggagagcuggaucgucgaccggcagugggcccaggaccugacccugcccuggcagagcggcuccgggggcguguggcgcgagaugcaccaccucguggaguucgagcccccgcacgccgccaccauccgcguccuggcgcuggggaaccaggagggcagccucaagaccgcccugacgggcgccaugcgggugaccaaggacaccaacgacaacaaccuguacaagcuccacgggggccacguguccugccgcgucaagcugagcgcccugacccucaaggggacguccuacaagaucugcaccgacaagauguucuucgugaagaaccccaccgacaccggccacgggacgguggucaugcaggugaaggugagcaagggcgcgcccugccggauccccgucaucguggccgacgaccugaccgccgccaucaacaagggcauccuggugaccgucaacccgaucgccuccaccaacgacgacgaggugcucaucgaggugaacccgcccuucggggacagcuacaucaucgucggccgcggggacucccggcugaccuaccaguggcacaaggagggcagcuccggcagcacccuggggaaggccuucuccaccacgcucaagggcgcccagcgccuggcggcccugggggacaccgccugggacuucggcagcaucgggggcguguucaacuccaucggccgggccguccaccagguguucgggggcgccuuccgcacccucuucgggggcaugagcuggaucacccaggggcugaugggcgcgcugcuccuguggaugggggugaacgcccgggaccgcuccaucgcccuggccuuccucgcgacgggcggcguccugguguuccuggccaccaacgugcacgccuga

SEQ ID NO: 229 - RNA, 2025 nt, Artificial Sequence
  derived and/or modified CDS sequence (opt1) from YFV__NC_002031.1__SSIgE-prMEdelstem_TM-JEV (polyprotein: aa126-680)
auggacuggaccuggauccuguuccucguggccgccgcgacccgcguccacagccgcaagaaccgguggcuccugcugaacgugaccagcgaggaccucggcaagacguucuccguggggaccggcaacugcaccaccaacauccuggaggccaaguacuggugccccgacagcauggaguacaacugcccgaaccuguccccgcgcgaggagcccgacgacaucgacugcuggugcuacggggucgagaacgugcggguggccuacggcaagugcgacagcgcggggcgcucccggcgcagccggcgcgccaucgaccuccccacgcacgagaaccacggccugaagacccggcaggagaaguggaugaccggccgcaugggggagcggcagcugcagaagaucgagcgcugguucguccggaaccccuucuucgccgugaccgcccucacgaucgccuaccuggugggcuccaacaugacccagcgcgucgugaucgcgcugcucgugcuggccgucgggcccgccuacagcgcccacugcaucggcaucaccgaccgggacuucaucgagggggugcacggcggcaccuggguguccgcgacgcuggagcaggacaagugcgucaccgugauggcccccgacaagcccagccucgacaucucccuggagaccguggccaucgaccgcccggccgagguccggaaggugugcuacaacgccgugcugacccacgucaagaucaacgacaagugccccagcacgggggaggcgcaccucgccgaggagaacgagggcgacaacgccugcaagcgcaccuacuccgaccggggguggggcaacggcugcgggcuguucggcaaggggagcaucguggccugcgccaaguucaccugcgcgaaguccaugagccuguucgagguggaccagaccaagauccaguacgucauccgcgcccagcuccacgugggcgccaagcaggagaacuggaacacggacaucaagacccugaaguucgacgcccuguccgggagccaggaggucgaguucaucggcuacggcaaggccacccucgagugccaggugcagaccgcgguggacuucgggaacuccuacaucgccgagauggagacggagagcuggaucgucgaccggcagugggcccaggaccugacccugcccuggcagagcggcuccgggggcguguggcgcgagaugcaccaccucguggaguucgagcccccgcacgccgccaccauccgcguccuggcgcuggggaaccaggagggcagccucaagaccgcccugacgggcgccaugcgggugaccaaggacaccaacgacaacaaccuguacaagcuccacgggggccacguguccugccgcgucaagcugagcgcccugacccucaaggggacguccuacaagaucugcaccgacaagauguucuucgugaagaaccccaccgacaccggccacgggacgguggucaugcaggugaaggugagcaagggcgcgcccugccggauccccgucaucguggccgacgaccugaccgccgccaucaacaagggcauccuggugaccgucaacccgaucgccuccaccaacgacgacgaggugcucaucgaggugaacccgcccuucggggacagcuacaucaucgucggccgcggggacucccggcugaccuaccaguggcacaaggagggcagcuccggcagcacccuggggaaggccuucuccaccacgcucaagggcgcccagcgccuggcggcccugggggacaccgccugggacuucggcagcaucgggggcguguucaacuccaucggccgggccguccaccagguguucgggggcgccuuccgcacccucuucgggggcaugagcuggaucacccaggggcugaugggcgcgcugcuccuguggaugggggugaacgcccgggaccgcuccaucgcccuggccuuccucgcgacgggcggcguccugguguuccuggccaccaacgugcacgccuga

SEQ ID NO: 230 - RNA, 2055 nt, Artificial Sequence
  derived and/or modified CDS sequence (opt1) from YFV__NC_002031.1__SSjev-prMEdelstem_TM-JEV (polyprotein: aa122-680)
augggcaagcgcagcgccggguccaucauguggcuggccagccucgcgguggucaucgccugcgccggcgccgugacccugguccgcaagaaccgguggcuccugcugaacgugaccagcgaggaccucggcaagacguucuccguggggaccggcaacugcaccaccaacauccuggaggccaaguacuggugccccgacagcauggaguacaacugcccgaaccuguccccgcgcgaggagcccgacgacaucgacugcuggugcuacggggucgagaacgugcggguggccuacggcaagugcgacagcgcggggcgcucccggcgcagccggcgcgccaucgaccuccccacgcacgagaaccacggccugaagacccggcaggagaaguggaugaccggccgcaugggggagcggcagcugcagaagaucgagcgcugguucguccggaaccccuucuucgccgugaccgcccucacgaucgccuaccuggugggcuccaacaugacccagcgcgucgugaucgcgcugcucgugcuggccgucgggcccgccuacagcgcccacugcaucggcaucaccgaccgggacuucaucgagggggugcacggcggcaccuggguguccgcgacgcuggagcaggacaagugcgucaccgugauggcccccgacaagcccagccucgacaucucccuggagaccguggccaucgaccgcccggccgagguccggaaggugugcuacaacgccgugcugacccacgucaagaucaacgacaagugccccagcacgggggaggcgcaccucgccgaggagaacgagggcgacaacgccugcaagcgcaccuacuccgaccggggguggggcaacggcugcgggcuguucggcaaggggagcaucguggccugcgccaaguucaccugcgcgaaguccaugagccuguucgagguggaccagaccaagauccaguacgucauccgcgcccagcuccacgugggcgccaagcaggagaacuggaacacggacaucaagacccugaaguucgacgcccuguccgggagccaggaggucgaguucaucggcuacggcaaggccacccucgagugccaggugcagaccgcgguggacuucgggaacuccuacaucgccgagauggagacggagagcuggaucgucgaccggcagugggcccaggaccugacccugcccuggcagagcggcuccgggggcguguggcgcgagaugcaccaccucguggaguucgagcccccgcacgccgccaccauccgcguccuggcgcuggggaaccaggagggcagccucaagaccgcccugacgggcgccaugcgggugaccaaggacaccaacgacaacaaccuguacaagcuccacgggggccacguguccugccgcgucaagcugagcgcccugacccucaaggggacguccuacaagaucugcaccgacaagauguucuucgugaagaaccccaccgacaccggccacgggacgguggucaugcaggugaaggugagcaagggcgcgcccugccggauccccgucaucguggccgacgaccugaccgccgccaucaacaagggcauccuggugaccgucaacccgaucgccuccaccaacgacgacgaggugcucaucgaggugaacccgcccuucggggacagcuacaucaucgucggccgcggggacucccggcugaccuaccaguggcacaaggagggcagcuccggcagcacccuggggaaggccuucuccaccacgcucaagggcgcccagcgccuggcggcccugggggacaccgccugggacuucggcagcaucgggggcguguucaacuccaucggccgggccguccaccagguguucgggggcgccuuccgcacccucuucgggggcaugagcuggaucacccaggggcugaugggcgcgcugcuccuguggaugggggugaacgcccgggaccgcuccaucgcccuggccuuccucgcgacgggcggcguccugguguuccuggccaccaacgugcacgccuga

SEQ ID NO: 231 - RNA, 2043 nt, Artificial Sequence
  derived and/or modified CDS sequence (opt1) from YFV__NC_002031.1__SSjev-prMEdelstem_TM-JEV (polyprotein: aa126-680)
augggcaagcgcagcgccggguccaucauguggcuggccagccucgcgguggucaucgccugcgccggcgcccgcaagaaccgguggcuccugcugaacgugaccagcgaggaccucggcaagacguucuccguggggaccggcaacugcaccaccaacauccuggaggccaaguacuggugccccgacagcauggaguacaacugcccgaaccuguccccgcgcgaggagcccgacgacaucgacugcuggugcuacggggucgagaacgugcggguggccuacggcaagugcgacagcgcggggcgcucccggcgcagccggcgcgccaucgaccuccccacgcacgagaaccacggccugaagacccggcaggagaaguggaugaccggccgcaugggggagcggcagcugcagaagaucgagcgcugguucguccggaaccccuucuucgccgugaccgcccucacgaucgccuaccuggugggcuccaacaugacccagcgcgucgugaucgcgcugcucgugcuggccgucgggcccgccuacagcgcccacugcaucggcaucaccgaccgggacuucaucgagggggugcacggcggcaccuggguguccgcgacgcuggagcaggacaagugcgucaccgugauggcccccgacaagcccagccucgacaucucccuggagaccguggccaucgaccgcccggccgagguccggaaggugugcuacaacgccgugcugacccacgucaagaucaacgacaagugccccagcacgggggaggcgcaccucgccgaggagaacgagggcgacaacgccugcaagcgcaccuacuccgaccggggguggggcaacggcugcgggcuguucggcaaggggagcaucguggccugcgccaaguucaccugcgcgaaguccaugagccuguucgagguggaccagaccaagauccaguacgucauccgcgcccagcuccacgugggcgccaagcaggagaacuggaacacggacaucaagacccugaaguucgacgcccuguccgggagccaggaggucgaguucaucggcuacggcaaggccacccucgagugccaggugcagaccgcgguggacuucgggaacuccuacaucgccgagauggagacggagagcuggaucgucgaccggcagugggcccaggaccugacccugcccuggcagagcggcuccgggggcguguggcgcgagaugcaccaccucguggaguucgagcccccgcacgccgccaccauccgcguccuggcgcuggggaaccaggagggcagccucaagaccgcccugacgggcgccaugcgggugaccaaggacaccaacgacaacaaccuguacaagcuccacgggggccacguguccugccgcgucaagcugagcgcccugacccucaaggggacguccuacaagaucugcaccgacaagauguucuucgugaagaaccccaccgacaccggccacgggacgguggucaugcaggugaaggugagcaagggcgcgcccugccggauccccgucaucguggccgacgaccugaccgccgccaucaacaagggcauccuggugaccgucaacccgaucgccuccaccaacgacgacgaggugcucaucgaggugaacccgcccuucggggacagcuacaucaucgucggccgcggggacucccggcugaccuaccaguggcacaaggagggcagcuccggcagcacccuggggaaggccuucuccaccacgcucaagggcgcccagcgccuggcggcccugggggacaccgccugggacuucggcagcaucgggggcguguucaacuccaucggccgggccguccaccagguguucgggggcgccuuccgcacccucuucgggggcaugagcuggaucacccaggggcugaugggcgcgcugcuccuguggaugggggugaacgcccgggaccgcuccaucgcccuggccuuccucgcgacgggcggcguccugguguuccuggccaccaacgugcacgccuga

SEQ ID NO: 232 - RNA, 2094 nt, Artificial Sequence
  derived and/or modified CDS sequence (opt1) from YFV__NC_002031.1__X-SS-prME-XX (polyprotein: aa92-788)
augcggggccugagcucccgcaagcggcgcagccacgacgugcucaccguccaguuccugauccuggggaugcuccugaugaccggcggggugacgcuggugcggaagaaccgcuggcuccugcugaacgucaccuccgaggaccucggcaagaccuucagcguggggaccggcaacugcacgaccaacauccuggaggccaaguacuggugccccgacuccauggaguacaacugcccgaaccugagcccccgggaggagcccgacgacaucgacugcuggugcuacggcguggagaacguccgcguggccuacgggaagugcgacuccgcgggccggagccgccggucccgccgggccaucgaccuccccacccacgagaaccacgggcugaagacccgccaggagaaguggaugacgggccggaugggggagcgccagcugcagaagaucgagcggugguucgugcgcaacccguucuucgccgucaccgcccucaccaucgccuaccuggugggcagcaacaugacccagcggguggucaucgcgcugcucgugcuggccgugggccccgccuacuccgcccacugcaucgggaucacggaccgcgacuucaucgagggcguccacgggggcaccugggugagcgcgacccuggagcaggacaagugcgugaccgucauggcccccgacaagcccucccucgacaucagccuggagacgguggccaucgaccggccggccgaggugcgcaaggucugcuacaacgccgugcugacccacgugaagaucaacgacaagugccccuccaccggcgaggcgcaccucgccgaggagaacgagggggacaacgccugcaagcggaccuacagcgaccggggcugggggaacggcugcgggcuguucggcaagggcuccaucgucgccugcgccaaguucacgugcgcgaaguccaugagccuguucgagguggaccagaccaagauccaguacgucauccgcgcccagcuccacgugggggccaagcaggagaacuggaacaccgacaucaagacccugaaguucgacgcccugagcggcagccaggagguggaguucaucggguacggcaaggccacgcucgagugccagguccagaccgcgguggacuucgggaacuccuacaucgccgagauggagaccgagagcuggaucguggaccggcagugggcccaggaccugacccugcccuggcaguccggcagcggcggggucuggcgcgagaugcaccaccucguggaguucgagcccccgcacgccgccacgauccgggugcuggcgcugggcaaccaggaggggucccucaagaccgcccugaccggcgccaugcgcgucaccaaggacacgaacgacaacaaccuguacaagcuccacgggggccacgugagcugccgggugaagcuguccgcccugacccucaagggcaccagcuacaagaucugcaccgacaagauguucuucgucaagaaccccacggacaccgggcacggcaccguggugaugcaggucaagguguccaagggggcgcccugccgcaucccggugaucgucgccgacgaccugaccgccgccaucaacaagggcauccuggugaccgugaacccgaucgccagcacgaacgacgacgagguccucaucgaggugaacccccccuucggcgacuccuacaucaucguggggcggggcgacagccgccugaccuaccaguggcacaaggagggguccagcaucggcaagcuguucacccagaccaugaagggggucgagcggcuggcggugaugggcgacacggccugggacuucuccagcgccggcggguucuucaccuccgugggcaaggggauccacaccgucuucggcagcgccuuccaggggcuguucggcggccucaacuggaucaccaaggugaucaugggggccgugcugaucugggucggcaucaacacgcgcaacaugaccauguccaugagcaugauccucgugggggugaucaugauguuccugagccugggcgucggggcggaccagggcugcgccaucaacuucggcaaguga

SEQ ID NO: 233 - RNA, 2064 nt, Artificial Sequence
  derived and/or modified CDS sequence (opt1) from YFV__NC_002031.1__X-SS-prME (polyprotein: aa92-778)
augcggggccugagcucccgcaagcggcgcagccacgacgugcucaccguccaguuccugauccuggggaugcuccugaugaccggcggggugacgcuggugcggaagaaccgcuggcuccugcugaacgucaccuccgaggaccucggcaagaccuucagcguggggaccggcaacugcacgaccaacauccuggaggccaaguacuggugccccgacuccauggaguacaacugcccgaaccugagcccccgggaggagcccgacgacaucgacugcuggugcuacggcguggagaacguccgcguggccuacgggaagugcgacuccgcgggccggagccgccggucccgccgggccaucgaccuccccacccacgagaaccacgggcugaagacccgccaggagaaguggaugacgggccggaugggggagcgccagcugcagaagaucgagcggugguucgugcgcaacccguucuucgccgucaccgcccucaccaucgccuaccuggugggcagcaacaugacccagcggguggucaucgcgcugcucgugcuggccgugggccccgccuacuccgcccacugcaucgggaucacggaccgcgacuucaucgagggcguccacgggggcaccugggugagcgcgacccuggagcaggacaagugcgugaccgucauggcccccgacaagcccucccucgacaucagccuggagacgguggccaucgaccggccggccgaggugcgcaaggucugcuacaacgccgugcugacccacgugaagaucaacgacaagugccccuccaccggcgaggcgcaccucgccgaggagaacgagggggacaacgccugcaagcggaccuacagcgaccggggcugggggaacggcugcgggcuguucggcaagggcuccaucgucgccugcgccaaguucacgugcgcgaaguccaugagccuguucgagguggaccagaccaagauccaguacgucauccgcgcccagcuccacgugggggccaagcaggagaacuggaacaccgacaucaagacccugaaguucgacgcccugagcggcagccaggagguggaguucaucggguacggcaaggccacgcucgagugccagguccagaccgcgguggacuucgggaacuccuacaucgccgagauggagaccgagagcuggaucguggaccggcagugggcccaggaccugacccugcccuggcaguccggcagcggcggggucuggcgcgagaugcaccaccucguggaguucgagcccccgcacgccgccacgauccgggugcuggcgcugggcaaccaggaggggucccucaagaccgcccugaccggcgccaugcgcgucaccaaggacacgaacgacaacaaccuguacaagcuccacgggggccacgugagcugccgggugaagcuguccgcccugacccucaagggcaccagcuacaagaucugcaccgacaagauguucuucgucaagaaccccacggacaccgggcacggcaccguggugaugcaggucaagguguccaagggggcgcccugccgcaucccggugaucgucgccgacgaccugaccgccgccaucaacaagggcauccuggugaccgugaacccgaucgccagcacgaacgacgacgagguccucaucgaggugaacccccccuucggcgacuccuacaucaucguggggcggggcgacagccgccugaccuaccaguggcacaaggagggguccagcaucggcaagcuguucacccagaccaugaagggggucgagcggcuggcggugaugggcgacacggccugggacuucuccagcgccggcggguucuucaccuccgugggcaaggggauccacaccgucuucggcagcgccuuccaggggcuguucggcggccucaacuggaucaccaaggugaucaugggggccgugcugaucugggucggcaucaacacgcgcaacaugaccauguccaugagcaugauccucgugggggugaucaugauguuccugagccugggcgucggggcguga

SEQ ID NO: 234 - RNA, 2067 nt, Artificial Sequence
  derived and/or modified CDS sequence (opt1) from YFV__NC_002031.1__SS-prME-XX (polyprotein: M,aa102-788)
augagccacgacgugcucaccguccaguuccugauccuggggaugcuccugaugaccggcggggugacgcuggugcggaagaaccgcuggcuccugcugaacgucaccuccgaggaccucggcaagaccuucagcguggggaccggcaacugcacgaccaacauccuggaggccaaguacuggugccccgacuccauggaguacaacugcccgaaccugagcccccgggaggagcccgacgacaucgacugcuggugcuacggcguggagaacguccgcguggccuacgggaagugcgacuccgcgggccggagccgccggucccgccgggccaucgaccuccccacccacgagaaccacgggcugaagacccgccaggagaaguggaugacgggccggaugggggagcgccagcugcagaagaucgagcggugguucgugcgcaacccguucuucgccgucaccgcccucaccaucgccuaccuggugggcagcaacaugacccagcggguggucaucgcgcugcucgugcuggccgugggccccgccuacuccgcccacugcaucgggaucacggaccgcgacuucaucgagggcguccacgggggcaccugggugagcgcgacccuggagcaggacaagugcgugaccgucauggcccccgacaagcccucccucgacaucagccuggagacgguggccaucgaccggccggccgaggugcgcaaggucugcuacaacgccgugcugacccacgugaagaucaacgacaagugccccuccaccggcgaggcgcaccucgccgaggagaacgagggggacaacgccugcaagcggaccuacagcgaccggggcugggggaacggcugcgggcuguucggcaagggcuccaucgucgccugcgccaaguucacgugcgcgaaguccaugagccuguucgagguggaccagaccaagauccaguacgucauccgcgcccagcuccacgugggggccaagcaggagaacuggaacaccgacaucaagacccugaaguucgacgcccugagcggcagccaggagguggaguucaucggguacggcaaggccacgcucgagugccagguccagaccgcgguggacuucgggaacuccuacaucgccgagauggagaccgagagcuggaucguggaccggcagugggcccaggaccugacccugcccuggcaguccggcagcggcggggucuggcgcgagaugcaccaccucguggaguucgagcccccgcacgccgccacgauccgggugcuggcgcugggcaaccaggaggggucccucaagaccgcccugaccggcgccaugcgcgucaccaaggacacgaacgacaacaaccuguacaagcuccacgggggccacgugagcugccgggugaagcuguccgcccugacccucaagggcaccagcuacaagaucugcaccgacaagauguucuucgucaagaaccccacggacaccgggcacggcaccguggugaugcaggucaagguguccaagggggcgcccugccgcaucccggugaucgucgccgacgaccugaccgccgccaucaacaagggcauccuggugaccgugaacccgaucgccagcacgaacgacgacgagguccucaucgaggugaacccccccuucggcgacuccuacaucaucguggggcggggcgacagccgccugaccuaccaguggcacaaggagggguccagcaucggcaagcuguucacccagaccaugaagggggucgagcggcuggcggugaugggcgacacggccugggacuucuccagcgccggcggguucuucaccuccgugggcaaggggauccacaccgucuucggcagcgccuuccaggggcuguucggcggccucaacuggaucaccaaggugaucaugggggccgugcugaucugggucggcaucaacacgcgcaacaugaccauguccaugagcaugauccucgugggggugaucaugauguuccugagccugggcgucggggcggaccagggcugcgccaucaacuucggcaaguga

SEQ ID NO: 235 - RNA, 2061 nt, Artificial Sequence
  derived and/or modified CDS sequence (opt1) from YFV__NC_002031.1__SS-prME-XX (polyprotein: M,aa104-788)
auggacgugcucaccguccaguuccugauccuggggaugcuccugaugaccggcggggugacgcuggugcggaagaaccgcuggcuccugcugaacgucaccuccgaggaccucggcaagaccuucagcguggggaccggcaacugcacgaccaacauccuggaggccaaguacuggugccccgacuccauggaguacaacugcccgaaccugagcccccgggaggagcccgacgacaucgacugcuggugcuacggcguggagaacguccgcguggccuacgggaagugcgacuccgcgggccggagccgccggucccgccgggccaucgaccuccccacccacgagaaccacgggcugaagacccgccaggagaaguggaugacgggccggaugggggagcgccagcugcagaagaucgagcggugguucgugcgcaacccguucuucgccgucaccgcccucaccaucgccuaccuggugggcagcaacaugacccagcggguggucaucgcgcugcucgugcuggccgugggccccgccuacuccgcccacugcaucgggaucacggaccgcgacuucaucgagggcguccacgggggcaccugggugagcgcgacccuggagcaggacaagugcgugaccgucauggcccccgacaagcccucccucgacaucagccuggagacgguggccaucgaccggccggccgaggugcgcaaggucugcuacaacgccgugcugacccacgugaagaucaacgacaagugccccuccaccggcgaggcgcaccucgccgaggagaacgagggggacaacgccugcaagcggaccuacagcgaccggggcugggggaacggcugcgggcuguucggcaagggcuccaucgucgccugcgccaaguucacgugcgcgaaguccaugagccuguucgagguggaccagaccaagauccaguacgucauccgcgcccagcuccacgugggggccaagcaggagaacuggaacaccgacaucaagacccugaaguucgacgcccugagcggcagccaggagguggaguucaucggguacggcaaggccacgcucgagugccagguccagaccgcgguggacuucgggaacuccuacaucgccgagauggagaccgagagcuggaucguggaccggcagugggcccaggaccugacccugcccuggcaguccggcagcggcggggucuggcgcgagaugcaccaccucguggaguucgagcccccgcacgccgccacgauccgggugcuggcgcugggcaaccaggaggggucccucaagaccgcccugaccggcgccaugcgcgucaccaaggacacgaacgacaacaaccuguacaagcuccacgggggccacgugagcugccgggugaagcuguccgcccugacccucaagggcaccagcuacaagaucugcaccgacaagauguucuucgucaagaaccccacggacaccgggcacggcaccguggugaugcaggucaagguguccaagggggcgcccugccgcaucccggugaucgucgccgacgaccugaccgccgccaucaacaagggcauccuggugaccgugaacccgaucgccagcacgaacgacgacgagguccucaucgaggugaacccccccuucggcgacuccuacaucaucguggggcggggcgacagccgccugaccuaccaguggcacaaggagggguccagcaucggcaagcuguucacccagaccaugaagggggucgagcggcuggcggugaugggcgacacggccugggacuucuccagcgccggcggguucuucaccuccgugggcaaggggauccacaccgucuucggcagcgccuuccaggggcuguucggcggccucaacuggaucaccaaggugaucaugggggccgugcugaucugggucggcaucaacacgcgcaacaugaccauguccaugagcaugauccucgugggggugaucaugauguuccugagccugggcgucggggcggaccagggcugcgccaucaacuucggcaaguga

SEQ ID NO: 236 - RNA, 2037 nt, Artificial Sequence
  derived and/or modified CDS sequence (opt1) from YFV__NC_002031.1__SS-prME (polyprotein: M,aa102-778)
augagccacgacgugcucaccguccaguuccugauccuggggaugcuccugaugaccggcggggugacgcuggugcggaagaaccgcuggcuccugcugaacgucaccuccgaggaccucggcaagaccuucagcguggggaccggcaacugcacgaccaacauccuggaggccaaguacuggugccccgacuccauggaguacaacugcccgaaccugagcccccgggaggagcccgacgacaucgacugcuggugcuacggcguggagaacguccgcguggccuacgggaagugcgacuccgcgggccggagccgccggucccgccgggccaucgaccuccccacccacgagaaccacgggcugaagacccgccaggagaaguggaugacgggccggaugggggagcgccagcugcagaagaucgagcggugguucgugcgcaacccguucuucgccgucaccgcccucaccaucgccuaccuggugggcagcaacaugacccagcggguggucaucgcgcugcucgugcuggccgugggccccgccuacuccgcccacugcaucgggaucacggaccgcgacuucaucgagggcguccacgggggcaccugggugagcgcgacccuggagcaggacaagugcgugaccgucauggcccccgacaagcccucccucgacaucagccuggagacgguggccaucgaccggccggccgaggugcgcaaggucugcuacaacgccgugcugacccacgugaagaucaacgacaagugccccuccaccggcgaggcgcaccucgccgaggagaacgagggggacaacgccugcaagcggaccuacagcgaccggggcugggggaacggcugcgggcuguucggcaagggcuccaucgucgccugcgccaaguucacgugcgcgaaguccaugagccuguucgagguggaccagaccaagauccaguacgucauccgcgcccagcuccacgugggggccaagcaggagaacuggaacaccgacaucaagacccugaaguucgacgcccugagcggcagccaggagguggaguucaucggguacggcaaggccacgcucgagugccagguccagaccgcgguggacuucgggaacuccuacaucgccgagauggagaccgagagcuggaucguggaccggcagugggcccaggaccugacccugcccuggcaguccggcagcggcggggucuggcgcgagaugcaccaccucguggaguucgagcccccgcacgccgccacgauccgggugcuggcgcugggcaaccaggaggggucccucaagaccgcccugaccggcgccaugcgcgucaccaaggacacgaacgacaacaaccuguacaagcuccacgggggccacgugagcugccgggugaagcuguccgcccugacccucaagggcaccagcuacaagaucugcaccgacaagauguucuucgucaagaaccccacggacaccgggcacggcaccguggugaugcaggucaagguguccaagggggcgcccugccgcaucccggugaucgucgccgacgaccugaccgccgccaucaacaagggcauccuggugaccgugaacccgaucgccagcacgaacgacgacgagguccucaucgaggugaacccccccuucggcgacuccuacaucaucguggggcggggcgacagccgccugaccuaccaguggcacaaggagggguccagcaucggcaagcuguucacccagaccaugaagggggucgagcggcuggcggugaugggcgacacggccugggacuucuccagcgccggcggguucuucaccuccgugggcaaggggauccacaccgucuucggcagcgccuuccaggggcuguucggcggccucaacuggaucaccaaggugaucaugggggccgugcugaucugggucggcaucaacacgcgcaacaugaccauguccaugagcaugauccucgugggggugaucaugauguuccugagccugggcgucggggcguga

SEQ ID NO: 237 - RNA, 2031 nt, Artificial Sequence
  derived and/or modified CDS sequence (opt1) from YFV__NC_002031.1__SS-prME (polyprotein: M,aa104-778)
auggacgugcucaccguccaguuccugauccuggggaugcuccugaugaccggcggggugacgcuggugcggaagaaccgcuggcuccugcugaacgucaccuccgaggaccucggcaagaccuucagcguggggaccggcaacugcacgaccaacauccuggaggccaaguacuggugccccgacuccauggaguacaacugcccgaaccugagcccccgggaggagcccgacgacaucgacugcuggugcuacggcguggagaacguccgcguggccuacgggaagugcgacuccgcgggccggagccgccggucccgccgggccaucgaccuccccacccacgagaaccacgggcugaagacccgccaggagaaguggaugacgggccggaugggggagcgccagcugcagaagaucgagcggugguucgugcgcaacccguucuucgccgucaccgcccucaccaucgccuaccuggugggcagcaacaugacccagcggguggucaucgcgcugcucgugcuggccgugggccccgccuacuccgcccacugcaucgggaucacggaccgcgacuucaucgagggcguccacgggggcaccugggugagcgcgacccuggagcaggacaagugcgugaccgucauggcccccgacaagcccucccucgacaucagccuggagacgguggccaucgaccggccggccgaggugcgcaaggucugcuacaacgccgugcugacccacgugaagaucaacgacaagugccccuccaccggcgaggcgcaccucgccgaggagaacgagggggacaacgccugcaagcggaccuacagcgaccggggcugggggaacggcugcgggcuguucggcaagggcuccaucgucgccugcgccaaguucacgugcgcgaaguccaugagccuguucgagguggaccagaccaagauccaguacgucauccgcgcccagcuccacgugggggccaagcaggagaacuggaacaccgacaucaagacccugaaguucgacgcccugagcggcagccaggagguggaguucaucggguacggcaaggccacgcucgagugccagguccagaccgcgguggacuucgggaacuccuacaucgccgagauggagaccgagagcuggaucguggaccggcagugggcccaggaccugacccugcccuggcaguccggcagcggcggggucuggcgcgagaugcaccaccucguggaguucgagcccccgcacgccgccacgauccgggugcuggcgcugggcaaccaggaggggucccucaagaccgcccugaccggcgccaugcgcgucaccaaggacacgaacgacaacaaccuguacaagcuccacgggggccacgugagcugccgggugaagcuguccgcccugacccucaagggcaccagcuacaagaucugcaccgacaagauguucuucgucaagaaccccacggacaccgggcacggcaccguggugaugcaggucaagguguccaagggggcgcccugccgcaucccggugaucgucgccgacgaccugaccgccgccaucaacaagggcauccuggugaccgugaacccgaucgccagcacgaacgacgacgagguccucaucgaggugaacccccccuucggcgacuccuacaucaucguggggcggggcgacagccgccugaccuaccaguggcacaaggagggguccagcaucggcaagcuguucacccagaccaugaagggggucgagcggcuggcggugaugggcgacacggccugggacuucuccagcgccggcggguucuucaccuccgugggcaaggggauccacaccgucuucggcagcgccuuccaggggcuguucggcggccucaacuggaucaccaaggugaucaugggggccgugcugaucugggucggcaucaacacgcgcaacaugaccauguccaugagcaugauccucgugggggugaucaugauguuccugagccugggcgucggggcguga

SEQ ID NO: 238 - RNA, 2073 nt, Artificial Sequence
  derived and/or modified CDS sequence (opt1) from YFV__NC_002031.1__X-SS-prMEdelstem_TM-JEV (polyprotein: aa92-680)
augcggggccugagcucccgcaagcggcgcagccacgacgugcucaccguccaguuccugauccuggggaugcuccugaugaccggcggggugacgcuggugcggaagaaccgcuggcuccugcugaacgucaccuccgaggaccucggcaagaccuucagcguggggaccggcaacugcacgaccaacauccuggaggccaaguacuggugccccgacuccauggaguacaacugcccgaaccugagcccccgggaggagcccgacgacaucgacugcuggugcuacggcguggagaacguccgcguggccuacgggaagugcgacuccgcgggccggagccgccggucccgccgggccaucgaccuccccacccacgagaaccacgggcugaagacccgccaggagaaguggaugacgggccggaugggggagcgccagcugcagaagaucgagcggugguucgugcgcaacccguucuucgccgucaccgcccucaccaucgccuaccuggugggcagcaacaugacccagcggguggucaucgcgcugcucgugcuggccgugggccccgccuacuccgcccacugcaucgggaucacggaccgcgacuucaucgagggcguccacgggggcaccugggugagcgcgacccuggagcaggacaagugcgugaccgucauggcccccgacaagcccucccucgacaucagccuggagacgguggccaucgaccggccggccgaggugcgcaaggucugcuacaacgccgugcugacccacgugaagaucaacgacaagugccccuccaccggcgaggcgcaccucgccgaggagaacgagggggacaacgccugcaagcggaccuacagcgaccggggcugggggaacggcugcgggcuguucggcaagggcuccaucgucgccugcgccaaguucacgugcgcgaaguccaugagccuguucgagguggaccagaccaagauccaguacgucauccgcgcccagcuccacgugggggccaagcaggagaacuggaacaccgacaucaagacccugaaguucgacgcccugagcggcagccaggagguggaguucaucggguacggcaaggccacgcucgagugccagguccagaccgcgguggacuucgggaacuccuacaucgccgagauggagaccgagagcuggaucguggaccggcagugggcccaggaccugacccugcccuggcaguccggcagcggcggggucuggcgcgagaugcaccaccucguggaguucgagcccccgcacgccgccacgauccgggugcuggcgcugggcaaccaggaggggucccucaagaccgcccugaccggcgccaugcgcgucaccaaggacacgaacgacaacaaccuguacaagcuccacgggggccacgugagcugccgggugaagcuguccgcccugacccucaagggcaccagcuacaagaucugcaccgacaagauguucuucgucaagaaccccacggacaccgggcacggcaccguggugaugcaggucaagguguccaagggggcgcccugccgcaucccggugaucgucgccgacgaccugaccgccgccaucaacaagggcauccuggugaccgugaacccgaucgccagcacgaacgacgacgagguccucaucgaggugaacccccccuucggcgacuccuacaucaucguggggcggggcgacagccgccugaccuaccaguggcacaaggagggguccagcggcagcacccuggggaaggccuucuccaccacgcucaagggcgcccagcgccuggcggcccugggggacaccgccugggacuucggcagcaucgggggcguguucaacuccaucggccgggccguccaccagguguucgggggcgccuuccgcacccucuucgggggcaugagcuggaucacccaggggcugaugggcgcgcugcuccuguggaugggggugaacgcccgggaccgcuccaucgcccuggccuuccucgcgacgggcggcguccugguguuccuggccaccaacgugcacgccuga

SEQ ID NO: 239 - RNA, 2046 nt, Artificial Sequence
  derived and/or modified CDS sequence (opt1) from YFV__NC_002031.1__SS-prMEdelstem_TM-JEV (polyprotein: M,aa102-680)
augagccacgacgugcucaccguccaguuccugauccuggggaugcuccugaugaccggcggggugacgcuggugcggaagaaccgcuggcuccugcugaacgucaccuccgaggaccucggcaagaccuucagcguggggaccggcaacugcacgaccaacauccuggaggccaaguacuggugccccgacuccauggaguacaacugcccgaaccugagcccccgggaggagcccgacgacaucgacugcuggugcuacggcguggagaacguccgcguggccuacgggaagugcgacuccgcgggccggagccgccggucccgccgggccaucgaccuccccacccacgagaaccacgggcugaagacccgccaggagaaguggaugacgggccggaugggggagcgccagcugcagaagaucgagcggugguucgugcgcaacccguucuucgccgucaccgcccucaccaucgccuaccuggugggcagcaacaugacccagcggguggucaucgcgcugcucgugcuggccgugggccccgccuacuccgcccacugcaucgggaucacggaccgcgacuucaucgagggcguccacgggggcaccugggugagcgcgacccuggagcaggacaagugcgugaccgucauggcccccgacaagcccucccucgacaucagccuggagacgguggccaucgaccggccggccgaggugcgcaaggucugcuacaacgccgugcugacccacgugaagaucaacgacaagugccccuccaccggcgaggcgcaccucgccgaggagaacgagggggacaacgccugcaagcggaccuacagcgaccggggcugggggaacggcugcgggcuguucggcaagggcuccaucgucgccugcgccaaguucacgugcgcgaaguccaugagccuguucgagguggaccagaccaagauccaguacgucauccgcgcccagcuccacgugggggccaagcaggagaacuggaacaccgacaucaagacccugaaguucgacgcccugagcggcagccaggagguggaguucaucggguacggcaaggccacgcucgagugccagguccagaccgcgguggacuucgggaacuccuacaucgccgagauggagaccgagagcuggaucguggaccggcagugggcccaggaccugacccugcccuggcaguccggcagcggcggggucuggcgcgagaugcaccaccucguggaguucgagcccccgcacgccgccacgauccgggugcuggcgcugggcaaccaggaggggucccucaagaccgcccugaccggcgccaugcgcgucaccaaggacacgaacgacaacaaccuguacaagcuccacgggggccacgugagcugccgggugaagcuguccgcccugacccucaagggcaccagcuacaagaucugcaccgacaagauguucuucgucaagaaccccacggacaccgggcacggcaccguggugaugcaggucaagguguccaagggggcgcccugccgcaucccggugaucgucgccgacgaccugaccgccgccaucaacaagggcauccuggugaccgugaacccgaucgccagcacgaacgacgacgagguccucaucgaggugaacccccccuucggcgacuccuacaucaucguggggcggggcgacagccgccugaccuaccaguggcacaaggagggguccagcggcagcacccuggggaaggccuucuccaccacgcucaagggcgcccagcgccuggcggcccugggggacaccgccugggacuucggcagcaucgggggcguguucaacuccaucggccgggccguccaccagguguucgggggcgccuuccgcacccucuucgggggcaugagcuggaucacccaggggcugaugggcgcgcugcuccuguggaugggggugaacgcccgggaccgcuccaucgcccuggccuuccucgcgacgggcggcguccugguguuccuggccaccaacgugcacgccuga

SEQ ID NO: 240 - RNA, 2040 nt, Artificial Sequence
  derived and/or modified CDS sequence (opt1) from YFV__NC_002031.1__SS-prMEdelstem_TM-JEV (polyprotein: M,aa104-680)
auggacgugcucaccguccaguuccugauccuggggaugcuccugaugaccggcggggugacgcuggugcggaagaaccgcuggcuccugcugaacgucaccuccgaggaccucggcaagaccuucagcguggggaccggcaacugcacgaccaacauccuggaggccaaguacuggugccccgacuccauggaguacaacugcccgaaccugagcccccgggaggagcccgacgacaucgacugcuggugcuacggcguggagaacguccgcguggccuacgggaagugcgacuccgcgggccggagccgccggucccgccgggccaucgaccuccccacccacgagaaccacgggcugaagacccgccaggagaaguggaugacgggccggaugggggagcgccagcugcagaagaucgagcggugguucgugcgcaacccguucuucgccgucaccgcccucaccaucgccuaccuggugggcagcaacaugacccagcggguggucaucgcgcugcucgugcuggccgugggccccgccuacuccgcccacugcaucgggaucacggaccgcgacuucaucgagggcguccacgggggcaccugggugagcgcgacccuggagcaggacaagugcgugaccgucauggcccccgacaagcccucccucgacaucagccuggagacgguggccaucgaccggccggccgaggugcgcaaggucugcuacaacgccgugcugacccacgugaagaucaacgacaagugccccuccaccggcgaggcgcaccucgccgaggagaacgagggggacaacgccugcaagcggaccuacagcgaccggggcugggggaacggcugcgggcuguucggcaagggcuccaucgucgccugcgccaaguucacgugcgcgaaguccaugagccuguucgagguggaccagaccaagauccaguacgucauccgcgcccagcuccacgugggggccaagcaggagaacuggaacaccgacaucaagacccugaaguucgacgcccugagcggcagccaggagguggaguucaucggguacggcaaggccacgcucgagugccagguccagaccgcgguggacuucgggaacuccuacaucgccgagauggagaccgagagcuggaucguggaccggcagugggcccaggaccugacccugcccuggcaguccggcagcggcggggucuggcgcgagaugcaccaccucguggaguucgagcccccgcacgccgccacgauccgggugcuggcgcugggcaaccaggaggggucccucaagaccgcccugaccggcgccaugcgcgucaccaaggacacgaacgacaacaaccuguacaagcuccacgggggccacgugagcugccgggugaagcuguccgcccugacccucaagggcaccagcuacaagaucugcaccgacaagauguucuucgucaagaaccccacggacaccgggcacggcaccguggugaugcaggucaagguguccaagggggcgcccugccgcaucccggugaucgucgccgacgaccugaccgccgccaucaacaagggcauccuggugaccgugaacccgaucgccagcacgaacgacgacgagguccucaucgaggugaacccccccuucggcgacuccuacaucaucguggggcggggcgacagccgccugaccuaccaguggcacaaggagggguccagcggcagcacccuggggaaggccuucuccaccacgcucaagggcgcccagcgccuggcggcccugggggacaccgccugggacuucggcagcaucgggggcguguucaacuccaucggccgggccguccaccagguguucgggggcgccuuccgcacccucuucgggggcaugagcuggaucacccaggggcugaugggcgcgcugcuccuguggaugggggugaacgcccgggaccgcuccaucgcccuggccuuccucgcgacgggcggcguccugguguuccuggccaccaacgugcacgccuga

SEQ ID NO: 241 - RNA, 2058 nt, Artificial Sequence
  derived and/or modified CDS sequence (opt1) from YFV__NC_002031.1__SSIgE-prME-XX (polyprotein: aa122-788)
auggacuggaccuggauccuguuccucguggccgccgcgacccgcguccacagcgugacgcuggugcggaagaaccgcuggcuccugcugaacgucaccuccgaggaccucggcaagaccuucagcguggggaccggcaacugcacgaccaacauccuggaggccaaguacuggugccccgacuccauggaguacaacugcccgaaccugagcccccgggaggagcccgacgacaucgacugcuggugcuacggcguggagaacguccgcguggccuacgggaagugcgacuccgcgggccggagccgccggucccgccgggccaucgaccuccccacccacgagaaccacgggcugaagacccgccaggagaaguggaugacgggccggaugggggagcgccagcugcagaagaucgagcggugguucgugcgcaacccguucuucgccgucaccgcccucaccaucgccuaccuggugggcagcaacaugacccagcggguggucaucgcgcugcucgugcuggccgugggccccgccuacuccgcccacugcaucgggaucacggaccgcgacuucaucgagggcguccacgggggcaccugggugagcgcgacccuggagcaggacaagugcgugaccgucauggcccccgacaagcccucccucgacaucagccuggagacgguggccaucgaccggccggccgaggugcgcaaggucugcuacaacgccgugcugacccacgugaagaucaacgacaagugccccuccaccggcgaggcgcaccucgccgaggagaacgagggggacaacgccugcaagcggaccuacagcgaccggggcugggggaacggcugcgggcuguucggcaagggcuccaucgucgccugcgccaaguucacgugcgcgaaguccaugagccuguucgagguggaccagaccaagauccaguacgucauccgcgcccagcuccacgugggggccaagcaggagaacuggaacaccgacaucaagacccugaaguucgacgcccugagcggcagccaggagguggaguucaucggguacggcaaggccacgcucgagugccagguccagaccgcgguggacuucgggaacuccuacaucgccgagauggagaccgagagcuggaucguggaccggcagugggcccaggaccugacccugcccuggcaguccggcagcggcggggucuggcgcgagaugcaccaccucguggaguucgagcccccgcacgccgccacgauccgggugcuggcgcugggcaaccaggaggggucccucaagaccgcccugaccggcgccaugcgcgucaccaaggacacgaacgacaacaaccuguacaagcuccacgggggccacgugagcugccgggugaagcuguccgcccugacccucaagggcaccagcuacaagaucugcaccgacaagauguucuucgucaagaaccccacggacaccgggcacggcaccguggugaugcaggucaagguguccaagggggcgcccugccgcaucccggugaucgucgccgacgaccugaccgccgccaucaacaagggcauccuggugaccgugaacccgaucgccagcacgaacgacgacgagguccucaucgaggugaacccccccuucggcgacuccuacaucaucguggggcggggcgacagccgccugaccuaccaguggcacaaggagggguccagcaucggcaagcuguucacccagaccaugaagggggucgagcggcuggcggugaugggcgacacggccugggacuucuccagcgccggcggguucuucaccuccgugggcaaggggauccacaccgucuucggcagcgccuuccaggggcuguucggcggccucaacuggaucaccaaggugaucaugggggccgugcugaucugggucggcaucaacacgcgcaacaugaccauguccaugagcaugauccucgugggggugaucaugauguuccugagccugggcgucggggcggaccagggcugcgccaucaacuucggcaaguga

SEQ ID NO: 242 - RNA, 2046 nt, Artificial Sequence
  derived and/or modified CDS sequence (opt1) from YFV__NC_002031.1__SSIgE-prME-XX (polyprotein: aa126-788)
auggacuggaccuggauccuguuccucguggccgccgcgacccgcguccacagccggaagaaccgcuggcuccugcugaacgucaccuccgaggaccucggcaagaccuucagcguggggaccggcaacugcacgaccaacauccuggaggccaaguacuggugccccgacuccauggaguacaacugcccgaaccugagcccccgggaggagcccgacgacaucgacugcuggugcuacggcguggagaacguccgcguggccuacgggaagugcgacuccgcgggccggagccgccggucccgccgggccaucgaccuccccacccacgagaaccacgggcugaagacccgccaggagaaguggaugacgggccggaugggggagcgccagcugcagaagaucgagcggugguucgugcgcaacccguucuucgccgucaccgcccucaccaucgccuaccuggugggcagcaacaugacccagcggguggucaucgcgcugcucgugcuggccgugggccccgccuacuccgcccacugcaucgggaucacggaccgcgacuucaucgagggcguccacgggggcaccugggugagcgcgacccuggagcaggacaagugcgugaccgucauggcccccgacaagcccucccucgacaucagccuggagacgguggccaucgaccggccggccgaggugcgcaaggucugcuacaacgccgugcugacccacgugaagaucaacgacaagugccccuccaccggcgaggcgcaccucgccgaggagaacgagggggacaacgccugcaagcggaccuacagcgaccggggcugggggaacggcugcgggcuguucggcaagggcuccaucgucgccugcgccaaguucacgugcgcgaaguccaugagccuguucgagguggaccagaccaagauccaguacgucauccgcgcccagcuccacgugggggccaagcaggagaacuggaacaccgacaucaagacccugaaguucgacgcccugagcggcagccaggagguggaguucaucggguacggcaaggccacgcucgagugccagguccagaccgcgguggacuucgggaacuccuacaucgccgagauggagaccgagagcuggaucguggaccggcagugggcccaggaccugacccugcccuggcaguccggcagcggcggggucuggcgcgagaugcaccaccucguggaguucgagcccccgcacgccgccacgauccgggugcuggcgcugggcaaccaggaggggucccucaagaccgcccugaccggcgccaugcgcgucaccaaggacacgaacgacaacaaccuguacaagcuccacgggggccacgugagcugccgggugaagcuguccgcccugacccucaagggcaccagcuacaagaucugcaccgacaagauguucuucgucaagaaccccacggacaccgggcacggcaccguggugaugcaggucaagguguccaagggggcgcccugccgcaucccggugaucgucgccgacgaccugaccgccgccaucaacaagggcauccuggugaccgugaacccgaucgccagcacgaacgacgacgagguccucaucgaggugaacccccccuucggcgacuccuacaucaucguggggcggggcgacagccgccugaccuaccaguggcacaaggagggguccagcaucggcaagcuguucacccagaccaugaagggggucgagcggcuggcggugaugggcgacacggccugggacuucuccagcgccggcggguucuucaccuccgugggcaaggggauccacaccgucuucggcagcgccuuccaggggcuguucggcggccucaacuggaucaccaaggugaucaugggggccgugcugaucugggucggcaucaacacgcgcaacaugaccauguccaugagcaugauccucgugggggugaucaugauguuccugagccugggcgucggggcggaccagggcugcgccaucaacuucggcaaguga

SEQ ID NO: 243 - RNA, 2028 nt, Artificial Sequence
  derived and/or modified CDS sequence (opt1) from YFV__NC_002031.1__SSIgE-prME (polyprotein: aa122-778)
auggacuggaccuggauccuguuccucguggccgccgcgacccgcguccacagcgugacgcuggugcggaagaaccgcuggcuccugcugaacgucaccuccgaggaccucggcaagaccuucagcguggggaccggcaacugcacgaccaacauccuggaggccaaguacuggugccccgacuccauggaguacaacugcccgaaccugagcccccgggaggagcccgacgacaucgacugcuggugcuacggcguggagaacguccgcguggccuacgggaagugcgacuccgcgggccggagccgccggucccgccgggccaucgaccuccccacccacgagaaccacgggcugaagacccgccaggagaaguggaugacgggccggaugggggagcgccagcugcagaagaucgagcggugguucgugcgcaacccguucuucgccgucaccgcccucaccaucgccuaccuggugggcagcaacaugacccagcggguggucaucgcgcugcucgugcuggccgugggccccgccuacuccgcccacugcaucgggaucacggaccgcgacuucaucgagggcguccacgggggcaccugggugagcgcgacccuggagcaggacaagugcgugaccgucauggcccccgacaagcccucccucgacaucagccuggagacgguggccaucgaccggccggccgaggugcgcaaggucugcuacaacgccgugcugacccacgugaagaucaacgacaagugccccuccaccggcgaggcgcaccucgccgaggagaacgagggggacaacgccugcaagcggaccuacagcgaccggggcugggggaacggcugcgggcuguucggcaagggcuccaucgucgccugcgccaaguucacgugcgcgaaguccaugagccuguucgagguggaccagaccaagauccaguacgucauccgcgcccagcuccacgugggggccaagcaggagaacuggaacaccgacaucaagacccugaaguucgacgcccugagcggcagccaggagguggaguucaucggguacggcaaggccacgcucgagugccagguccagaccgcgguggacuucgggaacuccuacaucgccgagauggagaccgagagcuggaucguggaccggcagugggcccaggaccugacccugcccuggcaguccggcagcggcggggucuggcgcgagaugcaccaccucguggaguucgagcccccgcacgccgccacgauccgggugcuggcgcugggcaaccaggaggggucccucaagaccgcccugaccggcgccaugcgcgucaccaaggacacgaacgacaacaaccuguacaagcuccacgggggccacgugagcugccgggugaagcuguccgcccugacccucaagggcaccagcuacaagaucugcaccgacaagauguucuucgucaagaaccccacggacaccgggcacggcaccguggugaugcaggucaagguguccaagggggcgcccugccgcaucccggugaucgucgccgacgaccugaccgccgccaucaacaagggcauccuggugaccgugaacccgaucgccagcacgaacgacgacgagguccucaucgaggugaacccccccuucggcgacuccuacaucaucguggggcggggcgacagccgccugaccuaccaguggcacaaggagggguccagcaucggcaagcuguucacccagaccaugaagggggucgagcggcuggcggugaugggcgacacggccugggacuucuccagcgccggcggguucuucaccuccgugggcaaggggauccacaccgucuucggcagcgccuuccaggggcuguucggcggccucaacuggaucaccaaggugaucaugggggccgugcugaucugggucggcaucaacacgcgcaacaugaccauguccaugagcaugauccucgugggggugaucaugauguuccugagccugggcgucggggcguga

SEQ ID NO: 244 - RNA, 2016 nt, Artificial Sequence
  derived and/or modified CDS sequence (opt1) from YFV__NC_002031.1__SSIgE-prME (polyprotein: aa126-778)
auggacuggaccuggauccuguuccucguggccgccgcgacccgcguccacagccggaagaaccgcuggcuccugcugaacgucaccuccgaggaccucggcaagaccuucagcguggggaccggcaacugcacgaccaacauccuggaggccaaguacuggugccccgacuccauggaguacaacugcccgaaccugagcccccgggaggagcccgacgacaucgacugcuggugcuacggcguggagaacguccgcguggccuacgggaagugcgacuccgcgggccggagccgccggucccgccgggccaucgaccuccccacccacgagaaccacgggcugaagacccgccaggagaaguggaugacgggccggaugggggagcgccagcugcagaagaucgagcggugguucgugcgcaacccguucuucgccgucaccgcccucaccaucgccuaccuggugggcagcaacaugacccagcggguggucaucgcgcugcucgugcuggccgugggccccgccuacuccgcccacugcaucgggaucacggaccgcgacuucaucgagggcguccacgggggcaccugggugagcgcgacccuggagcaggacaagugcgugaccgucauggcccccgacaagcccucccucgacaucagccuggagacgguggccaucgaccggccggccgaggugcgcaaggucugcuacaacgccgugcugacccacgugaagaucaacgacaagugccccuccaccggcgaggcgcaccucgccgaggagaacgagggggacaacgccugcaagcggaccuacagcgaccggggcugggggaacggcugcgggcuguucggcaagggcuccaucgucgccugcgccaaguucacgugcgcgaaguccaugagccuguucgagguggaccagaccaagauccaguacgucauccgcgcccagcuccacgugggggccaagcaggagaacuggaacaccgacaucaagacccugaaguucgacgcccugagcggcagccaggagguggaguucaucggguacggcaaggccacgcucgagugccagguccagaccgcgguggacuucgggaacuccuacaucgccgagauggagaccgagagcuggaucguggaccggcagugggcccaggaccugacccugcccuggcaguccggcagcggcggggucuggcgcgagaugcaccaccucguggaguucgagcccccgcacgccgccacgauccgggugcuggcgcugggcaaccaggaggggucccucaagaccgcccugaccggcgccaugcgcgucaccaaggacacgaacgacaacaaccuguacaagcuccacgggggccacgugagcugccgggugaagcuguccgcccugacccucaagggcaccagcuacaagaucugcaccgacaagauguucuucgucaagaaccccacggacaccgggcacggcaccguggugaugcaggucaagguguccaagggggcgcccugccgcaucccggugaucgucgccgacgaccugaccgccgccaucaacaagggcauccuggugaccgugaacccgaucgccagcacgaacgacgacgagguccucaucgaggugaacccccccuucggcgacuccuacaucaucguggggcggggcgacagccgccugaccuaccaguggcacaaggagggguccagcaucggcaagcuguucacccagaccaugaagggggucgagcggcuggcggugaugggcgacacggccugggacuucuccagcgccggcggguucuucaccuccgugggcaaggggauccacaccgucuucggcagcgccuuccaggggcuguucggcggccucaacuggaucaccaaggugaucaugggggccgugcugaucugggucggcaucaacacgcgcaacaugaccauguccaugagcaugauccucgugggggugaucaugauguuccugagccugggcgucggggcguga

SEQ ID NO: 245 - RNA, 2076 nt, Artificial Sequence
  derived and/or modified CDS sequence (opt1) from YFV__NC_002031.1__SSjev-prME-XX (polyprotein: aa122-788)
augggcaagcgcagcgccggguccaucauguggcuggccagccucgcgguggucaucgccugcgccggcgccgugacgcuggugcggaagaaccgcuggcuccugcugaacgucaccuccgaggaccucggcaagaccuucagcguggggaccggcaacugcacgaccaacauccuggaggccaaguacuggugccccgacuccauggaguacaacugcccgaaccugagcccccgggaggagcccgacgacaucgacugcuggugcuacggcguggagaacguccgcguggccuacgggaagugcgacuccgcgggccggagccgccggucccgccgggccaucgaccuccccacccacgagaaccacgggcugaagacccgccaggagaaguggaugacgggccggaugggggagcgccagcugcagaagaucgagcggugguucgugcgcaacccguucuucgccgucaccgcccucaccaucgccuaccuggugggcagcaacaugacccagcggguggucaucgcgcugcucgugcuggccgugggccccgccuacuccgcccacugcaucgggaucacggaccgcgacuucaucgagggcguccacgggggcaccugggugagcgcgacccuggagcaggacaagugcgugaccgucauggcccccgacaagcccucccucgacaucagccuggagacgguggccaucgaccggccggccgaggugcgcaaggucugcuacaacgccgugcugacccacgugaagaucaacgacaagugccccuccaccggcgaggcgcaccucgccgaggagaacgagggggacaacgccugcaagcggaccuacagcgaccggggcugggggaacggcugcgggcuguucggcaagggcuccaucgucgccugcgccaaguucacgugcgcgaaguccaugagccuguucgagguggaccagaccaagauccaguacgucauccgcgcccagcuccacgugggggccaagcaggagaacuggaacaccgacaucaagacccugaaguucgacgcccugagcggcagccaggagguggaguucaucggguacggcaaggccacgcucgagugccagguccagaccgcgguggacuucgggaacuccuacaucgccgagauggagaccgagagcuggaucguggaccggcagugggcccaggaccugacccugcccuggcaguccggcagcggcggggucuggcgcgagaugcaccaccucguggaguucgagcccccgcacgccgccacgauccgggugcuggcgcugggcaaccaggaggggucccucaagaccgcccugaccggcgccaugcgcgucaccaaggacacgaacgacaacaaccuguacaagcuccacgggggccacgugagcugccgggugaagcuguccgcccugacccucaagggcaccagcuacaagaucugcaccgacaagauguucuucgucaagaaccccacggacaccgggcacggcaccguggugaugcaggucaagguguccaagggggcgcccugccgcaucccggugaucgucgccgacgaccugaccgccgccaucaacaagggcauccuggugaccgugaacccgaucgccagcacgaacgacgacgagguccucaucgaggugaacccccccuucggcgacuccuacaucaucguggggcggggcgacagccgccugaccuaccaguggcacaaggagggguccagcaucggcaagcuguucacccagaccaugaagggggucgagcggcuggcggugaugggcgacacggccugggacuucuccagcgccggcggguucuucaccuccgugggcaaggggauccacaccgucuucggcagcgccuuccaggggcuguucggcggccucaacuggaucaccaaggugaucaugggggccgugcugaucugggucggcaucaacacgcgcaacaugaccauguccaugagcaugauccucgugggggugaucaugauguuccugagccugggcgucggggcggaccagggcugcgccaucaacuucggcaaguga

SEQ ID NO: 246 - RNA, 2064 nt, Artificial Sequence
  derived and/or modified CDS sequence (opt1) from YFV__NC_002031.1__SSjev-prME-XX (polyprotein: aa126-788)
augggcaagcgcagcgccggguccaucauguggcuggccagccucgcgguggucaucgccugcgccggcgcccggaagaaccgcuggcuccugcugaacgucaccuccgaggaccucggcaagaccuucagcguggggaccggcaacugcacgaccaacauccuggaggccaaguacuggugccccgacuccauggaguacaacugcccgaaccugagcccccgggaggagcccgacgacaucgacugcuggugcuacggcguggagaacguccgcguggccuacgggaagugcgacuccgcgggccggagccgccggucccgccgggccaucgaccuccccacccacgagaaccacgggcugaagacccgccaggagaaguggaugacgggccggaugggggagcgccagcugcagaagaucgagcggugguucgugcgcaacccguucuucgccgucaccgcccucaccaucgccuaccuggugggcagcaacaugacccagcggguggucaucgcgcugcucgugcuggccgugggccccgccuacuccgcccacugcaucgggaucacggaccgcgacuucaucgagggcguccacgggggcaccugggugagcgcgacccuggagcaggacaagugcgugaccgucauggcccccgacaagcccucccucgacaucagccuggagacgguggccaucgaccggccggccgaggugcgcaaggucugcuacaacgccgugcugacccacgugaagaucaacgacaagugccccuccaccggcgaggcgcaccucgccgaggagaacgagggggacaacgccugcaagcggaccuacagcgaccggggcugggggaacggcugcgggcuguucggcaagggcuccaucgucgccugcgccaaguucacgugcgcgaaguccaugagccuguucgagguggaccagaccaagauccaguacgucauccgcgcccagcuccacgugggggccaagcaggagaacuggaacaccgacaucaagacccugaaguucgacgcccugagcggcagccaggagguggaguucaucggguacggcaaggccacgcucgagugccagguccagaccgcgguggacuucgggaacuccuacaucgccgagauggagaccgagagcuggaucguggaccggcagugggcccaggaccugacccugcccuggcaguccggcagcggcggggucuggcgcgagaugcaccaccucguggaguucgagcccccgcacgccgccacgauccgggugcuggcgcugggcaaccaggaggggucccucaagaccgcccugaccggcgccaugcgcgucaccaaggacacgaacgacaacaaccuguacaagcuccacgggggccacgugagcugccgggugaagcuguccgcccugacccucaagggcaccagcuacaagaucugcaccgacaagauguucuucgucaagaaccccacggacaccgggcacggcaccguggugaugcaggucaagguguccaagggggcgcccugccgcaucccggugaucgucgccgacgaccugaccgccgccaucaacaagggcauccuggugaccgugaacccgaucgccagcacgaacgacgacgagguccucaucgaggugaacccccccuucggcgacuccuacaucaucguggggcggggcgacagccgccugaccuaccaguggcacaaggagggguccagcaucggcaagcuguucacccagaccaugaagggggucgagcggcuggcggugaugggcgacacggccugggacuucuccagcgccggcggguucuucaccuccgugggcaaggggauccacaccgucuucggcagcgccuuccaggggcuguucggcggccucaacuggaucaccaaggugaucaugggggccgugcugaucugggucggcaucaacacgcgcaacaugaccauguccaugagcaugauccucgugggggugaucaugauguuccugagccugggcgucggggcggaccagggcugcgccaucaacuucggcaaguga

SEQ ID NO: 247 - RNA, 2046 nt, Artificial Sequence
  derived and/or modified CDS sequence (opt1) from YFV__NC_002031.1__SSjev-prME (polyprotein: aa122-778)
augggcaagcgcagcgccggguccaucauguggcuggccagccucgcgguggucaucgccugcgccggcgccgugacgcuggugcggaagaaccgcuggcuccugcugaacgucaccuccgaggaccucggcaagaccuucagcguggggaccggcaacugcacgaccaacauccuggaggccaaguacuggugccccgacuccauggaguacaacugcccgaaccugagcccccgggaggagcccgacgacaucgacugcuggugcuacggcguggagaacguccgcguggccuacgggaagugcgacuccgcgggccggagccgccggucccgccgggccaucgaccuccccacccacgagaaccacgggcugaagacccgccaggagaaguggaugacgggccggaugggggagcgccagcugcagaagaucgagcggugguucgugcgcaacccguucuucgccgucaccgcccucaccaucgccuaccuggugggcagcaacaugacccagcggguggucaucgcgcugcucgugcuggccgugggccccgccuacuccgcccacugcaucgggaucacggaccgcgacuucaucgagggcguccacgggggcaccugggugagcgcgacccuggagcaggacaagugcgugaccgucauggcccccgacaagcccucccucgacaucagccuggagacgguggccaucgaccggccggccgaggugcgcaaggucugcuacaacgccgugcugacccacgugaagaucaacgacaagugccccuccaccggcgaggcgcaccucgccgaggagaacgagggggacaacgccugcaagcggaccuacagcgaccggggcugggggaacggcugcgggcuguucggcaagggcuccaucgucgccugcgccaaguucacgugcgcgaaguccaugagccuguucgagguggaccagaccaagauccaguacgucauccgcgcccagcuccacgugggggccaagcaggagaacuggaacaccgacaucaagacccugaaguucgacgcccugagcggcagccaggagguggaguucaucggguacggcaaggccacgcucgagugccagguccagaccgcgguggacuucgggaacuccuacaucgccgagauggagaccgagagcuggaucguggaccggcagugggcccaggaccugacccugcccuggcaguccggcagcggcggggucuggcgcgagaugcaccaccucguggaguucgagcccccgcacgccgccacgauccgggugcuggcgcugggcaaccaggaggggucccucaagaccgcccugaccggcgccaugcgcgucaccaaggacacgaacgacaacaaccuguacaagcuccacgggggccacgugagcugccgggugaagcuguccgcccugacccucaagggcaccagcuacaagaucugcaccgacaagauguucuucgucaagaaccccacggacaccgggcacggcaccguggugaugcaggucaagguguccaagggggcgcccugccgcaucccggugaucgucgccgacgaccugaccgccgccaucaacaagggcauccuggugaccgugaacccgaucgccagcacgaacgacgacgagguccucaucgaggugaacccccccuucggcgacuccuacaucaucguggggcggggcgacagccgccugaccuaccaguggcacaaggagggguccagcaucggcaagcuguucacccagaccaugaagggggucgagcggcuggcggugaugggcgacacggccugggacuucuccagcgccggcggguucuucaccuccgugggcaaggggauccacaccgucuucggcagcgccuuccaggggcuguucggcggccucaacuggaucaccaaggugaucaugggggccgugcugaucugggucggcaucaacacgcgcaacaugaccauguccaugagcaugauccucgugggggugaucaugauguuccugagccugggcgucggggcguga

SEQ ID NO: 248 - RNA, 2034 nt, Artificial Sequence
  derived and/or modified CDS sequence (opt1) from YFV__NC_002031.1__SSjev-prME (polyprotein: aa126-778)
augggcaagcgcagcgccggguccaucauguggcuggccagccucgcgguggucaucgccugcgccggcgcccggaagaaccgcuggcuccugcugaacgucaccuccgaggaccucggcaagaccuucagcguggggaccggcaacugcacgaccaacauccuggaggccaaguacuggugccccgacuccauggaguacaacugcccgaaccugagcccccgggaggagcccgacgacaucgacugcuggugcuacggcguggagaacguccgcguggccuacgggaagugcgacuccgcgggccggagccgccggucccgccgggccaucgaccuccccacccacgagaaccacgggcugaagacccgccaggagaaguggaugacgggccggaugggggagcgccagcugcagaagaucgagcggugguucgugcgcaacccguucuucgccgucaccgcccucaccaucgccuaccuggugggcagcaacaugacccagcggguggucaucgcgcugcucgugcuggccgugggccccgccuacuccgcccacugcaucgggaucacggaccgcgacuucaucgagggcguccacgggggcaccugggugagcgcgacccuggagcaggacaagugcgugaccgucauggcccccgacaagcccucccucgacaucagccuggagacgguggccaucgaccggccggccgaggugcgcaaggucugcuacaacgccgugcugacccacgugaagaucaacgacaagugccccuccaccggcgaggcgcaccucgccgaggagaacgagggggacaacgccugcaagcggaccuacagcgaccggggcugggggaacggcugcgggcuguucggcaagggcuccaucgucgccugcgccaaguucacgugcgcgaaguccaugagccuguucgagguggaccagaccaagauccaguacgucauccgcgcccagcuccacgugggggccaagcaggagaacuggaacaccgacaucaagacccugaaguucgacgcccugagcggcagccaggagguggaguucaucggguacggcaaggccacgcucgagugccagguccagaccgcgguggacuucgggaacuccuacaucgccgagauggagaccgagagcuggaucguggaccggcagugggcccaggaccugacccugcccuggcaguccggcagcggcggggucuggcgcgagaugcaccaccucguggaguucgagcccccgcacgccgccacgauccgggugcuggcgcugggcaaccaggaggggucccucaagaccgcccugaccggcgccaugcgcgucaccaaggacacgaacgacaacaaccuguacaagcuccacgggggccacgugagcugccgggugaagcuguccgcccugacccucaagggcaccagcuacaagaucugcaccgacaagauguucuucgucaagaaccccacggacaccgggcacggcaccguggugaugcaggucaagguguccaagggggcgcccugccgcaucccggugaucgucgccgacgaccugaccgccgccaucaacaagggcauccuggugaccgugaacccgaucgccagcacgaacgacgacgagguccucaucgaggugaacccccccuucggcgacuccuacaucaucguggggcggggcgacagccgccugaccuaccaguggcacaaggagggguccagcaucggcaagcuguucacccagaccaugaagggggucgagcggcuggcggugaugggcgacacggccugggacuucuccagcgccggcggguucuucaccuccgugggcaaggggauccacaccgucuucggcagcgccuuccaggggcuguucggcggccucaacuggaucaccaaggugaucaugggggccgugcugaucugggucggcaucaacacgcgcaacaugaccauguccaugagcaugauccucgugggggugaucaugauguuccugagccugggcgucggggcguga

SEQ ID NO: 249 - RNA, 2094 nt, Artificial Sequence
  derived and/or modified CDS sequence (opt1) from YFV__NC_002031.1__SSjev(V2)-prME-XX (polyprotein: aa122-788)
augggccggaagcagaacaagcgcgggggcaacgaggggagcaucauguggcuggccucccucgccguggucaucgcgugcgccggcgccgugacgcuggugcggaagaaccgcuggcuccugcugaacgucaccuccgaggaccucggcaagaccuucagcguggggaccggcaacugcacgaccaacauccuggaggccaaguacuggugccccgacuccauggaguacaacugcccgaaccugagcccccgggaggagcccgacgacaucgacugcuggugcuacggcguggagaacguccgcguggccuacgggaagugcgacuccgcgggccggagccgccggucccgccgggccaucgaccuccccacccacgagaaccacgggcugaagacccgccaggagaaguggaugacgggccggaugggggagcgccagcugcagaagaucgagcggugguucgugcgcaacccguucuucgccgucaccgcccucaccaucgccuaccuggugggcagcaacaugacccagcggguggucaucgcgcugcucgugcuggccgugggccccgccuacuccgcccacugcaucgggaucacggaccgcgacuucaucgagggcguccacgggggcaccugggugagcgcgacccuggagcaggacaagugcgugaccgucauggcccccgacaagcccucccucgacaucagccuggagacgguggccaucgaccggccggccgaggugcgcaaggucugcuacaacgccgugcugacccacgugaagaucaacgacaagugccccuccaccggcgaggcgcaccucgccgaggagaacgagggggacaacgccugcaagcggaccuacagcgaccggggcugggggaacggcugcgggcuguucggcaagggcuccaucgucgccugcgccaaguucacgugcgcgaaguccaugagccuguucgagguggaccagaccaagauccaguacgucauccgcgcccagcuccacgugggggccaagcaggagaacuggaacaccgacaucaagacccugaaguucgacgcccugagcggcagccaggagguggaguucaucggguacggcaaggccacgcucgagugccagguccagaccgcgguggacuucgggaacuccuacaucgccgagauggagaccgagagcuggaucguggaccggcagugggcccaggaccugacccugcccuggcaguccggcagcggcggggucuggcgcgagaugcaccaccucguggaguucgagcccccgcacgccgccacgauccgggugcuggcgcugggcaaccaggaggggucccucaagaccgcccugaccggcgccaugcgcgucaccaaggacacgaacgacaacaaccuguacaagcuccacgggggccacgugagcugccgggugaagcuguccgcccugacccucaagggcaccagcuacaagaucugcaccgacaagauguucuucgucaagaaccccacggacaccgggcacggcaccguggugaugcaggucaagguguccaagggggcgcccugccgcaucccggugaucgucgccgacgaccugaccgccgccaucaacaagggcauccuggugaccgugaacccgaucgccagcacgaacgacgacgagguccucaucgaggugaacccccccuucggcgacuccuacaucaucguggggcggggcgacagccgccugaccuaccaguggcacaaggagggguccagcaucggcaagcuguucacccagaccaugaagggggucgagcggcuggcggugaugggcgacacggccugggacuucuccagcgccggcggguucuucaccuccgugggcaaggggauccacaccgucuucggcagcgccuuccaggggcuguucggcggccucaacuggaucaccaaggugaucaugggggccgugcugaucugggucggcaucaacacgcgcaacaugaccauguccaugagcaugauccucgugggggugaucaugauguuccugagccugggcgucggggcggaccagggcugcgccaucaacuucggcaaguga

SEQ ID NO: 250 - RNA, 2082 nt, Artificial Sequence
  derived and/or modified CDS sequence (opt1) from YFV__NC_002031.1__SSjev(V2)-prME-XX (polyprotein: aa126-788)
augggccggaagcagaacaagcgcgggggcaacgaggggagcaucauguggcuggccucccucgccguggucaucgcgugcgccggcgcccggaagaaccgcuggcuccugcugaacgucaccuccgaggaccucggcaagaccuucagcguggggaccggcaacugcacgaccaacauccuggaggccaaguacuggugccccgacuccauggaguacaacugcccgaaccugagcccccgggaggagcccgacgacaucgacugcuggugcuacggcguggagaacguccgcguggccuacgggaagugcgacuccgcgggccggagccgccggucccgccgggccaucgaccuccccacccacgagaaccacgggcugaagacccgccaggagaaguggaugacgggccggaugggggagcgccagcugcagaagaucgagcggugguucgugcgcaacccguucuucgccgucaccgcccucaccaucgccuaccuggugggcagcaacaugacccagcggguggucaucgcgcugcucgugcuggccgugggccccgccuacuccgcccacugcaucgggaucacggaccgcgacuucaucgagggcguccacgggggcaccugggugagcgcgacccuggagcaggacaagugcgugaccgucauggcccccgacaagcccucccucgacaucagccuggagacgguggccaucgaccggccggccgaggugcgcaaggucugcuacaacgccgugcugacccacgugaagaucaacgacaagugccccuccaccggcgaggcgcaccucgccgaggagaacgagggggacaacgccugcaagcggaccuacagcgaccggggcugggggaacggcugcgggcuguucggcaagggcuccaucgucgccugcgccaaguucacgugcgcgaaguccaugagccuguucgagguggaccagaccaagauccaguacgucauccgcgcccagcuccacgugggggccaagcaggagaacuggaacaccgacaucaagacccugaaguucgacgcccugagcggcagccaggagguggaguucaucggguacggcaaggccacgcucgagugccagguccagaccgcgguggacuucgggaacuccuacaucgccgagauggagaccgagagcuggaucguggaccggcagugggcccaggaccugacccugcccuggcaguccggcagcggcggggucuggcgcgagaugcaccaccucguggaguucgagcccccgcacgccgccacgauccgggugcuggcgcugggcaaccaggaggggucccucaagaccgcccugaccggcgccaugcgcgucaccaaggacacgaacgacaacaaccuguacaagcuccacgggggccacgugagcugccgggugaagcuguccgcccugacccucaagggcaccagcuacaagaucugcaccgacaagauguucuucgucaagaaccccacggacaccgggcacggcaccguggugaugcaggucaagguguccaagggggcgcccugccgcaucccggugaucgucgccgacgaccugaccgccgccaucaacaagggcauccuggugaccgugaacccgaucgccagcacgaacgacgacgagguccucaucgaggugaacccccccuucggcgacuccuacaucaucguggggcggggcgacagccgccugaccuaccaguggcacaaggagggguccagcaucggcaagcuguucacccagaccaugaagggggucgagcggcuggcggugaugggcgacacggccugggacuucuccagcgccggcggguucuucaccuccgugggcaaggggauccacaccgucuucggcagcgccuuccaggggcuguucggcggccucaacuggaucaccaaggugaucaugggggccgugcugaucugggucggcaucaacacgcgcaacaugaccauguccaugagcaugauccucgugggggugaucaugauguuccugagccugggcgucggggcggaccagggcugcgccaucaacuucggcaaguga

SEQ ID NO: 251 - RNA, 2064 nt, Artificial Sequence
  derived and/or modified CDS sequence (opt1) from YFV__NC_002031.1__SSjev(V2)-prME (polyprotein: aa122-778)
augggccggaagcagaacaagcgcgggggcaacgaggggagcaucauguggcuggccucccucgccguggucaucgcgugcgccggcgccgugacgcuggugcggaagaaccgcuggcuccugcugaacgucaccuccgaggaccucggcaagaccuucagcguggggaccggcaacugcacgaccaacauccuggaggccaaguacuggugccccgacuccauggaguacaacugcccgaaccugagcccccgggaggagcccgacgacaucgacugcuggugcuacggcguggagaacguccgcguggccuacgggaagugcgacuccgcgggccggagccgccggucccgccgggccaucgaccuccccacccacgagaaccacgggcugaagacccgccaggagaaguggaugacgggccggaugggggagcgccagcugcagaagaucgagcggugguucgugcgcaacccguucuucgccgucaccgcccucaccaucgccuaccuggugggcagcaacaugacccagcggguggucaucgcgcugcucgugcuggccgugggccccgccuacuccgcccacugcaucgggaucacggaccgcgacuucaucgagggcguccacgggggcaccugggugagcgcgacccuggagcaggacaagugcgugaccgucauggcccccgacaagcccucccucgacaucagccuggagacgguggccaucgaccggccggccgaggugcgcaaggucugcuacaacgccgugcugacccacgugaagaucaacgacaagugccccuccaccggcgaggcgcaccucgccgaggagaacgagggggacaacgccugcaagcggaccuacagcgaccggggcugggggaacggcugcgggcuguucggcaagggcuccaucgucgccugcgccaaguucacgugcgcgaaguccaugagccuguucgagguggaccagaccaagauccaguacgucauccgcgcccagcuccacgugggggccaagcaggagaacuggaacaccgacaucaagacccugaaguucgacgcccugagcggcagccaggagguggaguucaucggguacggcaaggccacgcucgagugccagguccagaccgcgguggacuucgggaacuccuacaucgccgagauggagaccgagagcuggaucguggaccggcagugggcccaggaccugacccugcccuggcaguccggcagcggcggggucuggcgcgagaugcaccaccucguggaguucgagcccccgcacgccgccacgauccgggugcuggcgcugggcaaccaggaggggucccucaagaccgcccugaccggcgccaugcgcgucaccaaggacacgaacgacaacaaccuguacaagcuccacgggggccacgugagcugccgggugaagcuguccgcccugacccucaagggcaccagcuacaagaucugcaccgacaagauguucuucgucaagaaccccacggacaccgggcacggcaccguggugaugcaggucaagguguccaagggggcgcccugccgcaucccggugaucgucgccgacgaccugaccgccgccaucaacaagggcauccuggugaccgugaacccgaucgccagcacgaacgacgacgagguccucaucgaggugaacccccccuucggcgacuccuacaucaucguggggcggggcgacagccgccugaccuaccaguggcacaaggagggguccagcaucggcaagcuguucacccagaccaugaagggggucgagcggcuggcggugaugggcgacacggccugggacuucuccagcgccggcggguucuucaccuccgugggcaaggggauccacaccgucuucggcagcgccuuccaggggcuguucggcggccucaacuggaucaccaaggugaucaugggggccgugcugaucugggucggcaucaacacgcgcaacaugaccauguccaugagcaugauccucgugggggugaucaugauguuccugagccugggcgucggggcguga

SEQ ID NO: 252 - RNA, 2052 nt, Artificial Sequence
  derived and/or modified CDS sequence (opt1) from YFV__NC_002031.1__SSjev(V2)-prME (polyprotein: aa126-778)
augggccggaagcagaacaagcgcgggggcaacgaggggagcaucauguggcuggccucccucgccguggucaucgcgugcgccggcgcccggaagaaccgcuggcuccugcugaacgucaccuccgaggaccucggcaagaccuucagcguggggaccggcaacugcacgaccaacauccuggaggccaaguacuggugccccgacuccauggaguacaacugcccgaaccugagcccccgggaggagcccgacgacaucgacugcuggugcuacggcguggagaacguccgcguggccuacgggaagugcgacuccgcgggccggagccgccggucccgccgggccaucgaccuccccacccacgagaaccacgggcugaagacccgccaggagaaguggaugacgggccggaugggggagcgccagcugcagaagaucgagcggugguucgugcgcaacccguucuucgccgucaccgcccucaccaucgccuaccuggugggcagcaacaugacccagcggguggucaucgcgcugcucgugcuggccgugggccccgccuacuccgcccacugcaucgggaucacggaccgcgacuucaucgagggcguccacgggggcaccugggugagcgcgacccuggagcaggacaagugcgugaccgucauggcccccgacaagcccucccucgacaucagccuggagacgguggccaucgaccggccggccgaggugcgcaaggucugcuacaacgccgugcugacccacgugaagaucaacgacaagugccccuccaccggcgaggcgcaccucgccgaggagaacgagggggacaacgccugcaagcggaccuacagcgaccggggcugggggaacggcugcgggcuguucggcaagggcuccaucgucgccugcgccaaguucacgugcgcgaaguccaugagccuguucgagguggaccagaccaagauccaguacgucauccgcgcccagcuccacgugggggccaagcaggagaacuggaacaccgacaucaagacccugaaguucgacgcccugagcggcagccaggagguggaguucaucggguacggcaaggccacgcucgagugccagguccagaccgcgguggacuucgggaacuccuacaucgccgagauggagaccgagagcuggaucguggaccggcagugggcccaggaccugacccugcccuggcaguccggcagcggcggggucuggcgcgagaugcaccaccucguggaguucgagcccccgcacgccgccacgauccgggugcuggcgcugggcaaccaggaggggucccucaagaccgcccugaccggcgccaugcgcgucaccaaggacacgaacgacaacaaccuguacaagcuccacgggggccacgugagcugccgggugaagcuguccgcccugacccucaagggcaccagcuacaagaucugcaccgacaagauguucuucgucaagaaccccacggacaccgggcacggcaccguggugaugcaggucaagguguccaagggggcgcccugccgcaucccggugaucgucgccgacgaccugaccgccgccaucaacaagggcauccuggugaccgugaacccgaucgccagcacgaacgacgacgagguccucaucgaggugaacccccccuucggcgacuccuacaucaucguggggcggggcgacagccgccugaccuaccaguggcacaaggagggguccagcaucggcaagcuguucacccagaccaugaagggggucgagcggcuggcggugaugggcgacacggccugggacuucuccagcgccggcggguucuucaccuccgugggcaaggggauccacaccgucuucggcagcgccuuccaggggcuguucggcggccucaacuggaucaccaaggugaucaugggggccgugcugaucugggucggcaucaacacgcgcaacaugaccauguccaugagcaugauccucgugggggugaucaugauguuccugagccugggcgucggggcguga

SEQ ID NO: 253 - RNA, 2067 nt, Artificial Sequence
  derived and/or modified CDS sequence (opt1) from YFV__NC_002031.1__SSjev(V3)-prME-XX (polyprotein: aa122-788)
augaacgagggcagcaucauguggcuggccucccucgccguggucaucgcgugcgccggggccgugacgcuggugcggaagaaccgcuggcuccugcugaacgucaccuccgaggaccucggcaagaccuucagcguggggaccggcaacugcacgaccaacauccuggaggccaaguacuggugccccgacuccauggaguacaacugcccgaaccugagcccccgggaggagcccgacgacaucgacugcuggugcuacggcguggagaacguccgcguggccuacgggaagugcgacuccgcgggccggagccgccggucccgccgggccaucgaccuccccacccacgagaaccacgggcugaagacccgccaggagaaguggaugacgggccggaugggggagcgccagcugcagaagaucgagcggugguucgugcgcaacccguucuucgccgucaccgcccucaccaucgccuaccuggugggcagcaacaugacccagcggguggucaucgcgcugcucgugcuggccgugggccccgccuacuccgcccacugcaucgggaucacggaccgcgacuucaucgagggcguccacgggggcaccugggugagcgcgacccuggagcaggacaagugcgugaccgucauggcccccgacaagcccucccucgacaucagccuggagacgguggccaucgaccggccggccgaggugcgcaaggucugcuacaacgccgugcugacccacgugaagaucaacgacaagugccccuccaccggcgaggcgcaccucgccgaggagaacgagggggacaacgccugcaagcggaccuacagcgaccggggcugggggaacggcugcgggcuguucggcaagggcuccaucgucgccugcgccaaguucacgugcgcgaaguccaugagccuguucgagguggaccagaccaagauccaguacgucauccgcgcccagcuccacgugggggccaagcaggagaacuggaacaccgacaucaagacccugaaguucgacgcccugagcggcagccaggagguggaguucaucggguacggcaaggccacgcucgagugccagguccagaccgcgguggacuucgggaacuccuacaucgccgagauggagaccgagagcuggaucguggaccggcagugggcccaggaccugacccugcccuggcaguccggcagcggcggggucuggcgcgagaugcaccaccucguggaguucgagcccccgcacgccgccacgauccgggugcuggcgcugggcaaccaggaggggucccucaagaccgcccugaccggcgccaugcgcgucaccaaggacacgaacgacaacaaccuguacaagcuccacgggggccacgugagcugccgggugaagcuguccgcccugacccucaagggcaccagcuacaagaucugcaccgacaagauguucuucgucaagaaccccacggacaccgggcacggcaccguggugaugcaggucaagguguccaagggggcgcccugccgcaucccggugaucgucgccgacgaccugaccgccgccaucaacaagggcauccuggugaccgugaacccgaucgccagcacgaacgacgacgagguccucaucgaggugaacccccccuucggcgacuccuacaucaucguggggcggggcgacagccgccugaccuaccaguggcacaaggagggguccagcaucggcaagcuguucacccagaccaugaagggggucgagcggcuggcggugaugggcgacacggccugggacuucuccagcgccggcggguucuucaccuccgugggcaaggggauccacaccgucuucggcagcgccuuccaggggcuguucggcggccucaacuggaucaccaaggugaucaugggggccgugcugaucugggucggcaucaacacgcgcaacaugaccauguccaugagcaugauccucgugggggugaucaugauguuccugagccugggcgucggggcggaccagggcugcgccaucaacuucggcaaguga

SEQ ID NO: 254 - RNA, 2055 nt, Artificial Sequence
  derived and/or modified CDS sequence (opt1) from YFV__NC_002031.1__SSjev(V3)-prME-XX (polyprotein: aa126-788)
augaacgagggcagcaucauguggcuggccucccucgccguggucaucgcgugcgccggggcccggaagaaccgcuggcuccugcugaacgucaccuccgaggaccucggcaagaccuucagcguggggaccggcaacugcacgaccaacauccuggaggccaaguacuggugccccgacuccauggaguacaacugcccgaaccugagcccccgggaggagcccgacgacaucgacugcuggugcuacggcguggagaacguccgcguggccuacgggaagugcgacuccgcgggccggagccgccggucccgccgggccaucgaccuccccacccacgagaaccacgggcugaagacccgccaggagaaguggaugacgggccggaugggggagcgccagcugcagaagaucgagcggugguucgugcgcaacccguucuucgccgucaccgcccucaccaucgccuaccuggugggcagcaacaugacccagcggguggucaucgcgcugcucgugcuggccgugggccccgccuacuccgcccacugcaucgggaucacggaccgcgacuucaucgagggcguccacgggggcaccugggugagcgcgacccuggagcaggacaagugcgugaccgucauggcccccgacaagcccucccucgacaucagccuggagacgguggccaucgaccggccggccgaggugcgcaaggucugcuacaacgccgugcugacccacgugaagaucaacgacaagugccccuccaccggcgaggcgcaccucgccgaggagaacgagggggacaacgccugcaagcggaccuacagcgaccggggcugggggaacggcugcgggcuguucggcaagggcuccaucgucgccugcgccaaguucacgugcgcgaaguccaugagccuguucgagguggaccagaccaagauccaguacgucauccgcgcccagcuccacgugggggccaagcaggagaacuggaacaccgacaucaagacccugaaguucgacgcccugagcggcagccaggagguggaguucaucggguacggcaaggccacgcucgagugccagguccagaccgcgguggacuucgggaacuccuacaucgccgagauggagaccgagagcuggaucguggaccggcagugggcccaggaccugacccugcccuggcaguccggcagcggcggggucuggcgcgagaugcaccaccucguggaguucgagcccccgcacgccgccacgauccgggugcuggcgcugggcaaccaggaggggucccucaagaccgcccugaccggcgccaugcgcgucaccaaggacacgaacgacaacaaccuguacaagcuccacgggggccacgugagcugccgggugaagcuguccgcccugacccucaagggcaccagcuacaagaucugcaccgacaagauguucuucgucaagaaccccacggacaccgggcacggcaccguggugaugcaggucaagguguccaagggggcgcccugccgcaucccggugaucgucgccgacgaccugaccgccgccaucaacaagggcauccuggugaccgugaacccgaucgccagcacgaacgacgacgagguccucaucgaggugaacccccccuucggcgacuccuacaucaucguggggcggggcgacagccgccugaccuaccaguggcacaaggagggguccagcaucggcaagcuguucacccagaccaugaagggggucgagcggcuggcggugaugggcgacacggccugggacuucuccagcgccggcggguucuucaccuccgugggcaaggggauccacaccgucuucggcagcgccuuccaggggcuguucggcggccucaacuggaucaccaaggugaucaugggggccgugcugaucugggucggcaucaacacgcgcaacaugaccauguccaugagcaugauccucgugggggugaucaugauguuccugagccugggcgucggggcggaccagggcugcgccaucaacuucggcaaguga

SEQ ID NO: 255 - RNA, 2037 nt, Artificial Sequence
  derived and/or modified CDS sequence (opt1) from YFV__NC_002031.1__SSjev(V3)-prME (polyprotein: aa122-778)
augaacgagggcagcaucauguggcuggccucccucgccguggucaucgcgugcgccggggccgugacgcuggugcggaagaaccgcuggcuccugcugaacgucaccuccgaggaccucggcaagaccuucagcguggggaccggcaacugcacgaccaacauccuggaggccaaguacuggugccccgacuccauggaguacaacugcccgaaccugagcccccgggaggagcccgacgacaucgacugcuggugcuacggcguggagaacguccgcguggccuacgggaagugcgacuccgcgggccggagccgccggucccgccgggccaucgaccuccccacccacgagaaccacgggcugaagacccgccaggagaaguggaugacgggccggaugggggagcgccagcugcagaagaucgagcggugguucgugcgcaacccguucuucgccgucaccgcccucaccaucgccuaccuggugggcagcaacaugacccagcggguggucaucgcgcugcucgugcuggccgugggccccgccuacuccgcccacugcaucgggaucacggaccgcgacuucaucgagggcguccacgggggcaccugggugagcgcgacccuggagcaggacaagugcgugaccgucauggcccccgacaagcccucccucgacaucagccuggagacgguggccaucgaccggccggccgaggugcgcaaggucugcuacaacgccgugcugacccacgugaagaucaacgacaagugccccuccaccggcgaggcgcaccucgccgaggagaacgagggggacaacgccugcaagcggaccuacagcgaccggggcugggggaacggcugcgggcuguucggcaagggcuccaucgucgccugcgccaaguucacgugcgcgaaguccaugagccuguucgagguggaccagaccaagauccaguacgucauccgcgcccagcuccacgugggggccaagcaggagaacuggaacaccgacaucaagacccugaaguucgacgcccugagcggcagccaggagguggaguucaucggguacggcaaggccacgcucgagugccagguccagaccgcgguggacuucgggaacuccuacaucgccgagauggagaccgagagcuggaucguggaccggcagugggcccaggaccugacccugcccuggcaguccggcagcggcggggucuggcgcgagaugcaccaccucguggaguucgagcccccgcacgccgccacgauccgggugcuggcgcugggcaaccaggaggggucccucaagaccgcccugaccggcgccaugcgcgucaccaaggacacgaacgacaacaaccuguacaagcuccacgggggccacgugagcugccgggugaagcuguccgcccugacccucaagggcaccagcuacaagaucugcaccgacaagauguucuucgucaagaaccccacggacaccgggcacggcaccguggugaugcaggucaagguguccaagggggcgcccugccgcaucccggugaucgucgccgacgaccugaccgccgccaucaacaagggcauccuggugaccgugaacccgaucgccagcacgaacgacgacgagguccucaucgaggugaacccccccuucggcgacuccuacaucaucguggggcggggcgacagccgccugaccuaccaguggcacaaggagggguccagcaucggcaagcuguucacccagaccaugaagggggucgagcggcuggcggugaugggcgacacggccugggacuucuccagcgccggcggguucuucaccuccgugggcaaggggauccacaccgucuucggcagcgccuuccaggggcuguucggcggccucaacuggaucaccaaggugaucaugggggccgugcugaucugggucggcaucaacacgcgcaacaugaccauguccaugagcaugauccucgugggggugaucaugauguuccugagccugggcgucggggcguga

SEQ ID NO: 256 - RNA, 2025 nt, Artificial Sequence
  derived and/or modified CDS sequence (opt1) from YFV__NC_002031.1__SSjev(V3)-prME (polyprotein: aa126-778)
augaacgagggcagcaucauguggcuggccucccucgccguggucaucgcgugcgccggggcccggaagaaccgcuggcuccugcugaacgucaccuccgaggaccucggcaagaccuucagcguggggaccggcaacugcacgaccaacauccuggaggccaaguacuggugccccgacuccauggaguacaacugcccgaaccugagcccccgggaggagcccgacgacaucgacugcuggugcuacggcguggagaacguccgcguggccuacgggaagugcgacuccgcgggccggagccgccggucccgccgggccaucgaccuccccacccacgagaaccacgggcugaagacccgccaggagaaguggaugacgggccggaugggggagcgccagcugcagaagaucgagcggugguucgugcgcaacccguucuucgccgucaccgcccucaccaucgccuaccuggugggcagcaacaugacccagcggguggucaucgcgcugcucgugcuggccgugggccccgccuacuccgcccacugcaucgggaucacggaccgcgacuucaucgagggcguccacgggggcaccugggugagcgcgacccuggagcaggacaagugcgugaccgucauggcccccgacaagcccucccucgacaucagccuggagacgguggccaucgaccggccggccgaggugcgcaaggucugcuacaacgccgugcugacccacgugaagaucaacgacaagugccccuccaccggcgaggcgcaccucgccgaggagaacgagggggacaacgccugcaagcggaccuacagcgaccggggcugggggaacggcugcgggcuguucggcaagggcuccaucgucgccugcgccaaguucacgugcgcgaaguccaugagccuguucgagguggaccagaccaagauccaguacgucauccgcgcccagcuccacgugggggccaagcaggagaacuggaacaccgacaucaagacccugaaguucgacgcccugagcggcagccaggagguggaguucaucggguacggcaaggccacgcucgagugccagguccagaccgcgguggacuucgggaacuccuacaucgccgagauggagaccgagagcuggaucguggaccggcagugggcccaggaccugacccugcccuggcaguccggcagcggcggggucuggcgcgagaugcaccaccucguggaguucgagcccccgcacgccgccacgauccgggugcuggcgcugggcaaccaggaggggucccucaagaccgcccugaccggcgccaugcgcgucaccaaggacacgaacgacaacaaccuguacaagcuccacgggggccacgugagcugccgggugaagcuguccgcccugacccucaagggcaccagcuacaagaucugcaccgacaagauguucuucgucaagaaccccacggacaccgggcacggcaccguggugaugcaggucaagguguccaagggggcgcccugccgcaucccggugaucgucgccgacgaccugaccgccgccaucaacaagggcauccuggugaccgugaacccgaucgccagcacgaacgacgacgagguccucaucgaggugaacccccccuucggcgacuccuacaucaucguggggcggggcgacagccgccugaccuaccaguggcacaaggagggguccagcaucggcaagcuguucacccagaccaugaagggggucgagcggcuggcggugaugggcgacacggccugggacuucuccagcgccggcggguucuucaccuccgugggcaaggggauccacaccgucuucggcagcgccuuccaggggcuguucggcggccucaacuggaucaccaaggugaucaugggggccgugcugaucugggucggcaucaacacgcgcaacaugaccauguccaugagcaugauccucgugggggugaucaugauguuccugagccugggcgucggggcguga

SEQ ID NO: 257 - RNA, 2076 nt, Artificial Sequence
  derived and/or modified CDS sequence (opt1) from YFV__NC_002031.1__SSjev(V4)-prME-XX (polyprotein: aa122-788)
augcugggcagcaacuccgggcagcgcguggucuucaccauccuccugcugcucguggcccccgccuacagcgugacgcuggugcggaagaaccgcuggcuccugcugaacgucaccuccgaggaccucggcaagaccuucagcguggggaccggcaacugcacgaccaacauccuggaggccaaguacuggugccccgacuccauggaguacaacugcccgaaccugagcccccgggaggagcccgacgacaucgacugcuggugcuacggcguggagaacguccgcguggccuacgggaagugcgacuccgcgggccggagccgccggucccgccgggccaucgaccuccccacccacgagaaccacgggcugaagacccgccaggagaaguggaugacgggccggaugggggagcgccagcugcagaagaucgagcggugguucgugcgcaacccguucuucgccgucaccgcccucaccaucgccuaccuggugggcagcaacaugacccagcggguggucaucgcgcugcucgugcuggccgugggccccgccuacuccgcccacugcaucgggaucacggaccgcgacuucaucgagggcguccacgggggcaccugggugagcgcgacccuggagcaggacaagugcgugaccgucauggcccccgacaagcccucccucgacaucagccuggagacgguggccaucgaccggccggccgaggugcgcaaggucugcuacaacgccgugcugacccacgugaagaucaacgacaagugccccuccaccggcgaggcgcaccucgccgaggagaacgagggggacaacgccugcaagcggaccuacagcgaccggggcugggggaacggcugcgggcuguucggcaagggcuccaucgucgccugcgccaaguucacgugcgcgaaguccaugagccuguucgagguggaccagaccaagauccaguacgucauccgcgcccagcuccacgugggggccaagcaggagaacuggaacaccgacaucaagacccugaaguucgacgcccugagcggcagccaggagguggaguucaucggguacggcaaggccacgcucgagugccagguccagaccgcgguggacuucgggaacuccuacaucgccgagauggagaccgagagcuggaucguggaccggcagugggcccaggaccugacccugcccuggcaguccggcagcggcggggucuggcgcgagaugcaccaccucguggaguucgagcccccgcacgccgccacgauccgggugcuggcgcugggcaaccaggaggggucccucaagaccgcccugaccggcgccaugcgcgucaccaaggacacgaacgacaacaaccuguacaagcuccacgggggccacgugagcugccgggugaagcuguccgcccugacccucaagggcaccagcuacaagaucugcaccgacaagauguucuucgucaagaaccccacggacaccgggcacggcaccguggugaugcaggucaagguguccaagggggcgcccugccgcaucccggugaucgucgccgacgaccugaccgccgccaucaacaagggcauccuggugaccgugaacccgaucgccagcacgaacgacgacgagguccucaucgaggugaacccccccuucggcgacuccuacaucaucguggggcggggcgacagccgccugaccuaccaguggcacaaggagggguccagcaucggcaagcuguucacccagaccaugaagggggucgagcggcuggcggugaugggcgacacggccugggacuucuccagcgccggcggguucuucaccuccgugggcaaggggauccacaccgucuucggcagcgccuuccaggggcuguucggcggccucaacuggaucaccaaggugaucaugggggccgugcugaucugggucggcaucaacacgcgcaacaugaccauguccaugagcaugauccucgugggggugaucaugauguuccugagccugggcgucggggcggaccagggcugcgccaucaacuucggcaaguga

SEQ ID NO: 258 - RNA, 2064 nt, Artificial Sequence
  derived and/or modified CDS sequence (opt1) from YFV__NC_002031.1__SSjev(V4)-prME-XX (polyprotein: aa126-788)
augcugggcagcaacuccgggcagcgcguggucuucaccauccuccugcugcucguggcccccgccuacagccggaagaaccgcuggcuccugcugaacgucaccuccgaggaccucggcaagaccuucagcguggggaccggcaacugcacgaccaacauccuggaggccaaguacuggugccccgacuccauggaguacaacugcccgaaccugagcccccgggaggagcccgacgacaucgacugcuggugcuacggcguggagaacguccgcguggccuacgggaagugcgacuccgcgggccggagccgccggucccgccgggccaucgaccuccccacccacgagaaccacgggcugaagacccgccaggagaaguggaugacgggccggaugggggagcgccagcugcagaagaucgagcggugguucgugcgcaacccguucuucgccgucaccgcccucaccaucgccuaccuggugggcagcaacaugacccagcggguggucaucgcgcugcucgugcuggccgugggccccgccuacuccgcccacugcaucgggaucacggaccgcgacuucaucgagggcguccacgggggcaccugggugagcgcgacccuggagcaggacaagugcgugaccgucauggcccccgacaagcccucccucgacaucagccuggagacgguggccaucgaccggccggccgaggugcgcaaggucugcuacaacgccgugcugacccacgugaagaucaacgacaagugccccuccaccggcgaggcgcaccucgccgaggagaacgagggggacaacgccugcaagcggaccuacagcgaccggggcugggggaacggcugcgggcuguucggcaagggcuccaucgucgccugcgccaaguucacgugcgcgaaguccaugagccuguucgagguggaccagaccaagauccaguacgucauccgcgcccagcuccacgugggggccaagcaggagaacuggaacaccgacaucaagacccugaaguucgacgcccugagcggcagccaggagguggaguucaucggguacggcaaggccacgcucgagugccagguccagaccgcgguggacuucgggaacuccuacaucgccgagauggagaccgagagcuggaucguggaccggcagugggcccaggaccugacccugcccuggcaguccggcagcggcggggucuggcgcgagaugcaccaccucguggaguucgagcccccgcacgccgccacgauccgggugcuggcgcugggcaaccaggaggggucccucaagaccgcccugaccggcgccaugcgcgucaccaaggacacgaacgacaacaaccuguacaagcuccacgggggccacgugagcugccgggugaagcuguccgcccugacccucaagggcaccagcuacaagaucugcaccgacaagauguucuucgucaagaaccccacggacaccgggcacggcaccguggugaugcaggucaagguguccaagggggcgcccugccgcaucccggugaucgucgccgacgaccugaccgccgccaucaacaagggcauccuggugaccgugaacccgaucgccagcacgaacgacgacgagguccucaucgaggugaacccccccuucggcgacuccuacaucaucguggggcggggcgacagccgccugaccuaccaguggcacaaggagggguccagcaucggcaagcuguucacccagaccaugaagggggucgagcggcuggcggugaugggcgacacggccugggacuucuccagcgccggcggguucuucaccuccgugggcaaggggauccacaccgucuucggcagcgccuuccaggggcuguucggcggccucaacuggaucaccaaggugaucaugggggccgugcugaucugggucggcaucaacacgcgcaacaugaccauguccaugagcaugauccucgugggggugaucaugauguuccugagccugggcgucggggcggaccagggcugcgccaucaacuucggcaaguga

SEQ ID NO: 259 - RNA, 2046 nt, Artificial Sequence
  derived and/or modified CDS sequence (opt1) from YFV__NC_002031.1__SSjev(V4)-prME (polyprotein: aa122-778)
augcugggcagcaacuccgggcagcgcguggucuucaccauccuccugcugcucguggcccccgccuacagcgugacgcuggugcggaagaaccgcuggcuccugcugaacgucaccuccgaggaccucggcaagaccuucagcguggggaccggcaacugcacgaccaacauccuggaggccaaguacuggugccccgacuccauggaguacaacugcccgaaccugagcccccgggaggagcccgacgacaucgacugcuggugcuacggcguggagaacguccgcguggccuacgggaagugcgacuccgcgggccggagccgccggucccgccgggccaucgaccuccccacccacgagaaccacgggcugaagacccgccaggagaaguggaugacgggccggaugggggagcgccagcugcagaagaucgagcggugguucgugcgcaacccguucuucgccgucaccgcccucaccaucgccuaccuggugggcagcaacaugacccagcggguggucaucgcgcugcucgugcuggccgugggccccgccuacuccgcccacugcaucgggaucacggaccgcgacuucaucgagggcguccacgggggcaccugggugagcgcgacccuggagcaggacaagugcgugaccgucauggcccccgacaagcccucccucgacaucagccuggagacgguggccaucgaccggccggccgaggugcgcaaggucugcuacaacgccgugcugacccacgugaagaucaacgacaagugccccuccaccggcgaggcgcaccucgccgaggagaacgagggggacaacgccugcaagcggaccuacagcgaccggggcugggggaacggcugcgggcuguucggcaagggcuccaucgucgccugcgccaaguucacgugcgcgaaguccaugagccuguucgagguggaccagaccaagauccaguacgucauccgcgcccagcuccacgugggggccaagcaggagaacuggaacaccgacaucaagacccugaaguucgacgcccugagcggcagccaggagguggaguucaucggguacggcaaggccacgcucgagugccagguccagaccgcgguggacuucgggaacuccuacaucgccgagauggagaccgagagcuggaucguggaccggcagugggcccaggaccugacccugcccuggcaguccggcagcggcggggucuggcgcgagaugcaccaccucguggaguucgagcccccgcacgccgccacgauccgggugcuggcgcugggcaaccaggaggggucccucaagaccgcccugaccggcgccaugcgcgucaccaaggacacgaacgacaacaaccuguacaagcuccacgggggccacgugagcugccgggugaagcuguccgcccugacccucaagggcaccagcuacaagaucugcaccgacaagauguucuucgucaagaaccccacggacaccgggcacggcaccguggugaugcaggucaagguguccaagggggcgcccugccgcaucccggugaucgucgccgacgaccugaccgccgccaucaacaagggcauccuggugaccgugaacccgaucgccagcacgaacgacgacgagguccucaucgaggugaacccccccuucggcgacuccuacaucaucguggggcggggcgacagccgccugaccuaccaguggcacaaggagggguccagcaucggcaagcuguucacccagaccaugaagggggucgagcggcuggcggugaugggcgacacggccugggacuucuccagcgccggcggguucuucaccuccgugggcaaggggauccacaccgucuucggcagcgccuuccaggggcuguucggcggccucaacuggaucaccaaggugaucaugggggccgugcugaucugggucggcaucaacacgcgcaacaugaccauguccaugagcaugauccucgugggggugaucaugauguuccugagccugggcgucggggcguga

SEQ ID NO: 260 - RNA, 2034 nt, Artificial Sequence
  derived and/or modified CDS sequence (opt1) from YFV__NC_002031.1__SSjev(V4)-prME (polyprotein: aa126-778)
augcugggcagcaacuccgggcagcgcguggucuucaccauccuccugcugcucguggcccccgccuacagccggaagaaccgcuggcuccugcugaacgucaccuccgaggaccucggcaagaccuucagcguggggaccggcaacugcacgaccaacauccuggaggccaaguacuggugccccgacuccauggaguacaacugcccgaaccugagcccccgggaggagcccgacgacaucgacugcuggugcuacggcguggagaacguccgcguggccuacgggaagugcgacuccgcgggccggagccgccggucccgccgggccaucgaccuccccacccacgagaaccacgggcugaagacccgccaggagaaguggaugacgggccggaugggggagcgccagcugcagaagaucgagcggugguucgugcgcaacccguucuucgccgucaccgcccucaccaucgccuaccuggugggcagcaacaugacccagcggguggucaucgcgcugcucgugcuggccgugggccccgccuacuccgcccacugcaucgggaucacggaccgcgacuucaucgagggcguccacgggggcaccugggugagcgcgacccuggagcaggacaagugcgugaccgucauggcccccgacaagcccucccucgacaucagccuggagacgguggccaucgaccggccggccgaggugcgcaaggucugcuacaacgccgugcugacccacgugaagaucaacgacaagugccccuccaccggcgaggcgcaccucgccgaggagaacgagggggacaacgccugcaagcggaccuacagcgaccggggcugggggaacggcugcgggcuguucggcaagggcuccaucgucgccugcgccaaguucacgugcgcgaaguccaugagccuguucgagguggaccagaccaagauccaguacgucauccgcgcccagcuccacgugggggccaagcaggagaacuggaacaccgacaucaagacccugaaguucgacgcccugagcggcagccaggagguggaguucaucggguacggcaaggccacgcucgagugccagguccagaccgcgguggacuucgggaacuccuacaucgccgagauggagaccgagagcuggaucguggaccggcagugggcccaggaccugacccugcccuggcaguccggcagcggcggggucuggcgcgagaugcaccaccucguggaguucgagcccccgcacgccgccacgauccgggugcuggcgcugggcaaccaggaggggucccucaagaccgcccugaccggcgccaugcgcgucaccaaggacacgaacgacaacaaccuguacaagcuccacgggggccacgugagcugccgggugaagcuguccgcccugacccucaagggcaccagcuacaagaucugcaccgacaagauguucuucgucaagaaccccacggacaccgggcacggcaccguggugaugcaggucaagguguccaagggggcgcccugccgcaucccggugaucgucgccgacgaccugaccgccgccaucaacaagggcauccuggugaccgugaacccgaucgccagcacgaacgacgacgagguccucaucgaggugaacccccccuucggcgacuccuacaucaucguggggcggggcgacagccgccugaccuaccaguggcacaaggagggguccagcaucggcaagcuguucacccagaccaugaagggggucgagcggcuggcggugaugggcgacacggccugggacuucuccagcgccggcggguucuucaccuccgugggcaaggggauccacaccgucuucggcagcgccuuccaggggcuguucggcggccucaacuggaucaccaaggugaucaugggggccgugcugaucugggucggcaucaacacgcgcaacaugaccauguccaugagcaugauccucgugggggugaucaugauguuccugagccugggcgucggggcguga

SEQ ID NO: 261 - RNA, 2049 nt, Artificial Sequence
  derived and/or modified CDS sequence (opt1) from YFV__NC_002031.1__SSjev(V5)-prME-XX (polyprotein: aa122-788)
auguggcuggugagccucgccaucgucaccgccugcgcgggcgccgugacgcuggugcggaagaaccgcuggcuccugcugaacgucaccuccgaggaccucggcaagaccuucagcguggggaccggcaacugcacgaccaacauccuggaggccaaguacuggugccccgacuccauggaguacaacugcccgaaccugagcccccgggaggagcccgacgacaucgacugcuggugcuacggcguggagaacguccgcguggccuacgggaagugcgacuccgcgggccggagccgccggucccgccgggccaucgaccuccccacccacgagaaccacgggcugaagacccgccaggagaaguggaugacgggccggaugggggagcgccagcugcagaagaucgagcggugguucgugcgcaacccguucuucgccgucaccgcccucaccaucgccuaccuggugggcagcaacaugacccagcggguggucaucgcgcugcucgugcuggccgugggccccgccuacuccgcccacugcaucgggaucacggaccgcgacuucaucgagggcguccacgggggcaccugggugagcgcgacccuggagcaggacaagugcgugaccgucauggcccccgacaagcccucccucgacaucagccuggagacgguggccaucgaccggccggccgaggugcgcaaggucugcuacaacgccgugcugacccacgugaagaucaacgacaagugccccuccaccggcgaggcgcaccucgccgaggagaacgagggggacaacgccugcaagcggaccuacagcgaccggggcugggggaacggcugcgggcuguucggcaagggcuccaucgucgccugcgccaaguucacgugcgcgaaguccaugagccuguucgagguggaccagaccaagauccaguacgucauccgcgcccagcuccacgugggggccaagcaggagaacuggaacaccgacaucaagacccugaaguucgacgcccugagcggcagccaggagguggaguucaucggguacggcaaggccacgcucgagugccagguccagaccgcgguggacuucgggaacuccuacaucgccgagauggagaccgagagcuggaucguggaccggcagugggcccaggaccugacccugcccuggcaguccggcagcggcggggucuggcgcgagaugcaccaccucguggaguucgagcccccgcacgccgccacgauccgggugcuggcgcugggcaaccaggaggggucccucaagaccgcccugaccggcgccaugcgcgucaccaaggacacgaacgacaacaaccuguacaagcuccacgggggccacgugagcugccgggugaagcuguccgcccugacccucaagggcaccagcuacaagaucugcaccgacaagauguucuucgucaagaaccccacggacaccgggcacggcaccguggugaugcaggucaagguguccaagggggcgcccugccgcaucccggugaucgucgccgacgaccugaccgccgccaucaacaagggcauccuggugaccgugaacccgaucgccagcacgaacgacgacgagguccucaucgaggugaacccccccuucggcgacuccuacaucaucguggggcggggcgacagccgccugaccuaccaguggcacaaggagggguccagcaucggcaagcuguucacccagaccaugaagggggucgagcggcuggcggugaugggcgacacggccugggacuucuccagcgccggcggguucuucaccuccgugggcaaggggauccacaccgucuucggcagcgccuuccaggggcuguucggcggccucaacuggaucaccaaggugaucaugggggccgugcugaucugggucggcaucaacacgcgcaacaugaccauguccaugagcaugauccucgugggggugaucaugauguuccugagccugggcgucggggcggaccagggcugcgccaucaacuucggcaaguga

SEQ ID NO: 262 - RNA, 2037 nt, Artificial Sequence
  derived and/or modified CDS sequence (opt1) from YFV__NC_002031.1__SSjev(V5)-prME-XX (polyprotein: aa126-788)
auguggcuggugagccucgccaucgucaccgccugcgcgggcgcccggaagaaccgcuggcuccugcugaacgucaccuccgaggaccucggcaagaccuucagcguggggaccggcaacugcacgaccaacauccuggaggccaaguacuggugccccgacuccauggaguacaacugcccgaaccugagcccccgggaggagcccgacgacaucgacugcuggugcuacggcguggagaacguccgcguggccuacgggaagugcgacuccgcgggccggagccgccggucccgccgggccaucgaccuccccacccacgagaaccacgggcugaagacccgccaggagaaguggaugacgggccggaugggggagcgccagcugcagaagaucgagcggugguucgugcgcaacccguucuucgccgucaccgcccucaccaucgccuaccuggugggcagcaacaugacccagcggguggucaucgcgcugcucgugcuggccgugggccccgccuacuccgcccacugcaucgggaucacggaccgcgacuucaucgagggcguccacgggggcaccugggugagcgcgacccuggagcaggacaagugcgugaccgucauggcccccgacaagcccucccucgacaucagccuggagacgguggccaucgaccggccggccgaggugcgcaaggucugcuacaacgccgugcugacccacgugaagaucaacgacaagugccccuccaccggcgaggcgcaccucgccgaggagaacgagggggacaacgccugcaagcggaccuacagcgaccggggcugggggaacggcugcgggcuguucggcaagggcuccaucgucgccugcgccaaguucacgugcgcgaaguccaugagccuguucgagguggaccagaccaagauccaguacgucauccgcgcccagcuccacgugggggccaagcaggagaacuggaacaccgacaucaagacccugaaguucgacgcccugagcggcagccaggagguggaguucaucggguacggcaaggccacgcucgagugccagguccagaccgcgguggacuucgggaacuccuacaucgccgagauggagaccgagagcuggaucguggaccggcagugggcccaggaccugacccugcccuggcaguccggcagcggcggggucuggcgcgagaugcaccaccucguggaguucgagcccccgcacgccgccacgauccgggugcuggcgcugggcaaccaggaggggucccucaagaccgcccugaccggcgccaugcgcgucaccaaggacacgaacgacaacaaccuguacaagcuccacgggggccacgugagcugccgggugaagcuguccgcccugacccucaagggcaccagcuacaagaucugcaccgacaagauguucuucgucaagaaccccacggacaccgggcacggcaccguggugaugcaggucaagguguccaagggggcgcccugccgcaucccggugaucgucgccgacgaccugaccgccgccaucaacaagggcauccuggugaccgugaacccgaucgccagcacgaacgacgacgagguccucaucgaggugaacccccccuucggcgacuccuacaucaucguggggcggggcgacagccgccugaccuaccaguggcacaaggagggguccagcaucggcaagcuguucacccagaccaugaagggggucgagcggcuggcggugaugggcgacacggccugggacuucuccagcgccggcggguucuucaccuccgugggcaaggggauccacaccgucuucggcagcgccuuccaggggcuguucggcggccucaacuggaucaccaaggugaucaugggggccgugcugaucugggucggcaucaacacgcgcaacaugaccauguccaugagcaugauccucgugggggugaucaugauguuccugagccugggcgucggggcggaccagggcugcgccaucaacuucggcaaguga

SEQ ID NO: 263 - RNA, 2019 nt, Artificial Sequence
  derived and/or modified CDS sequence (opt1) from YFV__NC_002031.1__SSjev(V5)-prME (polyprotein: aa122-778)
auguggcuggugagccucgccaucgucaccgccugcgcgggcgccgugacgcuggugcggaagaaccgcuggcuccugcugaacgucaccuccgaggaccucggcaagaccuucagcguggggaccggcaacugcacgaccaacauccuggaggccaaguacuggugccccgacuccauggaguacaacugcccgaaccugagcccccgggaggagcccgacgacaucgacugcuggugcuacggcguggagaacguccgcguggccuacgggaagugcgacuccgcgggccggagccgccggucccgccgggccaucgaccuccccacccacgagaaccacgggcugaagacccgccaggagaaguggaugacgggccggaugggggagcgccagcugcagaagaucgagcggugguucgugcgcaacccguucuucgccgucaccgcccucaccaucgccuaccuggugggcagcaacaugacccagcggguggucaucgcgcugcucgugcuggccgugggccccgccuacuccgcccacugcaucgggaucacggaccgcgacuucaucgagggcguccacgggggcaccugggugagcgcgacccuggagcaggacaagugcgugaccgucauggcccccgacaagcccucccucgacaucagccuggagacgguggccaucgaccggccggccgaggugcgcaaggucugcuacaacgccgugcugacccacgugaagaucaacgacaagugccccuccaccggcgaggcgcaccucgccgaggagaacgagggggacaacgccugcaagcggaccuacagcgaccggggcugggggaacggcugcgggcuguucggcaagggcuccaucgucgccugcgccaaguucacgugcgcgaaguccaugagccuguucgagguggaccagaccaagauccaguacgucauccgcgcccagcuccacgugggggccaagcaggagaacuggaacaccgacaucaagacccugaaguucgacgcccugagcggcagccaggagguggaguucaucggguacggcaaggccacgcucgagugccagguccagaccgcgguggacuucgggaacuccuacaucgccgagauggagaccgagagcuggaucguggaccggcagugggcccaggaccugacccugcccuggcaguccggcagcggcggggucuggcgcgagaugcaccaccucguggaguucgagcccccgcacgccgccacgauccgggugcuggcgcugggcaaccaggaggggucccucaagaccgcccugaccggcgccaugcgcgucaccaaggacacgaacgacaacaaccuguacaagcuccacgggggccacgugagcugccgggugaagcuguccgcccugacccucaagggcaccagcuacaagaucugcaccgacaagauguucuucgucaagaaccccacggacaccgggcacggcaccguggugaugcaggucaagguguccaagggggcgcccugccgcaucccggugaucgucgccgacgaccugaccgccgccaucaacaagggcauccuggugaccgugaacccgaucgccagcacgaacgacgacgagguccucaucgaggugaacccccccuucggcgacuccuacaucaucguggggcggggcgacagccgccugaccuaccaguggcacaaggagggguccagcaucggcaagcuguucacccagaccaugaagggggucgagcggcuggcggugaugggcgacacggccugggacuucuccagcgccggcggguucuucaccuccgugggcaaggggauccacaccgucuucggcagcgccuuccaggggcuguucggcggccucaacuggaucaccaaggugaucaugggggccgugcugaucugggucggcaucaacacgcgcaacaugaccauguccaugagcaugauccucgugggggugaucaugauguuccugagccugggcgucggggcguga

SEQ ID NO: 264 - RNA, 2007 nt, Artificial Sequence
  derived and/or modified CDS sequence (opt1) from YFV__NC_002031.1__SSjev(V5)-prME (polyprotein: aa126-778)
auguggcuggugagccucgccaucgucaccgccugcgcgggcgcccggaagaaccgcuggcuccugcugaacgucaccuccgaggaccucggcaagaccuucagcguggggaccggcaacugcacgaccaacauccuggaggccaaguacuggugccccgacuccauggaguacaacugcccgaaccugagcccccgggaggagcccgacgacaucgacugcuggugcuacggcguggagaacguccgcguggccuacgggaagugcgacuccgcgggccggagccgccggucccgccgggccaucgaccuccccacccacgagaaccacgggcugaagacccgccaggagaaguggaugacgggccggaugggggagcgccagcugcagaagaucgagcggugguucgugcgcaacccguucuucgccgucaccgcccucaccaucgccuaccuggugggcagcaacaugacccagcggguggucaucgcgcugcucgugcuggccgugggccccgccuacuccgcccacugcaucgggaucacggaccgcgacuucaucgagggcguccacgggggcaccugggugagcgcgacccuggagcaggacaagugcgugaccgucauggcccccgacaagcccucccucgacaucagccuggagacgguggccaucgaccggccggccgaggugcgcaaggucugcuacaacgccgugcugacccacgugaagaucaacgacaagugccccuccaccggcgaggcgcaccucgccgaggagaacgagggggacaacgccugcaagcggaccuacagcgaccggggcugggggaacggcugcgggcuguucggcaagggcuccaucgucgccugcgccaaguucacgugcgcgaaguccaugagccuguucgagguggaccagaccaagauccaguacgucauccgcgcccagcuccacgugggggccaagcaggagaacuggaacaccgacaucaagacccugaaguucgacgcccugagcggcagccaggagguggaguucaucggguacggcaaggccacgcucgagugccagguccagaccgcgguggacuucgggaacuccuacaucgccgagauggagaccgagagcuggaucguggaccggcagugggcccaggaccugacccugcccuggcaguccggcagcggcggggucuggcgcgagaugcaccaccucguggaguucgagcccccgcacgccgccacgauccgggugcuggcgcugggcaaccaggaggggucccucaagaccgcccugaccggcgccaugcgcgucaccaaggacacgaacgacaacaaccuguacaagcuccacgggggccacgugagcugccgggugaagcuguccgcccugacccucaagggcaccagcuacaagaucugcaccgacaagauguucuucgucaagaaccccacggacaccgggcacggcaccguggugaugcaggucaagguguccaagggggcgcccugccgcaucccggugaucgucgccgacgaccugaccgccgccaucaacaagggcauccuggugaccgugaacccgaucgccagcacgaacgacgacgagguccucaucgaggugaacccccccuucggcgacuccuacaucaucguggggcggggcgacagccgccugaccuaccaguggcacaaggagggguccagcaucggcaagcuguucacccagaccaugaagggggucgagcggcuggcggugaugggcgacacggccugggacuucuccagcgccggcggguucuucaccuccgugggcaaggggauccacaccgucuucggcagcgccuuccaggggcuguucggcggccucaacuggaucaccaaggugaucaugggggccgugcugaucugggucggcaucaacacgcgcaacaugaccauguccaugagcaugauccucgugggggugaucaugauguuccugagccugggcgucggggcguga

SEQ ID NO: 265 - RNA, 2037 nt, Artificial Sequence
  derived and/or modified CDS sequence (opt1) from YFV__NC_002031.1__SSIgE-prMEdelstem_TM-JEV (polyprotein: aa122-680)
auggacuggaccuggauccuguuccucguggccgccgcgacccgcguccacagcgugacgcuggugcggaagaaccgcuggcuccugcugaacgucaccuccgaggaccucggcaagaccuucagcguggggaccggcaacugcacgaccaacauccuggaggccaaguacuggugccccgacuccauggaguacaacugcccgaaccugagcccccgggaggagcccgacgacaucgacugcuggugcuacggcguggagaacguccgcguggccuacgggaagugcgacuccgcgggccggagccgccggucccgccgggccaucgaccuccccacccacgagaaccacgggcugaagacccgccaggagaaguggaugacgggccggaugggggagcgccagcugcagaagaucgagcggugguucgugcgcaacccguucuucgccgucaccgcccucaccaucgccuaccuggugggcagcaacaugacccagcggguggucaucgcgcugcucgugcuggccgugggccccgccuacuccgcccacugcaucgggaucacggaccgcgacuucaucgagggcguccacgggggcaccugggugagcgcgacccuggagcaggacaagugcgugaccgucauggcccccgacaagcccucccucgacaucagccuggagacgguggccaucgaccggccggccgaggugcgcaaggucugcuacaacgccgugcugacccacgugaagaucaacgacaagugccccuccaccggcgaggcgcaccucgccgaggagaacgagggggacaacgccugcaagcggaccuacagcgaccggggcugggggaacggcugcgggcuguucggcaagggcuccaucgucgccugcgccaaguucacgugcgcgaaguccaugagccuguucgagguggaccagaccaagauccaguacgucauccgcgcccagcuccacgugggggccaagcaggagaacuggaacaccgacaucaagacccugaaguucgacgcccugagcggcagccaggagguggaguucaucggguacggcaaggccacgcucgagugccagguccagaccgcgguggacuucgggaacuccuacaucgccgagauggagaccgagagcuggaucguggaccggcagugggcccaggaccugacccugcccuggcaguccggcagcggcggggucuggcgcgagaugcaccaccucguggaguucgagcccccgcacgccgccacgauccgggugcuggcgcugggcaaccaggaggggucccucaagaccgcccugaccggcgccaugcgcgucaccaaggacacgaacgacaacaaccuguacaagcuccacgggggccacgugagcugccgggugaagcuguccgcccugacccucaagggcaccagcuacaagaucugcaccgacaagauguucuucgucaagaaccccacggacaccgggcacggcaccguggugaugcaggucaagguguccaagggggcgcccugccgcaucccggugaucgucgccgacgaccugaccgccgccaucaacaagggcauccuggugaccgugaacccgaucgccagcacgaacgacgacgagguccucaucgaggugaacccccccuucggcgacuccuacaucaucguggggcggggcgacagccgccugaccuaccaguggcacaaggagggguccagcggcagcacccuggggaaggccuucuccaccacgcucaagggcgcccagcgccuggcggcccugggggacaccgccugggacuucggcagcaucgggggcguguucaacuccaucggccgggccguccaccagguguucgggggcgccuuccgcacccucuucgggggcaugagcuggaucacccaggggcugaugggcgcgcugcuccuguggaugggggugaacgcccgggaccgcuccaucgcccuggccuuccucgcgacgggcggcguccugguguuccuggccaccaacgugcacgccuga

SEQ ID NO: 266 - RNA, 2025 nt, Artificial Sequence
  derived and/or modified CDS sequence (opt1) from YFV__NC_002031.1__SSIgE-prMEdelstem_TM-JEV (polyprotein: aa126-680)
auggacuggaccuggauccuguuccucguggccgccgcgacccgcguccacagccggaagaaccgcuggcuccugcugaacgucaccuccgaggaccucggcaagaccuucagcguggggaccggcaacugcacgaccaacauccuggaggccaaguacuggugccccgacuccauggaguacaacugcccgaaccugagcccccgggaggagcccgacgacaucgacugcuggugcuacggcguggagaacguccgcguggccuacgggaagugcgacuccgcgggccggagccgccggucccgccgggccaucgaccuccccacccacgagaaccacgggcugaagacccgccaggagaaguggaugacgggccggaugggggagcgccagcugcagaagaucgagcggugguucgugcgcaacccguucuucgccgucaccgcccucaccaucgccuaccuggugggcagcaacaugacccagcggguggucaucgcgcugcucgugcuggccgugggccccgccuacuccgcccacugcaucgggaucacggaccgcgacuucaucgagggcguccacgggggcaccugggugagcgcgacccuggagcaggacaagugcgugaccgucauggcccccgacaagcccucccucgacaucagccuggagacgguggccaucgaccggccggccgaggugcgcaaggucugcuacaacgccgugcugacccacgugaagaucaacgacaagugccccuccaccggcgaggcgcaccucgccgaggagaacgagggggacaacgccugcaagcggaccuacagcgaccggggcugggggaacggcugcgggcuguucggcaagggcuccaucgucgccugcgccaaguucacgugcgcgaaguccaugagccuguucgagguggaccagaccaagauccaguacgucauccgcgcccagcuccacgugggggccaagcaggagaacuggaacaccgacaucaagacccugaaguucgacgcccugagcggcagccaggagguggaguucaucggguacggcaaggccacgcucgagugccagguccagaccgcgguggacuucgggaacuccuacaucgccgagauggagaccgagagcuggaucguggaccggcagugggcccaggaccugacccugcccuggcaguccggcagcggcggggucuggcgcgagaugcaccaccucguggaguucgagcccccgcacgccgccacgauccgggugcuggcgcugggcaaccaggaggggucccucaagaccgcccugaccggcgccaugcgcgucaccaaggacacgaacgacaacaaccuguacaagcuccacgggggccacgugagcugccgggugaagcuguccgcccugacccucaagggcaccagcuacaagaucugcaccgacaagauguucuucgucaagaaccccacggacaccgggcacggcaccguggugaugcaggucaagguguccaagggggcgcccugccgcaucccggugaucgucgccgacgaccugaccgccgccaucaacaagggcauccuggugaccgugaacccgaucgccagcacgaacgacgacgagguccucaucgaggugaacccccccuucggcgacuccuacaucaucguggggcggggcgacagccgccugaccuaccaguggcacaaggagggguccagcggcagcacccuggggaaggccuucuccaccacgcucaagggcgcccagcgccuggcggcccugggggacaccgccugggacuucggcagcaucgggggcguguucaacuccaucggccgggccguccaccagguguucgggggcgccuuccgcacccucuucgggggcaugagcuggaucacccaggggcugaugggcgcgcugcuccuguggaugggggugaacgcccgggaccgcuccaucgcccuggccuuccucgcgacgggcggcguccugguguuccuggccaccaacgugcacgccuga

SEQ ID NO: 267 - RNA, 2055 nt, Artificial Sequence
  derived and/or modified CDS sequence (opt1) from YFV__NC_002031.1__SSjev-prMEdelstem_TM-JEV (polyprotein: aa122-680)
augggcaagcgcagcgccggguccaucauguggcuggccagccucgcgguggucaucgccugcgccggcgccgugacgcuggugcggaagaaccgcuggcuccugcugaacgucaccuccgaggaccucggcaagaccuucagcguggggaccggcaacugcacgaccaacauccuggaggccaaguacuggugccccgacuccauggaguacaacugcccgaaccugagcccccgggaggagcccgacgacaucgacugcuggugcuacggcguggagaacguccgcguggccuacgggaagugcgacuccgcgggccggagccgccggucccgccgggccaucgaccuccccacccacgagaaccacgggcugaagacccgccaggagaaguggaugacgggccggaugggggagcgccagcugcagaagaucgagcggugguucgugcgcaacccguucuucgccgucaccgcccucaccaucgccuaccuggugggcagcaacaugacccagcggguggucaucgcgcugcucgugcuggccgugggccccgccuacuccgcccacugcaucgggaucacggaccgcgacuucaucgagggcguccacgggggcaccugggugagcgcgacccuggagcaggacaagugcgugaccgucauggcccccgacaagcccucccucgacaucagccuggagacgguggccaucgaccggccggccgaggugcgcaaggucugcuacaacgccgugcugacccacgugaagaucaacgacaagugccccuccaccggcgaggcgcaccucgccgaggagaacgagggggacaacgccugcaagcggaccuacagcgaccggggcugggggaacggcugcgggcuguucggcaagggcuccaucgucgccugcgccaaguucacgugcgcgaaguccaugagccuguucgagguggaccagaccaagauccaguacgucauccgcgcccagcuccacgugggggccaagcaggagaacuggaacaccgacaucaagacccugaaguucgacgcccugagcggcagccaggagguggaguucaucggguacggcaaggccacgcucgagugccagguccagaccgcgguggacuucgggaacuccuacaucgccgagauggagaccgagagcuggaucguggaccggcagugggcccaggaccugacccugcccuggcaguccggcagcggcggggucuggcgcgagaugcaccaccucguggaguucgagcccccgcacgccgccacgauccgggugcuggcgcugggcaaccaggaggggucccucaagaccgcccugaccggcgccaugcgcgucaccaaggacacgaacgacaacaaccuguacaagcuccacgggggccacgugagcugccgggugaagcuguccgcccugacccucaagggcaccagcuacaagaucugcaccgacaagauguucuucgucaagaaccccacggacaccgggcacggcaccguggugaugcaggucaagguguccaagggggcgcccugccgcaucccggugaucgucgccgacgaccugaccgccgccaucaacaagggcauccuggugaccgugaacccgaucgccagcacgaacgacgacgagguccucaucgaggugaacccccccuucggcgacuccuacaucaucguggggcggggcgacagccgccugaccuaccaguggcacaaggagggguccagcggcagcacccuggggaaggccuucuccaccacgcucaagggcgcccagcgccuggcggcccugggggacaccgccugggacuucggcagcaucgggggcguguucaacuccaucggccgggccguccaccagguguucgggggcgccuuccgcacccucuucgggggcaugagcuggaucacccaggggcugaugggcgcgcugcuccuguggaugggggugaacgcccgggaccgcuccaucgcccuggccuuccucgcgacgggcggcguccugguguuccuggccaccaacgugcacgccuga

SEQ ID NO: 268 - RNA, 2043 nt, Artificial Sequence
  derived and/or modified CDS sequence (opt1) from YFV__NC_002031.1__SSjev-prMEdelstem_TM-JEV (polyprotein: aa126-680)
augggcaagcgcagcgccggguccaucauguggcuggccagccucgcgguggucaucgccugcgccggcgcccggaagaaccgcuggcuccugcugaacgucaccuccgaggaccucggcaagaccuucagcguggggaccggcaacugcacgaccaacauccuggaggccaaguacuggugccccgacuccauggaguacaacugcccgaaccugagcccccgggaggagcccgacgacaucgacugcuggugcuacggcguggagaacguccgcguggccuacgggaagugcgacuccgcgggccggagccgccggucccgccgggccaucgaccuccccacccacgagaaccacgggcugaagacccgccaggagaaguggaugacgggccggaugggggagcgccagcugcagaagaucgagcggugguucgugcgcaacccguucuucgccgucaccgcccucaccaucgccuaccuggugggcagcaacaugacccagcggguggucaucgcgcugcucgugcuggccgugggccccgccuacuccgcccacugcaucgggaucacggaccgcgacuucaucgagggcguccacgggggcaccugggugagcgcgacccuggagcaggacaagugcgugaccgucauggcccccgacaagcccucccucgacaucagccuggagacgguggccaucgaccggccggccgaggugcgcaaggucugcuacaacgccgugcugacccacgugaagaucaacgacaagugccccuccaccggcgaggcgcaccucgccgaggagaacgagggggacaacgccugcaagcggaccuacagcgaccggggcugggggaacggcugcgggcuguucggcaagggcuccaucgucgccugcgccaaguucacgugcgcgaaguccaugagccuguucgagguggaccagaccaagauccaguacgucauccgcgcccagcuccacgugggggccaagcaggagaacuggaacaccgacaucaagacccugaaguucgacgcccugagcggcagccaggagguggaguucaucggguacggcaaggccacgcucgagugccagguccagaccgcgguggacuucgggaacuccuacaucgccgagauggagaccgagagcuggaucguggaccggcagugggcccaggaccugacccugcccuggcaguccggcagcggcggggucuggcgcgagaugcaccaccucguggaguucgagcccccgcacgccgccacgauccgggugcuggcgcugggcaaccaggaggggucccucaagaccgcccugaccggcgccaugcgcgucaccaaggacacgaacgacaacaaccuguacaagcuccacgggggccacgugagcugccgggugaagcuguccgcccugacccucaagggcaccagcuacaagaucugcaccgacaagauguucuucgucaagaaccccacggacaccgggcacggcaccguggugaugcaggucaagguguccaagggggcgcccugccgcaucccggugaucgucgccgacgaccugaccgccgccaucaacaagggcauccuggugaccgugaacccgaucgccagcacgaacgacgacgagguccucaucgaggugaacccccccuucggcgacuccuacaucaucguggggcggggcgacagccgccugaccuaccaguggcacaaggagggguccagcggcagcacccuggggaaggccuucuccaccacgcucaagggcgcccagcgccuggcggcccugggggacaccgccugggacuucggcagcaucgggggcguguucaacuccaucggccgggccguccaccagguguucgggggcgccuuccgcacccucuucgggggcaugagcuggaucacccaggggcugaugggcgcgcugcuccuguggaugggggugaacgcccgggaccgcuccaucgcccuggccuuccucgcgacgggcggcguccugguguuccuggccaccaacgugcacgccuga

SEQ ID NO: 269 - RNA, 2094 nt, Artificial Sequence
  derived and/or modified CDS sequence (opt1) from YFV__NC_002031.1__X-SS-prME-XX (polyprotein: aa92-788)
augcgcggccugagcucccggaagcgccggagccacgacgugcucaccguccaguuccugauccuggggaugcuccugaugaccggcggggugacgcuggugcgcaagaaccgguggcuccugcugaacgucaccuccgaggaccucggcaagaccuucagcguggggaccggcaacugcacgaccaacauccuggaggccaaguacuggugccccgacuccauggaguacaacugccccaaccugagcccccgcgaggagcccgacgacaucgacugcuggugcuacggcguggagaacguccggguggccuacgggaagugcgacuccgcgggccgcagccggcgcucccggcgcgccaucgaccuccccacccacgagaaccacgggcugaagacccggcaggagaaguggaugacgggccgcaugggggagcggcagcugcagaagaucgagcgcugguucgugcggaacccguucuucgccgucaccgcccucaccaucgccuaccuggugggcagcaacaugacccagcgcguggucaucgcgcugcucgugcuggccgugggccccgccuacuccgcccacugcaucgggaucacggaccgggacuucaucgagggcguccacgggggcaccugggugagcgcgacccuggagcaggacaagugcgugaccgucauggcccccgacaagcccucccucgacaucagccuggagacgguggccaucgaccgcccggccgaggugcggaaggucugcuacaacgccgugcugacccacgugaagaucaacgacaagugccccuccaccggcgaggcgcaccucgccgaggagaacgagggggacaacgccugcaagcgcaccuacagcgaccgcggcugggggaacggcugcgggcuguucggcaagggcuccaucgucgccugcgccaaguucacgugcgccaagagcaugucccuguucgagguggaccagaccaagauccaguacgucauccgggcgcagcuccacgugggggccaagcaggagaacuggaacaccgacaucaagacccugaaguucgacgcccugagcggcagccaggagguggaguucaucggguacggcaaggccacgcucgagugccagguccagaccgcgguggacuucgggaacuccuacaucgccgagauggagaccgagagcuggaucguggaccgccagugggcccaggaccugacccugcccuggcaguccggcagcggcggggucuggcgggagaugcaccaccucguggaguucgagcccccgcacgccgccacgauccgcgugcuggcgcugggcaaccaggaggggucccucaagaccgcccugaccggcgccaugcgggucaccaaggacacgaacgacaacaaccuguacaagcuccacgggggccacgugagcugccgcgugaagcuguccgcccugacccucaagggcaccagcuacaagaucugcaccgacaagauguucuucgucaagaaccccacggacaccgggcacggcaccguggugaugcaggucaagguguccaagggggcgcccugccggauccccgugaucgucgccgacgaccugaccgccgccaucaacaagggcauccuggugaccgugaacccgaucgccagcacgaacgacgacgagguccucaucgaggugaacccgcccuucggcgacuccuacaucaucguggggcgcggcgacagccggcugaccuaccaguggcacaaggagggguccagcaucggcaagcuguucacccagaccaugaagggggucgagcgccucgcggugaugggcgacacggccugggacuucuccagcgccggcggguucuucaccuccgugggcaaggggauccacaccgucuucggcagcgccuuccaggggcuguucggcggccugaacuggaucaccaaggugaucaugggggccgugcugaucugggucggcaucaacacgcggaacaugaccauguccaugagcaugauccucgugggggugaucaugauguuccugagccugggcgucggggcggaccagggcugcgccaucaacuucggcaaguga

SEQ ID NO: 270 - RNA, 2064 nt, Artificial Sequence
  derived and/or modified CDS sequence (opt1) from YFV__NC_002031.1__X-SS-prME (polyprotein: aa92-778)
augcggggccugagcucccgcaagcggcgcagccacgacgugcucaccguccaguuccugauccuggggaugcuccugaugaccggcggggugacgcuggugcggaagaaccgcuggcuccugcugaacgucaccuccgaggaccucggcaagaccuucagcguggggaccggcaacugcacgaccaacauccuggaggccaaguacuggugccccgacuccauggaguacaacugccccaaccugagcccccgggaggagcccgacgacaucgacugcuggugcuacggcguggagaacguccgcguggccuacgggaagugcgacuccgcgggccggagccgccggucccgccgggccaucgaccuccccacccacgagaaccacgggcugaagacccgccaggagaaguggaugacgggccggaugggggagcgccagcugcagaagaucgagcggugguucgugcgcaacccguucuucgccgucaccgcccucaccaucgccuaccuggugggcagcaacaugacccagcggguggucaucgcgcugcucgugcuggccgugggccccgccuacuccgcccacugcaucgggaucacggaccgcgacuucaucgagggcguccacgggggcaccugggugagcgcgacccuggagcaggacaagugcgugaccgucauggcccccgacaagcccucccucgacaucagccuggagacgguggccaucgaccggccggccgaggugcgcaaggucugcuacaacgccgugcugacccacgugaagaucaacgacaagugccccuccaccggcgaggcgcaccucgccgaggagaacgagggggacaacgccugcaagcggaccuacagcgaccggggcugggggaacggcugcgggcuguucggcaagggcuccaucgucgccugcgccaaguucacgugcgcgaaguccaugagccuguucgagguggaccagaccaagauccaguacgucauccgcgcccagcuccacgugggggccaagcaggagaacuggaacaccgacaucaagacccugaaguucgacgcccugagcggcagccaggagguggaguucaucggguacggcaaggccacgcucgagugccagguccagaccgcgguggacuucgggaacuccuacaucgccgagauggagaccgagagcuggaucguggaccggcagugggcccaggaccugacccugcccuggcaguccggcagcggcggggucuggcgcgagaugcaccaccucguggaguucgagcccccgcacgccgccacgauccgggugcuggcgcugggcaaccaggaggggucccucaagaccgcccugaccggcgccaugcgcgucaccaaggacacgaacgacaacaaccuguacaagcuccacgggggccacgugagcugccgggugaagcuguccgcccugacccucaagggcaccagcuacaagaucugcaccgacaagauguucuucgucaagaaccccacggacaccgggcacggcaccguggugaugcaggucaagguguccaagggggcgcccugccgcaucccggugaucgucgccgacgaccugaccgccgccaucaacaagggcauccuggugaccgugaacccgaucgccagcacgaacgacgacgagguccucaucgaggugaacccgcccuucggcgacuccuacaucaucguggggcggggcgacagccgccugaccuaccaguggcacaaggagggguccagcaucggcaagcuguucacccagaccaugaagggggucgagcggcuggcggugaugggcgacacggccugggacuucuccagcgccggcggguucuucaccuccgugggcaaggggauccacaccgucuucggcagcgccuuccaggggcuguucggcggccucaacuggaucaccaaggugaucaugggggccgugcugaucugggucggcaucaacacgcgcaacaugaccauguccaugagcaugauccucgugggggugaucaugauguuccugagccugggcgucggggcguga

SEQ ID NO: 271 - RNA, 2067 nt, Artificial Sequence
  derived and/or modified CDS sequence (opt1) from YFV__NC_002031.1__SS-prME-XX (polyprotein: M,aa102-788)
augagccacgacgugcugaccguccaguuccucauccugggcaugcugcucaugaccgggggcgugacgcuggugcgcaagaaccgguggcugcuccugaacgucaccuccgaggaccuggggaagaccuucagcgugggcaccgggaacugcacgaccaacauccucgaggccaaguacuggugccccgacuccauggaguacaacugccccaaccugagcccccgcgaggagcccgacgacaucgacugcuggugcuacggcguggagaacguccggguggccuacggcaagugcgacuccgcggggcgcagccggcgcucccggcgcgccaucgaccugcccacccacgagaaccacggccucaagacccggcaggagaaguggaugacggggcgcaugggcgagcggcagcugcagaagaucgagcgcugguucgugcggaacccguucuucgccgucaccgcccugaccaucgccuaccucguggggagcaacaugacccagcgcguggucaucgcgcugcuggugcucgccgugggccccgccuacuccgcccacugcaucggcaucacggaccgggacuucaucgaggggguccacggcgggaccugggugagcgcgacccuggagcaggacaagugcgugaccgucauggcccccgacaagcccucccuggacaucagccucgagacgguggccaucgaccgcccggccgaggugcggaaggucugcuacaacgccgugcugacccacgugaagaucaacgacaagugccccuccaccggcgaggcgcaccuggccgaggagaacgagggcgacaacgccugcaagcgcaccuacagcgaccggggguggggcaacgggugcggccucuucgggaagggcuccaucgucgccugcgccaaguucacgugcgccaagagcaugucccuguucgagguggaccagaccaagauccaguacgucauccgcgcgcagcugcacgugggcgccaagcaggagaacuggaacaccgacaucaagacccucaaguucgacgcccugagcgggucccaggagguggaguucaucggcuacgggaaggccacgcuggagugccagguccagaccgcgguggacuucggcaacagcuacaucgccgagauggagaccgagagcuggaucguggaccggcagugggcccaggaccucacccugcccuggcaguccgggagcggcggcgucuggcgcgagaugcaccaccugguggaguucgagcccccgcacgccgccacgauccgcgugcucgcgcuggggaaccaggagggcucccugaagaccgcccucaccggggccaugcgggucaccaaggacacgaacgacaacaaccuguacaagcugcacggcgggcacgugagcugccgcgugaagcucuccgcccugacccugaagggcaccagcuacaagaucugcaccgacaagauguucuucgucaagaaccccacggacaccggccacgggaccguggugaugcaggucaagguguccaagggcgcgcccugccggauccccgugaucgucgccgacgaccucaccgccgccaucaacaaggggauccuggugaccgugaacccgaucgccagcacgaacgacgacgagguccugaucgaggugaacccgcccuucggcgacuccuacaucaucgugggccgcggggacagccggcucaccuaccaguggcacaaggagggcuccagcaucgggaagcuguucacccagaccaugaagggcgucgagcgccuggcggugaugggggacacggccugggacuucuccagcgccggcggcuucuucaccuccguggggaagggcauccacaccgucuucgggagcgccuuccagggccucuucgggggccugaacuggaucaccaaggugaucaugggcgccgugcugaucugggucgggaucaacacgcggaacaugaccauguccaugagcaugauccuggugggcgugaucaugauguuccucucccugggggucggcgcggaccaggggugcgccaucaacuucggcaaguga

SEQ ID NO: 272 - RNA, 2061 nt, Artificial Sequence
  derived and/or modified CDS sequence (opt1) from YFV__NC_002031.1__SS-prME-XX (polyprotein: M,aa104-788)
auggacgugcugaccguccaguuccucauccugggcaugcugcucaugaccgggggcgugacgcuggugcgcaagaaccgguggcugcuccugaacgucaccagcgaggaccuggggaagaccuucuccgugggcaccgggaacugcacgaccaacauccucgaggccaaguacuggugccccgacagcauggaguacaacugccccaaccugagcccccgcgaggagcccgacgacaucgacugcuggugcuacggcguggagaacguccggguggccuacggcaagugcgacuccgcggggcgcucccggcgcagccggcgcgccaucgaccugcccacccacgagaaccacggccucaagacccggcaggagaaguggaugacggggcgcaugggcgagcggcagcugcagaagaucgagcgcugguucgugcggaacccguucuucgccgucaccgcccugaccaucgccuaccucgugggguccaacaugacccagcgcguggucaucgcgcugcuggugcucgccgugggccccgccuacagcgcccacugcaucggcaucacggaccgggacuucaucgaggggguccacggcgggaccuggguguccgcgacccuggagcaggacaagugcgugaccgucauggcccccgacaagcccagccuggacaucucccucgagacgguggccaucgaccgcccggccgaggugcggaaggucugcuacaacgccgugcugacccacgugaagaucaacgacaagugccccagcaccggcgaggcgcaccuggccgaggagaacgagggcgacaacgccugcaagcgcaccuacuccgaccggggguggggcaacgggugcggccucuucgggaagggcagcaucgucgccugcgccaaguucacgugcgcgaaguccaugagccuguucgagguggaccagaccaagauccaguacgucauccgcgcccagcugcacgugggcgccaagcaggagaacuggaacaccgacaucaagacccucaaguucgacgcccuguccgggagccaggagguggaguucaucggcuacgggaaggccacgcuggagugccagguccagaccgcgguggacuucggcaacuccuacaucgccgagauggagaccgagagcuggaucguggaccggcagugggcccaggaccucacccugcccuggcagagcggguccggcggcgucuggcgcgagaugcaccaccugguggaguucgagcccccgcacgccgccacgauccgcgugcucgcgcuggggaaccaggagggcagccugaagaccgcccucaccggggccaugcgggucaccaaggacacgaacgacaacaaccuguacaagcugcacggcgggcacguguccugccgcgugaagcucagcgcccugacccugaagggcaccuccuacaagaucugcaccgacaagauguucuucgucaagaaccccacggacaccggccacgggaccguggugaugcaggucaaggugagcaagggcgcgcccugccggauccccgugaucgucgccgacgaccucaccgccgccaucaacaaggggauccuggugaccgugaacccgaucgccuccacgaacgacgacgagguccugaucgaggugaacccgcccuucggcgacagcuacaucaucgugggccgcggggacucccggcucaccuaccaguggcacaaggagggcagcuccaucgggaagcuguucacccagaccaugaagggcgucgagcgccuggcggugaugggggacacggccugggacuucagcuccgccggcggcuucuucaccagcguggggaagggcauccacaccgucuucggguccgccuuccagggccucuucgggggccugaacuggaucaccaaggugaucaugggcgccgugcugaucugggucgggaucaacacgcggaacaugaccaugagcauguccaugauccuggugggcgugaucaugauguuccucagccugggggucggcgcggaccaggggugcgccaucaacuucggcaaguga

SEQ ID NO: 273 - RNA, 2037 nt, Artificial Sequence
  derived and/or modified CDS sequence (opt1) from YFV__NC_002031.1__SS-prME (polyprotein: M,aa102-778)
augagccacgacgugcugaccguccaguuccucauccugggcaugcugcucaugaccgggggcgugacgcuggugcgcaagaaccgguggcugcuccugaacgucaccuccgaggaccuggggaagaccuucagcgugggcaccgggaacugcacgaccaacauccucgaggccaaguacuggugccccgacuccauggaguacaacugccccaaccugagcccccgcgaggagcccgacgacaucgacugcuggugcuacggcguggagaacguccggguggccuacggcaagugcgacuccgcggggcgcagccggcgcucccggcgcgccaucgaccugcccacccacgagaaccacggccucaagacccggcaggagaaguggaugacggggcgcaugggcgagcggcagcugcagaagaucgagcgcugguucgugcggaacccguucuucgccgucaccgcccugaccaucgccuaccucguggggagcaacaugacccagcgcguggucaucgcgcugcuggugcucgccgugggccccgccuacuccgcccacugcaucggcaucacggaccgggacuucaucgaggggguccacggcgggaccugggugagcgcgacccuggagcaggacaagugcgugaccgucauggcccccgacaagcccucccuggacaucagccucgagacgguggccaucgaccgcccggccgaggugcggaaggucugcuacaacgccgugcugacccacgugaagaucaacgacaagugccccuccaccggcgaggcgcaccuggccgaggagaacgagggcgacaacgccugcaagcgcaccuacagcgaccggggguggggcaacgggugcggccucuucgggaagggcuccaucgucgccugcgccaaguucacgugcgccaagagcaugucccuguucgagguggaccagaccaagauccaguacgucauccgcgcgcagcugcacgugggcgccaagcaggagaacuggaacaccgacaucaagacccucaaguucgacgcccugagcgggucccaggagguggaguucaucggcuacgggaaggccacgcuggagugccagguccagaccgcgguggacuucggcaacagcuacaucgccgagauggagaccgagagcuggaucguggaccggcagugggcccaggaccucacccugcccuggcaguccgggagcggcggcgucuggcgcgagaugcaccaccugguggaguucgagcccccgcacgccgccacgauccgcgugcucgcgcuggggaaccaggagggcucccugaagaccgcccucaccggggccaugcgggucaccaaggacacgaacgacaacaaccuguacaagcugcacggcgggcacgugagcugccgcgugaagcucuccgcccugacccugaagggcaccagcuacaagaucugcaccgacaagauguucuucgucaagaaccccacggacaccggccacgggaccguggugaugcaggucaagguguccaagggcgcgcccugccggauccccgugaucgucgccgacgaccucaccgccgccaucaacaaggggauccuggugaccgugaacccgaucgccagcacgaacgacgacgagguccugaucgaggugaacccgcccuucggcgacuccuacaucaucgugggccgcggggacagccggcucaccuaccaguggcacaaggagggcuccagcaucgggaagcuguucacccagaccaugaagggcgucgagcgccuggcggugaugggggacacggccugggacuucuccagcgccggcggcuucuucaccuccguggggaagggcauccacaccgucuucgggagcgccuuccagggccucuucgggggccugaacuggaucaccaaggugaucaugggcgccgugcugaucugggucgggaucaacacgcggaacaugaccauguccaugagcaugauccuggugggcgugaucaugauguuccucucccugggggucggcgcguga

SEQ ID NO: 274 - RNA, 2031 nt, Artificial Sequence
  derived and/or modified CDS sequence (opt1) from YFV__NC_002031.1__SS-prME (polyprotein: M,aa104-778)
auggacgugcugaccguccaguuccucauccugggcaugcugcucaugaccgggggcgugacgcuggugcgcaagaaccgguggcugcuccugaacgucaccagcgaggaccuggggaagaccuucuccgugggcaccgggaacugcacgaccaacauccucgaggccaaguacuggugccccgacagcauggaguacaacugccccaaccugagcccccgcgaggagcccgacgacaucgacugcuggugcuacggcguggagaacguccggguggccuacggcaagugcgacuccgcggggcgcucccggcgcagccggcgcgccaucgaccugcccacccacgagaaccacggccucaagacccggcaggagaaguggaugacggggcgcaugggcgagcggcagcugcagaagaucgagcgcugguucgugcggaacccguucuucgccgucaccgcccugaccaucgccuaccucgugggguccaacaugacccagcgcguggucaucgcgcugcuggugcucgccgugggccccgccuacagcgcccacugcaucggcaucacggaccgggacuucaucgaggggguccacggcgggaccuggguguccgcgacccuggagcaggacaagugcgugaccgucauggcccccgacaagcccagccuggacaucucccucgagacgguggccaucgaccgcccggccgaggugcggaaggucugcuacaacgccgugcugacccacgugaagaucaacgacaagugccccagcaccggcgaggcgcaccuggccgaggagaacgagggcgacaacgccugcaagcgcaccuacuccgaccggggguggggcaacgggugcggccucuucgggaagggcagcaucgucgccugcgccaaguucacgugcgcgaaguccaugagccuguucgagguggaccagaccaagauccaguacgucauccgcgcccagcugcacgugggcgccaagcaggagaacuggaacaccgacaucaagacccucaaguucgacgcccuguccgggagccaggagguggaguucaucggcuacgggaaggccacgcuggagugccagguccagaccgcgguggacuucggcaacuccuacaucgccgagauggagaccgagagcuggaucguggaccggcagugggcccaggaccucacccugcccuggcagagcggguccggcggcgucuggcgcgagaugcaccaccugguggaguucgagcccccgcacgccgccacgauccgcgugcucgcgcuggggaaccaggagggcagccugaagaccgcccucaccggggccaugcgggucaccaaggacacgaacgacaacaaccuguacaagcugcacggcgggcacguguccugccgcgugaagcucagcgcccugacccugaagggcaccuccuacaagaucugcaccgacaagauguucuucgucaagaaccccacggacaccggccacgggaccguggugaugcaggucaaggugagcaagggcgcgcccugccggauccccgugaucgucgccgacgaccucaccgccgccaucaacaaggggauccuggugaccgugaacccgaucgccuccacgaacgacgacgagguccugaucgaggugaacccgcccuucggcgacagcuacaucaucgugggccgcggggacucccggcucaccuaccaguggcacaaggagggcagcuccaucgggaagcuguucacccagaccaugaagggcgucgagcgccuggcggugaugggggacacggccugggacuucagcuccgccggcggcuucuucaccagcguggggaagggcauccacaccgucuucggguccgccuuccagggccucuucgggggccugaacuggaucaccaaggugaucaugggcgccgugcugaucugggucgggaucaacacgcggaacaugaccaugagcauguccaugauccuggugggcgugaucaugauguuccucagccugggggucggcgcguga

SEQ ID NO: 275 - RNA, 2073 nt, Artificial Sequence
  derived and/or modified CDS sequence (opt1) from YFV__NC_002031.1__X-SS-prMEdelstem_TM-JEV (polyprotein: aa92-680)
augcgcggccugagcucccggaagcgccggagccacgacgugcucaccguccaguuccugauccuggggaugcuccugaugaccggcggggugacgcuggugcgcaagaaccgguggcuccugcugaacgucaccuccgaggaccucggcaagaccuucagcguggggaccggcaacugcacgaccaacauccuggaggccaaguacuggugccccgacuccauggaguacaacugccccaaccugagcccccgcgaggagcccgacgacaucgacugcuggugcuacggcguggagaacguccggguggccuacgggaagugcgacuccgcgggccgcagccggcgcucccggcgcgccaucgaccuccccacccacgagaaccacgggcugaagacccggcaggagaaguggaugacgggccgcaugggggagcggcagcugcagaagaucgagcgcugguucgugcggaacccguucuucgccgucaccgcccucaccaucgccuaccuggugggcagcaacaugacccagcgcguggucaucgcgcugcucgugcuggccgugggccccgccuacuccgcccacugcaucgggaucacggaccgggacuucaucgagggcguccacgggggcaccugggugagcgcgacccuggagcaggacaagugcgugaccgucauggcccccgacaagcccucccucgacaucagccuggagacgguggccaucgaccgcccggccgaggugcggaaggucugcuacaacgccgugcugacccacgugaagaucaacgacaagugccccuccaccggcgaggcgcaccucgccgaggagaacgagggggacaacgccugcaagcgcaccuacagcgaccgcggcugggggaacggcugcgggcuguucggcaagggcuccaucgucgccugcgccaaguucacgugcgccaagagcaugucccuguucgagguggaccagaccaagauccaguacgucauccgggcgcagcuccacgugggggccaagcaggagaacuggaacaccgacaucaagacccugaaguucgacgcccugagcggcagccaggagguggaguucaucggguacggcaaggccacgcucgagugccagguccagaccgcgguggacuucgggaacuccuacaucgccgagauggagaccgagagcuggaucguggaccgccagugggcccaggaccugacccugcccuggcaguccggcagcggcggggucuggcgggagaugcaccaccucguggaguucgagcccccgcacgccgccacgauccgcgugcuggcgcugggcaaccaggaggggucccucaagaccgcccugaccggcgccaugcgggucaccaaggacacgaacgacaacaaccuguacaagcuccacgggggccacgugagcugccgcgugaagcuguccgcccugacccucaagggcaccagcuacaagaucugcaccgacaagauguucuucgucaagaaccccacggacaccgggcacggcaccguggugaugcaggucaagguguccaagggggcgcccugccggauccccgugaucgucgccgacgaccugaccgccgccaucaacaagggcauccuggugaccgugaacccgaucgccagcacgaacgacgacgagguccucaucgaggugaacccgcccuucggcgacuccuacaucaucguggggcgcggcgacagccggcugaccuaccaguggcacaaggagggguccagcggcuccacccuggggaaggcguucagcaccacgcucaagggcgcccagcgccuggccgcccugggcgacaccgccugggacuucggguccaucggcggggucuucaacagcaucggccgggcggugcaccagguguucgggggcgccuuccgcacccuguucggcgggauguccuggaucacccagggccucaugggggcccugcugcucuggaugggcgucaacgcccgggaccgcagcaucgcccuggcguuccuggccaccgggggcgugcucguguuccuggccacgaacguccacgccuga

SEQ ID NO: 276 - RNA, 2046 nt, Artificial Sequence
  derived and/or modified CDS sequence (opt1) from YFV__NC_002031.1__SS-prMEdelstem_TM-JEV (polyprotein: M,aa102-680)
augagccacgacgugcugaccguccaguuccucauccugggcaugcugcucaugaccgggggcgugacgcuggugcgcaagaaccgguggcugcuccugaacgucaccuccgaggaccuggggaagaccuucagcgugggcaccgggaacugcacgaccaacauccucgaggccaaguacuggugccccgacuccauggaguacaacugccccaaccugagcccccgcgaggagcccgacgacaucgacugcuggugcuacggcguggagaacguccggguggccuacggcaagugcgacuccgcggggcgcagccggcgcucccggcgcgccaucgaccugcccacccacgagaaccacggccucaagacccggcaggagaaguggaugacggggcgcaugggcgagcggcagcugcagaagaucgagcgcugguucgugcggaacccguucuucgccgucaccgcccugaccaucgccuaccucguggggagcaacaugacccagcgcguggucaucgcgcugcuggugcucgccgugggccccgccuacuccgcccacugcaucggcaucacggaccgggacuucaucgaggggguccacggcgggaccugggugagcgcgacccuggagcaggacaagugcgugaccgucauggcccccgacaagcccucccuggacaucagccucgagacgguggccaucgaccgcccggccgaggugcggaaggucugcuacaacgccgugcugacccacgugaagaucaacgacaagugccccuccaccggcgaggcgcaccuggccgaggagaacgagggcgacaacgccugcaagcgcaccuacagcgaccggggguggggcaacgggugcggccucuucgggaagggcuccaucgucgccugcgccaaguucacgugcgccaagagcaugucccuguucgagguggaccagaccaagauccaguacgucauccgcgcgcagcugcacgugggcgccaagcaggagaacuggaacaccgacaucaagacccucaaguucgacgcccugagcgggucccaggagguggaguucaucggcuacgggaaggccacgcuggagugccagguccagaccgcgguggacuucggcaacagcuacaucgccgagauggagaccgagagcuggaucguggaccggcagugggcccaggaccucacccugcccuggcaguccgggagcggcggcgucuggcgcgagaugcaccaccugguggaguucgagcccccgcacgccgccacgauccgcgugcucgcgcuggggaaccaggagggcucccugaagaccgcccucaccggggccaugcgggucaccaaggacacgaacgacaacaaccuguacaagcugcacggcgggcacgugagcugccgcgugaagcucuccgcccugacccugaagggcaccagcuacaagaucugcaccgacaagauguucuucgucaagaaccccacggacaccggccacgggaccguggugaugcaggucaagguguccaagggcgcgcccugccggauccccgugaucgucgccgacgaccucaccgccgccaucaacaaggggauccuggugaccgugaacccgaucgccagcacgaacgacgacgagguccugaucgaggugaacccgcccuucggcgacuccuacaucaucgugggccgcggggacagccggcucaccuaccaguggcacaaggagggcuccagcggguccacccugggcaaggcguucagcaccacgcugaagggggcccagcgccucgccgcccugggcgacaccgccugggacuucggcuccaucgggggcgucuucaacagcaucgggcgggcggugcaccagguguucggcggggccuuccgcacccuguucggcggcauguccuggaucacccaggggcugaugggcgcccuccugcuguggaugggggucaacgcccgggaccgcagcaucgcccucgcguuccuggccacgggcggggugcugguguuccucgccaccaacguccacgccuga

SEQ ID NO: 277 - RNA, 2040 nt, Artificial Sequence
  derived and/or modified CDS sequence (opt1) from YFV__NC_002031.1__SS-prMEdelstem_TM-JEV (polyprotein: M,aa104-680)
auggacgugcugaccguccaguuccucauccugggcaugcugcucaugaccgggggcgugacgcuggugcgcaagaaccgguggcugcuccugaacgucaccagcgaggaccuggggaagaccuucuccgugggcaccgggaacugcacgaccaacauccucgaggccaaguacuggugccccgacagcauggaguacaacugccccaaccugagcccccgcgaggagcccgacgacaucgacugcuggugcuacggcguggagaacguccggguggccuacggcaagugcgacuccgcggggcgcucccggcgcagccggcgcgccaucgaccugcccacccacgagaaccacggccucaagacccggcaggagaaguggaugacggggcgcaugggcgagcggcagcugcagaagaucgagcgcugguucgugcggaacccguucuucgccgucaccgcccugaccaucgccuaccucgugggguccaacaugacccagcgcguggucaucgcgcugcuggugcucgccgugggccccgccuacagcgcccacugcaucggcaucacggaccgggacuucaucgaggggguccacggcgggaccuggguguccgcgacccuggagcaggacaagugcgugaccgucauggcccccgacaagcccagccuggacaucucccucgagacgguggccaucgaccgcccggccgaggugcggaaggucugcuacaacgccgugcugacccacgugaagaucaacgacaagugccccagcaccggcgaggcgcaccuggccgaggagaacgagggcgacaacgccugcaagcgcaccuacuccgaccggggguggggcaacgggugcggccucuucgggaagggcagcaucgucgccugcgccaaguucacgugcgcgaaguccaugagccuguucgagguggaccagaccaagauccaguacgucauccgcgcccagcugcacgugggcgccaagcaggagaacuggaacaccgacaucaagacccucaaguucgacgcccuguccgggagccaggagguggaguucaucggcuacgggaaggccacgcuggagugccagguccagaccgcgguggacuucggcaacuccuacaucgccgagauggagaccgagagcuggaucguggaccggcagugggcccaggaccucacccugcccuggcagagcggguccggcggcgucuggcgcgagaugcaccaccugguggaguucgagcccccgcacgccgccacgauccgcgugcucgcgcuggggaaccaggagggcagccugaagaccgcccucaccggggccaugcgggucaccaaggacacgaacgacaacaaccuguacaagcugcacggcgggcacguguccugccgcgugaagcucagcgcccugacccugaagggcaccuccuacaagaucugcaccgacaagauguucuucgucaagaaccccacggacaccggccacgggaccguggugaugcaggucaaggugagcaagggcgcgcccugccggauccccgugaucgucgccgacgaccucaccgccgccaucaacaaggggauccuggugaccgugaacccgaucgccuccacgaacgacgacgagguccugaucgaggugaacccgcccuucggcgacagcuacaucaucgugggccgcggggacucccggcucaccuaccaguggcacaaggagggcagcuccgggagcacccugggcaaggcguucuccaccacgcugaagggggcccagcgccucgccgcccugggcgacaccgccugggacuucggcagcaucgggggcgucuucaacuccaucgggcgggcggugcaccagguguucggcggggccuuccgcacccuguucggcggcaugagcuggaucacccaggggcugaugggcgcccuccugcuguggaugggggucaacgcccgggaccgcuccaucgcccucgcguuccuggccacgggcggggugcugguguuccucgccaccaacguccacgccuga

SEQ ID NO: 278 - RNA, 2058 nt, Artificial Sequence
  derived and/or modified CDS sequence (opt1) from YFV__NC_002031.1__SSIgE-prME-XX (polyprotein: aa122-788)
auggacuggaccuggauccuguuccucguggccgccgcgacccgcguccacagcgugacgcuggugcggaagaaccgcuggcugcuccugaacgucaccuccgaggaccugggcaagaccuucagcguggggaccggcaacugcacgaccaacauccucgaggccaaguacuggugccccgacuccauggaguacaacugccccaaccugagcccccgggaggagcccgacgacaucgacugcuggugcuacgggguggagaacguccgcguggccuacggcaagugcgacuccgccgggcggagccgccggucccgccgggccaucgaccugcccacccacgagaaccacggccucaagacccgccaggagaaguggaugacgggccggaugggggagcgccagcugcagaagaucgagcggugguucgugcgcaacccguucuucgcggucaccgcccugaccaucgccuaccucgugggcagcaacaugacccagcggguggucaucgcccugcuggugcucgcgguggggcccgccuacuccgcccacugcaucggcaucacggaccgcgacuucaucgaggggguccacggcggcaccugggugagcgccacccuggagcaggacaagugcgugaccgucauggcccccgacaagcccucccuggacaucagccucgagacgguggcgaucgaccggccggccgaggugcgcaaggucugcuacaacgccgugcugacccacgugaagaucaacgacaagugccccuccaccggggaggcccaccuggccgaggagaacgagggcgacaacgcgugcaagcggaccuacagcgaccgcggguggggcaacggcugcggccucuucgggaagggguccaucgucgccugcgccaaguucacgugcgccaagagcaugucccuguucgagguggaccagaccaagauccaguacgucauccgggcccagcugcacgugggcgcgaagcaggagaacuggaacaccgacaucaagacccucaaguucgacgcccugagcgggucccaggagguggaguucaucggcuacggcaaggccacgcuggagugccagguccagaccgccguggacuucgggaacagcuacaucgccgagauggagaccgagagcuggaucguggaccgccagugggcgcaggaccucacccugcccuggcaguccggcagcgggggcgucuggcgcgagaugcaccaccugguggaguucgagcccccgcacgccgccacgauccgggugcucgcccuggggaaccaggagggcucccugaagaccgcgcucaccggcgccaugcgcgucaccaaggacacgaacgacaacaaccuguacaagcugcacgggggccacgugagcugccgggugaagcucuccgcccugacccugaaggggaccagcuacaagaucugcaccgacaagauguucuucgucaagaaccccacggacaccggccacgggaccguggugaugcaggucaagguguccaagggcgcccccugccgcauccccgugaucgucgccgacgaccucaccgcggccaucaacaagggcauccuggugaccgugaacccgaucgccagcacgaacgacgacgagguccugaucgaggugaacccgcccuucggggacuccuacaucaucgugggccgcggggacagccggcucaccuaccaguggcacaaggagggcuccagcaucggcaagcuguucacccagaccaugaagggggucgagcggcuggccgugaugggcgacacggccugggacuucuccagcgccgggggcuucuucaccuccguggggaagggcauccacaccgucuucggcagcgcguuccaggggcuguucggcgggcucaacuggaucaccaaggugaucaugggcgccgugcugaucugggucgggaucaacacgcgcaacaugaccauguccaugagcaugauccucgugggcgugaucaugauguuccugucccugggcgucggggccgaccagggcugcgccaucaacuucgggaaguga

SEQ ID NO: 279 - RNA, 2046 nt, Artificial Sequence
  derived and/or modified CDS sequence (opt1) from YFV__NC_002031.1__SSIgE-prME-XX (polyprotein: aa126-788)
auggacuggaccuggauccuguuccucguggccgccgcgacccgcguccacagccggaagaaccgcuggcugcugcucaacgugacguccgaggaccugggcaagaccuucagcguggggaccggcaacugcaccacgaacauccuggaggccaaguacuggugccccgacuccauggaguacaacugccccaaccucagcccccgggaggagcccgacgacaucgacugcuggugcuacggggucgagaacgugcgcguggccuacggcaagugcgacuccgccgggcggagccgccggucccgccgggccaucgaccugcccacccacgagaaccacggccugaagacccgccaggagaaguggaugaccggccggaugggggagcgccagcuccagaagaucgagcggugguucguccgcaacccguucuucgcggugacggcccugaccaucgccuaccuggugggcagcaacaugacccagcgggucgugaucgcccuccuggugcuggcggucgggcccgccuacuccgcccacugcaucggcaucaccgaccgcgacuucaucgagggggugcacggcggcacgugggugagcgccacccucgagcaggacaagugcgucaccgugauggcccccgacaagcccucccuggacaucagccuggagaccguggcgaucgaccggccggccgagguccgcaaggugugcuacaacgccgugcucacgcacgucaagaucaacgacaagugccccuccaccggggaggcccaccuggccgaggagaacgagggcgacaacgcgugcaagcggaccuacagcgaccgcggguggggcaacggcugcgggcuguucggcaagggguccaucguggccugcgccaaguucacgugcgccaagagcaugucccucuucgagguggaccagaccaagauccaguacgucauccgggcccagcugcacgugggcgcgaagcaggagaacuggaacaccgacaucaagacccugaaguucgacgcccucagcgggucccaggaggucgaguucaucggcuacggcaaggccacccuggagugccaggugcagacggccguggacuucgggaacagcuacaucgccgagauggagaccgagagcuggaucgucgaccgccagugggcgcaggaccugacccuccccuggcaguccggcagcgggggcguguggcgcgagaugcaccaccugguggaguucgagcccccgcacgccgccaccauccggguccuggcccucgggaaccaggagggcucccugaagacggcgcugaccggcgccaugcgcgugaccaaggacaccaacgacaacaaccucuacaagcugcacgggggccacgugagcugccgggucaagcuguccgcccucacgcugaaggggaccagcuacaagaucugcaccgacaagauguucuucgugaagaaccccaccgacacgggccacgggaccguggucaugcaggucaagguguccaagggcgcccccugccgcauccccgugaucguggccgacgaccugaccgcggccaucaacaagggcauccucgugaccgucaacccgaucgccagcaccaacgacgacgaggugcugaucgaggugaacccgcccuucggggacuccuacaucaucgucggccgcggggacagccggcugacguaccaguggcacaaggagggcuccagcaucggcaagcuguucacccagaccaugaaggggguggagcggcucgccgugaugggcgacaccgccugggacuucuccagcgccgggggcuucuucacguccgucgggaagggcauccacaccguguucggcagcgcguuccaggggcuguucggcgggcucaacuggaucaccaaggugaucaugggcgccguccugaucuggguggggaucaacacccgcaacaugacgauguccaugagcaugauccuggugggcgucaucaugauguuccucucccugggcgugggggccgaccagggcugcgccaucaacuucgggaaguga

SEQ ID NO: 280 - RNA, 2028 nt, Artificial Sequence
  derived and/or modified CDS sequence (opt1) from YFV__NC_002031.1__SSIgE-prME (polyprotein: aa122-778)
auggacuggaccuggauccuguuccucguggccgccgcgacccgcguccacagcgugacgcuggugcggaagaaccgcuggcugcuccugaacgucaccuccgaggaccugggcaagaccuucagcguggggaccggcaacugcacgaccaacauccucgaggccaaguacuggugccccgacuccauggaguacaacugccccaaccugagcccccgggaggagcccgacgacaucgacugcuggugcuacgggguggagaacguccgcguggccuacggcaagugcgacuccgccgggcggagccgccggucccgccgggccaucgaccugcccacccacgagaaccacggccucaagacccgccaggagaaguggaugacgggccggaugggggagcgccagcugcagaagaucgagcggugguucgugcgcaacccguucuucgcggucaccgcccugaccaucgccuaccucgugggcagcaacaugacccagcggguggucaucgcccugcuggugcucgcgguggggcccgccuacuccgcccacugcaucggcaucacggaccgcgacuucaucgaggggguccacggcggcaccugggugagcgccacccuggagcaggacaagugcgugaccgucauggcccccgacaagcccucccuggacaucagccucgagacgguggcgaucgaccggccggccgaggugcgcaaggucugcuacaacgccgugcugacccacgugaagaucaacgacaagugccccuccaccggggaggcccaccuggccgaggagaacgagggcgacaacgcgugcaagcggaccuacagcgaccgcggguggggcaacggcugcggccucuucgggaagggguccaucgucgccugcgccaaguucacgugcgccaagagcaugucccuguucgagguggaccagaccaagauccaguacgucauccgggcccagcugcacgugggcgcgaagcaggagaacuggaacaccgacaucaagacccucaaguucgacgcccugagcgggucccaggagguggaguucaucggcuacggcaaggccacgcuggagugccagguccagaccgccguggacuucgggaacagcuacaucgccgagauggagaccgagagcuggaucguggaccgccagugggcgcaggaccucacccugcccuggcaguccggcagcgggggcgucuggcgcgagaugcaccaccugguggaguucgagcccccgcacgccgccacgauccgggugcucgcccuggggaaccaggagggcucccugaagaccgcgcucaccggcgccaugcgcgucaccaaggacacgaacgacaacaaccuguacaagcugcacgggggccacgugagcugccgggugaagcucuccgcccugacccugaaggggaccagcuacaagaucugcaccgacaagauguucuucgucaagaaccccacggacaccggccacgggaccguggugaugcaggucaagguguccaagggcgcccccugccgcauccccgugaucgucgccgacgaccucaccgcggccaucaacaagggcauccuggugaccgugaacccgaucgccagcacgaacgacgacgagguccugaucgaggugaacccgcccuucggggacuccuacaucaucgugggccgcggggacagccggcucaccuaccaguggcacaaggagggcuccagcaucggcaagcuguucacccagaccaugaagggggucgagcggcuggccgugaugggcgacacggccugggacuucuccagcgccgggggcuucuucaccuccguggggaagggcauccacaccgucuucggcagcgcguuccaggggcuguucggcgggcucaacuggaucaccaaggugaucaugggcgccgugcugaucugggucgggaucaacacgcgcaacaugaccauguccaugagcaugauccucgugggcgugaucaugauguuccugucccugggcgucggggccuga

SEQ ID NO: 281 - RNA, 2016 nt, Artificial Sequence
  derived and/or modified CDS sequence (opt1) from YFV__NC_002031.1__SSIgE-prME (polyprotein: aa126-778)
auggacuggaccuggauccuguuccucguggccgccgcgacccgcguccacagccggaagaaccgcuggcugcugcucaacgugacguccgaggaccugggcaagaccuucagcguggggaccggcaacugcaccacgaacauccuggaggccaaguacuggugccccgacuccauggaguacaacugccccaaccucagcccccgggaggagcccgacgacaucgacugcuggugcuacggggucgagaacgugcgcguggccuacggcaagugcgacuccgccgggcggagccgccggucccgccgggccaucgaccugcccacccacgagaaccacggccugaagacccgccaggagaaguggaugaccggccggaugggggagcgccagcuccagaagaucgagcggugguucguccgcaacccguucuucgcggugacggcccugaccaucgccuaccuggugggcagcaacaugacccagcgggucgugaucgcccuccuggugcuggcggucgggcccgccuacuccgcccacugcaucggcaucaccgaccgcgacuucaucgagggggugcacggcggcacgugggugagcgccacccucgagcaggacaagugcgucaccgugauggcccccgacaagcccucccuggacaucagccuggagaccguggcgaucgaccggccggccgagguccgcaaggugugcuacaacgccgugcucacgcacgucaagaucaacgacaagugccccuccaccggggaggcccaccuggccgaggagaacgagggcgacaacgcgugcaagcggaccuacagcgaccgcggguggggcaacggcugcgggcuguucggcaagggguccaucguggccugcgccaaguucacgugcgccaagagcaugucccucuucgagguggaccagaccaagauccaguacgucauccgggcccagcugcacgugggcgcgaagcaggagaacuggaacaccgacaucaagacccugaaguucgacgcccucagcgggucccaggaggucgaguucaucggcuacggcaaggccacccuggagugccaggugcagacggccguggacuucgggaacagcuacaucgccgagauggagaccgagagcuggaucgucgaccgccagugggcgcaggaccugacccuccccuggcaguccggcagcgggggcguguggcgcgagaugcaccaccugguggaguucgagcccccgcacgccgccaccauccggguccuggcccucgggaaccaggagggcucccugaagacggcgcugaccggcgccaugcgcgugaccaaggacaccaacgacaacaaccucuacaagcugcacgggggccacgugagcugccgggucaagcuguccgcccucacgcugaaggggaccagcuacaagaucugcaccgacaagauguucuucgugaagaaccccaccgacacgggccacgggaccguggucaugcaggucaagguguccaagggcgcccccugccgcauccccgugaucguggccgacgaccugaccgcggccaucaacaagggcauccucgugaccgucaacccgaucgccagcaccaacgacgacgaggugcugaucgaggugaacccgcccuucggggacuccuacaucaucgucggccgcggggacagccggcugacguaccaguggcacaaggagggcuccagcaucggcaagcuguucacccagaccaugaaggggguggagcggcucgccgugaugggcgacaccgccugggacuucuccagcgccgggggcuucuucacguccgucgggaagggcauccacaccguguucggcagcgcguuccaggggcuguucggcgggcucaacuggaucaccaaggugaucaugggcgccguccugaucuggguggggaucaacacccgcaacaugacgauguccaugagcaugauccuggugggcgucaucaugauguuccucucccugggcgugggggccuga

SEQ ID NO: 282 - RNA, 2076 nt, Artificial Sequence
  derived and/or modified CDS sequence (opt1) from YFV__NC_002031.1__SSjev-prME-XX (polyprotein: aa122-788)
augggcaagcgcagcgccggguccaucauguggcuggccagccucgcgguggucaucgccugcgccggcgccgugacccuggugcggaagaaccgcuggcugcuccugaacgucaccuccgaggaccuggggaagacguucagcgugggcaccgggaacugcaccaccaacauccucgaggccaaguacuggugccccgacuccauggaguacaacugccccaaccugagcccccgggaggagcccgacgacaucgacugcuggugcuacggcguggagaacguccgcguggcguacggcaagugcgacuccgccgggcggagccgccggucccgccgggccaucgaccugcccacgcacgagaaccacggccucaagacccgccaggagaaguggaugaccgggcggaugggcgagcgccagcugcagaagaucgagcggugguucgugcgcaacccguucuucgccgucaccgcgcugacgaucgccuaccucguggggagcaacaugacccagcggguggucaucgcccugcuggugcucgccgugggccccgccuacuccgcgcacugcaucggcaucaccgaccgcgacuucaucgaggggguccacggcgggaccugggugagcgccacgcuggagcaggacaagugcgugaccgucauggcccccgacaagcccucccuggacaucagccucgagaccguggccaucgaccggccggccgaggugcgcaaggucugcuacaacgcggugcugacccacgugaagaucaacgacaagugccccuccacgggcgaggcccaccuggccgaggagaacgagggcgacaacgccugcaagcggaccuacagcgaccgcggguggggcaacgggugcggccucuucgggaagggcuccaucgucgccugcgcgaaguucacgugcgccaagagcaugucccuguucgagguggaccagaccaagauccaguacgucauccgggcccagcugcacgugggcgccaagcaggagaacuggaacaccgacaucaagacccucaaguucgacgcccugagcgggagccaggagguggaguucaucggcuacgggaaggcgacccuggagugccagguccagaccgccguggacuucggcaacuccuacaucgccgagauggagacggagagcuggaucguggaccgccagugggcccaggaccucacccugcccuggcaguccgggagcggcggcgucuggcgcgagaugcaccaccugguggaguucgagcccccgcacgcggccaccauccgggugcucgcccuggggaaccaggagggcucccugaagaccgcccucacgggggccaugcgcgucaccaaggacaccaacgacaacaaccuguacaagcugcacggcgggcacgugagcugccgggugaagcucuccgcgcugacccugaagggcacgagcuacaagaucugcaccgacaagauguucuucgucaagaaccccaccgacaccggccacgggacgguggugaugcaggucaagguguccaagggcgcccccugccgcauccccgugaucgucgccgacgaccucaccgccgccaucaacaaggggauccuggugaccgugaacccgaucgcgagcaccaacgacgacgagguccugaucgaggugaacccgcccuucggcgacuccuacaucaucgugggccgcggggacagccggcucaccuaccaguggcacaaggagggcuccagcaucgggaagcuguucacgcagaccaugaagggcgucgagcggcuggccgugaugggggacaccgccugggacuucuccagcgccggcggcuucuucaccuccguggggaagggcauccacacggucuucgggagcgccuuccagggccucuucgggggccugaacuggaucaccaaggugaucaugggcgcggugcugaucugggucgggaucaacacccgcaacaugaccauguccaugagcaugauccucgugggcgugaucaugauguuccugagccugggggucggcgccgaccaggggugcgccaucaacuucggcaaguga

SEQ ID NO: 283 - RNA, 2064 nt, Artificial Sequence
  derived and/or modified CDS sequence (opt1) from YFV__NC_002031.1__SSjev-prME-XX (polyprotein: aa126-788)
augggcaagcgcagcgccggguccaucauguggcuggccagccucgcgguggucaucgccugcgccggcgcccggaagaaccgcuggcugcugcucaacgugaccuccgaggaccuggggaagaccuucagcgugggcacggggaacugcaccaccaacauccuggaggccaaguacuggugccccgacuccauggaguacaacugccccaaccucagcccccgggaggagcccgacgacaucgacugcuggugcuacggcgucgagaacgugcgcguggcguacggcaagugcgacuccgccgggcggagccgccggucccgccgggccaucgaccugcccacccacgagaaccacggccugaagacgcgccaggagaaguggaugaccgggcggaugggcgagcgccagcuccagaagaucgagcggugguucguccgcaacccguucuucgccgugaccgcgcugaccaucgccuaccugguggggagcaacaugacgcagcgggucgugaucgcccuccuggugcuggccgucggccccgccuacuccgcgcacugcaucggcaucaccgaccgcgacuucaucgagggggugcacggcgggaccugggugagcgccacccucgagcaggacaagugcgucacggugauggcccccgacaagcccucccuggacaucagccuggagaccguggccaucgaccggccggccgagguccgcaaggugugcuacaacgcggugcucacccacgucaagaucaacgacaagugccccuccaccggcgaggcccaccuggccgaggagaacgagggcgacaacgccugcaagcggacguacagcgaccgcggguggggcaacgggugcggccuguucgggaagggcuccaucguggccugcgcgaaguucacgugcgccaagagcaugucccucuucgagguggaccagaccaagauccaguacgucauccgggcccagcugcacgugggcgccaagcaggagaacuggaacaccgacaucaagacccugaaguucgacgcccucagcgggagccaggaggucgaguucaucggcuacgggaaggcgacccuggagugccaggugcagaccgccguggacuucggcaacuccuacaucgccgagauggagaccgagagcuggaucgucgaccgccagugggcccaggaccugacgcuccccuggcaguccgggagcggcggcguguggcgcgagaugcaccaccugguggaguucgagcccccgcacgcggccaccauccggguccuggcccucgggaaccaggagggcucccugaagaccgcccugaccggggccaugcgcgugacgaaggacaccaacgacaacaaccucuacaagcugcacggcgggcacgugagcugccgggucaagcuguccgcgcucacccugaagggcaccagcuacaagaucugcacggacaagauguucuucgugaagaaccccaccgacaccggccacgggaccguggucaugcaggucaagguguccaagggcgcccccugccgcauccccgugaucguggccgacgaccugacggccgccaucaacaaggggauccucgugaccgucaacccgaucgcgagcaccaacgacgacgaggugcugaucgaggugaacccgcccuucggcgacuccuacaucaucgucggccgcggggacagccggcugaccuaccaguggcacaaggagggcuccagcaucgggaagcuguucacccagacgaugaagggcguggagcggcucgccgugaugggggacaccgccugggacuucuccagcgccggcggcuucuucaccuccgucgggaagggcauccacaccguguucgggagcgccuuccagggccuguucgggggccucaacuggaucacgaaggugaucaugggcgcgguccugaucuggguggggaucaacacccgcaacaugaccauguccaugagcaugauccuggugggcgucaucaugauguuccucagccugggggugggcgccgaccaggggugcgccaucaacuucggcaaguga

SEQ ID NO: 284 - RNA, 2046 nt, Artificial Sequence
  derived and/or modified CDS sequence (opt1) from YFV__NC_002031.1__SSjev-prME (polyprotein: aa122-778)
augggcaagcgcagcgccggguccaucauguggcuggccagccucgcgguggucaucgccugcgccggcgccgugacccuggugcggaagaaccgcuggcugcuccugaacgucaccuccgaggaccuggggaagacguucagcgugggcaccgggaacugcaccaccaacauccucgaggccaaguacuggugccccgacuccauggaguacaacugccccaaccugagcccccgggaggagcccgacgacaucgacugcuggugcuacggcguggagaacguccgcguggcguacggcaagugcgacuccgccgggcggagccgccggucccgccgggccaucgaccugcccacgcacgagaaccacggccucaagacccgccaggagaaguggaugaccgggcggaugggcgagcgccagcugcagaagaucgagcggugguucgugcgcaacccguucuucgccgucaccgcgcugacgaucgccuaccucguggggagcaacaugacccagcggguggucaucgcccugcuggugcucgccgugggccccgccuacuccgcgcacugcaucggcaucaccgaccgcgacuucaucgaggggguccacggcgggaccugggugagcgccacgcuggagcaggacaagugcgugaccgucauggcccccgacaagcccucccuggacaucagccucgagaccguggccaucgaccggccggccgaggugcgcaaggucugcuacaacgcggugcugacccacgugaagaucaacgacaagugccccuccacgggcgaggcccaccuggccgaggagaacgagggcgacaacgccugcaagcggaccuacagcgaccgcggguggggcaacgggugcggccucuucgggaagggcuccaucgucgccugcgcgaaguucacgugcgccaagagcaugucccuguucgagguggaccagaccaagauccaguacgucauccgggcccagcugcacgugggcgccaagcaggagaacuggaacaccgacaucaagacccucaaguucgacgcccugagcgggagccaggagguggaguucaucggcuacgggaaggcgacccuggagugccagguccagaccgccguggacuucggcaacuccuacaucgccgagauggagacggagagcuggaucguggaccgccagugggcccaggaccucacccugcccuggcaguccgggagcggcggcgucuggcgcgagaugcaccaccugguggaguucgagcccccgcacgcggccaccauccgggugcucgcccuggggaaccaggagggcucccugaagaccgcccucacgggggccaugcgcgucaccaaggacaccaacgacaacaaccuguacaagcugcacggcgggcacgugagcugccgggugaagcucuccgcgcugacccugaagggcacgagcuacaagaucugcaccgacaagauguucuucgucaagaaccccaccgacaccggccacgggacgguggugaugcaggucaagguguccaagggcgcccccugccgcauccccgugaucgucgccgacgaccucaccgccgccaucaacaaggggauccuggugaccgugaacccgaucgcgagcaccaacgacgacgagguccugaucgaggugaacccgcccuucggcgacuccuacaucaucgugggccgcggggacagccggcucaccuaccaguggcacaaggagggcuccagcaucgggaagcuguucacgcagaccaugaagggcgucgagcggcuggccgugaugggggacaccgccugggacuucuccagcgccggcggcuucuucaccuccguggggaagggcauccacacggucuucgggagcgccuuccagggccucuucgggggccugaacuggaucaccaaggugaucaugggcgcggugcugaucugggucgggaucaacacccgcaacaugaccauguccaugagcaugauccucgugggcgugaucaugauguuccugagccugggggucggcgccuga

SEQ ID NO: 285 - RNA, 2034 nt, Artificial Sequence
  derived and/or modified CDS sequence (opt1) from YFV__NC_002031.1__SSjev-prME (polyprotein: aa126-778)
augggcaagcgcagcgccggguccaucauguggcuggccagccucgcgguggucaucgccugcgccggcgcccggaagaaccgcuggcugcugcucaacgugaccuccgaggaccuggggaagaccuucagcgugggcacggggaacugcaccaccaacauccuggaggccaaguacuggugccccgacuccauggaguacaacugccccaaccucagcccccgggaggagcccgacgacaucgacugcuggugcuacggcgucgagaacgugcgcguggcguacggcaagugcgacuccgccgggcggagccgccggucccgccgggccaucgaccugcccacccacgagaaccacggccugaagacgcgccaggagaaguggaugaccgggcggaugggcgagcgccagcuccagaagaucgagcggugguucguccgcaacccguucuucgccgugaccgcgcugaccaucgccuaccugguggggagcaacaugacgcagcgggucgugaucgcccuccuggugcuggccgucggccccgccuacuccgcgcacugcaucggcaucaccgaccgcgacuucaucgagggggugcacggcgggaccugggugagcgccacccucgagcaggacaagugcgucacggugauggcccccgacaagcccucccuggacaucagccuggagaccguggccaucgaccggccggccgagguccgcaaggugugcuacaacgcggugcucacccacgucaagaucaacgacaagugccccuccaccggcgaggcccaccuggccgaggagaacgagggcgacaacgccugcaagcggacguacagcgaccgcggguggggcaacgggugcggccuguucgggaagggcuccaucguggccugcgcgaaguucacgugcgccaagagcaugucccucuucgagguggaccagaccaagauccaguacgucauccgggcccagcugcacgugggcgccaagcaggagaacuggaacaccgacaucaagacccugaaguucgacgcccucagcgggagccaggaggucgaguucaucggcuacgggaaggcgacccuggagugccaggugcagaccgccguggacuucggcaacuccuacaucgccgagauggagaccgagagcuggaucgucgaccgccagugggcccaggaccugacgcuccccuggcaguccgggagcggcggcguguggcgcgagaugcaccaccugguggaguucgagcccccgcacgcggccaccauccggguccuggcccucgggaaccaggagggcucccugaagaccgcccugaccggggccaugcgcgugacgaaggacaccaacgacaacaaccucuacaagcugcacggcgggcacgugagcugccgggucaagcuguccgcgcucacccugaagggcaccagcuacaagaucugcacggacaagauguucuucgugaagaaccccaccgacaccggccacgggaccguggucaugcaggucaagguguccaagggcgcccccugccgcauccccgugaucguggccgacgaccugacggccgccaucaacaaggggauccucgugaccgucaacccgaucgcgagcaccaacgacgacgaggugcugaucgaggugaacccgcccuucggcgacuccuacaucaucgucggccgcggggacagccggcugaccuaccaguggcacaaggagggcuccagcaucgggaagcuguucacccagacgaugaagggcguggagcggcucgccgugaugggggacaccgccugggacuucuccagcgccggcggcuucuucaccuccgucgggaagggcauccacaccguguucgggagcgccuuccagggccuguucgggggccucaacuggaucacgaaggugaucaugggcgcgguccugaucuggguggggaucaacacccgcaacaugaccauguccaugagcaugauccuggugggcgucaucaugauguuccucagccugggggugggcgccuga

SEQ ID NO: 286 - RNA, 2094 nt, Artificial Sequence
  derived and/or modified CDS sequence (opt1) from YFV__NC_002031.1__SSjev(V2)-prME-XX (polyprotein: aa122-788)
augggccgcaagcagaacaagcgcgggggcaacgaggggagcaucauguggcuggccucccucgccguggucaucgcgugcgccggcgccgugacccuggugcggaagaaccgguggcugcuccugaacgucaccagcgaggaccuggggaagacguucuccgugggcaccggcaacugcaccaccaacauccucgaggccaaguacuggugccccgacagcauggaguacaacugccccaaccugagcccccgcgaggagcccgacgacaucgacugcuggugcuacgggguggagaacguccggguggccuacggcaagugcgacuccgcggggcgcucccggcgcagccggcgcgccaucgaccugcccacgcacgagaaccacggccucaagacccggcaggagaaguggaugaccgggcgcaugggcgagcggcagcugcagaagaucgagcgcugguucgugcggaacccguucuucgccgucaccgcccugacgaucgcguaccucgugggcuccaacaugacccagcgcguggucaucgcccugcuggugcucgccguggggcccgccuacagcgcccacugcaucggcaucaccgaccgggacuucaucgaggggguccacggcggcaccuggguguccgcgacgcuggagcaggacaagugcgugaccgucauggcccccgacaagcccagccuggacaucucccucgagaccguggccaucgaccgcccggccgaggugcggaaggucugcuacaacgccgugcugacccacgugaagaucaacgacaagugccccagcacgggggaggcgcaccuggccgaggagaacgagggcgacaacgccugcaagcgcaccuacuccgaccggggguggggcaacgggugcggccucuucggcaaggggagcaucgucgccugcgccaaguucacgugcgcgaaguccaugagccuguucgagguggaccagaccaagauccaguacgucauccgcgcccagcugcacgugggcgccaagcaggagaacuggaacaccgacaucaagacccucaaguucgacgcccuguccgggagccaggagguggaguucaucggcuacgggaaggccacccuggagugccagguccagaccgcgguggacuucggcaacagcuacaucgccgagauggagacggaguccuggaucguggaccgccagugggcccaggaccucacccugcccuggcagagcggcuccgggggcgucuggcgggagaugcaccaccugguggaguucgagcccccgcacgccgcgaccauccgcgugcucgcccuggggaaccaggagggcagccugaagaccgcccucacgggggccaugcgggucaccaaggacaccaacgacaacaaccuguacaagcugcacggcggccacguguccugccgcgugaagcucagcgcccugacccugaaggggacguccuacaagaucugcaccgacaagauguucuucgucaagaaccccaccgacaccggccacgggacgguggugaugcaggucaaggugagcaagggcgcgcccugccggauccccgugaucgucgccgacgaccucaccgccgccaucaacaagggcauccuggugaccgugaacccgaucgccuccaccaacgacgacgagguccugaucgaggugaacccgcccuucggggacagcuacaucaucgugggccgcggggacucccggcucaccuaccaguggcacaaggagggcagcuccaucgggaagcuguucacgcagaccaugaagggcgucgagcgccuggcggugaugggcgacaccgccugggacuucagcuccgccgggggcuucuucaccagcguggggaagggcauccacacggucuucggguccgccuuccagggccucuucggcgggcugaacuggaucaccaaggugaucaugggcgccgugcugaucugggucgggaucaacacccggaacaugaccaugagcauguccaugauccucgugggcgugaucaugauguuccugagccugggggucggcgcggaccagggcugcgccaucaacuucgggaaguga

SEQ ID NO: 287 - RNA, 2082 nt, Artificial Sequence
  derived and/or modified CDS sequence (opt1) from YFV__NC_002031.1__SSjev(V2)-prME-XX (polyprotein: aa126-788)
augggccgcaagcagaacaagcgcgggggcaacgaggggagcaucauguggcuggccucccucgccguggucaucgcgugcgccggcgcccggaagaaccgguggcugcugcucaacgugaccagcgaggaccuggggaagaccuucuccgugggcacgggcaacugcaccaccaacauccuggaggccaaguacuggugccccgacagcauggaguacaacugccccaaccucagcccccgcgaggagcccgacgacaucgacugcuggugcuacggggucgagaacgugcggguggccuacggcaagugcgacuccgcggggcgcucccggcgcagccggcgcgccaucgaccugcccacccacgagaaccacggccugaagacgcggcaggagaaguggaugaccgggcgcaugggcgagcggcagcuccagaagaucgagcgcugguucguccggaacccguucuucgccgugaccgcccugaccaucgcguaccuggugggcuccaacaugacgcagcgcgucgugaucgcccuccuggugcuggccgucgggcccgccuacagcgcccacugcaucggcaucaccgaccgggacuucaucgagggggugcacggcggcaccuggguguccgcgacccucgagcaggacaagugcgucacggugauggcccccgacaagcccagccuggacaucucccuggagaccguggccaucgaccgcccggccgagguccggaaggugugcuacaacgccgugcucacccacgucaagaucaacgacaagugccccagcaccggggaggcgcaccuggccgaggagaacgagggcgacaacgccugcaagcgcacguacuccgaccggggguggggcaacgggugcggccuguucggcaaggggagcaucguggccugcgccaaguucacgugcgcgaaguccaugagccucuucgagguggaccagaccaagauccaguacgucauccgcgcccagcugcacgugggcgccaagcaggagaacuggaacaccgacaucaagacccugaaguucgacgcccucuccgggagccaggaggucgaguucaucggcuacgggaaggccacccuggagugccaggugcagaccgcgguggacuucggcaacagcuacaucgccgagauggagaccgaguccuggaucgucgaccgccagugggcccaggaccugacgcuccccuggcagagcggcuccgggggcguguggcgggagaugcaccaccugguggaguucgagcccccgcacgccgcgaccauccgcguccuggcccucgggaaccaggagggcagccugaagaccgcccugaccggggccaugcgggugacgaaggacaccaacgacaacaaccucuacaagcugcacggcggccacguguccugccgcgucaagcugagcgcccucacccugaaggggaccuccuacaagaucugcacggacaagauguucuucgugaagaaccccaccgacaccggccacgggaccguggucaugcaggucaaggugagcaagggcgcgcccugccggauccccgugaucguggccgacgaccugacggccgccaucaacaagggcauccucgugaccgucaacccgaucgccuccaccaacgacgacgaggugcugaucgaggugaacccgcccuucggggacagcuacaucaucgucggccgcggggacucccggcugaccuaccaguggcacaaggagggcagcuccaucgggaagcuguucacccagacgaugaagggcguggagcgccucgcggugaugggcgacaccgccugggacuucagcuccgccgggggcuucuucaccagcgucgggaagggcauccacaccguguucggguccgccuuccagggccuguucggcgggcucaacuggaucacgaaggugaucaugggcgccguccugaucuggguggggaucaacacccggaacaugaccaugagcauguccaugauccuggugggcgucaucaugauguuccucagccugggggugggcgcggaccagggcugcgccaucaacuucgggaaguga

SEQ ID NO: 288 - RNA, 2064 nt, Artificial Sequence
  derived and/or modified CDS sequence (opt1) from YFV__NC_002031.1__SSjev(V2)-prME (polyprotein: aa122-778)
augggccgcaagcagaacaagcgcgggggcaacgaggggagcaucauguggcuggccucccucgccguggucaucgcgugcgccggcgccgugacccuggugcggaagaaccgguggcugcuccugaacgucaccagcgaggaccuggggaagacguucuccgugggcaccggcaacugcaccaccaacauccucgaggccaaguacuggugccccgacagcauggaguacaacugccccaaccugagcccccgcgaggagcccgacgacaucgacugcuggugcuacgggguggagaacguccggguggccuacggcaagugcgacuccgcggggcgcucccggcgcagccggcgcgccaucgaccugcccacgcacgagaaccacggccucaagacccggcaggagaaguggaugaccgggcgcaugggcgagcggcagcugcagaagaucgagcgcugguucgugcggaacccguucuucgccgucaccgcccugacgaucgcguaccucgugggcuccaacaugacccagcgcguggucaucgcccugcuggugcucgccguggggcccgccuacagcgcccacugcaucggcaucaccgaccgggacuucaucgaggggguccacggcggcaccuggguguccgcgacgcuggagcaggacaagugcgugaccgucauggcccccgacaagcccagccuggacaucucccucgagaccguggccaucgaccgcccggccgaggugcggaaggucugcuacaacgccgugcugacccacgugaagaucaacgacaagugccccagcacgggggaggcgcaccuggccgaggagaacgagggcgacaacgccugcaagcgcaccuacuccgaccggggguggggcaacgggugcggccucuucggcaaggggagcaucgucgccugcgccaaguucacgugcgcgaaguccaugagccuguucgagguggaccagaccaagauccaguacgucauccgcgcccagcugcacgugggcgccaagcaggagaacuggaacaccgacaucaagacccucaaguucgacgcccuguccgggagccaggagguggaguucaucggcuacgggaaggccacccuggagugccagguccagaccgcgguggacuucggcaacagcuacaucgccgagauggagacggaguccuggaucguggaccgccagugggcccaggaccucacccugcccuggcagagcggcuccgggggcgucuggcgggagaugcaccaccugguggaguucgagcccccgcacgccgcgaccauccgcgugcucgcccuggggaaccaggagggcagccugaagaccgcccucacgggggccaugcgggucaccaaggacaccaacgacaacaaccuguacaagcugcacggcggccacguguccugccgcgugaagcucagcgcccugacccugaaggggacguccuacaagaucugcaccgacaagauguucuucgucaagaaccccaccgacaccggccacgggacgguggugaugcaggucaaggugagcaagggcgcgcccugccggauccccgugaucgucgccgacgaccucaccgccgccaucaacaagggcauccuggugaccgugaacccgaucgccuccaccaacgacgacgagguccugaucgaggugaacccgcccuucggggacagcuacaucaucgugggccgcggggacucccggcucaccuaccaguggcacaaggagggcagcuccaucgggaagcuguucacgcagaccaugaagggcgucgagcgccuggcggugaugggcgacaccgccugggacuucagcuccgccgggggcuucuucaccagcguggggaagggcauccacacggucuucggguccgccuuccagggccucuucggcgggcugaacuggaucaccaaggugaucaugggcgccgugcugaucugggucgggaucaacacccggaacaugaccaugagcauguccaugauccucgugggcgugaucaugauguuccugagccugggggucggcgcguga

SEQ ID NO: 289 - RNA, 2052 nt, Artificial Sequence
  derived and/or modified CDS sequence (opt1) from YFV__NC_002031.1__SSjev(V2)-prME (polyprotein: aa126-778)
augggccgcaagcagaacaagcgcgggggcaacgaggggagcaucauguggcuggccucccucgccguggucaucgcgugcgccggcgcccggaagaaccgguggcugcugcucaacgugaccagcgaggaccuggggaagaccuucuccgugggcacgggcaacugcaccaccaacauccuggaggccaaguacuggugccccgacagcauggaguacaacugccccaaccucagcccccgcgaggagcccgacgacaucgacugcuggugcuacggggucgagaacgugcggguggccuacggcaagugcgacuccgcggggcgcucccggcgcagccggcgcgccaucgaccugcccacccacgagaaccacggccugaagacgcggcaggagaaguggaugaccgggcgcaugggcgagcggcagcuccagaagaucgagcgcugguucguccggaacccguucuucgccgugaccgcccugaccaucgcguaccuggugggcuccaacaugacgcagcgcgucgugaucgcccuccuggugcuggccgucgggcccgccuacagcgcccacugcaucggcaucaccgaccgggacuucaucgagggggugcacggcggcaccuggguguccgcgacccucgagcaggacaagugcgucacggugauggcccccgacaagcccagccuggacaucucccuggagaccguggccaucgaccgcccggccgagguccggaaggugugcuacaacgccgugcucacccacgucaagaucaacgacaagugccccagcaccggggaggcgcaccuggccgaggagaacgagggcgacaacgccugcaagcgcacguacuccgaccggggguggggcaacgggugcggccuguucggcaaggggagcaucguggccugcgccaaguucacgugcgcgaaguccaugagccucuucgagguggaccagaccaagauccaguacgucauccgcgcccagcugcacgugggcgccaagcaggagaacuggaacaccgacaucaagacccugaaguucgacgcccucuccgggagccaggaggucgaguucaucggcuacgggaaggccacccuggagugccaggugcagaccgcgguggacuucggcaacagcuacaucgccgagauggagaccgaguccuggaucgucgaccgccagugggcccaggaccugacgcuccccuggcagagcggcuccgggggcguguggcgggagaugcaccaccugguggaguucgagcccccgcacgccgcgaccauccgcguccuggcccucgggaaccaggagggcagccugaagaccgcccugaccggggccaugcgggugacgaaggacaccaacgacaacaaccucuacaagcugcacggcggccacguguccugccgcgucaagcugagcgcccucacccugaaggggaccuccuacaagaucugcacggacaagauguucuucgugaagaaccccaccgacaccggccacgggaccguggucaugcaggucaaggugagcaagggcgcgcccugccggauccccgugaucguggccgacgaccugacggccgccaucaacaagggcauccucgugaccgucaacccgaucgccuccaccaacgacgacgaggugcugaucgaggugaacccgcccuucggggacagcuacaucaucgucggccgcggggacucccggcugaccuaccaguggcacaaggagggcagcuccaucgggaagcuguucacccagacgaugaagggcguggagcgccucgcggugaugggcgacaccgccugggacuucagcuccgccgggggcuucuucaccagcgucgggaagggcauccacaccguguucggguccgccuuccagggccuguucggcgggcucaacuggaucacgaaggugaucaugggcgccguccugaucuggguggggaucaacacccggaacaugaccaugagcauguccaugauccuggugggcgucaucaugauguuccucagccugggggugggcgcguga

SEQ ID NO: 290 - RNA, 2067 nt, Artificial Sequence
  derived and/or modified CDS sequence (opt1) from YFV__NC_002031.1__SSjev(V3)-prME-XX (polyprotein: aa122-788)
augaacgagggcagcaucauguggcuggccucccucgccguggucaucgcgugcgccggggccgugacgcuggugcggaagaaccgcuggcuccugcugaacgucaccuccgaggaccucggcaagaccuucagcguggggaccggcaacugcacgaccaacauccuggaggccaaguacuggugccccgacuccauggaguacaacugccccaaccugagcccccgggaggagcccgacgacaucgacugcuggugcuacggcguggagaacguccgcguggccuacgggaagugcgacuccgcgggccggagccgccggucccgccgggccaucgaccuccccacccacgagaaccacgggcugaagacccgccaggagaaguggaugacgggccggaugggggagcgccagcugcagaagaucgagcggugguucgugcgcaacccguucuucgccgucaccgcccucaccaucgccuaccuggugggcagcaacaugacccagcggguggucaucgcgcugcucgugcuggccgugggccccgccuacuccgcccacugcaucgggaucacggaccgcgacuucaucgagggcguccacgggggcaccugggugagcgcgacccuggagcaggacaagugcgugaccgucauggcccccgacaagcccucccucgacaucagccuggagacgguggccaucgaccggccggccgaggugcgcaaggucugcuacaacgccgugcugacccacgugaagaucaacgacaagugccccuccaccggcgaggcgcaccucgccgaggagaacgagggggacaacgccugcaagcggaccuacagcgaccggggcugggggaacggcugcgggcuguucggcaagggcuccaucgucgccugcgccaaguucacgugcgcgaaguccaugagccuguucgagguggaccagaccaagauccaguacgucauccgcgcccagcuccacgugggggccaagcaggagaacuggaacaccgacaucaagacccugaaguucgacgcccugagcggcagccaggagguggaguucaucggguacggcaaggccacgcucgagugccagguccagaccgcgguggacuucgggaacuccuacaucgccgagauggagaccgagagcuggaucguggaccggcagugggcccaggaccugacccugcccuggcaguccggcagcggcggggucuggcgcgagaugcaccaccucguggaguucgagcccccgcacgccgccacgauccgggugcuggcgcugggcaaccaggaggggucccucaagaccgcccugaccggcgccaugcgcgucaccaaggacacgaacgacaacaaccuguacaagcuccacgggggccacgugagcugccgggugaagcuguccgcccugacccucaagggcaccagcuacaagaucugcaccgacaagauguucuucgucaagaaccccacggacaccgggcacggcaccguggugaugcaggucaagguguccaagggggcgcccugccgcaucccggugaucgucgccgacgaccugaccgccgccaucaacaagggcauccuggugaccgugaacccgaucgccagcacgaacgacgacgagguccucaucgaggugaacccgcccuucggcgacuccuacaucaucguggggcggggcgacagccgccugaccuaccaguggcacaaggagggguccagcaucggcaagcuguucacccagaccaugaagggggucgagcggcuggcggugaugggcgacacggccugggacuucuccagcgccggcggguucuucaccuccgugggcaaggggauccacaccgucuucggcagcgccuuccaggggcuguucggcggccucaacuggaucaccaaggugaucaugggggccgugcugaucugggucggcaucaacacgcgcaacaugaccauguccaugagcaugauccucgugggggugaucaugauguuccugagccugggcgucggggcggaccagggcugcgccaucaacuucggcaaguga

SEQ ID NO: 291 - RNA, 2055 nt, Artificial Sequence
  derived and/or modified CDS sequence (opt1) from YFV__NC_002031.1__SSjev(V3)-prME-XX (polyprotein: aa126-788)
augaacgagggcagcaucauguggcuggccucccucgccguggucaucgcgugcgccggggcccgcaagaaccgguggcugcugcucaacgugaccagcgaggaccugggcaagaccuucuccguggggacgggcaacugcaccaccaacauccuggaggccaaguacuggugccccgacagcauggaguacaacugccccaaccucagcccccgcgaggagcccgacgacaucgacugcuggugcuacggggucgagaacgugcggguggccuacggcaagugcgacuccgcgggccgcucccggcgcagccggcgcgccaucgaccugcccacccacgagaaccacgggcugaagacgcggcaggagaaguggaugaccggccgcaugggggagcggcagcuccagaagaucgagcgcugguucguccggaacccguucuucgccgugaccgcccugaccaucgcguaccuggugggcuccaacaugacgcagcgcgucgugaucgcccuccuggugcuggccgucgggcccgccuacagcgcccacugcaucggcaucaccgaccgggacuucaucgagggcgugcacgggggcaccuggguguccgcgacccucgagcaggacaagugcgucacggugauggcccccgacaagcccagccuggacaucucccuggagaccguggccaucgaccgcccggccgagguccggaaggugugcuacaacgccgugcucacccacgucaagaucaacgacaagugccccagcaccggggaggcgcaccuggccgaggagaacgagggcgacaacgccugcaagcgcacguacuccgaccggggcugggggaacggcugcgggcuguucggcaaggggagcaucguggccugcgccaaguucacgugcgcgaaguccaugagccucuucgagguggaccagaccaagauccaguacgucauccgcgcccagcugcacgugggcgccaagcaggagaacuggaacaccgacaucaagacccugaaguucgacgcccucuccggcagccaggaggucgaguucaucggguacggcaaggccacccuggagugccaggugcagaccgcgguggacuucgggaacagcuacaucgccgagauggagaccgaguccuggaucgucgaccggcagugggcccaggaccugacgcuccccuggcagagcggcuccgggggcguguggcgcgagaugcaccaccugguggaguucgagcccccgcacgccgcgaccauccgcguccuggcccucggcaaccaggaggggagccugaagaccgcccugaccggcgccaugcgggugacgaaggacaccaacgacaacaaccucuacaagcugcacgggggccacguguccugccgcgucaagcugagcgcccucacccugaaggggaccuccuacaagaucugcacggacaagauguucuucgugaagaaccccaccgacaccggccacggcaccguggucaugcaggucaaggugagcaagggggcgcccugccggauccccgugaucguggccgacgaccugacggccgccaucaacaagggcauccucgugaccgucaacccgaucgccuccaccaacgacgacgaggugcugaucgaggugaacccgcccuucggggacagcuacaucaucgucggccgcggcgacucccggcugaccuaccaguggcacaaggaggggagcuccaucggcaagcuguucacccagacgaugaaggggguggagcgccucgcggugaugggcgacaccgccugggacuucagcuccgccgggggcuucuucaccagcgucggcaaggggauccacaccguguucggcuccgccuuccaggggcuguucggcgggcucaacuggaucacgaaggugaucaugggcgccguccugaucugggugggcaucaacacccggaacaugaccaugagcauguccaugauccuggugggggucaucaugauguuccucagccugggcgugggggcggaccagggcugcgccaucaacuucgggaaguga

SEQ ID NO: 292 - RNA, 2037 nt, Artificial Sequence
  derived and/or modified CDS sequence (opt1) from YFV__NC_002031.1__SSjev(V3)-prME (polyprotein: aa122-778)
augaacgagggcagcaucauguggcuggccucccucgccguggucaucgcgugcgccggggccgugacccuggugcgcaagaaccgguggcugcuccugaacgucaccagcgaggaccugggcaagacguucuccguggggaccggcaacugcaccaccaacauccucgaggccaaguacuggugccccgacagcauggaguacaacugccccaaccugagcccccgcgaggagcccgacgacaucgacugcuggugcuacgggguggagaacguccggguggccuacggcaagugcgacuccgcgggccgcucccggcgcagccggcgcgccaucgaccugcccacgcacgagaaccacgggcucaagacccggcaggagaaguggaugaccggccgcaugggggagcggcagcugcagaagaucgagcgcugguucgugcggaacccguucuucgccgucaccgcccugacgaucgcguaccucgugggcuccaacaugacccagcgcguggucaucgcccugcuggugcucgccguggggcccgccuacagcgcccacugcaucggcaucaccgaccgggacuucaucgagggcguccacgggggcaccuggguguccgcgacgcuggagcaggacaagugcgugaccgucauggcccccgacaagcccagccuggacaucucccucgagaccguggccaucgaccgcccggccgaggugcggaaggucugcuacaacgccgugcugacccacgugaagaucaacgacaagugccccagcacgggggaggcgcaccuggccgaggagaacgagggcgacaacgccugcaagcgcaccuacuccgaccggggcugggggaacggcugcggccucuucgggaaggggagcaucgucgccugcgccaaguucacgugcgcgaaguccaugagccuguucgagguggaccagaccaagauccaguacgucauccgcgcccagcugcacgugggcgccaagcaggagaacuggaacaccgacaucaagacccucaaguucgacgcccuguccggcagccaggagguggaguucaucggguacggcaaggccacccuggagugccagguccagaccgcgguggacuucgggaacagcuacaucgccgagauggagacggaguccuggaucguggaccggcagugggcccaggaccucacccugcccuggcagagcggcuccgggggcgucuggcgcgagaugcaccaccugguggaguucgagcccccgcacgccgcgaccauccgcgugcucgcccugggcaaccaggaggggagccugaagaccgcccucacgggcgccaugcgggucaccaaggacaccaacgacaacaaccuguacaagcugcacgggggccacguguccugccgcgugaagcucagcgcccugacccugaaggggacguccuacaagaucugcaccgacaagauguucuucgucaagaaccccaccgacaccggccacggcacgguggugaugcaggucaaggugagcaagggggcgcccugccggauccccgugaucgucgccgacgaccucaccgccgccaucaacaagggcauccuggugaccgugaacccgaucgccuccaccaacgacgacgagguccugaucgaggugaacccgcccuucggggacagcuacaucaucgugggccgcggcgacucccggcucaccuaccaguggcacaaggaggggagcuccaucggcaagcuguucacgcagaccaugaagggggucgagcgccuggcggugaugggcgacaccgccugggacuucagcuccgccgggggcuucuucaccagcgugggcaaggggauccacacggucuucggcuccgccuuccaggggcuguucggcgggcucaacuggaucaccaaggugaucaugggcgccgugcugaucugggucggcaucaacacccggaacaugaccaugagcauguccaugauccucgugggggugaucaugauguuccugagccugggcgucggggcguga

SEQ ID NO: 293 - RNA, 2025 nt, Artificial Sequence
  derived and/or modified CDS sequence (opt1) from YFV__NC_002031.1__SSjev(V3)-prME (polyprotein: aa126-778)
augaacgagggcagcaucauguggcuggccucccucgccguggucaucgcgugcgccggggcccgcaagaaccgguggcugcugcucaacgugaccagcgaggaccugggcaagaccuucuccguggggacgggcaacugcaccaccaacauccuggaggccaaguacuggugccccgacagcauggaguacaacugccccaaccucagcccccgcgaggagcccgacgacaucgacugcuggugcuacggggucgagaacgugcggguggccuacggcaagugcgacuccgcgggccgcucccggcgcagccggcgcgccaucgaccugcccacccacgagaaccacgggcugaagacgcggcaggagaaguggaugaccggccgcaugggggagcggcagcuccagaagaucgagcgcugguucguccggaacccguucuucgccgugaccgcccugaccaucgcguaccuggugggcuccaacaugacgcagcgcgucgugaucgcccuccuggugcuggccgucgggcccgccuacagcgcccacugcaucggcaucaccgaccgggacuucaucgagggcgugcacgggggcaccuggguguccgcgacccucgagcaggacaagugcgucacggugauggcccccgacaagcccagccuggacaucucccuggagaccguggccaucgaccgcccggccgagguccggaaggugugcuacaacgccgugcucacccacgucaagaucaacgacaagugccccagcaccggggaggcgcaccuggccgaggagaacgagggcgacaacgccugcaagcgcacguacuccgaccggggcugggggaacggcugcgggcuguucggcaaggggagcaucguggccugcgccaaguucacgugcgcgaaguccaugagccucuucgagguggaccagaccaagauccaguacgucauccgcgcccagcugcacgugggcgccaagcaggagaacuggaacaccgacaucaagacccugaaguucgacgcccucuccggcagccaggaggucgaguucaucggguacggcaaggccacccuggagugccaggugcagaccgcgguggacuucgggaacagcuacaucgccgagauggagaccgaguccuggaucgucgaccggcagugggcccaggaccugacgcuccccuggcagagcggcuccgggggcguguggcgcgagaugcaccaccugguggaguucgagcccccgcacgccgcgaccauccgcguccuggcccucggcaaccaggaggggagccugaagaccgcccugaccggcgccaugcgggugacgaaggacaccaacgacaacaaccucuacaagcugcacgggggccacguguccugccgcgucaagcugagcgcccucacccugaaggggaccuccuacaagaucugcacggacaagauguucuucgugaagaaccccaccgacaccggccacggcaccguggucaugcaggucaaggugagcaagggggcgcccugccggauccccgugaucguggccgacgaccugacggccgccaucaacaagggcauccucgugaccgucaacccgaucgccuccaccaacgacgacgaggugcugaucgaggugaacccgcccuucggggacagcuacaucaucgucggccgcggcgacucccggcugaccuaccaguggcacaaggaggggagcuccaucggcaagcuguucacccagacgaugaaggggguggagcgccucgcggugaugggcgacaccgccugggacuucagcuccgccgggggcuucuucaccagcgucggcaaggggauccacaccguguucggcuccgccuuccaggggcuguucggcgggcucaacuggaucacgaaggugaucaugggcgccguccugaucugggugggcaucaacacccggaacaugaccaugagcauguccaugauccuggugggggucaucaugauguuccucagccugggcgugggggcguga

SEQ ID NO: 294 - RNA, 2076 nt, Artificial Sequence
  derived and/or modified CDS sequence (opt1) from YFV__NC_002031.1__SSjev(V4)-prME-XX (polyprotein: aa122-788)
augcugggcagcaacuccgggcagcgcguggucuucaccauccuccugcugcucguggcccccgccuacagcgugacccugguccggaagaaccgcuggcugcuccugaacgugacguccgaggaccugggcaagaccuucagcguggggaccggcaacugcaccacgaacauccucgaggcgaaguacuggugccccgacuccauggaguacaacugccccaaccugagcccccgggaggagcccgacgacaucgacugcuggugcuacggggucgagaacgugcgcguggccuacggcaagugcgacuccgccggccggagccgccggucccgccgggccaucgaccugccgacccacgagaaccacgggcucaagacccgccaggagaaguggaugaccggccggaugggggagcgccagcugcagaagaucgagcggugguucguccgcaaccccuucuucgccgugacggcgcugaccaucgccuaccucgugggcagcaacaugacccagcgggucgugaucgcccugcuggugcucgccgucgggcccgcguacuccgcccacugcaucggcaucaccgaccgcgacuucaucgagggcgugcacgggggcacgugggugagcgccacccuggagcaggacaagugcgucaccgugauggcccccgacaagccgucccuggacaucagccucgagaccguggccaucgaccggcccgcggagguccgcaaggugugcuacaacgccgugcugacgcacgucaagaucaacgacaagugccccuccaccggggaggcccaccuggccgaggagaacgagggcgacaacgccugcaagcggaccuacagcgaccgcggcugggggaacggcugcggccucuucgggaagggguccaucguggcgugcgccaaguucacgugcgccaagagcaugucccuguucgaggucgaccagaccaagauccaguacgugauccgggcccagcugcacgugggcgccaagcaggagaacuggaacaccgacaucaagacccucaaguucgacgcgcugagcggcagccaggaggucgaguucaucggguacggcaaggccacccuggagugccaggugcagacggccguggacuucgggaacuccuacaucgccgagauggagaccgagagcuggaucgucgaccgccagugggcccaggaccucacccugcccuggcaguccggcagcgggggcguguggcgcgagaugcaccaccugguggaguucgagccgccccacgcggccaccauccggguccucgcccugggcaaccaggaggggucccugaagacggcccucaccggcgcgaugcgcgugaccaaggacaccaacgacaacaaccuguacaagcugcacgggggccacgugagcugccgggucaagcucuccgcccugacgcugaaggggaccagcuacaagaucugcaccgacaagauguucuucgugaagaaccccaccgacacgggccacggcaccguggucaugcaggucaagguguccaagggggcccccugccgcaucccggugaucguggccgacgaccucaccgccgcgaucaacaagggcauccuggugaccgucaaccccaucgccagcaccaacgacgacgaggugcugaucgaggugaacccgcccuucggggacuccuacaucaucgucggccggggcgacagccgccucacguaccaguggcacaaggagggguccagcaucggcaagcuguucacccagaccaugaaggggguggagcggcuggccgugaugggcgacaccgccugggacuucuccagcgccgggggcuucuucacguccgucggcaaggggauccacaccguguucggcagcgcguuccaggggcuguucggcgggcucaacuggaucaccaaggugaucaugggcgccguccugaucugggugggcaucaacacccgcaacaugacgauguccaugagcaugauccuggugggggucaucaugauguuccucagccugggcgugggggccgaccagggcugcgccaucaacuucgggaaguga

SEQ ID NO: 295 - RNA, 2064 nt, Artificial Sequence
  derived and/or modified CDS sequence (opt1) from YFV__NC_002031.1__SSjev(V4)-prME-XX (polyprotein: aa126-788)
augcugggcagcaacuccgggcagcgcguggucuucaccauccuccugcugcucguggcccccgccuacagccggaagaaccgcuggcugcugcucaacgugaccuccgaggaccugggcaagacguucagcgucgggaccggcaacugcaccaccaacauccuggaggcgaaguacuggugccccgacuccauggaguacaacugccccaaccucagcccccgggaggagcccgacgacaucgacugcuggugcuacgggguggagaacgugcgcgucgccuacggcaagugcgacuccgccggccggagccgccggucccgccgggccaucgaccugccgacgcacgagaaccacgggcugaagacccgccaggagaaguggaugaccggccggaugggggagcgccagcuccagaagaucgagcggugguucgugcgcaaccccuucuucgccgugaccgcgcugacgaucgccuaccuggucggcagcaacaugacccagcggguggugaucgcccuccugguccuggccguggggcccgcguacuccgcccacugcaucggcaucaccgaccgcgacuucaucgagggcgugcacgggggcaccugggucagcgccacgcucgagcaggacaagugcgugaccgugauggcccccgacaagccgucccuggacaucagccuggagaccgucgccaucgaccggcccgcggaggugcgcaaggugugcuacaacgccguccucacccacgugaagaucaacgacaagugccccuccacgggggaggcccaccuggccgaggagaacgagggcgacaacgccugcaagcggaccuacagcgaccgcggcugggggaacggcugcgggcuguucggcaagggguccaucguggcgugcgccaaguucacgugcgccaagagcaugucccucuucgaggucgaccagaccaagauccaguacgugauccgggcccagcugcacgucggcgccaagcaggagaacuggaacaccgacaucaagacccugaaguucgacgcgcucagcggcagccaggagguggaguucaucggguacggcaaggccacccuggagugccaggugcagaccgccgucgacuucgggaacuccuacaucgccgagauggagacggagagcuggaucguggaccgccagugggcccaggaccugacccuccccuggcaguccggcagcgggggcguguggcgcgagaugcaccaccuggucgaguucgagccgccccacgcggccaccauccgggugcuggcccucggcaaccaggaggggucccugaagaccgcccugacgggcgcgaugcgcgugaccaaggacaccaacgacaacaaccucuacaagcugcacgggggccacgucagcugccgggugaagcuguccgcccucacccugaaggggacgagcuacaagaucugcaccgacaagauguucuucgugaagaaccccaccgacaccggccacggcacggucgugaugcaggucaagguguccaagggggcccccugccgcaucccggugaucguggccgacgaccugaccgccgcgaucaacaagggcauccucgucaccgugaaccccaucgccagcaccaacgacgacgaggugcugaucgaggucaacccgcccuucggggacuccuacaucaucgugggccggggcgacagccgccugaccuaccaguggcacaaggagggguccagcaucggcaagcuguucacgcagaccaugaaggggguggagcggcucgccgucaugggcgacaccgccugggacuucuccagcgccgggggcuucuucaccuccgugggcaaggggauccacacgguguucggcagcgcguuccaggggcuguucggcgggcucaacuggaucaccaaggucaucaugggcgccgugcugaucugggugggcaucaacacccgcaacaugaccauguccaugagcaugauccuggucggggugaucaugauguuccugagccucggcgugggggccgaccagggcugcgccaucaacuucgggaaguga

SEQ ID NO: 296 - RNA, 2046 nt, Artificial Sequence
  derived and/or modified CDS sequence (opt1) from YFV__NC_002031.1__SSjev(V4)-prME (polyprotein: aa122-778)
augcugggcagcaacuccgggcagcgcguggucuucaccauccuccugcugcucguggcccccgccuacagcgugacccugguccggaagaaccgcuggcugcuccugaacgugacguccgaggaccugggcaagaccuucagcguggggaccggcaacugcaccacgaacauccucgaggcgaaguacuggugccccgacuccauggaguacaacugccccaaccugagcccccgggaggagcccgacgacaucgacugcuggugcuacggggucgagaacgugcgcguggccuacggcaagugcgacuccgccggccggagccgccggucccgccgggccaucgaccugccgacccacgagaaccacgggcucaagacccgccaggagaaguggaugaccggccggaugggggagcgccagcugcagaagaucgagcggugguucguccgcaaccccuucuucgccgugacggcgcugaccaucgccuaccucgugggcagcaacaugacccagcgggucgugaucgcccugcuggugcucgccgucgggcccgcguacuccgcccacugcaucggcaucaccgaccgcgacuucaucgagggcgugcacgggggcacgugggugagcgccacccuggagcaggacaagugcgucaccgugauggcccccgacaagccgucccuggacaucagccucgagaccguggccaucgaccggcccgcggagguccgcaaggugugcuacaacgccgugcugacgcacgucaagaucaacgacaagugccccuccaccggggaggcccaccuggccgaggagaacgagggcgacaacgccugcaagcggaccuacagcgaccgcggcugggggaacggcugcggccucuucgggaagggguccaucguggcgugcgccaaguucacgugcgccaagagcaugucccuguucgaggucgaccagaccaagauccaguacgugauccgggcccagcugcacgugggcgccaagcaggagaacuggaacaccgacaucaagacccucaaguucgacgcgcugagcggcagccaggaggucgaguucaucggguacggcaaggccacccuggagugccaggugcagacggccguggacuucgggaacuccuacaucgccgagauggagaccgagagcuggaucgucgaccgccagugggcccaggaccucacccugcccuggcaguccggcagcgggggcguguggcgcgagaugcaccaccugguggaguucgagccgccccacgcggccaccauccggguccucgcccugggcaaccaggaggggucccugaagacggcccucaccggcgcgaugcgcgugaccaaggacaccaacgacaacaaccuguacaagcugcacgggggccacgugagcugccgggucaagcucuccgcccugacgcugaaggggaccagcuacaagaucugcaccgacaagauguucuucgugaagaaccccaccgacacgggccacggcaccguggucaugcaggucaagguguccaagggggcccccugccgcaucccggugaucguggccgacgaccucaccgccgcgaucaacaagggcauccuggugaccgucaaccccaucgccagcaccaacgacgacgaggugcugaucgaggugaacccgcccuucggggacuccuacaucaucgucggccggggcgacagccgccucacguaccaguggcacaaggagggguccagcaucggcaagcuguucacccagaccaugaaggggguggagcggcuggccgugaugggcgacaccgccugggacuucuccagcgccgggggcuucuucacguccgucggcaaggggauccacaccguguucggcagcgcguuccaggggcuguucggcgggcucaacuggaucaccaaggugaucaugggcgccguccugaucugggugggcaucaacacccgcaacaugacgauguccaugagcaugauccuggugggggucaucaugauguuccucagccugggcgugggggccuga

SEQ ID NO: 297 - RNA, 2034 nt, Artificial Sequence
  derived and/or modified CDS sequence (opt1) from YFV__NC_002031.1__SSjev(V4)-prME (polyprotein: aa126-778)
augcugggcagcaacuccgggcagcgcguggucuucaccauccuccugcugcucguggcccccgccuacagccggaagaaccgcuggcugcugcucaacgugaccuccgaggaccugggcaagacguucagcgucgggaccggcaacugcaccaccaacauccuggaggcgaaguacuggugccccgacuccauggaguacaacugccccaaccucagcccccgggaggagcccgacgacaucgacugcuggugcuacgggguggagaacgugcgcgucgccuacggcaagugcgacuccgccggccggagccgccggucccgccgggccaucgaccugccgacgcacgagaaccacgggcugaagacccgccaggagaaguggaugaccggccggaugggggagcgccagcuccagaagaucgagcggugguucgugcgcaaccccuucuucgccgugaccgcgcugacgaucgccuaccuggucggcagcaacaugacccagcggguggugaucgcccuccugguccuggccguggggcccgcguacuccgcccacugcaucggcaucaccgaccgcgacuucaucgagggcgugcacgggggcaccugggucagcgccacgcucgagcaggacaagugcgugaccgugauggcccccgacaagccgucccuggacaucagccuggagaccgucgccaucgaccggcccgcggaggugcgcaaggugugcuacaacgccguccucacccacgugaagaucaacgacaagugccccuccacgggggaggcccaccuggccgaggagaacgagggcgacaacgccugcaagcggaccuacagcgaccgcggcugggggaacggcugcgggcuguucggcaagggguccaucguggcgugcgccaaguucacgugcgccaagagcaugucccucuucgaggucgaccagaccaagauccaguacgugauccgggcccagcugcacgucggcgccaagcaggagaacuggaacaccgacaucaagacccugaaguucgacgcgcucagcggcagccaggagguggaguucaucggguacggcaaggccacccuggagugccaggugcagaccgccgucgacuucgggaacuccuacaucgccgagauggagacggagagcuggaucguggaccgccagugggcccaggaccugacccuccccuggcaguccggcagcgggggcguguggcgcgagaugcaccaccuggucgaguucgagccgccccacgcggccaccauccgggugcuggcccucggcaaccaggaggggucccugaagaccgcccugacgggcgcgaugcgcgugaccaaggacaccaacgacaacaaccucuacaagcugcacgggggccacgucagcugccgggugaagcuguccgcccucacccugaaggggacgagcuacaagaucugcaccgacaagauguucuucgugaagaaccccaccgacaccggccacggcacggucgugaugcaggucaagguguccaagggggcccccugccgcaucccggugaucguggccgacgaccugaccgccgcgaucaacaagggcauccucgucaccgugaaccccaucgccagcaccaacgacgacgaggugcugaucgaggucaacccgcccuucggggacuccuacaucaucgugggccggggcgacagccgccugaccuaccaguggcacaaggagggguccagcaucggcaagcuguucacgcagaccaugaaggggguggagcggcucgccgucaugggcgacaccgccugggacuucuccagcgccgggggcuucuucaccuccgugggcaaggggauccacacgguguucggcagcgcguuccaggggcuguucggcgggcucaacuggaucaccaaggucaucaugggcgccgugcugaucugggugggcaucaacacccgcaacaugaccauguccaugagcaugauccuggucggggugaucaugauguuccugagccucggcgugggggccuga

SEQ ID NO: 298 - RNA, 2049 nt, Artificial Sequence
  derived and/or modified CDS sequence (opt1) from YFV__NC_002031.1__SSjev(V5)-prME-XX (polyprotein: aa122-788)
auguggcuggugagccucgccaucgucaccgccugcgcgggcgccgugacccuggugcgcaagaaccgguggcugcuccugaacgucacguccgaggaccuggggaagaccuucagcgugggcaccgggaacugcaccacgaacauccucgaggccaaguacuggugccccgacuccauggaguacaacugccccaaccugagcccccgcgaggagcccgacgacaucgacugcuggugcuacggcguggagaacguccggguggccuacgggaagugcgacuccgccggccgcagccggcgcucccggcgcgcgaucgaccugcccacccacgagaaccacggccucaagacccggcaggagaaguggaugaccgggcgcaugggcgagcggcagcugcagaagaucgagcgcugguucgugcggaacccguucuucgccgucacggcccugaccaucgccuaccucguggggagcaacaugacccagcgcguggucaucgcgcugcuggugcucgccgugggccccgccuacuccgcccacugcaucgggaucaccgaccgggacuucaucgagggcguccacggcgggacgugggugagcgccacccuggagcaggacaagugcgugaccgucauggcgcccgacaagcccucccuggacaucagccucgagaccguggccaucgaccgcccggccgaggugcggaaggucugcuacaacgccgugcugacgcacgugaagaucaacgacaagugccccuccaccggcgaggcccaccuggcggaggagaacgagggggacaacgccugcaagcgcaccuacagcgaccggggcuggggcaacgggugcggccucuucgggaagggcuccaucgucgccugcgccaaguucacgugcgccaagagcaugucccuguucgagguggaccagaccaagauccaguacgucauccgcgcgcagcugcacgugggggccaagcaggagaacuggaacaccgacaucaagacccucaaguucgacgcccugagcggcucccaggagguggaguucaucggcuacgggaaggccacccuggagugccagguccagacggccguggacuucggcaacagcuacaucgcggagauggagaccgagagcuggaucguggaccggcagugggcccaggaccucacccugcccuggcaguccgggagcggcggggucuggcgcgagaugcaccaccugguggaguucgagcccccgcacgccgccaccauccgcgugcucgcgcugggcaaccaggagggcucccugaagacggcccucaccggggccaugcgggucaccaaggacaccaacgacaacaaccuguacaagcugcacggcgggcacgugagcugccgcgugaagcucuccgcccugacgcugaagggcaccagcuacaagaucugcaccgacaagauguucuucgucaagaaccccaccgacacggggcacggcaccguggugaugcaggucaagguguccaagggcgcccccugccggauccccgugaucgucgcggacgaccucaccgccgccaucaacaaggggauccuggugaccgugaacccgaucgccagcaccaacgacgacgagguccugaucgaggugaacccgcccuucggcgacuccuacaucaucguggggcgcggcgacagccggcucacguaccaguggcacaaggagggcuccagcaucgggaagcuguucacccagaccaugaagggcgucgagcgccuggccgugaugggggacaccgcgugggacuucuccagcgccggcggguucuucacguccgugggcaagggcauccacaccgucuucgggagcgccuuccagggccucuucgggggccugaacuggaucaccaaggugaucaugggggccgugcugaucugggucggcaucaacacccggaacaugacgauguccaugagcaugauccucgugggcgugaucaugauguuccugucccugggggucggcgccgaccaggggugcgcgaucaacuucggcaaguga

SEQ ID NO: 299 - RNA, 2037 nt, Artificial Sequence
  derived and/or modified CDS sequence (opt1) from YFV__NC_002031.1__SSjev(V5)-prME-XX (polyprotein: aa126-788)
auguggcuggugagccucgccaucgucaccgccugcgcgggcgcccgcaagaaccgguggcugcugcucaacgugaccuccgaggaccuggggaagacguucagcgugggcaccgggaacugcaccaccaacauccuggaggccaaguacuggugccccgacuccauggaguacaacugccccaaccucagcccccgcgaggagcccgacgacaucgacugcuggugcuacggcgucgagaacgugcggguggccuacgggaagugcgacuccgccggccgcagccggcgcucccggcgcgcgaucgaccugcccacgcacgagaaccacggccugaagacccggcaggagaaguggaugaccgggcgcaugggcgagcggcagcuccagaagaucgagcgcugguucguccggaacccguucuucgccgugaccgcccugacgaucgccuaccugguggggagcaacaugacccagcgcgucgugaucgcgcuccuggugcuggccgucggccccgccuacuccgcccacugcaucgggaucaccgaccgggacuucaucgagggcgugcacggcgggaccugggugagcgccacgcucgagcaggacaagugcgucaccgugauggcgcccgacaagcccucccuggacaucagccuggagaccguggccaucgaccgcccggccgagguccggaaggugugcuacaacgccgugcucacccacgucaagaucaacgacaagugccccuccacgggcgaggcccaccuggcggaggagaacgagggggacaacgccugcaagcgcaccuacagcgaccggggcuggggcaacgggugcggccuguucgggaagggcuccaucguggccugcgccaaguucacgugcgccaagagcaugucccucuucgagguggaccagaccaagauccaguacgucauccgcgcgcagcugcacgugggggccaagcaggagaacuggaacaccgacaucaagacccugaaguucgacgcccucagcggcucccaggaggucgaguucaucggcuacgggaaggccacccuggagugccaggugcagaccgccguggacuucggcaacagcuacaucgcggagauggagacggagagcuggaucgucgaccggcagugggcccaggaccugacccuccccuggcaguccgggagcggcgggguguggcgcgagaugcaccaccugguggaguucgagcccccgcacgccgccaccauccgcguccuggcgcucggcaaccaggagggcucccugaagaccgcccugacgggggccaugcgggugaccaaggacaccaacgacaacaaccucuacaagcugcacggcgggcacgugagcugccgcgucaagcuguccgcccucacccugaagggcacgagcuacaagaucugcaccgacaagauguucuucgugaagaaccccaccgacaccgggcacggcacgguggucaugcaggucaagguguccaagggcgcccccugccggauccccgugaucguggcggacgaccugaccgccgccaucaacaaggggauccucgugaccgucaacccgaucgccagcaccaacgacgacgaggugcugaucgaggugaacccgcccuucggcgacuccuacaucaucgucgggcgcggcgacagccggcugaccuaccaguggcacaaggagggcuccagcaucgggaagcuguucacgcagaccaugaagggcguggagcgccucgccgugaugggggacaccgcgugggacuucuccagcgccggcggguucuucaccuccgucggcaagggcauccacacgguguucgggagcgccuuccagggccuguucgggggccucaacuggaucaccaaggugaucaugggggccguccugaucugggugggcaucaacacccggaacaugaccauguccaugagcaugauccuggugggcgucaucaugauguuccucucccugggggugggcgccgaccaggggugcgcgaucaacuucggcaaguga

SEQ ID NO: 300 - RNA, 2019 nt, Artificial Sequence
  derived and/or modified CDS sequence (opt1) from YFV__NC_002031.1__SSjev(V5)-prME (polyprotein: aa122-778)
auguggcuggugagccucgccaucgucaccgccugcgcgggcgccgugacccuggugcgcaagaaccgguggcugcuccugaacgucacguccgaggaccuggggaagaccuucagcgugggcaccgggaacugcaccacgaacauccucgaggccaaguacuggugccccgacuccauggaguacaacugccccaaccugagcccccgcgaggagcccgacgacaucgacugcuggugcuacggcguggagaacguccggguggccuacgggaagugcgacuccgccggccgcagccggcgcucccggcgcgcgaucgaccugcccacccacgagaaccacggccucaagacccggcaggagaaguggaugaccgggcgcaugggcgagcggcagcugcagaagaucgagcgcugguucgugcggaacccguucuucgccgucacggcccugaccaucgccuaccucguggggagcaacaugacccagcgcguggucaucgcgcugcuggugcucgccgugggccccgccuacuccgcccacugcaucgggaucaccgaccgggacuucaucgagggcguccacggcgggacgugggugagcgccacccuggagcaggacaagugcgugaccgucauggcgcccgacaagcccucccuggacaucagccucgagaccguggccaucgaccgcccggccgaggugcggaaggucugcuacaacgccgugcugacgcacgugaagaucaacgacaagugccccuccaccggcgaggcccaccuggcggaggagaacgagggggacaacgccugcaagcgcaccuacagcgaccggggcuggggcaacgggugcggccucuucgggaagggcuccaucgucgccugcgccaaguucacgugcgccaagagcaugucccuguucgagguggaccagaccaagauccaguacgucauccgcgcgcagcugcacgugggggccaagcaggagaacuggaacaccgacaucaagacccucaaguucgacgcccugagcggcucccaggagguggaguucaucggcuacgggaaggccacccuggagugccagguccagacggccguggacuucggcaacagcuacaucgcggagauggagaccgagagcuggaucguggaccggcagugggcccaggaccucacccugcccuggcaguccgggagcggcggggucuggcgcgagaugcaccaccugguggaguucgagcccccgcacgccgccaccauccgcgugcucgcgcugggcaaccaggagggcucccugaagacggcccucaccggggccaugcgggucaccaaggacaccaacgacaacaaccuguacaagcugcacggcgggcacgugagcugccgcgugaagcucuccgcccugacgcugaagggcaccagcuacaagaucugcaccgacaagauguucuucgucaagaaccccaccgacacggggcacggcaccguggugaugcaggucaagguguccaagggcgcccccugccggauccccgugaucgucgcggacgaccucaccgccgccaucaacaaggggauccuggugaccgugaacccgaucgccagcaccaacgacgacgagguccugaucgaggugaacccgcccuucggcgacuccuacaucaucguggggcgcggcgacagccggcucacguaccaguggcacaaggagggcuccagcaucgggaagcuguucacccagaccaugaagggcgucgagcgccuggccgugaugggggacaccgcgugggacuucuccagcgccggcggguucuucacguccgugggcaagggcauccacaccgucuucgggagcgccuuccagggccucuucgggggccugaacuggaucaccaaggugaucaugggggccgugcugaucugggucggcaucaacacccggaacaugacgauguccaugagcaugauccucgugggcgugaucaugauguuccugucccugggggucggcgccuga

SEQ ID NO: 301 - RNA, 2007 nt, Artificial Sequence
  derived and/or modified CDS sequence (opt1) from YFV__NC_002031.1__SSjev(V5)-prME (polyprotein: aa126-778)
auguggcuggugagccucgccaucgucaccgccugcgcgggcgcccgcaagaaccgguggcugcugcucaacgugaccuccgaggaccuggggaagacguucagcgugggcaccgggaacugcaccaccaacauccuggaggccaaguacuggugccccgacuccauggaguacaacugccccaaccucagcccccgcgaggagcccgacgacaucgacugcuggugcuacggcgucgagaacgugcggguggccuacgggaagugcgacuccgccggccgcagccggcgcucccggcgcgcgaucgaccugcccacgcacgagaaccacggccugaagacccggcaggagaaguggaugaccgggcgcaugggcgagcggcagcuccagaagaucgagcgcugguucguccggaacccguucuucgccgugaccgcccugacgaucgccuaccugguggggagcaacaugacccagcgcgucgugaucgcgcuccuggugcuggccgucggccccgccuacuccgcccacugcaucgggaucaccgaccgggacuucaucgagggcgugcacggcgggaccugggugagcgccacgcucgagcaggacaagugcgucaccgugauggcgcccgacaagcccucccuggacaucagccuggagaccguggccaucgaccgcccggccgagguccggaaggugugcuacaacgccgugcucacccacgucaagaucaacgacaagugccccuccacgggcgaggcccaccuggcggaggagaacgagggggacaacgccugcaagcgcaccuacagcgaccggggcuggggcaacgggugcggccuguucgggaagggcuccaucguggccugcgccaaguucacgugcgccaagagcaugucccucuucgagguggaccagaccaagauccaguacgucauccgcgcgcagcugcacgugggggccaagcaggagaacuggaacaccgacaucaagacccugaaguucgacgcccucagcggcucccaggaggucgaguucaucggcuacgggaaggccacccuggagugccaggugcagaccgccguggacuucggcaacagcuacaucgcggagauggagacggagagcuggaucgucgaccggcagugggcccaggaccugacccuccccuggcaguccgggagcggcgggguguggcgcgagaugcaccaccugguggaguucgagcccccgcacgccgccaccauccgcguccuggcgcucggcaaccaggagggcucccugaagaccgcccugacgggggccaugcgggugaccaaggacaccaacgacaacaaccucuacaagcugcacggcgggcacgugagcugccgcgucaagcuguccgcccucacccugaagggcacgagcuacaagaucugcaccgacaagauguucuucgugaagaaccccaccgacaccgggcacggcacgguggucaugcaggucaagguguccaagggcgcccccugccggauccccgugaucguggcggacgaccugaccgccgccaucaacaaggggauccucgugaccgucaacccgaucgccagcaccaacgacgacgaggugcugaucgaggugaacccgcccuucggcgacuccuacaucaucgucgggcgcggcgacagccggcugaccuaccaguggcacaaggagggcuccagcaucgggaagcuguucacgcagaccaugaagggcguggagcgccucgccgugaugggggacaccgcgugggacuucuccagcgccggcggguucuucaccuccgucggcaagggcauccacacgguguucgggagcgccuuccagggccuguucgggggccucaacuggaucaccaaggugaucaugggggccguccugaucugggugggcaucaacacccggaacaugaccauguccaugagcaugauccuggugggcgucaucaugauguuccucucccugggggugggcgccuga

SEQ ID NO: 302 - RNA, 2037 nt, Artificial Sequence
  derived and/or modified CDS sequence (opt1) from YFV__NC_002031.1__SSIgE-prMEdelstem_TM-JEV (polyprotein: aa122-680)
auggacuggaccuggauccuguuccucguggccgccgcgacccgcguccacagcgugacgcuggugcggaagaaccgcuggcugcuccugaacgucaccuccgaggaccugggcaagaccuucagcguggggaccggcaacugcacgaccaacauccucgaggccaaguacuggugccccgacuccauggaguacaacugccccaaccugagcccccgggaggagcccgacgacaucgacugcuggugcuacgggguggagaacguccgcguggccuacggcaagugcgacuccgccgggcggagccgccggucccgccgggccaucgaccugcccacccacgagaaccacggccucaagacccgccaggagaaguggaugacgggccggaugggggagcgccagcugcagaagaucgagcggugguucgugcgcaacccguucuucgcggucaccgcccugaccaucgccuaccucgugggcagcaacaugacccagcggguggucaucgcccugcuggugcucgcgguggggcccgccuacuccgcccacugcaucggcaucacggaccgcgacuucaucgaggggguccacggcggcaccugggugagcgccacccuggagcaggacaagugcgugaccgucauggcccccgacaagcccucccuggacaucagccucgagacgguggcgaucgaccggccggccgaggugcgcaaggucugcuacaacgccgugcugacccacgugaagaucaacgacaagugccccuccaccggggaggcccaccuggccgaggagaacgagggcgacaacgcgugcaagcggaccuacagcgaccgcggguggggcaacggcugcggccucuucgggaagggguccaucgucgccugcgccaaguucacgugcgccaagagcaugucccuguucgagguggaccagaccaagauccaguacgucauccgggcccagcugcacgugggcgcgaagcaggagaacuggaacaccgacaucaagacccucaaguucgacgcccugagcgggucccaggagguggaguucaucggcuacggcaaggccacgcuggagugccagguccagaccgccguggacuucgggaacagcuacaucgccgagauggagaccgagagcuggaucguggaccgccagugggcgcaggaccucacccugcccuggcaguccggcagcgggggcgucuggcgcgagaugcaccaccugguggaguucgagcccccgcacgccgccacgauccgggugcucgcccuggggaaccaggagggcucccugaagaccgcgcucaccggcgccaugcgcgucaccaaggacacgaacgacaacaaccuguacaagcugcacgggggccacgugagcugccgggugaagcucuccgcccugacccugaaggggaccagcuacaagaucugcaccgacaagauguucuucgucaagaaccccacggacaccggccacgggaccguggugaugcaggucaagguguccaagggcgcccccugccgcauccccgugaucgucgccgacgaccucaccgcggccaucaacaagggcauccuggugaccgugaacccgaucgccagcacgaacgacgacgagguccugaucgaggugaacccgcccuucggggacuccuacaucaucgugggccgcggggacagccggcucaccuaccaguggcacaaggagggcuccagcggcuccacccuggggaaggccuucagcaccacgcugaagggcgcccagcggcucgcggcccugggggacaccgccugggacuucggcuccaucgggggcgucuucaacagcaucggccgcgccgugcaccagguguucgggggcgccuuccggacccuguucgggggcauguccuggaucacccaggggcucaugggcgcgcugcugcuguggaugggcgucaacgcccgcgaccggagcaucgcccucgccuuccuggcgaccgggggcgugcugguguuccucgccacgaacguccacgccuga

SEQ ID NO: 303 - RNA, 2025 nt, Artificial Sequence
  derived and/or modified CDS sequence (opt1) from YFV__NC_002031.1__SSIgE-prMEdelstem_TM-JEV (polyprotein: aa126-680)
auggacuggaccuggauccuguuccucguggccgccgcgacccgcguccacagccggaagaaccgcuggcugcugcucaacgugacguccgaggaccugggcaagaccuucagcguggggaccggcaacugcaccacgaacauccuggaggccaaguacuggugccccgacuccauggaguacaacugccccaaccucagcccccgggaggagcccgacgacaucgacugcuggugcuacggggucgagaacgugcgcguggccuacggcaagugcgacuccgccgggcggagccgccggucccgccgggccaucgaccugcccacccacgagaaccacggccugaagacccgccaggagaaguggaugaccggccggaugggggagcgccagcuccagaagaucgagcggugguucguccgcaacccguucuucgcggugacggcccugaccaucgccuaccuggugggcagcaacaugacccagcgggucgugaucgcccuccuggugcuggcggucgggcccgccuacuccgcccacugcaucggcaucaccgaccgcgacuucaucgagggggugcacggcggcacgugggugagcgccacccucgagcaggacaagugcgucaccgugauggcccccgacaagcccucccuggacaucagccuggagaccguggcgaucgaccggccggccgagguccgcaaggugugcuacaacgccgugcucacgcacgucaagaucaacgacaagugccccuccaccggggaggcccaccuggccgaggagaacgagggcgacaacgcgugcaagcggaccuacagcgaccgcggguggggcaacggcugcgggcuguucggcaagggguccaucguggccugcgccaaguucacgugcgccaagagcaugucccucuucgagguggaccagaccaagauccaguacgucauccgggcccagcugcacgugggcgcgaagcaggagaacuggaacaccgacaucaagacccugaaguucgacgcccucagcgggucccaggaggucgaguucaucggcuacggcaaggccacccuggagugccaggugcagacggccguggacuucgggaacagcuacaucgccgagauggagaccgagagcuggaucgucgaccgccagugggcgcaggaccugacccuccccuggcaguccggcagcgggggcguguggcgcgagaugcaccaccugguggaguucgagcccccgcacgccgccaccauccggguccuggcccucgggaaccaggagggcucccugaagacggcgcugaccggcgccaugcgcgugaccaaggacaccaacgacaacaaccucuacaagcugcacgggggccacgugagcugccgggucaagcuguccgcccucacgcugaaggggaccagcuacaagaucugcaccgacaagauguucuucgugaagaaccccaccgacacgggccacgggaccguggucaugcaggucaagguguccaagggcgcccccugccgcauccccgugaucguggccgacgaccugaccgcggccaucaacaagggcauccucgugaccgucaacccgaucgccagcaccaacgacgacgaggugcugaucgaggugaacccgcccuucggggacuccuacaucaucgucggccgcggggacagccggcugacguaccaguggcacaaggagggcuccagcggcuccacccucgggaaggccuucagcaccacccugaagggcgcccagcggcuggcggcccucggggacacggccugggacuucggcuccaucgggggcguguucaacagcaucggccgcgccgugcaccaggucuucgggggcgccuuccggacccuguucgggggcauguccuggaucacccaggggcugaugggcgcgcuccugcuguggaugggcgugaacgcccgcgaccggagcaucgcccuggccuuccucgcgaccgggggcgugcuggucuuccuggccacgaacgugcacgccuga

SEQ ID NO: 304 - RNA, 2055 nt, Artificial Sequence
  derived and/or modified CDS sequence (opt1) from YFV__NC_002031.1__SSjev-prMEdelstem_TM-JEV (polyprotein: aa122-680)
augggcaagcgcagcgccggguccaucauguggcuggccagccucgcgguggucaucgccugcgccggcgccgugacccuggugcggaagaaccgcuggcugcuccugaacgucaccuccgaggaccuggggaagacguucagcgugggcaccgggaacugcaccaccaacauccucgaggccaaguacuggugccccgacuccauggaguacaacugccccaaccugagcccccgggaggagcccgacgacaucgacugcuggugcuacggcguggagaacguccgcguggcguacggcaagugcgacuccgccgggcggagccgccggucccgccgggccaucgaccugcccacgcacgagaaccacggccucaagacccgccaggagaaguggaugaccgggcggaugggcgagcgccagcugcagaagaucgagcggugguucgugcgcaacccguucuucgccgucaccgcgcugacgaucgccuaccucguggggagcaacaugacccagcggguggucaucgcccugcuggugcucgccgugggccccgccuacuccgcgcacugcaucggcaucaccgaccgcgacuucaucgaggggguccacggcgggaccugggugagcgccacgcuggagcaggacaagugcgugaccgucauggcccccgacaagcccucccuggacaucagccucgagaccguggccaucgaccggccggccgaggugcgcaaggucugcuacaacgcggugcugacccacgugaagaucaacgacaagugccccuccacgggcgaggcccaccuggccgaggagaacgagggcgacaacgccugcaagcggaccuacagcgaccgcggguggggcaacgggugcggccucuucgggaagggcuccaucgucgccugcgcgaaguucacgugcgccaagagcaugucccuguucgagguggaccagaccaagauccaguacgucauccgggcccagcugcacgugggcgccaagcaggagaacuggaacaccgacaucaagacccucaaguucgacgcccugagcgggagccaggagguggaguucaucggcuacgggaaggcgacccuggagugccagguccagaccgccguggacuucggcaacuccuacaucgccgagauggagacggagagcuggaucguggaccgccagugggcccaggaccucacccugcccuggcaguccgggagcggcggcgucuggcgcgagaugcaccaccugguggaguucgagcccccgcacgcggccaccauccgggugcucgcccuggggaaccaggagggcucccugaagaccgcccucacgggggccaugcgcgucaccaaggacaccaacgacaacaaccuguacaagcugcacggcgggcacgugagcugccgggugaagcucuccgcgcugacccugaagggcacgagcuacaagaucugcaccgacaagauguucuucgucaagaaccccaccgacaccggccacgggacgguggugaugcaggucaagguguccaagggcgcccccugccgcauccccgugaucgucgccgacgaccucaccgccgccaucaacaaggggauccuggugaccgugaacccgaucgcgagcaccaacgacgacgagguccugaucgaggugaacccgcccuucggcgacuccuacaucaucgugggccgcggggacagccggcucaccuaccaguggcacaaggagggcuccagcggguccacgcugggcaaggccuucagcaccacccugaagggggcccagcggcucgccgcccugggcgacaccgcgugggacuucggcuccaucgggggcgucuucaacagcaucgggcgcgccgugcaccagguguucggcggggccuuccggacgcuguucggcggcauguccuggaucacccaggggcucaugggcgcccugcugcuguggaugggggucaacgcgcgcgaccggagcaucgcccucgccuuccuggccaccggcggggugcugguguuccucgccaccaacguccacgcguga

SEQ ID NO: 305 - RNA, 2043 nt, Artificial Sequence
  derived and/or modified CDS sequence (opt1) from YFV__NC_002031.1__SSjev-prMEdelstem_TM-JEV (polyprotein: aa126-680)
augggcaagcgcagcgccggguccaucauguggcuggccagccucgcgguggucaucgccugcgccggcgcccggaagaaccgcuggcugcugcucaacgugaccuccgaggaccuggggaagaccuucagcgugggcacggggaacugcaccaccaacauccuggaggccaaguacuggugccccgacuccauggaguacaacugccccaaccucagcccccgggaggagcccgacgacaucgacugcuggugcuacggcgucgagaacgugcgcguggcguacggcaagugcgacuccgccgggcggagccgccggucccgccgggccaucgaccugcccacccacgagaaccacggccugaagacgcgccaggagaaguggaugaccgggcggaugggcgagcgccagcuccagaagaucgagcggugguucguccgcaacccguucuucgccgugaccgcgcugaccaucgccuaccugguggggagcaacaugacgcagcgggucgugaucgcccuccuggugcuggccgucggccccgccuacuccgcgcacugcaucggcaucaccgaccgcgacuucaucgagggggugcacggcgggaccugggugagcgccacccucgagcaggacaagugcgucacggugauggcccccgacaagcccucccuggacaucagccuggagaccguggccaucgaccggccggccgagguccgcaaggugugcuacaacgcggugcucacccacgucaagaucaacgacaagugccccuccaccggcgaggcccaccuggccgaggagaacgagggcgacaacgccugcaagcggacguacagcgaccgcggguggggcaacgggugcggccuguucgggaagggcuccaucguggccugcgcgaaguucacgugcgccaagagcaugucccucuucgagguggaccagaccaagauccaguacgucauccgggcccagcugcacgugggcgccaagcaggagaacuggaacaccgacaucaagacccugaaguucgacgcccucagcgggagccaggaggucgaguucaucggcuacgggaaggcgacccuggagugccaggugcagaccgccguggacuucggcaacuccuacaucgccgagauggagaccgagagcuggaucgucgaccgccagugggcccaggaccugacgcuccccuggcaguccgggagcggcggcguguggcgcgagaugcaccaccugguggaguucgagcccccgcacgcggccaccauccggguccuggcccucgggaaccaggagggcucccugaagaccgcccugaccggggccaugcgcgugacgaaggacaccaacgacaacaaccucuacaagcugcacggcgggcacgugagcugccgggucaagcuguccgcgcucacccugaagggcaccagcuacaagaucugcacggacaagauguucuucgugaagaaccccaccgacaccggccacgggaccguggucaugcaggucaagguguccaagggcgcccccugccgcauccccgugaucguggccgacgaccugacggccgccaucaacaaggggauccucgugaccgucaacccgaucgcgagcaccaacgacgacgaggugcugaucgaggugaacccgcccuucggcgacuccuacaucaucgucggccgcggggacagccggcugaccuaccaguggcacaaggagggcuccagcggguccacccucggcaaggccuucagcacgacccugaagggggcccagcggcuggccgcccucggcgacaccgcgugggacuucggcuccaucgggggcguguucaacagcaucgggcgcgccgugcaccaggucuucggcggggccuuccggacccuguucggcggcauguccuggaucacgcaggggcugaugggcgcccuccugcuguggaugggggugaacgcgcgcgaccggagcaucgcccuggccuuccucgccaccggcggggugcuggucuuccuggccaccaacgugcacgcguga

SEQ ID NO: 306 - RNA, 2094 nt, Artificial Sequence
  derived and/or modified CDS sequence (opt2) from YFV__NC_002031.1__X-SS-prME-XX (polyprotein: aa92-788)
augcgcggccucuccucccgcaagcgccgcucccacgacguccucaccguccaguuccucauccucggcaugcuccucaugaccggcggcgucacccucguccgcaagaaccgcuggcuccuccucaacgucaccuccgaggaccucggcaagaccuucuccgucggcaccggcaacugcaccaccaacauccucgaggccaaguacuggugccccgacuccauggaguacaacugccccaaccucuccccccgcgaggagcccgacgacaucgacugcuggugcuacggcgucgagaacguccgcgucgccuacggcaagugcgacuccgccggccgcucccgccgcucccgccgcgccaucgaccuccccacccacgagaaccacggccucaagacccgccaggagaaguggaugaccggccgcaugggcgagcgccagcuccagaagaucgagcgcugguucguccgcaaccccuucuucgccgucaccgcccucaccaucgccuaccucgucggcuccaacaugacccagcgcgucgucaucgcccuccucguccucgccgucggccccgccuacuccgcccacugcaucggcaucaccgaccgcgacuucaucgagggcguccacggcggcaccugggucuccgccacccucgagcaggacaagugcgucaccgucauggcccccgacaagcccucccucgacaucucccucgagaccgucgccaucgaccgccccgccgagguccgcaaggucugcuacaacgccguccucacccacgucaagaucaacgacaagugccccuccaccggcgaggcccaccucgccgaggagaacgagggcgacaacgccugcaagcgcaccuacuccgaccgcggcuggggcaacggcugcggccucuucggcaagggcuccaucgucgccugcgccaaguucaccugcgccaaguccaugucccucuucgaggucgaccagaccaagauccaguacgucauccgcgcccagcuccacgucggcgccaagcaggagaacuggaacaccgacaucaagacccucaaguucgacgcccucuccggcucccaggaggucgaguucaucggcuacggcaaggccacccucgagugccagguccagaccgccgucgacuucggcaacuccuacaucgccgagauggagaccgaguccuggaucgucgaccgccagugggcccaggaccucacccuccccuggcaguccggcuccggcggcgucuggcgcgagaugcaccaccucgucgaguucgagcccccccacgccgccaccauccgcguccucgcccucggcaaccaggagggcucccucaagaccgcccucaccggcgccaugcgcgucaccaaggacaccaacgacaacaaccucuacaagcuccacggcggccacgucuccugccgcgucaagcucuccgcccucacccucaagggcaccuccuacaagaucugcaccgacaagauguucuucgucaagaaccccaccgacaccggccacggcaccgucgucaugcaggucaaggucuccaagggcgcccccugccgcauccccgucaucgucgccgacgaccucaccgccgccaucaacaagggcauccucgucaccgucaaccccaucgccuccaccaacgacgacgagguccucaucgaggucaacccccccuucggcgacuccuacaucaucgucggccgcggcgacucccgccucaccuaccaguggcacaaggagggcuccuccaucggcaagcucuucacccagaccaugaagggcgucgagcgccucgccgucaugggcgacaccgccugggacuucuccuccgccggcggcuucuucaccuccgucggcaagggcauccacaccgucuucggcuccgccuuccagggccucuucggcggccucaacuggaucaccaaggucaucaugggcgccguccucaucugggucggcaucaacacccgcaacaugaccauguccauguccaugauccucgucggcgucaucaugauguuccucucccucggcgucggcgccgaccagggcugcgccaucaacuucggcaaguga

SEQ ID NO: 307 - RNA, 2064 nt, Artificial Sequence
  derived and/or modified CDS sequence (opt2) from YFV__NC_002031.1__X-SS-prME (polyprotein: aa92-778)
augcgcggccucuccucccgcaagcgccgcucccacgacguccucaccguccaguuccucauccucggcaugcuccucaugaccggcggcgucacccucguccgcaagaaccgcuggcuccuccucaacgucaccuccgaggaccucggcaagaccuucuccgucggcaccggcaacugcaccaccaacauccucgaggccaaguacuggugccccgacuccauggaguacaacugccccaaccucuccccccgcgaggagcccgacgacaucgacugcuggugcuacggcgucgagaacguccgcgucgccuacggcaagugcgacuccgccggccgcucccgccgcucccgccgcgccaucgaccuccccacccacgagaaccacggccucaagacccgccaggagaaguggaugaccggccgcaugggcgagcgccagcuccagaagaucgagcgcugguucguccgcaaccccuucuucgccgucaccgcccucaccaucgccuaccucgucggcuccaacaugacccagcgcgucgucaucgcccuccucguccucgccgucggccccgccuacuccgcccacugcaucggcaucaccgaccgcgacuucaucgagggcguccacggcggcaccugggucuccgccacccucgagcaggacaagugcgucaccgucauggcccccgacaagcccucccucgacaucucccucgagaccgucgccaucgaccgccccgccgagguccgcaaggucugcuacaacgccguccucacccacgucaagaucaacgacaagugccccuccaccggcgaggcccaccucgccgaggagaacgagggcgacaacgccugcaagcgcaccuacuccgaccgcggcuggggcaacggcugcggccucuucggcaagggcuccaucgucgccugcgccaaguucaccugcgccaaguccaugucccucuucgaggucgaccagaccaagauccaguacgucauccgcgcccagcuccacgucggcgccaagcaggagaacuggaacaccgacaucaagacccucaaguucgacgcccucuccggcucccaggaggucgaguucaucggcuacggcaaggccacccucgagugccagguccagaccgccgucgacuucggcaacuccuacaucgccgagauggagaccgaguccuggaucgucgaccgccagugggcccaggaccucacccuccccuggcaguccggcuccggcggcgucuggcgcgagaugcaccaccucgucgaguucgagcccccccacgccgccaccauccgcguccucgcccucggcaaccaggagggcucccucaagaccgcccucaccggcgccaugcgcgucaccaaggacaccaacgacaacaaccucuacaagcuccacggcggccacgucuccugccgcgucaagcucuccgcccucacccucaagggcaccuccuacaagaucugcaccgacaagauguucuucgucaagaaccccaccgacaccggccacggcaccgucgucaugcaggucaaggucuccaagggcgcccccugccgcauccccgucaucgucgccgacgaccucaccgccgccaucaacaagggcauccucgucaccgucaaccccaucgccuccaccaacgacgacgagguccucaucgaggucaacccccccuucggcgacuccuacaucaucgucggccgcggcgacucccgccucaccuaccaguggcacaaggagggcuccuccaucggcaagcucuucacccagaccaugaagggcgucgagcgccucgccgucaugggcgacaccgccugggacuucuccuccgccggcggcuucuucaccuccgucggcaagggcauccacaccgucuucggcuccgccuuccagggccucuucggcggccucaacuggaucaccaaggucaucaugggcgccguccucaucugggucggcaucaacacccgcaacaugaccauguccauguccaugauccucgucggcgucaucaugauguuccucucccucggcgucggcgccuga

SEQ ID NO: 308 - RNA, 2067 nt, Artificial Sequence
  derived and/or modified CDS sequence (opt2) from YFV__NC_002031.1__SS-prME-XX (polyprotein: M,aa102-788)
augucccacgacguccucaccguccaguuccucauccucggcaugcuccucaugaccggcggcgucacccucguccgcaagaaccgcuggcuccuccucaacgucaccuccgaggaccucggcaagaccuucuccgucggcaccggcaacugcaccaccaacauccucgaggccaaguacuggugccccgacuccauggaguacaacugccccaaccucuccccccgcgaggagcccgacgacaucgacugcuggugcuacggcgucgagaacguccgcgucgccuacggcaagugcgacuccgccggccgcucccgccgcucccgccgcgccaucgaccuccccacccacgagaaccacggccucaagacccgccaggagaaguggaugaccggccgcaugggcgagcgccagcuccagaagaucgagcgcugguucguccgcaaccccuucuucgccgucaccgcccucaccaucgccuaccucgucggcuccaacaugacccagcgcgucgucaucgcccuccucguccucgccgucggccccgccuacuccgcccacugcaucggcaucaccgaccgcgacuucaucgagggcguccacggcggcaccugggucuccgccacccucgagcaggacaagugcgucaccgucauggcccccgacaagcccucccucgacaucucccucgagaccgucgccaucgaccgccccgccgagguccgcaaggucugcuacaacgccguccucacccacgucaagaucaacgacaagugccccuccaccggcgaggcccaccucgccgaggagaacgagggcgacaacgccugcaagcgcaccuacuccgaccgcggcuggggcaacggcugcggccucuucggcaagggcuccaucgucgccugcgccaaguucaccugcgccaaguccaugucccucuucgaggucgaccagaccaagauccaguacgucauccgcgcccagcuccacgucggcgccaagcaggagaacuggaacaccgacaucaagacccucaaguucgacgcccucuccggcucccaggaggucgaguucaucggcuacggcaaggccacccucgagugccagguccagaccgccgucgacuucggcaacuccuacaucgccgagauggagaccgaguccuggaucgucgaccgccagugggcccaggaccucacccuccccuggcaguccggcuccggcggcgucuggcgcgagaugcaccaccucgucgaguucgagcccccccacgccgccaccauccgcguccucgcccucggcaaccaggagggcucccucaagaccgcccucaccggcgccaugcgcgucaccaaggacaccaacgacaacaaccucuacaagcuccacggcggccacgucuccugccgcgucaagcucuccgcccucacccucaagggcaccuccuacaagaucugcaccgacaagauguucuucgucaagaaccccaccgacaccggccacggcaccgucgucaugcaggucaaggucuccaagggcgcccccugccgcauccccgucaucgucgccgacgaccucaccgccgccaucaacaagggcauccucgucaccgucaaccccaucgccuccaccaacgacgacgagguccucaucgaggucaacccccccuucggcgacuccuacaucaucgucggccgcggcgacucccgccucaccuaccaguggcacaaggagggcuccuccaucggcaagcucuucacccagaccaugaagggcgucgagcgccucgccgucaugggcgacaccgccugggacuucuccuccgccggcggcuucuucaccuccgucggcaagggcauccacaccgucuucggcuccgccuuccagggccucuucggcggccucaacuggaucaccaaggucaucaugggcgccguccucaucugggucggcaucaacacccgcaacaugaccauguccauguccaugauccucgucggcgucaucaugauguuccucucccucggcgucggcgccgaccagggcugcgccaucaacuucggcaaguga

SEQ ID NO: 309 - RNA, 2061 nt, Artificial Sequence
  derived and/or modified CDS sequence (opt2) from YFV__NC_002031.1__SS-prME-XX (polyprotein: M,aa104-788)
auggacguccucaccguccaguuccucauccucggcaugcuccucaugaccggcggcgucacccucguccgcaagaaccgcuggcuccuccucaacgucaccuccgaggaccucggcaagaccuucuccgucggcaccggcaacugcaccaccaacauccucgaggccaaguacuggugccccgacuccauggaguacaacugccccaaccucuccccccgcgaggagcccgacgacaucgacugcuggugcuacggcgucgagaacguccgcgucgccuacggcaagugcgacuccgccggccgcucccgccgcucccgccgcgccaucgaccuccccacccacgagaaccacggccucaagacccgccaggagaaguggaugaccggccgcaugggcgagcgccagcuccagaagaucgagcgcugguucguccgcaaccccuucuucgccgucaccgcccucaccaucgccuaccucgucggcuccaacaugacccagcgcgucgucaucgcccuccucguccucgccgucggccccgccuacuccgcccacugcaucggcaucaccgaccgcgacuucaucgagggcguccacggcggcaccugggucuccgccacccucgagcaggacaagugcgucaccgucauggcccccgacaagcccucccucgacaucucccucgagaccgucgccaucgaccgccccgccgagguccgcaaggucugcuacaacgccguccucacccacgucaagaucaacgacaagugccccuccaccggcgaggcccaccucgccgaggagaacgagggcgacaacgccugcaagcgcaccuacuccgaccgcggcuggggcaacggcugcggccucuucggcaagggcuccaucgucgccugcgccaaguucaccugcgccaaguccaugucccucuucgaggucgaccagaccaagauccaguacgucauccgcgcccagcuccacgucggcgccaagcaggagaacuggaacaccgacaucaagacccucaaguucgacgcccucuccggcucccaggaggucgaguucaucggcuacggcaaggccacccucgagugccagguccagaccgccgucgacuucggcaacuccuacaucgccgagauggagaccgaguccuggaucgucgaccgccagugggcccaggaccucacccuccccuggcaguccggcuccggcggcgucuggcgcgagaugcaccaccucgucgaguucgagcccccccacgccgccaccauccgcguccucgcccucggcaaccaggagggcucccucaagaccgcccucaccggcgccaugcgcgucaccaaggacaccaacgacaacaaccucuacaagcuccacggcggccacgucuccugccgcgucaagcucuccgcccucacccucaagggcaccuccuacaagaucugcaccgacaagauguucuucgucaagaaccccaccgacaccggccacggcaccgucgucaugcaggucaaggucuccaagggcgcccccugccgcauccccgucaucgucgccgacgaccucaccgccgccaucaacaagggcauccucgucaccgucaaccccaucgccuccaccaacgacgacgagguccucaucgaggucaacccccccuucggcgacuccuacaucaucgucggccgcggcgacucccgccucaccuaccaguggcacaaggagggcuccuccaucggcaagcucuucacccagaccaugaagggcgucgagcgccucgccgucaugggcgacaccgccugggacuucuccuccgccggcggcuucuucaccuccgucggcaagggcauccacaccgucuucggcuccgccuuccagggccucuucggcggccucaacuggaucaccaaggucaucaugggcgccguccucaucugggucggcaucaacacccgcaacaugaccauguccauguccaugauccucgucggcgucaucaugauguuccucucccucggcgucggcgccgaccagggcugcgccaucaacuucggcaaguga

SEQ ID NO: 310 - RNA, 2037 nt, Artificial Sequence
  derived and/or modified CDS sequence (opt2) from YFV__NC_002031.1__SS-prME (polyprotein: M,aa102-778)
augucccacgacguccucaccguccaguuccucauccucggcaugcuccucaugaccggcggcgucacccucguccgcaagaaccgcuggcuccuccucaacgucaccuccgaggaccucggcaagaccuucuccgucggcaccggcaacugcaccaccaacauccucgaggccaaguacuggugccccgacuccauggaguacaacugccccaaccucuccccccgcgaggagcccgacgacaucgacugcuggugcuacggcgucgagaacguccgcgucgccuacggcaagugcgacuccgccggccgcucccgccgcucccgccgcgccaucgaccuccccacccacgagaaccacggccucaagacccgccaggagaaguggaugaccggccgcaugggcgagcgccagcuccagaagaucgagcgcugguucguccgcaaccccuucuucgccgucaccgcccucaccaucgccuaccucgucggcuccaacaugacccagcgcgucgucaucgcccuccucguccucgccgucggccccgccuacuccgcccacugcaucggcaucaccgaccgcgacuucaucgagggcguccacggcggcaccugggucuccgccacccucgagcaggacaagugcgucaccgucauggcccccgacaagcccucccucgacaucucccucgagaccgucgccaucgaccgccccgccgagguccgcaaggucugcuacaacgccguccucacccacgucaagaucaacgacaagugccccuccaccggcgaggcccaccucgccgaggagaacgagggcgacaacgccugcaagcgcaccuacuccgaccgcggcuggggcaacggcugcggccucuucggcaagggcuccaucgucgccugcgccaaguucaccugcgccaaguccaugucccucuucgaggucgaccagaccaagauccaguacgucauccgcgcccagcuccacgucggcgccaagcaggagaacuggaacaccgacaucaagacccucaaguucgacgcccucuccggcucccaggaggucgaguucaucggcuacggcaaggccacccucgagugccagguccagaccgccgucgacuucggcaacuccuacaucgccgagauggagaccgaguccuggaucgucgaccgccagugggcccaggaccucacccuccccuggcaguccggcuccggcggcgucuggcgcgagaugcaccaccucgucgaguucgagcccccccacgccgccaccauccgcguccucgcccucggcaaccaggagggcucccucaagaccgcccucaccggcgccaugcgcgucaccaaggacaccaacgacaacaaccucuacaagcuccacggcggccacgucuccugccgcgucaagcucuccgcccucacccucaagggcaccuccuacaagaucugcaccgacaagauguucuucgucaagaaccccaccgacaccggccacggcaccgucgucaugcaggucaaggucuccaagggcgcccccugccgcauccccgucaucgucgccgacgaccucaccgccgccaucaacaagggcauccucgucaccgucaaccccaucgccuccaccaacgacgacgagguccucaucgaggucaacccccccuucggcgacuccuacaucaucgucggccgcggcgacucccgccucaccuaccaguggcacaaggagggcuccuccaucggcaagcucuucacccagaccaugaagggcgucgagcgccucgccgucaugggcgacaccgccugggacuucuccuccgccggcggcuucuucaccuccgucggcaagggcauccacaccgucuucggcuccgccuuccagggccucuucggcggccucaacuggaucaccaaggucaucaugggcgccguccucaucugggucggcaucaacacccgcaacaugaccauguccauguccaugauccucgucggcgucaucaugauguuccucucccucggcgucggcgccuga

SEQ ID NO: 311 - RNA, 2031 nt, Artificial Sequence
  derived and/or modified CDS sequence (opt2) from YFV__NC_002031.1__SS-prME (polyprotein: M,aa104-778)
auggacguccucaccguccaguuccucauccucggcaugcuccucaugaccggcggcgucacccucguccgcaagaaccgcuggcuccuccucaacgucaccuccgaggaccucggcaagaccuucuccgucggcaccggcaacugcaccaccaacauccucgaggccaaguacuggugccccgacuccauggaguacaacugccccaaccucuccccccgcgaggagcccgacgacaucgacugcuggugcuacggcgucgagaacguccgcgucgccuacggcaagugcgacuccgccggccgcucccgccgcucccgccgcgccaucgaccuccccacccacgagaaccacggccucaagacccgccaggagaaguggaugaccggccgcaugggcgagcgccagcuccagaagaucgagcgcugguucguccgcaaccccuucuucgccgucaccgcccucaccaucgccuaccucgucggcuccaacaugacccagcgcgucgucaucgcccuccucguccucgccgucggccccgccuacuccgcccacugcaucggcaucaccgaccgcgacuucaucgagggcguccacggcggcaccugggucuccgccacccucgagcaggacaagugcgucaccgucauggcccccgacaagcccucccucgacaucucccucgagaccgucgccaucgaccgccccgccgagguccgcaaggucugcuacaacgccguccucacccacgucaagaucaacgacaagugccccuccaccggcgaggcccaccucgccgaggagaacgagggcgacaacgccugcaagcgcaccuacuccgaccgcggcuggggcaacggcugcggccucuucggcaagggcuccaucgucgccugcgccaaguucaccugcgccaaguccaugucccucuucgaggucgaccagaccaagauccaguacgucauccgcgcccagcuccacgucggcgccaagcaggagaacuggaacaccgacaucaagacccucaaguucgacgcccucuccggcucccaggaggucgaguucaucggcuacggcaaggccacccucgagugccagguccagaccgccgucgacuucggcaacuccuacaucgccgagauggagaccgaguccuggaucgucgaccgccagugggcccaggaccucacccuccccuggcaguccggcuccggcggcgucuggcgcgagaugcaccaccucgucgaguucgagcccccccacgccgccaccauccgcguccucgcccucggcaaccaggagggcucccucaagaccgcccucaccggcgccaugcgcgucaccaaggacaccaacgacaacaaccucuacaagcuccacggcggccacgucuccugccgcgucaagcucuccgcccucacccucaagggcaccuccuacaagaucugcaccgacaagauguucuucgucaagaaccccaccgacaccggccacggcaccgucgucaugcaggucaaggucuccaagggcgcccccugccgcauccccgucaucgucgccgacgaccucaccgccgccaucaacaagggcauccucgucaccgucaaccccaucgccuccaccaacgacgacgagguccucaucgaggucaacccccccuucggcgacuccuacaucaucgucggccgcggcgacucccgccucaccuaccaguggcacaaggagggcuccuccaucggcaagcucuucacccagaccaugaagggcgucgagcgccucgccgucaugggcgacaccgccugggacuucuccuccgccggcggcuucuucaccuccgucggcaagggcauccacaccgucuucggcuccgccuuccagggccucuucggcggccucaacuggaucaccaaggucaucaugggcgccguccucaucugggucggcaucaacacccgcaacaugaccauguccauguccaugauccucgucggcgucaucaugauguuccucucccucggcgucggcgccuga

SEQ ID NO: 312 - RNA, 2073 nt, Artificial Sequence
  derived and/or modified CDS sequence (opt2) from YFV__NC_002031.1__X-SS-prMEdelstem_TM-JEV (polyprotein: aa92-680)
augcgcggccucuccucccgcaagcgccgcucccacgacguccucaccguccaguuccucauccucggcaugcuccucaugaccggcggcgucacccucguccgcaagaaccgcuggcuccuccucaacgucaccuccgaggaccucggcaagaccuucuccgucggcaccggcaacugcaccaccaacauccucgaggccaaguacuggugccccgacuccauggaguacaacugccccaaccucuccccccgcgaggagcccgacgacaucgacugcuggugcuacggcgucgagaacguccgcgucgccuacggcaagugcgacuccgccggccgcucccgccgcucccgccgcgccaucgaccuccccacccacgagaaccacggccucaagacccgccaggagaaguggaugaccggccgcaugggcgagcgccagcuccagaagaucgagcgcugguucguccgcaaccccuucuucgccgucaccgcccucaccaucgccuaccucgucggcuccaacaugacccagcgcgucgucaucgcccuccucguccucgccgucggccccgccuacuccgcccacugcaucggcaucaccgaccgcgacuucaucgagggcguccacggcggcaccugggucuccgccacccucgagcaggacaagugcgucaccgucauggcccccgacaagcccucccucgacaucucccucgagaccgucgccaucgaccgccccgccgagguccgcaaggucugcuacaacgccguccucacccacgucaagaucaacgacaagugccccuccaccggcgaggcccaccucgccgaggagaacgagggcgacaacgccugcaagcgcaccuacuccgaccgcggcuggggcaacggcugcggccucuucggcaagggcuccaucgucgccugcgccaaguucaccugcgccaaguccaugucccucuucgaggucgaccagaccaagauccaguacgucauccgcgcccagcuccacgucggcgccaagcaggagaacuggaacaccgacaucaagacccucaaguucgacgcccucuccggcucccaggaggucgaguucaucggcuacggcaaggccacccucgagugccagguccagaccgccgucgacuucggcaacuccuacaucgccgagauggagaccgaguccuggaucgucgaccgccagugggcccaggaccucacccuccccuggcaguccggcuccggcggcgucuggcgcgagaugcaccaccucgucgaguucgagcccccccacgccgccaccauccgcguccucgcccucggcaaccaggagggcucccucaagaccgcccucaccggcgccaugcgcgucaccaaggacaccaacgacaacaaccucuacaagcuccacggcggccacgucuccugccgcgucaagcucuccgcccucacccucaagggcaccuccuacaagaucugcaccgacaagauguucuucgucaagaaccccaccgacaccggccacggcaccgucgucaugcaggucaaggucuccaagggcgcccccugccgcauccccgucaucgucgccgacgaccucaccgccgccaucaacaagggcauccucgucaccgucaaccccaucgccuccaccaacgacgacgagguccucaucgaggucaacccccccuucggcgacuccuacaucaucgucggccgcggcgacucccgccucaccuaccaguggcacaaggagggcuccuccggcuccacccucggcaaggccuucuccaccacccucaagggcgcccagcgccucgccgcccucggcgacaccgccugggacuucggcuccaucggcggcgucuucaacuccaucggccgcgccguccaccaggucuucggcggcgccuuccgcacccucuucggcggcauguccuggaucacccagggccucaugggcgcccuccuccucuggaugggcgucaacgcccgcgaccgcuccaucgcccucgccuuccucgccaccggcggcguccucgucuuccucgccaccaacguccacgccuga

SEQ ID NO: 313 - RNA, 2046 nt, Artificial Sequence
  derived and/or modified CDS sequence (opt2) from YFV__NC_002031.1__SS-prMEdelstem_TM-JEV (polyprotein: M,aa102-680)
augucccacgacguccucaccguccaguuccucauccucggcaugcuccucaugaccggcggcgucacccucguccgcaagaaccgcuggcuccuccucaacgucaccuccgaggaccucggcaagaccuucuccgucggcaccggcaacugcaccaccaacauccucgaggccaaguacuggugccccgacuccauggaguacaacugccccaaccucuccccccgcgaggagcccgacgacaucgacugcuggugcuacggcgucgagaacguccgcgucgccuacggcaagugcgacuccgccggccgcucccgccgcucccgccgcgccaucgaccuccccacccacgagaaccacggccucaagacccgccaggagaaguggaugaccggccgcaugggcgagcgccagcuccagaagaucgagcgcugguucguccgcaaccccuucuucgccgucaccgcccucaccaucgccuaccucgucggcuccaacaugacccagcgcgucgucaucgcccuccucguccucgccgucggccccgccuacuccgcccacugcaucggcaucaccgaccgcgacuucaucgagggcguccacggcggcaccugggucuccgccacccucgagcaggacaagugcgucaccgucauggcccccgacaagcccucccucgacaucucccucgagaccgucgccaucgaccgccccgccgagguccgcaaggucugcuacaacgccguccucacccacgucaagaucaacgacaagugccccuccaccggcgaggcccaccucgccgaggagaacgagggcgacaacgccugcaagcgcaccuacuccgaccgcggcuggggcaacggcugcggccucuucggcaagggcuccaucgucgccugcgccaaguucaccugcgccaaguccaugucccucuucgaggucgaccagaccaagauccaguacgucauccgcgcccagcuccacgucggcgccaagcaggagaacuggaacaccgacaucaagacccucaaguucgacgcccucuccggcucccaggaggucgaguucaucggcuacggcaaggccacccucgagugccagguccagaccgccgucgacuucggcaacuccuacaucgccgagauggagaccgaguccuggaucgucgaccgccagugggcccaggaccucacccuccccuggcaguccggcuccggcggcgucuggcgcgagaugcaccaccucgucgaguucgagcccccccacgccgccaccauccgcguccucgcccucggcaaccaggagggcucccucaagaccgcccucaccggcgccaugcgcgucaccaaggacaccaacgacaacaaccucuacaagcuccacggcggccacgucuccugccgcgucaagcucuccgcccucacccucaagggcaccuccuacaagaucugcaccgacaagauguucuucgucaagaaccccaccgacaccggccacggcaccgucgucaugcaggucaaggucuccaagggcgcccccugccgcauccccgucaucgucgccgacgaccucaccgccgccaucaacaagggcauccucgucaccgucaaccccaucgccuccaccaacgacgacgagguccucaucgaggucaacccccccuucggcgacuccuacaucaucgucggccgcggcgacucccgccucaccuaccaguggcacaaggagggcuccuccggcuccacccucggcaaggccuucuccaccacccucaagggcgcccagcgccucgccgcccucggcgacaccgccugggacuucggcuccaucggcggcgucuucaacuccaucggccgcgccguccaccaggucuucggcggcgccuuccgcacccucuucggcggcauguccuggaucacccagggccucaugggcgcccuccuccucuggaugggcgucaacgcccgcgaccgcuccaucgcccucgccuuccucgccaccggcggcguccucgucuuccucgccaccaacguccacgccuga

SEQ ID NO: 314 - RNA, 2040 nt, Artificial Sequence
  derived and/or modified CDS sequence (opt2) from YFV__NC_002031.1__SS-prMEdelstem_TM-JEV (polyprotein: M,aa104-680)
auggacguccucaccguccaguuccucauccucggcaugcuccucaugaccggcggcgucacccucguccgcaagaaccgcuggcuccuccucaacgucaccuccgaggaccucggcaagaccuucuccgucggcaccggcaacugcaccaccaacauccucgaggccaaguacuggugccccgacuccauggaguacaacugccccaaccucuccccccgcgaggagcccgacgacaucgacugcuggugcuacggcgucgagaacguccgcgucgccuacggcaagugcgacuccgccggccgcucccgccgcucccgccgcgccaucgaccuccccacccacgagaaccacggccucaagacccgccaggagaaguggaugaccggccgcaugggcgagcgccagcuccagaagaucgagcgcugguucguccgcaaccccuucuucgccgucaccgcccucaccaucgccuaccucgucggcuccaacaugacccagcgcgucgucaucgcccuccucguccucgccgucggccccgccuacuccgcccacugcaucggcaucaccgaccgcgacuucaucgagggcguccacggcggcaccugggucuccgccacccucgagcaggacaagugcgucaccgucauggcccccgacaagcccucccucgacaucucccucgagaccgucgccaucgaccgccccgccgagguccgcaaggucugcuacaacgccguccucacccacgucaagaucaacgacaagugccccuccaccggcgaggcccaccucgccgaggagaacgagggcgacaacgccugcaagcgcaccuacuccgaccgcggcuggggcaacggcugcggccucuucggcaagggcuccaucgucgccugcgccaaguucaccugcgccaaguccaugucccucuucgaggucgaccagaccaagauccaguacgucauccgcgcccagcuccacgucggcgccaagcaggagaacuggaacaccgacaucaagacccucaaguucgacgcccucuccggcucccaggaggucgaguucaucggcuacggcaaggccacccucgagugccagguccagaccgccgucgacuucggcaacuccuacaucgccgagauggagaccgaguccuggaucgucgaccgccagugggcccaggaccucacccuccccuggcaguccggcuccggcggcgucuggcgcgagaugcaccaccucgucgaguucgagcccccccacgccgccaccauccgcguccucgcccucggcaaccaggagggcucccucaagaccgcccucaccggcgccaugcgcgucaccaaggacaccaacgacaacaaccucuacaagcuccacggcggccacgucuccugccgcgucaagcucuccgcccucacccucaagggcaccuccuacaagaucugcaccgacaagauguucuucgucaagaaccccaccgacaccggccacggcaccgucgucaugcaggucaaggucuccaagggcgcccccugccgcauccccgucaucgucgccgacgaccucaccgccgccaucaacaagggcauccucgucaccgucaaccccaucgccuccaccaacgacgacgagguccucaucgaggucaacccccccuucggcgacuccuacaucaucgucggccgcggcgacucccgccucaccuaccaguggcacaaggagggcuccuccggcuccacccucggcaaggccuucuccaccacccucaagggcgcccagcgccucgccgcccucggcgacaccgccugggacuucggcuccaucggcggcgucuucaacuccaucggccgcgccguccaccaggucuucggcggcgccuuccgcacccucuucggcggcauguccuggaucacccagggccucaugggcgcccuccuccucuggaugggcgucaacgcccgcgaccgcuccaucgcccucgccuuccucgccaccggcggcguccucgucuuccucgccaccaacguccacgccuga

SEQ ID NO: 315 - RNA, 2058 nt, Artificial Sequence
  derived and/or modified CDS sequence (opt2) from YFV__NC_002031.1__SSIgE-prME-XX (polyprotein: aa122-788)
auggacuggaccuggauccucuuccucgucgccgccgccacccgcguccacuccgucacccucguccgcaagaaccgcuggcuccuccucaacgucaccuccgaggaccucggcaagaccuucuccgucggcaccggcaacugcaccaccaacauccucgaggccaaguacuggugccccgacuccauggaguacaacugccccaaccucuccccccgcgaggagcccgacgacaucgacugcuggugcuacggcgucgagaacguccgcgucgccuacggcaagugcgacuccgccggccgcucccgccgcucccgccgcgccaucgaccuccccacccacgagaaccacggccucaagacccgccaggagaaguggaugaccggccgcaugggcgagcgccagcuccagaagaucgagcgcugguucguccgcaaccccuucuucgccgucaccgcccucaccaucgccuaccucgucggcuccaacaugacccagcgcgucgucaucgcccuccucguccucgccgucggccccgccuacuccgcccacugcaucggcaucaccgaccgcgacuucaucgagggcguccacggcggcaccugggucuccgccacccucgagcaggacaagugcgucaccgucauggcccccgacaagcccucccucgacaucucccucgagaccgucgccaucgaccgccccgccgagguccgcaaggucugcuacaacgccguccucacccacgucaagaucaacgacaagugccccuccaccggcgaggcccaccucgccgaggagaacgagggcgacaacgccugcaagcgcaccuacuccgaccgcggcuggggcaacggcugcggccucuucggcaagggcuccaucgucgccugcgccaaguucaccugcgccaaguccaugucccucuucgaggucgaccagaccaagauccaguacgucauccgcgcccagcuccacgucggcgccaagcaggagaacuggaacaccgacaucaagacccucaaguucgacgcccucuccggcucccaggaggucgaguucaucggcuacggcaaggccacccucgagugccagguccagaccgccgucgacuucggcaacuccuacaucgccgagauggagaccgaguccuggaucgucgaccgccagugggcccaggaccucacccuccccuggcaguccggcuccggcggcgucuggcgcgagaugcaccaccucgucgaguucgagcccccccacgccgccaccauccgcguccucgcccucggcaaccaggagggcucccucaagaccgcccucaccggcgccaugcgcgucaccaaggacaccaacgacaacaaccucuacaagcuccacggcggccacgucuccugccgcgucaagcucuccgcccucacccucaagggcaccuccuacaagaucugcaccgacaagauguucuucgucaagaaccccaccgacaccggccacggcaccgucgucaugcaggucaaggucuccaagggcgcccccugccgcauccccgucaucgucgccgacgaccucaccgccgccaucaacaagggcauccucgucaccgucaaccccaucgccuccaccaacgacgacgagguccucaucgaggucaacccccccuucggcgacuccuacaucaucgucggccgcggcgacucccgccucaccuaccaguggcacaaggagggcuccuccaucggcaagcucuucacccagaccaugaagggcgucgagcgccucgccgucaugggcgacaccgccugggacuucuccuccgccggcggcuucuucaccuccgucggcaagggcauccacaccgucuucggcuccgccuuccagggccucuucggcggccucaacuggaucaccaaggucaucaugggcgccguccucaucugggucggcaucaacacccgcaacaugaccauguccauguccaugauccucgucggcgucaucaugauguuccucucccucggcgucggcgccgaccagggcugcgccaucaacuucggcaaguga

SEQ ID NO: 316 - RNA, 2046 nt, Artificial Sequence
  derived and/or modified CDS sequence (opt2) from YFV__NC_002031.1__SSIgE-prME-XX (polyprotein: aa126-788)
auggacuggaccuggauccucuuccucgucgccgccgccacccgcguccacucccgcaagaaccgcuggcuccuccucaacgucaccuccgaggaccucggcaagaccuucuccgucggcaccggcaacugcaccaccaacauccucgaggccaaguacuggugccccgacuccauggaguacaacugccccaaccucuccccccgcgaggagcccgacgacaucgacugcuggugcuacggcgucgagaacguccgcgucgccuacggcaagugcgacuccgccggccgcucccgccgcucccgccgcgccaucgaccuccccacccacgagaaccacggccucaagacccgccaggagaaguggaugaccggccgcaugggcgagcgccagcuccagaagaucgagcgcugguucguccgcaaccccuucuucgccgucaccgcccucaccaucgccuaccucgucggcuccaacaugacccagcgcgucgucaucgcccuccucguccucgccgucggccccgccuacuccgcccacugcaucggcaucaccgaccgcgacuucaucgagggcguccacggcggcaccugggucuccgccacccucgagcaggacaagugcgucaccgucauggcccccgacaagcccucccucgacaucucccucgagaccgucgccaucgaccgccccgccgagguccgcaaggucugcuacaacgccguccucacccacgucaagaucaacgacaagugccccuccaccggcgaggcccaccucgccgaggagaacgagggcgacaacgccugcaagcgcaccuacuccgaccgcggcuggggcaacggcugcggccucuucggcaagggcuccaucgucgccugcgccaaguucaccugcgccaaguccaugucccucuucgaggucgaccagaccaagauccaguacgucauccgcgcccagcuccacgucggcgccaagcaggagaacuggaacaccgacaucaagacccucaaguucgacgcccucuccggcucccaggaggucgaguucaucggcuacggcaaggccacccucgagugccagguccagaccgccgucgacuucggcaacuccuacaucgccgagauggagaccgaguccuggaucgucgaccgccagugggcccaggaccucacccuccccuggcaguccggcuccggcggcgucuggcgcgagaugcaccaccucgucgaguucgagcccccccacgccgccaccauccgcguccucgcccucggcaaccaggagggcucccucaagaccgcccucaccggcgccaugcgcgucaccaaggacaccaacgacaacaaccucuacaagcuccacggcggccacgucuccugccgcgucaagcucuccgcccucacccucaagggcaccuccuacaagaucugcaccgacaagauguucuucgucaagaaccccaccgacaccggccacggcaccgucgucaugcaggucaaggucuccaagggcgcccccugccgcauccccgucaucgucgccgacgaccucaccgccgccaucaacaagggcauccucgucaccgucaaccccaucgccuccaccaacgacgacgagguccucaucgaggucaacccccccuucggcgacuccuacaucaucgucggccgcggcgacucccgccucaccuaccaguggcacaaggagggcuccuccaucggcaagcucuucacccagaccaugaagggcgucgagcgccucgccgucaugggcgacaccgccugggacuucuccuccgccggcggcuucuucaccuccgucggcaagggcauccacaccgucuucggcuccgccuuccagggccucuucggcggccucaacuggaucaccaaggucaucaugggcgccguccucaucugggucggcaucaacacccgcaacaugaccauguccauguccaugauccucgucggcgucaucaugauguuccucucccucggcgucggcgccgaccagggcugcgccaucaacuucggcaaguga

SEQ ID NO: 317 - RNA, 2028 nt, Artificial Sequence
  derived and/or modified CDS sequence (opt2) from YFV__NC_002031.1__SSIgE-prME (polyprotein: aa122-778)
auggacuggaccuggauccucuuccucgucgccgccgccacccgcguccacuccgucacccucguccgcaagaaccgcuggcuccuccucaacgucaccuccgaggaccucggcaagaccuucuccgucggcaccggcaacugcaccaccaacauccucgaggccaaguacuggugccccgacuccauggaguacaacugccccaaccucuccccccgcgaggagcccgacgacaucgacugcuggugcuacggcgucgagaacguccgcgucgccuacggcaagugcgacuccgccggccgcucccgccgcucccgccgcgccaucgaccuccccacccacgagaaccacggccucaagacccgccaggagaaguggaugaccggccgcaugggcgagcgccagcuccagaagaucgagcgcugguucguccgcaaccccuucuucgccgucaccgcccucaccaucgccuaccucgucggcuccaacaugacccagcgcgucgucaucgcccuccucguccucgccgucggccccgccuacuccgcccacugcaucggcaucaccgaccgcgacuucaucgagggcguccacggcggcaccugggucuccgccacccucgagcaggacaagugcgucaccgucauggcccccgacaagcccucccucgacaucucccucgagaccgucgccaucgaccgccccgccgagguccgcaaggucugcuacaacgccguccucacccacgucaagaucaacgacaagugccccuccaccggcgaggcccaccucgccgaggagaacgagggcgacaacgccugcaagcgcaccuacuccgaccgcggcuggggcaacggcugcggccucuucggcaagggcuccaucgucgccugcgccaaguucaccugcgccaaguccaugucccucuucgaggucgaccagaccaagauccaguacgucauccgcgcccagcuccacgucggcgccaagcaggagaacuggaacaccgacaucaagacccucaaguucgacgcccucuccggcucccaggaggucgaguucaucggcuacggcaaggccacccucgagugccagguccagaccgccgucgacuucggcaacuccuacaucgccgagauggagaccgaguccuggaucgucgaccgccagugggcccaggaccucacccuccccuggcaguccggcuccggcggcgucuggcgcgagaugcaccaccucgucgaguucgagcccccccacgccgccaccauccgcguccucgcccucggcaaccaggagggcucccucaagaccgcccucaccggcgccaugcgcgucaccaaggacaccaacgacaacaaccucuacaagcuccacggcggccacgucuccugccgcgucaagcucuccgcccucacccucaagggcaccuccuacaagaucugcaccgacaagauguucuucgucaagaaccccaccgacaccggccacggcaccgucgucaugcaggucaaggucuccaagggcgcccccugccgcauccccgucaucgucgccgacgaccucaccgccgccaucaacaagggcauccucgucaccgucaaccccaucgccuccaccaacgacgacgagguccucaucgaggucaacccccccuucggcgacuccuacaucaucgucggccgcggcgacucccgccucaccuaccaguggcacaaggagggcuccuccaucggcaagcucuucacccagaccaugaagggcgucgagcgccucgccgucaugggcgacaccgccugggacuucuccuccgccggcggcuucuucaccuccgucggcaagggcauccacaccgucuucggcuccgccuuccagggccucuucggcggccucaacuggaucaccaaggucaucaugggcgccguccucaucugggucggcaucaacacccgcaacaugaccauguccauguccaugauccucgucggcgucaucaugauguuccucucccucggcgucggcgccuga

SEQ ID NO: 318 - RNA, 2016 nt, Artificial Sequence
  derived and/or modified CDS sequence (opt2) from YFV__NC_002031.1__SSIgE-prME (polyprotein: aa126-778)
auggacuggaccuggauccucuuccucgucgccgccgccacccgcguccacucccgcaagaaccgcuggcuccuccucaacgucaccuccgaggaccucggcaagaccuucuccgucggcaccggcaacugcaccaccaacauccucgaggccaaguacuggugccccgacuccauggaguacaacugccccaaccucuccccccgcgaggagcccgacgacaucgacugcuggugcuacggcgucgagaacguccgcgucgccuacggcaagugcgacuccgccggccgcucccgccgcucccgccgcgccaucgaccuccccacccacgagaaccacggccucaagacccgccaggagaaguggaugaccggccgcaugggcgagcgccagcuccagaagaucgagcgcugguucguccgcaaccccuucuucgccgucaccgcccucaccaucgccuaccucgucggcuccaacaugacccagcgcgucgucaucgcccuccucguccucgccgucggccccgccuacuccgcccacugcaucggcaucaccgaccgcgacuucaucgagggcguccacggcggcaccugggucuccgccacccucgagcaggacaagugcgucaccgucauggcccccgacaagcccucccucgacaucucccucgagaccgucgccaucgaccgccccgccgagguccgcaaggucugcuacaacgccguccucacccacgucaagaucaacgacaagugccccuccaccggcgaggcccaccucgccgaggagaacgagggcgacaacgccugcaagcgcaccuacuccgaccgcggcuggggcaacggcugcggccucuucggcaagggcuccaucgucgccugcgccaaguucaccugcgccaaguccaugucccucuucgaggucgaccagaccaagauccaguacgucauccgcgcccagcuccacgucggcgccaagcaggagaacuggaacaccgacaucaagacccucaaguucgacgcccucuccggcucccaggaggucgaguucaucggcuacggcaaggccacccucgagugccagguccagaccgccgucgacuucggcaacuccuacaucgccgagauggagaccgaguccuggaucgucgaccgccagugggcccaggaccucacccuccccuggcaguccggcuccggcggcgucuggcgcgagaugcaccaccucgucgaguucgagcccccccacgccgccaccauccgcguccucgcccucggcaaccaggagggcucccucaagaccgcccucaccggcgccaugcgcgucaccaaggacaccaacgacaacaaccucuacaagcuccacggcggccacgucuccugccgcgucaagcucuccgcccucacccucaagggcaccuccuacaagaucugcaccgacaagauguucuucgucaagaaccccaccgacaccggccacggcaccgucgucaugcaggucaaggucuccaagggcgcccccugccgcauccccgucaucgucgccgacgaccucaccgccgccaucaacaagggcauccucgucaccgucaaccccaucgccuccaccaacgacgacgagguccucaucgaggucaacccccccuucggcgacuccuacaucaucgucggccgcggcgacucccgccucaccuaccaguggcacaaggagggcuccuccaucggcaagcucuucacccagaccaugaagggcgucgagcgccucgccgucaugggcgacaccgccugggacuucuccuccgccggcggcuucuucaccuccgucggcaagggcauccacaccgucuucggcuccgccuuccagggccucuucggcggccucaacuggaucaccaaggucaucaugggcgccguccucaucugggucggcaucaacacccgcaacaugaccauguccauguccaugauccucgucggcgucaucaugauguuccucucccucggcgucggcgccuga

SEQ ID NO: 319 - RNA, 2076 nt, Artificial Sequence
  derived and/or modified CDS sequence (opt2) from YFV__NC_002031.1__SSjev-prME-XX (polyprotein: aa122-788)
augggcaagcgcuccgccggcuccaucauguggcucgccucccucgccgucgucaucgccugcgccggcgccgucacccucguccgcaagaaccgcuggcuccuccucaacgucaccuccgaggaccucggcaagaccuucuccgucggcaccggcaacugcaccaccaacauccucgaggccaaguacuggugccccgacuccauggaguacaacugccccaaccucuccccccgcgaggagcccgacgacaucgacugcuggugcuacggcgucgagaacguccgcgucgccuacggcaagugcgacuccgccggccgcucccgccgcucccgccgcgccaucgaccuccccacccacgagaaccacggccucaagacccgccaggagaaguggaugaccggccgcaugggcgagcgccagcuccagaagaucgagcgcugguucguccgcaaccccuucuucgccgucaccgcccucaccaucgccuaccucgucggcuccaacaugacccagcgcgucgucaucgcccuccucguccucgccgucggccccgccuacuccgcccacugcaucggcaucaccgaccgcgacuucaucgagggcguccacggcggcaccugggucuccgccacccucgagcaggacaagugcgucaccgucauggcccccgacaagcccucccucgacaucucccucgagaccgucgccaucgaccgccccgccgagguccgcaaggucugcuacaacgccguccucacccacgucaagaucaacgacaagugccccuccaccggcgaggcccaccucgccgaggagaacgagggcgacaacgccugcaagcgcaccuacuccgaccgcggcuggggcaacggcugcggccucuucggcaagggcuccaucgucgccugcgccaaguucaccugcgccaaguccaugucccucuucgaggucgaccagaccaagauccaguacgucauccgcgcccagcuccacgucggcgccaagcaggagaacuggaacaccgacaucaagacccucaaguucgacgcccucuccggcucccaggaggucgaguucaucggcuacggcaaggccacccucgagugccagguccagaccgccgucgacuucggcaacuccuacaucgccgagauggagaccgaguccuggaucgucgaccgccagugggcccaggaccucacccuccccuggcaguccggcuccggcggcgucuggcgcgagaugcaccaccucgucgaguucgagcccccccacgccgccaccauccgcguccucgcccucggcaaccaggagggcucccucaagaccgcccucaccggcgccaugcgcgucaccaaggacaccaacgacaacaaccucuacaagcuccacggcggccacgucuccugccgcgucaagcucuccgcccucacccucaagggcaccuccuacaagaucugcaccgacaagauguucuucgucaagaaccccaccgacaccggccacggcaccgucgucaugcaggucaaggucuccaagggcgcccccugccgcauccccgucaucgucgccgacgaccucaccgccgccaucaacaagggcauccucgucaccgucaaccccaucgccuccaccaacgacgacgagguccucaucgaggucaacccccccuucggcgacuccuacaucaucgucggccgcggcgacucccgccucaccuaccaguggcacaaggagggcuccuccaucggcaagcucuucacccagaccaugaagggcgucgagcgccucgccgucaugggcgacaccgccugggacuucuccuccgccggcggcuucuucaccuccgucggcaagggcauccacaccgucuucggcuccgccuuccagggccucuucggcggccucaacuggaucaccaaggucaucaugggcgccguccucaucugggucggcaucaacacccgcaacaugaccauguccauguccaugauccucgucggcgucaucaugauguuccucucccucggcgucggcgccgaccagggcugcgccaucaacuucggcaaguga

SEQ ID NO: 320 - RNA, 2064 nt, Artificial Sequence
  derived and/or modified CDS sequence (opt2) from YFV__NC_002031.1__SSjev-prME-XX (polyprotein: aa126-788)
augggcaagcgcuccgccggcuccaucauguggcucgccucccucgccgucgucaucgccugcgccggcgcccgcaagaaccgcuggcuccuccucaacgucaccuccgaggaccucggcaagaccuucuccgucggcaccggcaacugcaccaccaacauccucgaggccaaguacuggugccccgacuccauggaguacaacugccccaaccucuccccccgcgaggagcccgacgacaucgacugcuggugcuacggcgucgagaacguccgcgucgccuacggcaagugcgacuccgccggccgcucccgccgcucccgccgcgccaucgaccuccccacccacgagaaccacggccucaagacccgccaggagaaguggaugaccggccgcaugggcgagcgccagcuccagaagaucgagcgcugguucguccgcaaccccuucuucgccgucaccgcccucaccaucgccuaccucgucggcuccaacaugacccagcgcgucgucaucgcccuccucguccucgccgucggccccgccuacuccgcccacugcaucggcaucaccgaccgcgacuucaucgagggcguccacggcggcaccugggucuccgccacccucgagcaggacaagugcgucaccgucauggcccccgacaagcccucccucgacaucucccucgagaccgucgccaucgaccgccccgccgagguccgcaaggucugcuacaacgccguccucacccacgucaagaucaacgacaagugccccuccaccggcgaggcccaccucgccgaggagaacgagggcgacaacgccugcaagcgcaccuacuccgaccgcggcuggggcaacggcugcggccucuucggcaagggcuccaucgucgccugcgccaaguucaccugcgccaaguccaugucccucuucgaggucgaccagaccaagauccaguacgucauccgcgcccagcuccacgucggcgccaagcaggagaacuggaacaccgacaucaagacccucaaguucgacgcccucuccggcucccaggaggucgaguucaucggcuacggcaaggccacccucgagugccagguccagaccgccgucgacuucggcaacuccuacaucgccgagauggagaccgaguccuggaucgucgaccgccagugggcccaggaccucacccuccccuggcaguccggcuccggcggcgucuggcgcgagaugcaccaccucgucgaguucgagcccccccacgccgccaccauccgcguccucgcccucggcaaccaggagggcucccucaagaccgcccucaccggcgccaugcgcgucaccaaggacaccaacgacaacaaccucuacaagcuccacggcggccacgucuccugccgcgucaagcucuccgcccucacccucaagggcaccuccuacaagaucugcaccgacaagauguucuucgucaagaaccccaccgacaccggccacggcaccgucgucaugcaggucaaggucuccaagggcgcccccugccgcauccccgucaucgucgccgacgaccucaccgccgccaucaacaagggcauccucgucaccgucaaccccaucgccuccaccaacgacgacgagguccucaucgaggucaacccccccuucggcgacuccuacaucaucgucggccgcggcgacucccgccucaccuaccaguggcacaaggagggcuccuccaucggcaagcucuucacccagaccaugaagggcgucgagcgccucgccgucaugggcgacaccgccugggacuucuccuccgccggcggcuucuucaccuccgucggcaagggcauccacaccgucuucggcuccgccuuccagggccucuucggcggccucaacuggaucaccaaggucaucaugggcgccguccucaucugggucggcaucaacacccgcaacaugaccauguccauguccaugauccucgucggcgucaucaugauguuccucucccucggcgucggcgccgaccagggcugcgccaucaacuucggcaaguga

SEQ ID NO: 321 - RNA, 2046 nt, Artificial Sequence
  derived and/or modified CDS sequence (opt2) from YFV__NC_002031.1__SSjev-prME (polyprotein: aa122-778)
augggcaagcgcuccgccggcuccaucauguggcucgccucccucgccgucgucaucgccugcgccggcgccgucacccucguccgcaagaaccgcuggcuccuccucaacgucaccuccgaggaccucggcaagaccuucuccgucggcaccggcaacugcaccaccaacauccucgaggccaaguacuggugccccgacuccauggaguacaacugccccaaccucuccccccgcgaggagcccgacgacaucgacugcuggugcuacggcgucgagaacguccgcgucgccuacggcaagugcgacuccgccggccgcucccgccgcucccgccgcgccaucgaccuccccacccacgagaaccacggccucaagacccgccaggagaaguggaugaccggccgcaugggcgagcgccagcuccagaagaucgagcgcugguucguccgcaaccccuucuucgccgucaccgcccucaccaucgccuaccucgucggcuccaacaugacccagcgcgucgucaucgcccuccucguccucgccgucggccccgccuacuccgcccacugcaucggcaucaccgaccgcgacuucaucgagggcguccacggcggcaccugggucuccgccacccucgagcaggacaagugcgucaccgucauggcccccgacaagcccucccucgacaucucccucgagaccgucgccaucgaccgccccgccgagguccgcaaggucugcuacaacgccguccucacccacgucaagaucaacgacaagugccccuccaccggcgaggcccaccucgccgaggagaacgagggcgacaacgccugcaagcgcaccuacuccgaccgcggcuggggcaacggcugcggccucuucggcaagggcuccaucgucgccugcgccaaguucaccugcgccaaguccaugucccucuucgaggucgaccagaccaagauccaguacgucauccgcgcccagcuccacgucggcgccaagcaggagaacuggaacaccgacaucaagacccucaaguucgacgcccucuccggcucccaggaggucgaguucaucggcuacggcaaggccacccucgagugccagguccagaccgccgucgacuucggcaacuccuacaucgccgagauggagaccgaguccuggaucgucgaccgccagugggcccaggaccucacccuccccuggcaguccggcuccggcggcgucuggcgcgagaugcaccaccucgucgaguucgagcccccccacgccgccaccauccgcguccucgcccucggcaaccaggagggcucccucaagaccgcccucaccggcgccaugcgcgucaccaaggacaccaacgacaacaaccucuacaagcuccacggcggccacgucuccugccgcgucaagcucuccgcccucacccucaagggcaccuccuacaagaucugcaccgacaagauguucuucgucaagaaccccaccgacaccggccacggcaccgucgucaugcaggucaaggucuccaagggcgcccccugccgcauccccgucaucgucgccgacgaccucaccgccgccaucaacaagggcauccucgucaccgucaaccccaucgccuccaccaacgacgacgagguccucaucgaggucaacccccccuucggcgacuccuacaucaucgucggccgcggcgacucccgccucaccuaccaguggcacaaggagggcuccuccaucggcaagcucuucacccagaccaugaagggcgucgagcgccucgccgucaugggcgacaccgccugggacuucuccuccgccggcggcuucuucaccuccgucggcaagggcauccacaccgucuucggcuccgccuuccagggccucuucggcggccucaacuggaucaccaaggucaucaugggcgccguccucaucugggucggcaucaacacccgcaacaugaccauguccauguccaugauccucgucggcgucaucaugauguuccucucccucggcgucggcgccuga

SEQ ID NO: 322 - RNA, 2034 nt, Artificial Sequence
  derived and/or modified CDS sequence (opt2) from YFV__NC_002031.1__SSjev-prME (polyprotein: aa126-778)
augggcaagcgcuccgccggcuccaucauguggcucgccucccucgccgucgucaucgccugcgccggcgcccgcaagaaccgcuggcuccuccucaacgucaccuccgaggaccucggcaagaccuucuccgucggcaccggcaacugcaccaccaacauccucgaggccaaguacuggugccccgacuccauggaguacaacugccccaaccucuccccccgcgaggagcccgacgacaucgacugcuggugcuacggcgucgagaacguccgcgucgccuacggcaagugcgacuccgccggccgcucccgccgcucccgccgcgccaucgaccuccccacccacgagaaccacggccucaagacccgccaggagaaguggaugaccggccgcaugggcgagcgccagcuccagaagaucgagcgcugguucguccgcaaccccuucuucgccgucaccgcccucaccaucgccuaccucgucggcuccaacaugacccagcgcgucgucaucgcccuccucguccucgccgucggccccgccuacuccgcccacugcaucggcaucaccgaccgcgacuucaucgagggcguccacggcggcaccugggucuccgccacccucgagcaggacaagugcgucaccgucauggcccccgacaagcccucccucgacaucucccucgagaccgucgccaucgaccgccccgccgagguccgcaaggucugcuacaacgccguccucacccacgucaagaucaacgacaagugccccuccaccggcgaggcccaccucgccgaggagaacgagggcgacaacgccugcaagcgcaccuacuccgaccgcggcuggggcaacggcugcggccucuucggcaagggcuccaucgucgccugcgccaaguucaccugcgccaaguccaugucccucuucgaggucgaccagaccaagauccaguacgucauccgcgcccagcuccacgucggcgccaagcaggagaacuggaacaccgacaucaagacccucaaguucgacgcccucuccggcucccaggaggucgaguucaucggcuacggcaaggccacccucgagugccagguccagaccgccgucgacuucggcaacuccuacaucgccgagauggagaccgaguccuggaucgucgaccgccagugggcccaggaccucacccuccccuggcaguccggcuccggcggcgucuggcgcgagaugcaccaccucgucgaguucgagcccccccacgccgccaccauccgcguccucgcccucggcaaccaggagggcucccucaagaccgcccucaccggcgccaugcgcgucaccaaggacaccaacgacaacaaccucuacaagcuccacggcggccacgucuccugccgcgucaagcucuccgcccucacccucaagggcaccuccuacaagaucugcaccgacaagauguucuucgucaagaaccccaccgacaccggccacggcaccgucgucaugcaggucaaggucuccaagggcgcccccugccgcauccccgucaucgucgccgacgaccucaccgccgccaucaacaagggcauccucgucaccgucaaccccaucgccuccaccaacgacgacgagguccucaucgaggucaacccccccuucggcgacuccuacaucaucgucggccgcggcgacucccgccucaccuaccaguggcacaaggagggcuccuccaucggcaagcucuucacccagaccaugaagggcgucgagcgccucgccgucaugggcgacaccgccugggacuucuccuccgccggcggcuucuucaccuccgucggcaagggcauccacaccgucuucggcuccgccuuccagggccucuucggcggccucaacuggaucaccaaggucaucaugggcgccguccucaucugggucggcaucaacacccgcaacaugaccauguccauguccaugauccucgucggcgucaucaugauguuccucucccucggcgucggcgccuga

SEQ ID NO: 323 - RNA, 2094 nt, Artificial Sequence
  derived and/or modified CDS sequence (opt2) from YFV__NC_002031.1__SSjev(V2)-prME-XX (polyprotein: aa122-788)
augggccgcaagcagaacaagcgcggcggcaacgagggcuccaucauguggcucgccucccucgccgucgucaucgccugcgccggcgccgucacccucguccgcaagaaccgcuggcuccuccucaacgucaccuccgaggaccucggcaagaccuucuccgucggcaccggcaacugcaccaccaacauccucgaggccaaguacuggugccccgacuccauggaguacaacugccccaaccucuccccccgcgaggagcccgacgacaucgacugcuggugcuacggcgucgagaacguccgcgucgccuacggcaagugcgacuccgccggccgcucccgccgcucccgccgcgccaucgaccuccccacccacgagaaccacggccucaagacccgccaggagaaguggaugaccggccgcaugggcgagcgccagcuccagaagaucgagcgcugguucguccgcaaccccuucuucgccgucaccgcccucaccaucgccuaccucgucggcuccaacaugacccagcgcgucgucaucgcccuccucguccucgccgucggccccgccuacuccgcccacugcaucggcaucaccgaccgcgacuucaucgagggcguccacggcggcaccugggucuccgccacccucgagcaggacaagugcgucaccgucauggcccccgacaagcccucccucgacaucucccucgagaccgucgccaucgaccgccccgccgagguccgcaaggucugcuacaacgccguccucacccacgucaagaucaacgacaagugccccuccaccggcgaggcccaccucgccgaggagaacgagggcgacaacgccugcaagcgcaccuacuccgaccgcggcuggggcaacggcugcggccucuucggcaagggcuccaucgucgccugcgccaaguucaccugcgccaaguccaugucccucuucgaggucgaccagaccaagauccaguacgucauccgcgcccagcuccacgucggcgccaagcaggagaacuggaacaccgacaucaagacccucaaguucgacgcccucuccggcucccaggaggucgaguucaucggcuacggcaaggccacccucgagugccagguccagaccgccgucgacuucggcaacuccuacaucgccgagauggagaccgaguccuggaucgucgaccgccagugggcccaggaccucacccuccccuggcaguccggcuccggcggcgucuggcgcgagaugcaccaccucgucgaguucgagcccccccacgccgccaccauccgcguccucgcccucggcaaccaggagggcucccucaagaccgcccucaccggcgccaugcgcgucaccaaggacaccaacgacaacaaccucuacaagcuccacggcggccacgucuccugccgcgucaagcucuccgcccucacccucaagggcaccuccuacaagaucugcaccgacaagauguucuucgucaagaaccccaccgacaccggccacggcaccgucgucaugcaggucaaggucuccaagggcgcccccugccgcauccccgucaucgucgccgacgaccucaccgccgccaucaacaagggcauccucgucaccgucaaccccaucgccuccaccaacgacgacgagguccucaucgaggucaacccccccuucggcgacuccuacaucaucgucggccgcggcgacucccgccucaccuaccaguggcacaaggagggcuccuccaucggcaagcucuucacccagaccaugaagggcgucgagcgccucgccgucaugggcgacaccgccugggacuucuccuccgccggcggcuucuucaccuccgucggcaagggcauccacaccgucuucggcuccgccuuccagggccucuucggcggccucaacuggaucaccaaggucaucaugggcgccguccucaucugggucggcaucaacacccgcaacaugaccauguccauguccaugauccucgucggcgucaucaugauguuccucucccucggcgucggcgccgaccagggcugcgccaucaacuucggcaaguga

SEQ ID NO: 324 - RNA, 2082 nt, Artificial Sequence
  derived and/or modified CDS sequence (opt2) from YFV__NC_002031.1__SSjev(V2)-prME-XX (polyprotein: aa126-788)
augggccgcaagcagaacaagcgcggcggcaacgagggcuccaucauguggcucgccucccucgccgucgucaucgccugcgccggcgcccgcaagaaccgcuggcuccuccucaacgucaccuccgaggaccucggcaagaccuucuccgucggcaccggcaacugcaccaccaacauccucgaggccaaguacuggugccccgacuccauggaguacaacugccccaaccucuccccccgcgaggagcccgacgacaucgacugcuggugcuacggcgucgagaacguccgcgucgccuacggcaagugcgacuccgccggccgcucccgccgcucccgccgcgccaucgaccuccccacccacgagaaccacggccucaagacccgccaggagaaguggaugaccggccgcaugggcgagcgccagcuccagaagaucgagcgcugguucguccgcaaccccuucuucgccgucaccgcccucaccaucgccuaccucgucggcuccaacaugacccagcgcgucgucaucgcccuccucguccucgccgucggccccgccuacuccgcccacugcaucggcaucaccgaccgcgacuucaucgagggcguccacggcggcaccugggucuccgccacccucgagcaggacaagugcgucaccgucauggcccccgacaagcccucccucgacaucucccucgagaccgucgccaucgaccgccccgccgagguccgcaaggucugcuacaacgccguccucacccacgucaagaucaacgacaagugccccuccaccggcgaggcccaccucgccgaggagaacgagggcgacaacgccugcaagcgcaccuacuccgaccgcggcuggggcaacggcugcggccucuucggcaagggcuccaucgucgccugcgccaaguucaccugcgccaaguccaugucccucuucgaggucgaccagaccaagauccaguacgucauccgcgcccagcuccacgucggcgccaagcaggagaacuggaacaccgacaucaagacccucaaguucgacgcccucuccggcucccaggaggucgaguucaucggcuacggcaaggccacccucgagugccagguccagaccgccgucgacuucggcaacuccuacaucgccgagauggagaccgaguccuggaucgucgaccgccagugggcccaggaccucacccuccccuggcaguccggcuccggcggcgucuggcgcgagaugcaccaccucgucgaguucgagcccccccacgccgccaccauccgcguccucgcccucggcaaccaggagggcucccucaagaccgcccucaccggcgccaugcgcgucaccaaggacaccaacgacaacaaccucuacaagcuccacggcggccacgucuccugccgcgucaagcucuccgcccucacccucaagggcaccuccuacaagaucugcaccgacaagauguucuucgucaagaaccccaccgacaccggccacggcaccgucgucaugcaggucaaggucuccaagggcgcccccugccgcauccccgucaucgucgccgacgaccucaccgccgccaucaacaagggcauccucgucaccgucaaccccaucgccuccaccaacgacgacgagguccucaucgaggucaacccccccuucggcgacuccuacaucaucgucggccgcggcgacucccgccucaccuaccaguggcacaaggagggcuccuccaucggcaagcucuucacccagaccaugaagggcgucgagcgccucgccgucaugggcgacaccgccugggacuucuccuccgccggcggcuucuucaccuccgucggcaagggcauccacaccgucuucggcuccgccuuccagggccucuucggcggccucaacuggaucaccaaggucaucaugggcgccguccucaucugggucggcaucaacacccgcaacaugaccauguccauguccaugauccucgucggcgucaucaugauguuccucucccucggcgucggcgccgaccagggcugcgccaucaacuucggcaaguga

SEQ ID NO: 325 - RNA, 2064 nt, Artificial Sequence
  derived and/or modified CDS sequence (opt2) from YFV__NC_002031.1__SSjev(V2)-prME (polyprotein: aa122-778)
augggccgcaagcagaacaagcgcggcggcaacgagggcuccaucauguggcucgccucccucgccgucgucaucgccugcgccggcgccgucacccucguccgcaagaaccgcuggcuccuccucaacgucaccuccgaggaccucggcaagaccuucuccgucggcaccggcaacugcaccaccaacauccucgaggccaaguacuggugccccgacuccauggaguacaacugccccaaccucuccccccgcgaggagcccgacgacaucgacugcuggugcuacggcgucgagaacguccgcgucgccuacggcaagugcgacuccgccggccgcucccgccgcucccgccgcgccaucgaccuccccacccacgagaaccacggccucaagacccgccaggagaaguggaugaccggccgcaugggcgagcgccagcuccagaagaucgagcgcugguucguccgcaaccccuucuucgccgucaccgcccucaccaucgccuaccucgucggcuccaacaugacccagcgcgucgucaucgcccuccucguccucgccgucggccccgccuacuccgcccacugcaucggcaucaccgaccgcgacuucaucgagggcguccacggcggcaccugggucuccgccacccucgagcaggacaagugcgucaccgucauggcccccgacaagcccucccucgacaucucccucgagaccgucgccaucgaccgccccgccgagguccgcaaggucugcuacaacgccguccucacccacgucaagaucaacgacaagugccccuccaccggcgaggcccaccucgccgaggagaacgagggcgacaacgccugcaagcgcaccuacuccgaccgcggcuggggcaacggcugcggccucuucggcaagggcuccaucgucgccugcgccaaguucaccugcgccaaguccaugucccucuucgaggucgaccagaccaagauccaguacgucauccgcgcccagcuccacgucggcgccaagcaggagaacuggaacaccgacaucaagacccucaaguucgacgcccucuccggcucccaggaggucgaguucaucggcuacggcaaggccacccucgagugccagguccagaccgccgucgacuucggcaacuccuacaucgccgagauggagaccgaguccuggaucgucgaccgccagugggcccaggaccucacccuccccuggcaguccggcuccggcggcgucuggcgcgagaugcaccaccucgucgaguucgagcccccccacgccgccaccauccgcguccucgcccucggcaaccaggagggcucccucaagaccgcccucaccggcgccaugcgcgucaccaaggacaccaacgacaacaaccucuacaagcuccacggcggccacgucuccugccgcgucaagcucuccgcccucacccucaagggcaccuccuacaagaucugcaccgacaagauguucuucgucaagaaccccaccgacaccggccacggcaccgucgucaugcaggucaaggucuccaagggcgcccccugccgcauccccgucaucgucgccgacgaccucaccgccgccaucaacaagggcauccucgucaccgucaaccccaucgccuccaccaacgacgacgagguccucaucgaggucaacccccccuucggcgacuccuacaucaucgucggccgcggcgacucccgccucaccuaccaguggcacaaggagggcuccuccaucggcaagcucuucacccagaccaugaagggcgucgagcgccucgccgucaugggcgacaccgccugggacuucuccuccgccggcggcuucuucaccuccgucggcaagggcauccacaccgucuucggcuccgccuuccagggccucuucggcggccucaacuggaucaccaaggucaucaugggcgccguccucaucugggucggcaucaacacccgcaacaugaccauguccauguccaugauccucgucggcgucaucaugauguuccucucccucggcgucggcgccuga

SEQ ID NO: 326 - RNA, 2052 nt, Artificial Sequence
  derived and/or modified CDS sequence (opt2) from YFV__NC_002031.1__SSjev(V2)-prME (polyprotein: aa126-778)
augggccgcaagcagaacaagcgcggcggcaacgagggcuccaucauguggcucgccucccucgccgucgucaucgccugcgccggcgcccgcaagaaccgcuggcuccuccucaacgucaccuccgaggaccucggcaagaccuucuccgucggcaccggcaacugcaccaccaacauccucgaggccaaguacuggugccccgacuccauggaguacaacugccccaaccucuccccccgcgaggagcccgacgacaucgacugcuggugcuacggcgucgagaacguccgcgucgccuacggcaagugcgacuccgccggccgcucccgccgcucccgccgcgccaucgaccuccccacccacgagaaccacggccucaagacccgccaggagaaguggaugaccggccgcaugggcgagcgccagcuccagaagaucgagcgcugguucguccgcaaccccuucuucgccgucaccgcccucaccaucgccuaccucgucggcuccaacaugacccagcgcgucgucaucgcccuccucguccucgccgucggccccgccuacuccgcccacugcaucggcaucaccgaccgcgacuucaucgagggcguccacggcggcaccugggucuccgccacccucgagcaggacaagugcgucaccgucauggcccccgacaagcccucccucgacaucucccucgagaccgucgccaucgaccgccccgccgagguccgcaaggucugcuacaacgccguccucacccacgucaagaucaacgacaagugccccuccaccggcgaggcccaccucgccgaggagaacgagggcgacaacgccugcaagcgcaccuacuccgaccgcggcuggggcaacggcugcggccucuucggcaagggcuccaucgucgccugcgccaaguucaccugcgccaaguccaugucccucuucgaggucgaccagaccaagauccaguacgucauccgcgcccagcuccacgucggcgccaagcaggagaacuggaacaccgacaucaagacccucaaguucgacgcccucuccggcucccaggaggucgaguucaucggcuacggcaaggccacccucgagugccagguccagaccgccgucgacuucggcaacuccuacaucgccgagauggagaccgaguccuggaucgucgaccgccagugggcccaggaccucacccuccccuggcaguccggcuccggcggcgucuggcgcgagaugcaccaccucgucgaguucgagcccccccacgccgccaccauccgcguccucgcccucggcaaccaggagggcucccucaagaccgcccucaccggcgccaugcgcgucaccaaggacaccaacgacaacaaccucuacaagcuccacggcggccacgucuccugccgcgucaagcucuccgcccucacccucaagggcaccuccuacaagaucugcaccgacaagauguucuucgucaagaaccccaccgacaccggccacggcaccgucgucaugcaggucaaggucuccaagggcgcccccugccgcauccccgucaucgucgccgacgaccucaccgccgccaucaacaagggcauccucgucaccgucaaccccaucgccuccaccaacgacgacgagguccucaucgaggucaacccccccuucggcgacuccuacaucaucgucggccgcggcgacucccgccucaccuaccaguggcacaaggagggcuccuccaucggcaagcucuucacccagaccaugaagggcgucgagcgccucgccgucaugggcgacaccgccugggacuucuccuccgccggcggcuucuucaccuccgucggcaagggcauccacaccgucuucggcuccgccuuccagggccucuucggcggccucaacuggaucaccaaggucaucaugggcgccguccucaucugggucggcaucaacacccgcaacaugaccauguccauguccaugauccucgucggcgucaucaugauguuccucucccucggcgucggcgccuga

SEQ ID NO: 327 - RNA, 2067 nt, Artificial Sequence
  derived and/or modified CDS sequence (opt2) from YFV__NC_002031.1__SSjev(V3)-prME-XX (polyprotein: aa122-788)
augaacgagggcuccaucauguggcucgccucccucgccgucgucaucgccugcgccggcgccgucacccucguccgcaagaaccgcuggcuccuccucaacgucaccuccgaggaccucggcaagaccuucuccgucggcaccggcaacugcaccaccaacauccucgaggccaaguacuggugccccgacuccauggaguacaacugccccaaccucuccccccgcgaggagcccgacgacaucgacugcuggugcuacggcgucgagaacguccgcgucgccuacggcaagugcgacuccgccggccgcucccgccgcucccgccgcgccaucgaccuccccacccacgagaaccacggccucaagacccgccaggagaaguggaugaccggccgcaugggcgagcgccagcuccagaagaucgagcgcugguucguccgcaaccccuucuucgccgucaccgcccucaccaucgccuaccucgucggcuccaacaugacccagcgcgucgucaucgcccuccucguccucgccgucggccccgccuacuccgcccacugcaucggcaucaccgaccgcgacuucaucgagggcguccacggcggcaccugggucuccgccacccucgagcaggacaagugcgucaccgucauggcccccgacaagcccucccucgacaucucccucgagaccgucgccaucgaccgccccgccgagguccgcaaggucugcuacaacgccguccucacccacgucaagaucaacgacaagugccccuccaccggcgaggcccaccucgccgaggagaacgagggcgacaacgccugcaagcgcaccuacuccgaccgcggcuggggcaacggcugcggccucuucggcaagggcuccaucgucgccugcgccaaguucaccugcgccaaguccaugucccucuucgaggucgaccagaccaagauccaguacgucauccgcgcccagcuccacgucggcgccaagcaggagaacuggaacaccgacaucaagacccucaaguucgacgcccucuccggcucccaggaggucgaguucaucggcuacggcaaggccacccucgagugccagguccagaccgccgucgacuucggcaacuccuacaucgccgagauggagaccgaguccuggaucgucgaccgccagugggcccaggaccucacccuccccuggcaguccggcuccggcggcgucuggcgcgagaugcaccaccucgucgaguucgagcccccccacgccgccaccauccgcguccucgcccucggcaaccaggagggcucccucaagaccgcccucaccggcgccaugcgcgucaccaaggacaccaacgacaacaaccucuacaagcuccacggcggccacgucuccugccgcgucaagcucuccgcccucacccucaagggcaccuccuacaagaucugcaccgacaagauguucuucgucaagaaccccaccgacaccggccacggcaccgucgucaugcaggucaaggucuccaagggcgcccccugccgcauccccgucaucgucgccgacgaccucaccgccgccaucaacaagggcauccucgucaccgucaaccccaucgccuccaccaacgacgacgagguccucaucgaggucaacccccccuucggcgacuccuacaucaucgucggccgcggcgacucccgccucaccuaccaguggcacaaggagggcuccuccaucggcaagcucuucacccagaccaugaagggcgucgagcgccucgccgucaugggcgacaccgccugggacuucuccuccgccggcggcuucuucaccuccgucggcaagggcauccacaccgucuucggcuccgccuuccagggccucuucggcggccucaacuggaucaccaaggucaucaugggcgccguccucaucugggucggcaucaacacccgcaacaugaccauguccauguccaugauccucgucggcgucaucaugauguuccucucccucggcgucggcgccgaccagggcugcgccaucaacuucggcaaguga

SEQ ID NO: 328 - RNA, 2055 nt, Artificial Sequence
  derived and/or modified CDS sequence (opt2) from YFV__NC_002031.1__SSjev(V3)-prME-XX (polyprotein: aa126-788)
augaacgagggcuccaucauguggcucgccucccucgccgucgucaucgccugcgccggcgcccgcaagaaccgcuggcuccuccucaacgucaccuccgaggaccucggcaagaccuucuccgucggcaccggcaacugcaccaccaacauccucgaggccaaguacuggugccccgacuccauggaguacaacugccccaaccucuccccccgcgaggagcccgacgacaucgacugcuggugcuacggcgucgagaacguccgcgucgccuacggcaagugcgacuccgccggccgcucccgccgcucccgccgcgccaucgaccuccccacccacgagaaccacggccucaagacccgccaggagaaguggaugaccggccgcaugggcgagcgccagcuccagaagaucgagcgcugguucguccgcaaccccuucuucgccgucaccgcccucaccaucgccuaccucgucggcuccaacaugacccagcgcgucgucaucgcccuccucguccucgccgucggccccgccuacuccgcccacugcaucggcaucaccgaccgcgacuucaucgagggcguccacggcggcaccugggucuccgccacccucgagcaggacaagugcgucaccgucauggcccccgacaagcccucccucgacaucucccucgagaccgucgccaucgaccgccccgccgagguccgcaaggucugcuacaacgccguccucacccacgucaagaucaacgacaagugccccuccaccggcgaggcccaccucgccgaggagaacgagggcgacaacgccugcaagcgcaccuacuccgaccgcggcuggggcaacggcugcggccucuucggcaagggcuccaucgucgccugcgccaaguucaccugcgccaaguccaugucccucuucgaggucgaccagaccaagauccaguacgucauccgcgcccagcuccacgucggcgccaagcaggagaacuggaacaccgacaucaagacccucaaguucgacgcccucuccggcucccaggaggucgaguucaucggcuacggcaaggccacccucgagugccagguccagaccgccgucgacuucggcaacuccuacaucgccgagauggagaccgaguccuggaucgucgaccgccagugggcccaggaccucacccuccccuggcaguccggcuccggcggcgucuggcgcgagaugcaccaccucgucgaguucgagcccccccacgccgccaccauccgcguccucgcccucggcaaccaggagggcucccucaagaccgcccucaccggcgccaugcgcgucaccaaggacaccaacgacaacaaccucuacaagcuccacggcggccacgucuccugccgcgucaagcucuccgcccucacccucaagggcaccuccuacaagaucugcaccgacaagauguucuucgucaagaaccccaccgacaccggccacggcaccgucgucaugcaggucaaggucuccaagggcgcccccugccgcauccccgucaucgucgccgacgaccucaccgccgccaucaacaagggcauccucgucaccgucaaccccaucgccuccaccaacgacgacgagguccucaucgaggucaacccccccuucggcgacuccuacaucaucgucggccgcggcgacucccgccucaccuaccaguggcacaaggagggcuccuccaucggcaagcucuucacccagaccaugaagggcgucgagcgccucgccgucaugggcgacaccgccugggacuucuccuccgccggcggcuucuucaccuccgucggcaagggcauccacaccgucuucggcuccgccuuccagggccucuucggcggccucaacuggaucaccaaggucaucaugggcgccguccucaucugggucggcaucaacacccgcaacaugaccauguccauguccaugauccucgucggcgucaucaugauguuccucucccucggcgucggcgccgaccagggcugcgccaucaacuucggcaaguga

SEQ ID NO: 329 - RNA, 2037 nt, Artificial Sequence
  derived and/or modified CDS sequence (opt2) from YFV__NC_002031.1__SSjev(V3)-prME (polyprotein: aa122-778)
augaacgagggcuccaucauguggcucgccucccucgccgucgucaucgccugcgccggcgccgucacccucguccgcaagaaccgcuggcuccuccucaacgucaccuccgaggaccucggcaagaccuucuccgucggcaccggcaacugcaccaccaacauccucgaggccaaguacuggugccccgacuccauggaguacaacugccccaaccucuccccccgcgaggagcccgacgacaucgacugcuggugcuacggcgucgagaacguccgcgucgccuacggcaagugcgacuccgccggccgcucccgccgcucccgccgcgccaucgaccuccccacccacgagaaccacggccucaagacccgccaggagaaguggaugaccggccgcaugggcgagcgccagcuccagaagaucgagcgcugguucguccgcaaccccuucuucgccgucaccgcccucaccaucgccuaccucgucggcuccaacaugacccagcgcgucgucaucgcccuccucguccucgccgucggccccgccuacuccgcccacugcaucggcaucaccgaccgcgacuucaucgagggcguccacggcggcaccugggucuccgccacccucgagcaggacaagugcgucaccgucauggcccccgacaagcccucccucgacaucucccucgagaccgucgccaucgaccgccccgccgagguccgcaaggucugcuacaacgccguccucacccacgucaagaucaacgacaagugccccuccaccggcgaggcccaccucgccgaggagaacgagggcgacaacgccugcaagcgcaccuacuccgaccgcggcuggggcaacggcugcggccucuucggcaagggcuccaucgucgccugcgccaaguucaccugcgccaaguccaugucccucuucgaggucgaccagaccaagauccaguacgucauccgcgcccagcuccacgucggcgccaagcaggagaacuggaacaccgacaucaagacccucaaguucgacgcccucuccggcucccaggaggucgaguucaucggcuacggcaaggccacccucgagugccagguccagaccgccgucgacuucggcaacuccuacaucgccgagauggagaccgaguccuggaucgucgaccgccagugggcccaggaccucacccuccccuggcaguccggcuccggcggcgucuggcgcgagaugcaccaccucgucgaguucgagcccccccacgccgccaccauccgcguccucgcccucggcaaccaggagggcucccucaagaccgcccucaccggcgccaugcgcgucaccaaggacaccaacgacaacaaccucuacaagcuccacggcggccacgucuccugccgcgucaagcucuccgcccucacccucaagggcaccuccuacaagaucugcaccgacaagauguucuucgucaagaaccccaccgacaccggccacggcaccgucgucaugcaggucaaggucuccaagggcgcccccugccgcauccccgucaucgucgccgacgaccucaccgccgccaucaacaagggcauccucgucaccgucaaccccaucgccuccaccaacgacgacgagguccucaucgaggucaacccccccuucggcgacuccuacaucaucgucggccgcggcgacucccgccucaccuaccaguggcacaaggagggcuccuccaucggcaagcucuucacccagaccaugaagggcgucgagcgccucgccgucaugggcgacaccgccugggacuucuccuccgccggcggcuucuucaccuccgucggcaagggcauccacaccgucuucggcuccgccuuccagggccucuucggcggccucaacuggaucaccaaggucaucaugggcgccguccucaucugggucggcaucaacacccgcaacaugaccauguccauguccaugauccucgucggcgucaucaugauguuccucucccucggcgucggcgccuga

SEQ ID NO: 330 - RNA, 2025 nt, Artificial Sequence
  derived and/or modified CDS sequence (opt2) from YFV__NC_002031.1__SSjev(V3)-prME (polyprotein: aa126-778)
augaacgagggcuccaucauguggcucgccucccucgccgucgucaucgccugcgccggcgcccgcaagaaccgcuggcuccuccucaacgucaccuccgaggaccucggcaagaccuucuccgucggcaccggcaacugcaccaccaacauccucgaggccaaguacuggugccccgacuccauggaguacaacugccccaaccucuccccccgcgaggagcccgacgacaucgacugcuggugcuacggcgucgagaacguccgcgucgccuacggcaagugcgacuccgccggccgcucccgccgcucccgccgcgccaucgaccuccccacccacgagaaccacggccucaagacccgccaggagaaguggaugaccggccgcaugggcgagcgccagcuccagaagaucgagcgcugguucguccgcaaccccuucuucgccgucaccgcccucaccaucgccuaccucgucggcuccaacaugacccagcgcgucgucaucgcccuccucguccucgccgucggccccgccuacuccgcccacugcaucggcaucaccgaccgcgacuucaucgagggcguccacggcggcaccugggucuccgccacccucgagcaggacaagugcgucaccgucauggcccccgacaagcccucccucgacaucucccucgagaccgucgccaucgaccgccccgccgagguccgcaaggucugcuacaacgccguccucacccacgucaagaucaacgacaagugccccuccaccggcgaggcccaccucgccgaggagaacgagggcgacaacgccugcaagcgcaccuacuccgaccgcggcuggggcaacggcugcggccucuucggcaagggcuccaucgucgccugcgccaaguucaccugcgccaaguccaugucccucuucgaggucgaccagaccaagauccaguacgucauccgcgcccagcuccacgucggcgccaagcaggagaacuggaacaccgacaucaagacccucaaguucgacgcccucuccggcucccaggaggucgaguucaucggcuacggcaaggccacccucgagugccagguccagaccgccgucgacuucggcaacuccuacaucgccgagauggagaccgaguccuggaucgucgaccgccagugggcccaggaccucacccuccccuggcaguccggcuccggcggcgucuggcgcgagaugcaccaccucgucgaguucgagcccccccacgccgccaccauccgcguccucgcccucggcaaccaggagggcucccucaagaccgcccucaccggcgccaugcgcgucaccaaggacaccaacgacaacaaccucuacaagcuccacggcggccacgucuccugccgcgucaagcucuccgcccucacccucaagggcaccuccuacaagaucugcaccgacaagauguucuucgucaagaaccccaccgacaccggccacggcaccgucgucaugcaggucaaggucuccaagggcgcccccugccgcauccccgucaucgucgccgacgaccucaccgccgccaucaacaagggcauccucgucaccgucaaccccaucgccuccaccaacgacgacgagguccucaucgaggucaacccccccuucggcgacuccuacaucaucgucggccgcggcgacucccgccucaccuaccaguggcacaaggagggcuccuccaucggcaagcucuucacccagaccaugaagggcgucgagcgccucgccgucaugggcgacaccgccugggacuucuccuccgccggcggcuucuucaccuccgucggcaagggcauccacaccgucuucggcuccgccuuccagggccucuucggcggccucaacuggaucaccaaggucaucaugggcgccguccucaucugggucggcaucaacacccgcaacaugaccauguccauguccaugauccucgucggcgucaucaugauguuccucucccucggcgucggcgccuga

SEQ ID NO: 331 - RNA, 2076 nt, Artificial Sequence
  derived and/or modified CDS sequence (opt2) from YFV__NC_002031.1__SSjev(V4)-prME-XX (polyprotein: aa122-788)
augcucggcuccaacuccggccagcgcgucgucuucaccauccuccuccuccucgucgcccccgccuacuccgucacccucguccgcaagaaccgcuggcuccuccucaacgucaccuccgaggaccucggcaagaccuucuccgucggcaccggcaacugcaccaccaacauccucgaggccaaguacuggugccccgacuccauggaguacaacugccccaaccucuccccccgcgaggagcccgacgacaucgacugcuggugcuacggcgucgagaacguccgcgucgccuacggcaagugcgacuccgccggccgcucccgccgcucccgccgcgccaucgaccuccccacccacgagaaccacggccucaagacccgccaggagaaguggaugaccggccgcaugggcgagcgccagcuccagaagaucgagcgcugguucguccgcaaccccuucuucgccgucaccgcccucaccaucgccuaccucgucggcuccaacaugacccagcgcgucgucaucgcccuccucguccucgccgucggccccgccuacuccgcccacugcaucggcaucaccgaccgcgacuucaucgagggcguccacggcggcaccugggucuccgccacccucgagcaggacaagugcgucaccgucauggcccccgacaagcccucccucgacaucucccucgagaccgucgccaucgaccgccccgccgagguccgcaaggucugcuacaacgccguccucacccacgucaagaucaacgacaagugccccuccaccggcgaggcccaccucgccgaggagaacgagggcgacaacgccugcaagcgcaccuacuccgaccgcggcuggggcaacggcugcggccucuucggcaagggcuccaucgucgccugcgccaaguucaccugcgccaaguccaugucccucuucgaggucgaccagaccaagauccaguacgucauccgcgcccagcuccacgucggcgccaagcaggagaacuggaacaccgacaucaagacccucaaguucgacgcccucuccggcucccaggaggucgaguucaucggcuacggcaaggccacccucgagugccagguccagaccgccgucgacuucggcaacuccuacaucgccgagauggagaccgaguccuggaucgucgaccgccagugggcccaggaccucacccuccccuggcaguccggcuccggcggcgucuggcgcgagaugcaccaccucgucgaguucgagcccccccacgccgccaccauccgcguccucgcccucggcaaccaggagggcucccucaagaccgcccucaccggcgccaugcgcgucaccaaggacaccaacgacaacaaccucuacaagcuccacggcggccacgucuccugccgcgucaagcucuccgcccucacccucaagggcaccuccuacaagaucugcaccgacaagauguucuucgucaagaaccccaccgacaccggccacggcaccgucgucaugcaggucaaggucuccaagggcgcccccugccgcauccccgucaucgucgccgacgaccucaccgccgccaucaacaagggcauccucgucaccgucaaccccaucgccuccaccaacgacgacgagguccucaucgaggucaacccccccuucggcgacuccuacaucaucgucggccgcggcgacucccgccucaccuaccaguggcacaaggagggcuccuccaucggcaagcucuucacccagaccaugaagggcgucgagcgccucgccgucaugggcgacaccgccugggacuucuccuccgccggcggcuucuucaccuccgucggcaagggcauccacaccgucuucggcuccgccuuccagggccucuucggcggccucaacuggaucaccaaggucaucaugggcgccguccucaucugggucggcaucaacacccgcaacaugaccauguccauguccaugauccucgucggcgucaucaugauguuccucucccucggcgucggcgccgaccagggcugcgccaucaacuucggcaaguga

SEQ ID NO: 332 - RNA, 2064 nt, Artificial Sequence
  derived and/or modified CDS sequence (opt2) from YFV__NC_002031.1__SSjev(V4)-prME-XX (polyprotein: aa126-788)
augcucggcuccaacuccggccagcgcgucgucuucaccauccuccuccuccucgucgcccccgccuacucccgcaagaaccgcuggcuccuccucaacgucaccuccgaggaccucggcaagaccuucuccgucggcaccggcaacugcaccaccaacauccucgaggccaaguacuggugccccgacuccauggaguacaacugccccaaccucuccccccgcgaggagcccgacgacaucgacugcuggugcuacggcgucgagaacguccgcgucgccuacggcaagugcgacuccgccggccgcucccgccgcucccgccgcgccaucgaccuccccacccacgagaaccacggccucaagacccgccaggagaaguggaugaccggccgcaugggcgagcgccagcuccagaagaucgagcgcugguucguccgcaaccccuucuucgccgucaccgcccucaccaucgccuaccucgucggcuccaacaugacccagcgcgucgucaucgcccuccucguccucgccgucggccccgccuacuccgcccacugcaucggcaucaccgaccgcgacuucaucgagggcguccacggcggcaccugggucuccgccacccucgagcaggacaagugcgucaccgucauggcccccgacaagcccucccucgacaucucccucgagaccgucgccaucgaccgccccgccgagguccgcaaggucugcuacaacgccguccucacccacgucaagaucaacgacaagugccccuccaccggcgaggcccaccucgccgaggagaacgagggcgacaacgccugcaagcgcaccuacuccgaccgcggcuggggcaacggcugcggccucuucggcaagggcuccaucgucgccugcgccaaguucaccugcgccaaguccaugucccucuucgaggucgaccagaccaagauccaguacgucauccgcgcccagcuccacgucggcgccaagcaggagaacuggaacaccgacaucaagacccucaaguucgacgcccucuccggcucccaggaggucgaguucaucggcuacggcaaggccacccucgagugccagguccagaccgccgucgacuucggcaacuccuacaucgccgagauggagaccgaguccuggaucgucgaccgccagugggcccaggaccucacccuccccuggcaguccggcuccggcggcgucuggcgcgagaugcaccaccucgucgaguucgagcccccccacgccgccaccauccgcguccucgcccucggcaaccaggagggcucccucaagaccgcccucaccggcgccaugcgcgucaccaaggacaccaacgacaacaaccucuacaagcuccacggcggccacgucuccugccgcgucaagcucuccgcccucacccucaagggcaccuccuacaagaucugcaccgacaagauguucuucgucaagaaccccaccgacaccggccacggcaccgucgucaugcaggucaaggucuccaagggcgcccccugccgcauccccgucaucgucgccgacgaccucaccgccgccaucaacaagggcauccucgucaccgucaaccccaucgccuccaccaacgacgacgagguccucaucgaggucaacccccccuucggcgacuccuacaucaucgucggccgcggcgacucccgccucaccuaccaguggcacaaggagggcuccuccaucggcaagcucuucacccagaccaugaagggcgucgagcgccucgccgucaugggcgacaccgccugggacuucuccuccgccggcggcuucuucaccuccgucggcaagggcauccacaccgucuucggcuccgccuuccagggccucuucggcggccucaacuggaucaccaaggucaucaugggcgccguccucaucugggucggcaucaacacccgcaacaugaccauguccauguccaugauccucgucggcgucaucaugauguuccucucccucggcgucggcgccgaccagggcugcgccaucaacuucggcaaguga

SEQ ID NO: 333 - RNA, 2046 nt, Artificial Sequence
  derived and/or modified CDS sequence (opt2) from YFV__NC_002031.1__SSjev(V4)-prME (polyprotein: aa122-778)
augcucggcuccaacuccggccagcgcgucgucuucaccauccuccuccuccucgucgcccccgccuacuccgucacccucguccgcaagaaccgcuggcuccuccucaacgucaccuccgaggaccucggcaagaccuucuccgucggcaccggcaacugcaccaccaacauccucgaggccaaguacuggugccccgacuccauggaguacaacugccccaaccucuccccccgcgaggagcccgacgacaucgacugcuggugcuacggcgucgagaacguccgcgucgccuacggcaagugcgacuccgccggccgcucccgccgcucccgccgcgccaucgaccuccccacccacgagaaccacggccucaagacccgccaggagaaguggaugaccggccgcaugggcgagcgccagcuccagaagaucgagcgcugguucguccgcaaccccuucuucgccgucaccgcccucaccaucgccuaccucgucggcuccaacaugacccagcgcgucgucaucgcccuccucguccucgccgucggccccgccuacuccgcccacugcaucggcaucaccgaccgcgacuucaucgagggcguccacggcggcaccugggucuccgccacccucgagcaggacaagugcgucaccgucauggcccccgacaagcccucccucgacaucucccucgagaccgucgccaucgaccgccccgccgagguccgcaaggucugcuacaacgccguccucacccacgucaagaucaacgacaagugccccuccaccggcgaggcccaccucgccgaggagaacgagggcgacaacgccugcaagcgcaccuacuccgaccgcggcuggggcaacggcugcggccucuucggcaagggcuccaucgucgccugcgccaaguucaccugcgccaaguccaugucccucuucgaggucgaccagaccaagauccaguacgucauccgcgcccagcuccacgucggcgccaagcaggagaacuggaacaccgacaucaagacccucaaguucgacgcccucuccggcucccaggaggucgaguucaucggcuacggcaaggccacccucgagugccagguccagaccgccgucgacuucggcaacuccuacaucgccgagauggagaccgaguccuggaucgucgaccgccagugggcccaggaccucacccuccccuggcaguccggcuccggcggcgucuggcgcgagaugcaccaccucgucgaguucgagcccccccacgccgccaccauccgcguccucgcccucggcaaccaggagggcucccucaagaccgcccucaccggcgccaugcgcgucaccaaggacaccaacgacaacaaccucuacaagcuccacggcggccacgucuccugccgcgucaagcucuccgcccucacccucaagggcaccuccuacaagaucugcaccgacaagauguucuucgucaagaaccccaccgacaccggccacggcaccgucgucaugcaggucaaggucuccaagggcgcccccugccgcauccccgucaucgucgccgacgaccucaccgccgccaucaacaagggcauccucgucaccgucaaccccaucgccuccaccaacgacgacgagguccucaucgaggucaacccccccuucggcgacuccuacaucaucgucggccgcggcgacucccgccucaccuaccaguggcacaaggagggcuccuccaucggcaagcucuucacccagaccaugaagggcgucgagcgccucgccgucaugggcgacaccgccugggacuucuccuccgccggcggcuucuucaccuccgucggcaagggcauccacaccgucuucggcuccgccuuccagggccucuucggcggccucaacuggaucaccaaggucaucaugggcgccguccucaucugggucggcaucaacacccgcaacaugaccauguccauguccaugauccucgucggcgucaucaugauguuccucucccucggcgucggcgccuga

SEQ ID NO: 334 - RNA, 2034 nt, Artificial Sequence
  derived and/or modified CDS sequence (opt2) from YFV__NC_002031.1__SSjev(V4)-prME (polyprotein: aa126-778)
augcucggcuccaacuccggccagcgcgucgucuucaccauccuccuccuccucgucgcccccgccuacucccgcaagaaccgcuggcuccuccucaacgucaccuccgaggaccucggcaagaccuucuccgucggcaccggcaacugcaccaccaacauccucgaggccaaguacuggugccccgacuccauggaguacaacugccccaaccucuccccccgcgaggagcccgacgacaucgacugcuggugcuacggcgucgagaacguccgcgucgccuacggcaagugcgacuccgccggccgcucccgccgcucccgccgcgccaucgaccuccccacccacgagaaccacggccucaagacccgccaggagaaguggaugaccggccgcaugggcgagcgccagcuccagaagaucgagcgcugguucguccgcaaccccuucuucgccgucaccgcccucaccaucgccuaccucgucggcuccaacaugacccagcgcgucgucaucgcccuccucguccucgccgucggccccgccuacuccgcccacugcaucggcaucaccgaccgcgacuucaucgagggcguccacggcggcaccugggucuccgccacccucgagcaggacaagugcgucaccgucauggcccccgacaagcccucccucgacaucucccucgagaccgucgccaucgaccgccccgccgagguccgcaaggucugcuacaacgccguccucacccacgucaagaucaacgacaagugccccuccaccggcgaggcccaccucgccgaggagaacgagggcgacaacgccugcaagcgcaccuacuccgaccgcggcuggggcaacggcugcggccucuucggcaagggcuccaucgucgccugcgccaaguucaccugcgccaaguccaugucccucuucgaggucgaccagaccaagauccaguacgucauccgcgcccagcuccacgucggcgccaagcaggagaacuggaacaccgacaucaagacccucaaguucgacgcccucuccggcucccaggaggucgaguucaucggcuacggcaaggccacccucgagugccagguccagaccgccgucgacuucggcaacuccuacaucgccgagauggagaccgaguccuggaucgucgaccgccagugggcccaggaccucacccuccccuggcaguccggcuccggcggcgucuggcgcgagaugcaccaccucgucgaguucgagcccccccacgccgccaccauccgcguccucgcccucggcaaccaggagggcucccucaagaccgcccucaccggcgccaugcgcgucaccaaggacaccaacgacaacaaccucuacaagcuccacggcggccacgucuccugccgcgucaagcucuccgcccucacccucaagggcaccuccuacaagaucugcaccgacaagauguucuucgucaagaaccccaccgacaccggccacggcaccgucgucaugcaggucaaggucuccaagggcgcccccugccgcauccccgucaucgucgccgacgaccucaccgccgccaucaacaagggcauccucgucaccgucaaccccaucgccuccaccaacgacgacgagguccucaucgaggucaacccccccuucggcgacuccuacaucaucgucggccgcggcgacucccgccucaccuaccaguggcacaaggagggcuccuccaucggcaagcucuucacccagaccaugaagggcgucgagcgccucgccgucaugggcgacaccgccugggacuucuccuccgccggcggcuucuucaccuccgucggcaagggcauccacaccgucuucggcuccgccuuccagggccucuucggcggccucaacuggaucaccaaggucaucaugggcgccguccucaucugggucggcaucaacacccgcaacaugaccauguccauguccaugauccucgucggcgucaucaugauguuccucucccucggcgucggcgccuga

SEQ ID NO: 335 - RNA, 2049 nt, Artificial Sequence
  derived and/or modified CDS sequence (opt2) from YFV__NC_002031.1__SSjev(V5)-prME-XX (polyprotein: aa122-788)
auguggcucgucucccucgccaucgucaccgccugcgccggcgccgucacccucguccgcaagaaccgcuggcuccuccucaacgucaccuccgaggaccucggcaagaccuucuccgucggcaccggcaacugcaccaccaacauccucgaggccaaguacuggugccccgacuccauggaguacaacugccccaaccucuccccccgcgaggagcccgacgacaucgacugcuggugcuacggcgucgagaacguccgcgucgccuacggcaagugcgacuccgccggccgcucccgccgcucccgccgcgccaucgaccuccccacccacgagaaccacggccucaagacccgccaggagaaguggaugaccggccgcaugggcgagcgccagcuccagaagaucgagcgcugguucguccgcaaccccuucuucgccgucaccgcccucaccaucgccuaccucgucggcuccaacaugacccagcgcgucgucaucgcccuccucguccucgccgucggccccgccuacuccgcccacugcaucggcaucaccgaccgcgacuucaucgagggcguccacggcggcaccugggucuccgccacccucgagcaggacaagugcgucaccgucauggcccccgacaagcccucccucgacaucucccucgagaccgucgccaucgaccgccccgccgagguccgcaaggucugcuacaacgccguccucacccacgucaagaucaacgacaagugccccuccaccggcgaggcccaccucgccgaggagaacgagggcgacaacgccugcaagcgcaccuacuccgaccgcggcuggggcaacggcugcggccucuucggcaagggcuccaucgucgccugcgccaaguucaccugcgccaaguccaugucccucuucgaggucgaccagaccaagauccaguacgucauccgcgcccagcuccacgucggcgccaagcaggagaacuggaacaccgacaucaagacccucaaguucgacgcccucuccggcucccaggaggucgaguucaucggcuacggcaaggccacccucgagugccagguccagaccgccgucgacuucggcaacuccuacaucgccgagauggagaccgaguccuggaucgucgaccgccagugggcccaggaccucacccuccccuggcaguccggcuccggcggcgucuggcgcgagaugcaccaccucgucgaguucgagcccccccacgccgccaccauccgcguccucgcccucggcaaccaggagggcucccucaagaccgcccucaccggcgccaugcgcgucaccaaggacaccaacgacaacaaccucuacaagcuccacggcggccacgucuccugccgcgucaagcucuccgcccucacccucaagggcaccuccuacaagaucugcaccgacaagauguucuucgucaagaaccccaccgacaccggccacggcaccgucgucaugcaggucaaggucuccaagggcgcccccugccgcauccccgucaucgucgccgacgaccucaccgccgccaucaacaagggcauccucgucaccgucaaccccaucgccuccaccaacgacgacgagguccucaucgaggucaacccccccuucggcgacuccuacaucaucgucggccgcggcgacucccgccucaccuaccaguggcacaaggagggcuccuccaucggcaagcucuucacccagaccaugaagggcgucgagcgccucgccgucaugggcgacaccgccugggacuucuccuccgccggcggcuucuucaccuccgucggcaagggcauccacaccgucuucggcuccgccuuccagggccucuucggcggccucaacuggaucaccaaggucaucaugggcgccguccucaucugggucggcaucaacacccgcaacaugaccauguccauguccaugauccucgucggcgucaucaugauguuccucucccucggcgucggcgccgaccagggcugcgccaucaacuucggcaaguga

SEQ ID NO: 336 - RNA, 2037 nt, Artificial Sequence
  derived and/or modified CDS sequence (opt2) from YFV__NC_002031.1__SSjev(V5)-prME-XX (polyprotein: aa126-788)
auguggcucgucucccucgccaucgucaccgccugcgccggcgcccgcaagaaccgcuggcuccuccucaacgucaccuccgaggaccucggcaagaccuucuccgucggcaccggcaacugcaccaccaacauccucgaggccaaguacuggugccccgacuccauggaguacaacugccccaaccucuccccccgcgaggagcccgacgacaucgacugcuggugcuacggcgucgagaacguccgcgucgccuacggcaagugcgacuccgccggccgcucccgccgcucccgccgcgccaucgaccuccccacccacgagaaccacggccucaagacccgccaggagaaguggaugaccggccgcaugggcgagcgccagcuccagaagaucgagcgcugguucguccgcaaccccuucuucgccgucaccgcccucaccaucgccuaccucgucggcuccaacaugacccagcgcgucgucaucgcccuccucguccucgccgucggccccgccuacuccgcccacugcaucggcaucaccgaccgcgacuucaucgagggcguccacggcggcaccugggucuccgccacccucgagcaggacaagugcgucaccgucauggcccccgacaagcccucccucgacaucucccucgagaccgucgccaucgaccgccccgccgagguccgcaaggucugcuacaacgccguccucacccacgucaagaucaacgacaagugccccuccaccggcgaggcccaccucgccgaggagaacgagggcgacaacgccugcaagcgcaccuacuccgaccgcggcuggggcaacggcugcggccucuucggcaagggcuccaucgucgccugcgccaaguucaccugcgccaaguccaugucccucuucgaggucgaccagaccaagauccaguacgucauccgcgcccagcuccacgucggcgccaagcaggagaacuggaacaccgacaucaagacccucaaguucgacgcccucuccggcucccaggaggucgaguucaucggcuacggcaaggccacccucgagugccagguccagaccgccgucgacuucggcaacuccuacaucgccgagauggagaccgaguccuggaucgucgaccgccagugggcccaggaccucacccuccccuggcaguccggcuccggcggcgucuggcgcgagaugcaccaccucgucgaguucgagcccccccacgccgccaccauccgcguccucgcccucggcaaccaggagggcucccucaagaccgcccucaccggcgccaugcgcgucaccaaggacaccaacgacaacaaccucuacaagcuccacggcggccacgucuccugccgcgucaagcucuccgcccucacccucaagggcaccuccuacaagaucugcaccgacaagauguucuucgucaagaaccccaccgacaccggccacggcaccgucgucaugcaggucaaggucuccaagggcgcccccugccgcauccccgucaucgucgccgacgaccucaccgccgccaucaacaagggcauccucgucaccgucaaccccaucgccuccaccaacgacgacgagguccucaucgaggucaacccccccuucggcgacuccuacaucaucgucggccgcggcgacucccgccucaccuaccaguggcacaaggagggcuccuccaucggcaagcucuucacccagaccaugaagggcgucgagcgccucgccgucaugggcgacaccgccugggacuucuccuccgccggcggcuucuucaccuccgucggcaagggcauccacaccgucuucggcuccgccuuccagggccucuucggcggccucaacuggaucaccaaggucaucaugggcgccguccucaucugggucggcaucaacacccgcaacaugaccauguccauguccaugauccucgucggcgucaucaugauguuccucucccucggcgucggcgccgaccagggcugcgccaucaacuucggcaaguga

SEQ ID NO: 337 - RNA, 2019 nt, Artificial Sequence
  derived and/or modified CDS sequence (opt2) from YFV__NC_002031.1__SSjev(V5)-prME (polyprotein: aa122-778)
auguggcucgucucccucgccaucgucaccgccugcgccggcgccgucacccucguccgcaagaaccgcuggcuccuccucaacgucaccuccgaggaccucggcaagaccuucuccgucggcaccggcaacugcaccaccaacauccucgaggccaaguacuggugccccgacuccauggaguacaacugccccaaccucuccccccgcgaggagcccgacgacaucgacugcuggugcuacggcgucgagaacguccgcgucgccuacggcaagugcgacuccgccggccgcucccgccgcucccgccgcgccaucgaccuccccacccacgagaaccacggccucaagacccgccaggagaaguggaugaccggccgcaugggcgagcgccagcuccagaagaucgagcgcugguucguccgcaaccccuucuucgccgucaccgcccucaccaucgccuaccucgucggcuccaacaugacccagcgcgucgucaucgcccuccucguccucgccgucggccccgccuacuccgcccacugcaucggcaucaccgaccgcgacuucaucgagggcguccacggcggcaccugggucuccgccacccucgagcaggacaagugcgucaccgucauggcccccgacaagcccucccucgacaucucccucgagaccgucgccaucgaccgccccgccgagguccgcaaggucugcuacaacgccguccucacccacgucaagaucaacgacaagugccccuccaccggcgaggcccaccucgccgaggagaacgagggcgacaacgccugcaagcgcaccuacuccgaccgcggcuggggcaacggcugcggccucuucggcaagggcuccaucgucgccugcgccaaguucaccugcgccaaguccaugucccucuucgaggucgaccagaccaagauccaguacgucauccgcgcccagcuccacgucggcgccaagcaggagaacuggaacaccgacaucaagacccucaaguucgacgcccucuccggcucccaggaggucgaguucaucggcuacggcaaggccacccucgagugccagguccagaccgccgucgacuucggcaacuccuacaucgccgagauggagaccgaguccuggaucgucgaccgccagugggcccaggaccucacccuccccuggcaguccggcuccggcggcgucuggcgcgagaugcaccaccucgucgaguucgagcccccccacgccgccaccauccgcguccucgcccucggcaaccaggagggcucccucaagaccgcccucaccggcgccaugcgcgucaccaaggacaccaacgacaacaaccucuacaagcuccacggcggccacgucuccugccgcgucaagcucuccgcccucacccucaagggcaccuccuacaagaucugcaccgacaagauguucuucgucaagaaccccaccgacaccggccacggcaccgucgucaugcaggucaaggucuccaagggcgcccccugccgcauccccgucaucgucgccgacgaccucaccgccgccaucaacaagggcauccucgucaccgucaaccccaucgccuccaccaacgacgacgagguccucaucgaggucaacccccccuucggcgacuccuacaucaucgucggccgcggcgacucccgccucaccuaccaguggcacaaggagggcuccuccaucggcaagcucuucacccagaccaugaagggcgucgagcgccucgccgucaugggcgacaccgccugggacuucuccuccgccggcggcuucuucaccuccgucggcaagggcauccacaccgucuucggcuccgccuuccagggccucuucggcggccucaacuggaucaccaaggucaucaugggcgccguccucaucugggucggcaucaacacccgcaacaugaccauguccauguccaugauccucgucggcgucaucaugauguuccucucccucggcgucggcgccuga

SEQ ID NO: 338 - RNA, 2007 nt, Artificial Sequence
  derived and/or modified CDS sequence (opt2) from YFV__NC_002031.1__SSjev(V5)-prME (polyprotein: aa126-778)
auguggcucgucucccucgccaucgucaccgccugcgccggcgcccgcaagaaccgcuggcuccuccucaacgucaccuccgaggaccucggcaagaccuucuccgucggcaccggcaacugcaccaccaacauccucgaggccaaguacuggugccccgacuccauggaguacaacugccccaaccucuccccccgcgaggagcccgacgacaucgacugcuggugcuacggcgucgagaacguccgcgucgccuacggcaagugcgacuccgccggccgcucccgccgcucccgccgcgccaucgaccuccccacccacgagaaccacggccucaagacccgccaggagaaguggaugaccggccgcaugggcgagcgccagcuccagaagaucgagcgcugguucguccgcaaccccuucuucgccgucaccgcccucaccaucgccuaccucgucggcuccaacaugacccagcgcgucgucaucgcccuccucguccucgccgucggccccgccuacuccgcccacugcaucggcaucaccgaccgcgacuucaucgagggcguccacggcggcaccugggucuccgccacccucgagcaggacaagugcgucaccgucauggcccccgacaagcccucccucgacaucucccucgagaccgucgccaucgaccgccccgccgagguccgcaaggucugcuacaacgccguccucacccacgucaagaucaacgacaagugccccuccaccggcgaggcccaccucgccgaggagaacgagggcgacaacgccugcaagcgcaccuacuccgaccgcggcuggggcaacggcugcggccucuucggcaagggcuccaucgucgccugcgccaaguucaccugcgccaaguccaugucccucuucgaggucgaccagaccaagauccaguacgucauccgcgcccagcuccacgucggcgccaagcaggagaacuggaacaccgacaucaagacccucaaguucgacgcccucuccggcucccaggaggucgaguucaucggcuacggcaaggccacccucgagugccagguccagaccgccgucgacuucggcaacuccuacaucgccgagauggagaccgaguccuggaucgucgaccgccagugggcccaggaccucacccuccccuggcaguccggcuccggcggcgucuggcgcgagaugcaccaccucgucgaguucgagcccccccacgccgccaccauccgcguccucgcccucggcaaccaggagggcucccucaagaccgcccucaccggcgccaugcgcgucaccaaggacaccaacgacaacaaccucuacaagcuccacggcggccacgucuccugccgcgucaagcucuccgcccucacccucaagggcaccuccuacaagaucugcaccgacaagauguucuucgucaagaaccccaccgacaccggccacggcaccgucgucaugcaggucaaggucuccaagggcgcccccugccgcauccccgucaucgucgccgacgaccucaccgccgccaucaacaagggcauccucgucaccgucaaccccaucgccuccaccaacgacgacgagguccucaucgaggucaacccccccuucggcgacuccuacaucaucgucggccgcggcgacucccgccucaccuaccaguggcacaaggagggcuccuccaucggcaagcucuucacccagaccaugaagggcgucgagcgccucgccgucaugggcgacaccgccugggacuucuccuccgccggcggcuucuucaccuccgucggcaagggcauccacaccgucuucggcuccgccuuccagggccucuucggcggccucaacuggaucaccaaggucaucaugggcgccguccucaucugggucggcaucaacacccgcaacaugaccauguccauguccaugauccucgucggcgucaucaugauguuccucucccucggcgucggcgccuga

SEQ ID NO: 339 - RNA, 2037 nt, Artificial Sequence
  derived and/or modified CDS sequence (opt2) from YFV__NC_002031.1__SSIgE-prMEdelstem_TM-JEV (polyprotein: aa122-680)
auggacuggaccuggauccucuuccucgucgccgccgccacccgcguccacuccgucacccucguccgcaagaaccgcuggcuccuccucaacgucaccuccgaggaccucggcaagaccuucuccgucggcaccggcaacugcaccaccaacauccucgaggccaaguacuggugccccgacuccauggaguacaacugccccaaccucuccccccgcgaggagcccgacgacaucgacugcuggugcuacggcgucgagaacguccgcgucgccuacggcaagugcgacuccgccggccgcucccgccgcucccgccgcgccaucgaccuccccacccacgagaaccacggccucaagacccgccaggagaaguggaugaccggccgcaugggcgagcgccagcuccagaagaucgagcgcugguucguccgcaaccccuucuucgccgucaccgcccucaccaucgccuaccucgucggcuccaacaugacccagcgcgucgucaucgcccuccucguccucgccgucggccccgccuacuccgcccacugcaucggcaucaccgaccgcgacuucaucgagggcguccacggcggcaccugggucuccgccacccucgagcaggacaagugcgucaccgucauggcccccgacaagcccucccucgacaucucccucgagaccgucgccaucgaccgccccgccgagguccgcaaggucugcuacaacgccguccucacccacgucaagaucaacgacaagugccccuccaccggcgaggcccaccucgccgaggagaacgagggcgacaacgccugcaagcgcaccuacuccgaccgcggcuggggcaacggcugcggccucuucggcaagggcuccaucgucgccugcgccaaguucaccugcgccaaguccaugucccucuucgaggucgaccagaccaagauccaguacgucauccgcgcccagcuccacgucggcgccaagcaggagaacuggaacaccgacaucaagacccucaaguucgacgcccucuccggcucccaggaggucgaguucaucggcuacggcaaggccacccucgagugccagguccagaccgccgucgacuucggcaacuccuacaucgccgagauggagaccgaguccuggaucgucgaccgccagugggcccaggaccucacccuccccuggcaguccggcuccggcggcgucuggcgcgagaugcaccaccucgucgaguucgagcccccccacgccgccaccauccgcguccucgcccucggcaaccaggagggcucccucaagaccgcccucaccggcgccaugcgcgucaccaaggacaccaacgacaacaaccucuacaagcuccacggcggccacgucuccugccgcgucaagcucuccgcccucacccucaagggcaccuccuacaagaucugcaccgacaagauguucuucgucaagaaccccaccgacaccggccacggcaccgucgucaugcaggucaaggucuccaagggcgcccccugccgcauccccgucaucgucgccgacgaccucaccgccgccaucaacaagggcauccucgucaccgucaaccccaucgccuccaccaacgacgacgagguccucaucgaggucaacccccccuucggcgacuccuacaucaucgucggccgcggcgacucccgccucaccuaccaguggcacaaggagggcuccuccggcuccacccucggcaaggccuucuccaccacccucaagggcgcccagcgccucgccgcccucggcgacaccgccugggacuucggcuccaucggcggcgucuucaacuccaucggccgcgccguccaccaggucuucggcggcgccuuccgcacccucuucggcggcauguccuggaucacccagggccucaugggcgcccuccuccucuggaugggcgucaacgcccgcgaccgcuccaucgcccucgccuuccucgccaccggcggcguccucgucuuccucgccaccaacguccacgccuga

SEQ ID NO: 340 - RNA, 2025 nt, Artificial Sequence
  derived and/or modified CDS sequence (opt2) from YFV__NC_002031.1__SSIgE-prMEdelstem_TM-JEV (polyprotein: aa126-680)
auggacuggaccuggauccucuuccucgucgccgccgccacccgcguccacucccgcaagaaccgcuggcuccuccucaacgucaccuccgaggaccucggcaagaccuucuccgucggcaccggcaacugcaccaccaacauccucgaggccaaguacuggugccccgacuccauggaguacaacugccccaaccucuccccccgcgaggagcccgacgacaucgacugcuggugcuacggcgucgagaacguccgcgucgccuacggcaagugcgacuccgccggccgcucccgccgcucccgccgcgccaucgaccuccccacccacgagaaccacggccucaagacccgccaggagaaguggaugaccggccgcaugggcgagcgccagcuccagaagaucgagcgcugguucguccgcaaccccuucuucgccgucaccgcccucaccaucgccuaccucgucggcuccaacaugacccagcgcgucgucaucgcccuccucguccucgccgucggccccgccuacuccgcccacugcaucggcaucaccgaccgcgacuucaucgagggcguccacggcggcaccugggucuccgccacccucgagcaggacaagugcgucaccgucauggcccccgacaagcccucccucgacaucucccucgagaccgucgccaucgaccgccccgccgagguccgcaaggucugcuacaacgccguccucacccacgucaagaucaacgacaagugccccuccaccggcgaggcccaccucgccgaggagaacgagggcgacaacgccugcaagcgcaccuacuccgaccgcggcuggggcaacggcugcggccucuucggcaagggcuccaucgucgccugcgccaaguucaccugcgccaaguccaugucccucuucgaggucgaccagaccaagauccaguacgucauccgcgcccagcuccacgucggcgccaagcaggagaacuggaacaccgacaucaagacccucaaguucgacgcccucuccggcucccaggaggucgaguucaucggcuacggcaaggccacccucgagugccagguccagaccgccgucgacuucggcaacuccuacaucgccgagauggagaccgaguccuggaucgucgaccgccagugggcccaggaccucacccuccccuggcaguccggcuccggcggcgucuggcgcgagaugcaccaccucgucgaguucgagcccccccacgccgccaccauccgcguccucgcccucggcaaccaggagggcucccucaagaccgcccucaccggcgccaugcgcgucaccaaggacaccaacgacaacaaccucuacaagcuccacggcggccacgucuccugccgcgucaagcucuccgcccucacccucaagggcaccuccuacaagaucugcaccgacaagauguucuucgucaagaaccccaccgacaccggccacggcaccgucgucaugcaggucaaggucuccaagggcgcccccugccgcauccccgucaucgucgccgacgaccucaccgccgccaucaacaagggcauccucgucaccgucaaccccaucgccuccaccaacgacgacgagguccucaucgaggucaacccccccuucggcgacuccuacaucaucgucggccgcggcgacucccgccucaccuaccaguggcacaaggagggcuccuccggcuccacccucggcaaggccuucuccaccacccucaagggcgcccagcgccucgccgcccucggcgacaccgccugggacuucggcuccaucggcggcgucuucaacuccaucggccgcgccguccaccaggucuucggcggcgccuuccgcacccucuucggcggcauguccuggaucacccagggccucaugggcgcccuccuccucuggaugggcgucaacgcccgcgaccgcuccaucgcccucgccuuccucgccaccggcggcguccucgucuuccucgccaccaacguccacgccuga

SEQ ID NO: 341 - RNA, 2055 nt, Artificial Sequence
  derived and/or modified CDS sequence (opt2) from YFV__NC_002031.1__SSjev-prMEdelstem_TM-JEV (polyprotein: aa122-680)
augggcaagcgcuccgccggcuccaucauguggcucgccucccucgccgucgucaucgccugcgccggcgccgucacccucguccgcaagaaccgcuggcuccuccucaacgucaccuccgaggaccucggcaagaccuucuccgucggcaccggcaacugcaccaccaacauccucgaggccaaguacuggugccccgacuccauggaguacaacugccccaaccucuccccccgcgaggagcccgacgacaucgacugcuggugcuacggcgucgagaacguccgcgucgccuacggcaagugcgacuccgccggccgcucccgccgcucccgccgcgccaucgaccuccccacccacgagaaccacggccucaagacccgccaggagaaguggaugaccggccgcaugggcgagcgccagcuccagaagaucgagcgcugguucguccgcaaccccuucuucgccgucaccgcccucaccaucgccuaccucgucggcuccaacaugacccagcgcgucgucaucgcccuccucguccucgccgucggccccgccuacuccgcccacugcaucggcaucaccgaccgcgacuucaucgagggcguccacggcggcaccugggucuccgccacccucgagcaggacaagugcgucaccgucauggcccccgacaagcccucccucgacaucucccucgagaccgucgccaucgaccgccccgccgagguccgcaaggucugcuacaacgccguccucacccacgucaagaucaacgacaagugccccuccaccggcgaggcccaccucgccgaggagaacgagggcgacaacgccugcaagcgcaccuacuccgaccgcggcuggggcaacggcugcggccucuucggcaagggcuccaucgucgccugcgccaaguucaccugcgccaaguccaugucccucuucgaggucgaccagaccaagauccaguacgucauccgcgcccagcuccacgucggcgccaagcaggagaacuggaacaccgacaucaagacccucaaguucgacgcccucuccggcucccaggaggucgaguucaucggcuacggcaaggccacccucgagugccagguccagaccgccgucgacuucggcaacuccuacaucgccgagauggagaccgaguccuggaucgucgaccgccagugggcccaggaccucacccuccccuggcaguccggcuccggcggcgucuggcgcgagaugcaccaccucgucgaguucgagcccccccacgccgccaccauccgcguccucgcccucggcaaccaggagggcucccucaagaccgcccucaccggcgccaugcgcgucaccaaggacaccaacgacaacaaccucuacaagcuccacggcggccacgucuccugccgcgucaagcucuccgcccucacccucaagggcaccuccuacaagaucugcaccgacaagauguucuucgucaagaaccccaccgacaccggccacggcaccgucgucaugcaggucaaggucuccaagggcgcccccugccgcauccccgucaucgucgccgacgaccucaccgccgccaucaacaagggcauccucgucaccgucaaccccaucgccuccaccaacgacgacgagguccucaucgaggucaacccccccuucggcgacuccuacaucaucgucggccgcggcgacucccgccucaccuaccaguggcacaaggagggcuccuccggcuccacccucggcaaggccuucuccaccacccucaagggcgcccagcgccucgccgcccucggcgacaccgccugggacuucggcuccaucggcggcgucuucaacuccaucggccgcgccguccaccaggucuucggcggcgccuuccgcacccucuucggcggcauguccuggaucacccagggccucaugggcgcccuccuccucuggaugggcgucaacgcccgcgaccgcuccaucgcccucgccuuccucgccaccggcggcguccucgucuuccucgccaccaacguccacgccuga

SEQ ID NO: 342 - RNA, 2043 nt, Artificial Sequence
  derived and/or modified CDS sequence (opt2) from YFV__NC_002031.1__SSjev-prMEdelstem_TM-JEV (polyprotein: aa126-680)
augggcaagcgcuccgccggcuccaucauguggcucgccucccucgccgucgucaucgccugcgccggcgcccgcaagaaccgcuggcuccuccucaacgucaccuccgaggaccucggcaagaccuucuccgucggcaccggcaacugcaccaccaacauccucgaggccaaguacuggugccccgacuccauggaguacaacugccccaaccucuccccccgcgaggagcccgacgacaucgacugcuggugcuacggcgucgagaacguccgcgucgccuacggcaagugcgacuccgccggccgcucccgccgcucccgccgcgccaucgaccuccccacccacgagaaccacggccucaagacccgccaggagaaguggaugaccggccgcaugggcgagcgccagcuccagaagaucgagcgcugguucguccgcaaccccuucuucgccgucaccgcccucaccaucgccuaccucgucggcuccaacaugacccagcgcgucgucaucgcccuccucguccucgccgucggccccgccuacuccgcccacugcaucggcaucaccgaccgcgacuucaucgagggcguccacggcggcaccugggucuccgccacccucgagcaggacaagugcgucaccgucauggcccccgacaagcccucccucgacaucucccucgagaccgucgccaucgaccgccccgccgagguccgcaaggucugcuacaacgccguccucacccacgucaagaucaacgacaagugccccuccaccggcgaggcccaccucgccgaggagaacgagggcgacaacgccugcaagcgcaccuacuccgaccgcggcuggggcaacggcugcggccucuucggcaagggcuccaucgucgccugcgccaaguucaccugcgccaaguccaugucccucuucgaggucgaccagaccaagauccaguacgucauccgcgcccagcuccacgucggcgccaagcaggagaacuggaacaccgacaucaagacccucaaguucgacgcccucuccggcucccaggaggucgaguucaucggcuacggcaaggccacccucgagugccagguccagaccgccgucgacuucggcaacuccuacaucgccgagauggagaccgaguccuggaucgucgaccgccagugggcccaggaccucacccuccccuggcaguccggcuccggcggcgucuggcgcgagaugcaccaccucgucgaguucgagcccccccacgccgccaccauccgcguccucgcccucggcaaccaggagggcucccucaagaccgcccucaccggcgccaugcgcgucaccaaggacaccaacgacaacaaccucuacaagcuccacggcggccacgucuccugccgcgucaagcucuccgcccucacccucaagggcaccuccuacaagaucugcaccgacaagauguucuucgucaagaaccccaccgacaccggccacggcaccgucgucaugcaggucaaggucuccaagggcgcccccugccgcauccccgucaucgucgccgacgaccucaccgccgccaucaacaagggcauccucgucaccgucaaccccaucgccuccaccaacgacgacgagguccucaucgaggucaacccccccuucggcgacuccuacaucaucgucggccgcggcgacucccgccucaccuaccaguggcacaaggagggcuccuccggcuccacccucggcaaggccuucuccaccacccucaagggcgcccagcgccucgccgcccucggcgacaccgccugggacuucggcuccaucggcggcgucuucaacuccaucggccgcgccguccaccaggucuucggcggcgccuuccgcacccucuucggcggcauguccuggaucacccagggccucaugggcgcccuccuccucuggaugggcgucaacgcccgcgaccgcuccaucgcccucgccuuccucgccaccggcggcguccucgucuuccucgccaccaacguccacgccuga

SEQ ID NO: 343 - RNA, 2094 nt, Artificial Sequence
  derived and/or modified CDS sequence (opt3) from YFV__NC_002031.1__X-SS-prME-XX (polyprotein: aa92-788)
augagaggccugagcuccaggaagcggcgcucucacgacgugcucaccguccaguuccuuauccuggggauguuguuaaugacaggagguguuacucuggugcguaaaaaccgauggcuacuccugaauguaacgucagaggaucuuggcaagaccuuuaguguggggacaggaaacugcacuaccaauauucuggaagccaaauacuggugucccgacagcauggaguauaacugcccuaauuuguccccaagagaggaaccggaugacauagauuguuggugcuacggcgucgaaaacgugaggguugcuuaugguaagugugacucugcagggcggucgcgcagaucaaggcgggccaucgaucuccccacacaugagaaucacggacugaaaacccgccaagagaaguggaugacuggccgaaugggcgaaagacagcugcagaagauugagaggugguucgugcggaacccuuucuucgcggucacagcucucaccaucgccuacuuaguggggagcaauaugacgcagcguguaguuauugcacugcuuguguuggccgucggaccagcuuauagugcacauugcaucgguauaacugaccgcgauuuuaucgaaggcgugcacgggggaaccuggguguccgccacacuggagcaagacaaaugugucacuguuauggcucccgauaagccuucucuagacauuagccucgagaccguggccaucgauagaccagcggaaguaaggaaagugugcuacaacgcaguccugacacaugugaagauuaaugacaaaugucccuccaccggcgaggcccaccuugcugaagagaacgaaggugacaaugccugcaagcggacguauucagaucgaggguggggaaacggcuguggccuguucgggaagggaaguaucguugcaugcgcuaaauuuacuugcgccaagagcaugucuuuguucgagguggaccagacaaaaauacaguacgucauucgcgcgcagcuccacgugggugccaagcaagagaauuggaacaccgauaucaaaacucugaaguuugacgcauuauccggcucacaggaaguagaguucauuggguacggaaaagcuacacuggaaugucagguucagaccgccguggauuuuggcaacagcuauaucgcugagauggaaacggagaguuggaucgucgacagacaaugggcccaggaucucacccuuccuuggcagucugguuccgggggcguguggagggagaugcaucaccuggucgaauuugagccaccgcaugcagccacaauucggguguuggcucuaggaaaucaagaaggcagccugaagacugcgcucaccggggcaaugcgcguuacaaaggacacuaacgauaauaaccuguacaaacuucacggaggucacgugucgugcagaguaaagcugucugccuugacccucaaaggcacauccuauaagauauguaccgacaaaauguuuuucgucaagaaucccacugauacggggcauggaacagugguuaugcaagugaaggucucaaaaggcgcuccuugcaggaucccagugauuguagccgacgaccugaccgcagccaucaacaaggguauauuagugacuguuaaucccauugcuaguaccaacgaugacgagguccugaucgaagugaauccuccauucggggauagcuacaucauugugggccguggagacucccggcuaacauaucaguggcacaaagagggcucuagcaucgggaagcucuuuacccagacuaugaaaggagucgagcgacuggccguuaugggugauacagcaugggacuucucaagugcgggcggguuuuucacguccgugggaaagggcauucauaccguguuugguagcgcuuuccaggggcuuuuuggcggauugaacuggauaacuaagguaaucaugggcgccguccugauuuggguggggaucaauacaagaaacaugaccaugucuaugucaaugauccucguuggagugauuaugauguuccugagucuuggcgucggugcagaucaggggugugccauaaauuuuggaaaauga

SEQ ID NO: 344 - RNA, 2064 nt, Artificial Sequence
  derived and/or modified CDS sequence (opt3) from YFV__NC_002031.1__X-SS-prME (polyprotein: aa92-778)
augagaggccugagcuccaggaagcggcgcucucacgacgugcucaccguccaguuccuuauccuggggauguuguuaaugacaggagguguuacucuggugcguaaaaaccgauggcuacuccugaauguaacgucagaggaucuuggcaagaccuuuaguguggggacaggaaacugcacuaccaauauucuggaagccaaauacuggugucccgacagcauggaguauaacugcccuaauuuguccccaagagaggaaccggaugacauagauuguuggugcuacggcgucgaaaacgugaggguugcuuaugguaagugugacucugcagggcggucgcgcagaucaaggcgggccaucgaucuccccacacaugagaaucacggacugaaaacccgccaagagaaguggaugacuggccgaaugggcgaaagacagcugcagaagauugagaggugguucgugcggaacccuuucuucgcggucacagcucucaccaucgccuacuuaguggggagcaauaugacgcagcguguaguuauugcacugcuuguguuggccgucggaccagcuuauagugcacauugcaucgguauaacugaccgcgauuuuaucgaaggcgugcacgggggaaccuggguguccgccacacuggagcaagacaaaugugucacuguuauggcucccgauaagccuucucuagacauuagccucgagaccguggccaucgauagaccagcggaaguaaggaaagugugcuacaacgcaguccugacacaugugaagauuaaugacaaaugucccuccaccggcgaggcccaccuugcugaagagaacgaaggugacaaugccugcaagcggacguauucagaucgaggguggggaaacggcuguggccuguucgggaagggaaguaucguugcaugcgcuaaauuuacuugcgccaagagcaugucuuuguucgagguggaccagacaaaaauacaguacgucauucgcgcgcagcuccacgugggugccaagcaagagaauuggaacaccgauaucaaaacucugaaguuugacgcauuauccggcucacaggaaguagaguucauuggguacggaaaagcuacacuggaaugucagguucagaccgccguggauuuuggcaacagcuauaucgcugagauggaaacggagaguuggaucgucgacagacaaugggcccaggaucucacccuuccuuggcagucugguuccgggggcguguggagggagaugcaucaccuggucgaauuugagccaccgcaugcagccacaauucggguguuggcucuaggaaaucaagaaggcagccugaagacugcgcucaccggggcaaugcgcguuacaaaggacacuaacgauaauaaccuguacaaacuucacggaggucacgugucgugcagaguaaagcugucugccuugacccucaaaggcacauccuauaagauauguaccgacaaaauguuuuucgucaagaaucccacugauacggggcauggaacagugguuaugcaagugaaggucucaaaaggcgcuccuugcaggaucccagugauuguagccgacgaccugaccgcagccaucaacaaggguauauuagugacuguuaaucccauugcuaguaccaacgaugacgagguccugaucgaagugaauccuccauucggggauagcuacaucauugugggccguggagacucccggcuaacauaucaguggcacaaagagggcucuagcaucgggaagcucuuuacccagacuaugaaaggagucgagcgacuggccguuaugggugauacagcaugggacuucucaagugcgggcggguuuuucacguccgugggaaagggcauucauaccguguuugguagcgcuuuccaggggcuuuuuggcggauugaacuggauaacuaagguaaucaugggcgccguccugauuuggguggggaucaauacaagaaacaugaccaugucuaugucaaugauccucguuggagugauuaugauguuccugagucuuggcgucggugcauga

SEQ ID NO: 345 - RNA, 2067 nt, Artificial Sequence
  derived and/or modified CDS sequence (opt3) from YFV__NC_002031.1__SS-prME-XX (polyprotein: M,aa102-788)
augucucacgacgugcucaccguccaguuccuuauccuggggauguuguuaaugacaggagguguuacucuggugcguaaaaaccgauggcuacuccugaauguaacgucagaggaucuuggcaagaccuuuaguguggggacaggaaacugcacuaccaauauucuggaagccaaauacuggugucccgacagcauggaguauaacugcccuaauuuguccccaagagaggaaccggaugacauagauuguuggugcuacggcgucgaaaacgugaggguugcuuaugguaagugugacucugcagggcggucgcgcagaucaaggcgggccaucgaucuccccacacaugagaaucacggacugaaaacccgccaagagaaguggaugacuggccgaaugggcgaaagacagcugcagaagauugagaggugguucgugcggaacccuuucuucgcggucacagcucucaccaucgccuacuuaguggggagcaauaugacgcagcguguaguuauugcacugcuuguguuggccgucggaccagcuuauagugcacauugcaucgguauaacugaccgcgauuuuaucgaaggcgugcacgggggaaccuggguguccgccacacuggagcaagacaaaugugucacuguuauggcucccgauaagccuucucuagacauuagccucgagaccguggccaucgauagaccagcggaaguaaggaaagugugcuacaacgcaguccugacacaugugaagauuaaugacaaaugucccuccaccggcgaggcccaccuugcugaagagaacgaaggugacaaugccugcaagcggacguauucagaucgaggguggggaaacggcuguggccuguucgggaagggaaguaucguugcaugcgcuaaauuuacuugcgccaagagcaugucuuuguucgagguggaccagacaaaaauacaguacgucauucgcgcgcagcuccacgugggugccaagcaagagaauuggaacaccgauaucaaaacucugaaguuugacgcauuauccggcucacaggaaguagaguucauuggguacggaaaagcuacacuggaaugucagguucagaccgccguggauuuuggcaacagcuauaucgcugagauggaaacggagaguuggaucgucgacagacaaugggcccaggaucucacccuuccuuggcagucugguuccgggggcguguggagggagaugcaucaccuggucgaauuugagccaccgcaugcagccacaauucggguguuggcucuaggaaaucaagaaggcagccugaagacugcgcucaccggggcaaugcgcguuacaaaggacacuaacgauaauaaccuguacaaacuucacggaggucacgugucgugcagaguaaagcugucugccuugacccucaaaggcacauccuauaagauauguaccgacaaaauguuuuucgucaagaaucccacugauacggggcauggaacagugguuaugcaagugaaggucucaaaaggcgcuccuugcaggaucccagugauuguagccgacgaccugaccgcagccaucaacaaggguauauuagugacuguuaaucccauugcuaguaccaacgaugacgagguccugaucgaagugaauccuccauucggggauagcuacaucauugugggccguggagacucccggcuaacauaucaguggcacaaagagggcucuagcaucgggaagcucuuuacccagacuaugaaaggagucgagcgacuggccguuaugggugauacagcaugggacuucucaagugcgggcggguuuuucacguccgugggaaagggcauucauaccguguuugguagcgcuuuccaggggcuuuuuggcggauugaacuggauaacuaagguaaucaugggcgccguccugauuuggguggggaucaauacaagaaacaugaccaugucuaugucaaugauccucguuggagugauuaugauguuccugagucuuggcgucggugcagaucaggggugugccauaaauuuuggaaaauga

SEQ ID NO: 346 - RNA, 2061 nt, Artificial Sequence
  derived and/or modified CDS sequence (opt3) from YFV__NC_002031.1__SS-prME-XX (polyprotein: M,aa104-788)
auggacgugcucaccguccaguuccuuauccuggggauguuguuaaugacaggagguguuacucuggugcguaaaaaccgauggcuacuccugaauguaacgucagaggaucuuggcaagaccuuuaguguggggacaggaaacugcacuaccaauauucuggaagccaaauacuggugucccgacagcauggaguauaacugcccuaauuuguccccaagagaggaaccggaugacauagauuguuggugcuacggcgucgaaaacgugaggguugcuuaugguaagugugacucugcagggcggucgcgcagaucaaggcgggccaucgaucuccccacacaugagaaucacggacugaaaacccgccaagagaaguggaugacuggccgaaugggcgaaagacagcugcagaagauugagaggugguucgugcggaacccuuucuucgcggucacagcucucaccaucgccuacuuaguggggagcaauaugacgcagcguguaguuauugcacugcuuguguuggccgucggaccagcuuauagugcacauugcaucgguauaacugaccgcgauuuuaucgaaggcgugcacgggggaaccuggguguccgccacacuggagcaagacaaaugugucacuguuauggcucccgauaagccuucucuagacauuagccucgagaccguggccaucgauagaccagcggaaguaaggaaagugugcuacaacgcaguccugacacaugugaagauuaaugacaaaugucccuccaccggcgaggcccaccuugcugaagagaacgaaggugacaaugccugcaagcggacguauucagaucgaggguggggaaacggcuguggccuguucgggaagggaaguaucguugcaugcgcuaaauuuacuugcgccaagagcaugucuuuguucgagguggaccagacaaaaauacaguacgucauucgcgcgcagcuccacgugggugccaagcaagagaauuggaacaccgauaucaaaacucugaaguuugacgcauuauccggcucacaggaaguagaguucauuggguacggaaaagcuacacuggaaugucagguucagaccgccguggauuuuggcaacagcuauaucgcugagauggaaacggagaguuggaucgucgacagacaaugggcccaggaucucacccuuccuuggcagucugguuccgggggcguguggagggagaugcaucaccuggucgaauuugagccaccgcaugcagccacaauucggguguuggcucuaggaaaucaagaaggcagccugaagacugcgcucaccggggcaaugcgcguuacaaaggacacuaacgauaauaaccuguacaaacuucacggaggucacgugucgugcagaguaaagcugucugccuugacccucaaaggcacauccuauaagauauguaccgacaaaauguuuuucgucaagaaucccacugauacggggcauggaacagugguuaugcaagugaaggucucaaaaggcgcuccuugcaggaucccagugauuguagccgacgaccugaccgcagccaucaacaaggguauauuagugacuguuaaucccauugcuaguaccaacgaugacgagguccugaucgaagugaauccuccauucggggauagcuacaucauugugggccguggagacucccggcuaacauaucaguggcacaaagagggcucuagcaucgggaagcucuuuacccagacuaugaaaggagucgagcgacuggccguuaugggugauacagcaugggacuucucaagugcgggcggguuuuucacguccgugggaaagggcauucauaccguguuugguagcgcuuuccaggggcuuuuuggcggauugaacuggauaacuaagguaaucaugggcgccguccugauuuggguggggaucaauacaagaaacaugaccaugucuaugucaaugauccucguuggagugauuaugauguuccugagucuuggcgucggugcagaucaggggugugccauaaauuuuggaaaauga

SEQ ID NO: 347 - RNA, 2037 nt, Artificial Sequence
  derived and/or modified CDS sequence (opt3) from YFV__NC_002031.1__SS-prME (polyprotein: M,aa102-778)
augagccacgacgugcugaccguccaguuccucauccuuggcaugcuguugaugacagggggaguuacuuuagugagaaagaacagguggcugcuacucaauguaacguccgaggaucuggguaaaaccuuuucugugggcacagggaacugcacuaccaauauucuugaagccaaguacuggugucccgacucaauggaguauaacugcccuaaucugaguccacgggaggaaccggaugacauagauuguuggugcuacggagucgaaaacgugcgcguugcuuauggcaaaugugacagcgcaggucgaucccguagaucuaggcgggccaucgauuugcccacacaugagaaucacgggcucaagacccgccaagagaaauggaugacuggaagaaugggcgaaaggcagcugcagaagauugagcggugguucgugcgcaacccuuucuucgcggucacagcucugaccaucgccuaccucgugggcucgaauaugacgcagcgaguaguuauugcauuacuggugcuugccgucgggccagcuuauucagcacauugcaucggaauaacugacagagauuuuaucgaaggugugcacggcgggaccugggugagcgccacauuggagcaagacaagugugucacuguuauggcucccgauaaaccuagucuggacauuucccuagagaccguggccaucgauaggccagcggaaguacggaaggugugcuacaacgcaguccucacacaugugaaaauuaaugacaagugucccucuaccggagaggcccaccuggcugaagagaacgaaggcgacaaugccugcaaacguacguauagcgaucgcgguugggggaacggauguggccuuuucggcaagggguccaucguugcaugcgcuaaguuuacuugcgccaaaucaaugagucuguucgagguggaccagacaaagauacaguacgucauuagagcgcaguugcacgugggagccaaacaagagaauuggaacaccgauaucaagacucucaaauuugacgcacugagcgguucucaggaaguagaguucauuggcuacgggaaggcuacauuagaaugucagguucagaccgccguggauuuuggaaacuccuauaucgcugagauggaaacggagucauggaucgucgacaggcaaugggcccaggaucugacccucccuuggcagagcggcaguggugggguguggcgggagaugcaucaccuugucgaauuugagccaccgcaugcagccacaauucgagugcuggcuuugggcaaucaagaaggaucucuaaaaacugcgcugaccggcgcaaugcgcguuacaaaggacacuaacgauaauaaccucuacaagcugcacgggggacacguguccugcagaguaaaacuuagcgcccugaccuugaaggguacaucguauaaaauauguaccgacaagauguuuuucgucaaaaaucccacugauacgggccaugggacagugguuaugcaagugaaggucucuaagggagcuccuugcaggaucccagugauuguagccgacgaccucaccgcagccaucaacaaaggcauacuggugacuguuaaucccauugcuuccaccaacgaugacgaggucuuaaucgaagugaauccuccauucggugauucauacaucauuguggggcggggcgacagucgccugacauaucaguggcacaaggagggaagcuccaucggcaaacuauuuacccagacuaugaagggggucgagagacucgccguuaugggagauacagcaugggacuucucuagcgcggguggcuuuuucacgucaguggggaaaggcauucauaccguguuuggaagugcuuuccagggucuguuugggggccuuaacuggauaacuaagguaaucaugggagccgucuugauuugggugggcaucaauacaaggaacaugaccauguccaugagcaugauccugguuggggugauuaugauguuccucucucugggagucggcgcauga

SEQ ID NO: 348 - RNA, 2031 nt, Artificial Sequence
  derived and/or modified CDS sequence (opt3) from YFV__NC_002031.1__SS-prME (polyprotein: M,aa104-778)
auggacgugcugaccguccaguuccucauccuuggcaugcuguugaugacagggggaguuacuuuagugagaaagaacagguggcugcuacucaauguaacgagcgaggaucuggguaaaaccuuuuccgugggcacagggaacugcacuaccaauauucuugaagccaaguacuggugucccgacucuauggaguauaacugcccuaaucugucaccacgggaggaaccggaugacauagauuguuggugcuacggagucgaaaacgugcgcguugcuuauggcaaaugugacagugcaggucgaagccguagauccaggcgggccaucgauuugcccacacacgagaaucaugggcucaagacccgccaagagaaauggaugacuggaagaaugggcgaaaggcagcugcagaagauugagcggugguucgugcgcaacccuuucuucgcggucacagcucugaccaucgccuaccucgugggcucuaauaugacgcagcgaguaguuauugcauuacuggugcuugccgucgggccagcuuauucggcacacugcaucggaauaacugacagagauuuuaucgaaggugugcauggcgggaccugggugucagccacauuggagcaagacaagugugucacuguuauggcucccgauaaaccuagccuggacauuagucuagagaccguggccaucgauaggccagcggaaguacggaaggugugcuacaacgcaguccucacacacgugaaaauuaaugacaagugucccuccaccggagaggcccaucuggcugaagagaacgaaggcgacaaugccugcaaacguacguauucugaucgcgguugggggaacggauguggccuuuucggcaaggggagcaucguugcaugcgcuaaguuuacuugcgccaaauccaugucacuguucgagguggaccagacaaagauacaguacgucauuagagcgcaguugcacgugggagccaaacaagagaauuggaacaccgauaucaagacucucaaauuugacgcacugagugguagccaggaaguagaguucauuggcuacgggaaggcuacauuagaaugucagguucagaccgccguggauuuuggaaacucuuauaucgcugagauggaaacggaguccuggaucgucgacaggcaaugggcccaggaucugacccucccuuggcagucaggcagcggugggguguggcgggagaugcaccaucuugucgaauuugagccaccgcacgcagccacaauucgagugcuggcuuugggcaaucaagaaggaagucuaaaaacugcgcugaccggcgcaaugcgcguuacaaaggacacuaacgauaauaaccucuacaagcugcaugggggacacgugucuugcagaguaaaacuuuccgcccugaccuugaaggguacaagcuauaaaauauguaccgacaagauguuuuucgucaaaaaucccacugauacgggccacgggacagugguuaugcaagugaaggucucgaagggagcuccuugcaggaucccagugauuguagccgacgaccucaccgcagccaucaacaaaggcauacuggugacuguuaaucccauugcuucuaccaacgaugacgaggucuuaaucgaagugaauccuccauucggugauuccuacaucauuguggggcggggcgacucacgccugacauaucaguggcauaaggagggaaguagcaucggcaaacuauuuacccagacuaugaagggggucgagagacucgccguuaugggagauacagcaugggacuucuccucugcggguggcuuuuucacgagcguggggaaaggcauucacaccguguuuggaucagcuuuccagggucuguuugggggccuuaacuggauaacuaagguaaucaugggagccgucuugauuugggugggcaucaauacaaggaacaugaccaugaguauguccaugauccugguuggggugauuaugauguuccucagccugggagucggcgcauga

SEQ ID NO: 349 - RNA, 2073 nt, Artificial Sequence
  derived and/or modified CDS sequence (opt3) from YFV__NC_002031.1__X-SS-prMEdelstem_TM-JEV (polyprotein: aa92-680)
augagaggccugagcuccaggaagcggcgcucucacgacgugcucaccguccaguuccuuauccuggggauguuguuaaugacaggagguguuacucuggugcguaaaaaccgauggcuacuccugaauguaacgucagaggaucuuggcaagaccuuuaguguggggacaggaaacugcacuaccaauauucuggaagccaaauacuggugucccgacagcauggaguauaacugcccuaauuuguccccaagagaggaaccggaugacauagauuguuggugcuacggcgucgaaaacgugaggguugcuuaugguaagugugacucugcagggcggucgcgcagaucaaggcgggccaucgaucuccccacacaugagaaucacggacugaaaacccgccaagagaaguggaugacuggccgaaugggcgaaagacagcugcagaagauugagaggugguucgugcggaacccuuucuucgcggucacagcucucaccaucgccuacuuaguggggagcaauaugacgcagcguguaguuauugcacugcuuguguuggccgucggaccagcuuauagugcacauugcaucgguauaacugaccgcgauuuuaucgaaggcgugcacgggggaaccuggguguccgccacacuggagcaagacaaaugugucacuguuauggcucccgauaagccuucucuagacauuagccucgagaccguggccaucgauagaccagcggaaguaaggaaagugugcuacaacgcaguccugacacaugugaagauuaaugacaaaugucccuccaccggcgaggcccaccuugcugaagagaacgaaggugacaaugccugcaagcggacguauucagaucgaggguggggaaacggcuguggccuguucgggaagggaaguaucguugcaugcgcuaaauuuacuugcgccaagagcaugucuuuguucgagguggaccagacaaaaauacaguacgucauucgcgcgcagcuccacgugggugccaagcaagagaauuggaacaccgauaucaaaacucugaaguuugacgcauuauccggcucacaggaaguagaguucauuggguacggaaaagcuacacuggaaugucagguucagaccgccguggauuuuggcaacagcuauaucgcugagauggaaacggagaguuggaucgucgacagacaaugggcccaggaucucacccuuccuuggcagucugguuccgggggcguguggagggagaugcaucaccuggucgaauuugagccaccgcaugcagccacaauucggguguuggcucuaggaaaucaagaaggcagccugaagacugcgcucaccggggcaaugcgcguuacaaaggacacuaacgauaauaaccuguacaaacuucacggaggucacgugucgugcagaguaaagcugucugccuugacccucaaaggcacauccuauaagauauguaccgacaaaauguuuuucgucaagaaucccacugauacggggcauggaacagugguuaugcaagugaaggucucaaaaggcgcuccuugcaggaucccagugauuguagccgacgaccugaccgcagccaucaacaaggguauauuagugacuguuaaucccauugcuaguaccaacgaugacgagguccugaucgaagugaauccuccauucggggauagcuacaucauugugggccguggagacucccggcuaacauaucaguggcacaaagagggcucuagcggcagcacccuggggaaggccuucuccacaacucucaaaggagcucagagacuugcagcccugggugacacggcgugggauuuuggcucuaucgggggaguguucaacucaauuggcagggcuguccaccaaguuuuugguggggccuuccggaccuuguuuggaggcaugaguuggauaacacagggcuuaaugggggcacugcuacucuggaugggagugaaugcccgcgaccgaagcaucgcucuggcauuccuugccacugguggcguacugguguuuuuggcuaccaacguccaugccuga

SEQ ID NO: 350 - RNA, 2046 nt, Artificial Sequence
  derived and/or modified CDS sequence (opt3) from YFV__NC_002031.1__SS-prMEdelstem_TM-JEV (polyprotein: M,aa102-680)
augagccacgacgugcugaccguccaguuccucauccuuggcaugcuguugaugacagggggaguuacuuuagugagaaagaacagguggcugcuacucaauguaacguccgaggaucuggguaaaaccuuuucugugggcacagggaacugcacuaccaauauucuugaagccaaguacuggugucccgacucaauggaguauaacugcccuaaucugaguccacgggaggaaccggaugacauagauuguuggugcuacggagucgaaaacgugcgcguugcuuauggcaaaugugacagcgcaggucgaucccguagaucuaggcgggccaucgauuugcccacacaugagaaucacgggcucaagacccgccaagagaaauggaugacuggaagaaugggcgaaaggcagcugcagaagauugagcggugguucgugcgcaacccuuucuucgcggucacagcucugaccaucgccuaccucgugggcucgaauaugacgcagcgaguaguuauugcauuacuggugcuugccgucgggccagcuuauucagcacauugcaucggaauaacugacagagauuuuaucgaaggugugcacggcgggaccugggugagcgccacauuggagcaagacaagugugucacuguuauggcucccgauaaaccuagucuggacauuucccuagagaccguggccaucgauaggccagcggaaguacggaaggugugcuacaacgcaguccucacacaugugaaaauuaaugacaagugucccucuaccggagaggcccaccuggcugaagagaacgaaggcgacaaugccugcaaacguacguauagcgaucgcgguugggggaacggauguggccuuuucggcaagggguccaucguugcaugcgcuaaguuuacuugcgccaaaucaaugagucuguucgagguggaccagacaaagauacaguacgucauuagagcgcaguugcacgugggagccaaacaagagaauuggaacaccgauaucaagacucucaaauuugacgcacugagcgguucucaggaaguagaguucauuggcuacgggaaggcuacauuagaaugucagguucagaccgccguggauuuuggaaacuccuauaucgcugagauggaaacggagucauggaucgucgacaggcaaugggcccaggaucugacccucccuuggcagagcggcaguggugggguguggcgggagaugcaucaccuugucgaauuugagccaccgcaugcagccacaauucgagugcuggcuuugggcaaucaagaaggaucucuaaaaacugcgcugaccggcgcaaugcgcguuacaaaggacacuaacgauaauaaccucuacaagcugcacgggggacacguguccugcagaguaaaacuuagcgcccugaccuugaaggguacaucguauaaaauauguaccgacaagauguuuuucgucaaaaaucccacugauacgggccaugggacagugguuaugcaagugaaggucucuaagggagcuccuugcaggaucccagugauuguagccgacgaccucaccgcagccaucaacaaaggcauacuggugacuguuaaucccauugcuuccaccaacgaugacgaggucuuaaucgaagugaauccuccauucggugauucauacaucauuguggggcggggcgacagucgccugacauaucaguggcacaaggagggaagcuccggcagcacccuggggaaggccuucuccacaacucucaaaggagcucagagacuugcagcccugggugacacggcgugggauuuuggcucuaucgggggaguguucaacucaauuggcagggcuguccaccaaguuuuugguggggccuuccggaccuuguuuggaggcaugaguuggauaacacagggcuuaaugggggcacugcuacucuggaugggagugaaugcccgcgaccgaagcaucgcucuggcauuccuugccacugguggcguacugguguuuuuggcuaccaacguccaugccuga

SEQ ID NO: 351 - RNA, 2040 nt, Artificial Sequence
  derived and/or modified CDS sequence (opt3) from YFV__NC_002031.1__SS-prMEdelstem_TM-JEV (polyprotein: M,aa104-680)
auggacgugcugaccguccaguuccucauccuuggcaugcuguugaugacagggggaguuacuuuagugagaaagaacagguggcugcuacucaauguaacgagcgaggaucuggguaaaaccuuuuccgugggcacagggaacugcacuaccaauauucuugaagccaaguacuggugucccgacucuauggaguauaacugcccuaaucugucaccacgggaggaaccggaugacauagauuguuggugcuacggagucgaaaacgugcgcguugcuuauggcaaaugugacagugcaggucgaagccguagauccaggcgggccaucgauuugcccacacacgagaaucaugggcucaagacccgccaagagaaauggaugacuggaagaaugggcgaaaggcagcugcagaagauugagcggugguucgugcgcaacccuuucuucgcggucacagcucugaccaucgccuaccucgugggcucuaauaugacgcagcgaguaguuauugcauuacuggugcuugccgucgggccagcuuauucggcacacugcaucggaauaacugacagagauuuuaucgaaggugugcauggcgggaccugggugucagccacauuggagcaagacaagugugucacuguuauggcucccgauaaaccuagccuggacauuagucuagagaccguggccaucgauaggccagcggaaguacggaaggugugcuacaacgcaguccucacacacgugaaaauuaaugacaagugucccuccaccggagaggcccaucuggcugaagagaacgaaggcgacaaugccugcaaacguacguauucugaucgcgguugggggaacggauguggccuuuucggcaaggggagcaucguugcaugcgcuaaguuuacuugcgccaaauccaugucacuguucgagguggaccagacaaagauacaguacgucauuagagcgcaguugcacgugggagccaaacaagagaauuggaacaccgauaucaagacucucaaauuugacgcacugagugguagccaggaaguagaguucauuggcuacgggaaggcuacauuagaaugucagguucagaccgccguggauuuuggaaacucuuauaucgcugagauggaaacggaguccuggaucgucgacaggcaaugggcccaggaucugacccucccuuggcagucaggcagcggugggguguggcgggagaugcaccaucuugucgaauuugagccaccgcacgcagccacaauucgagugcuggcuuugggcaaucaagaaggaagucuaaaaacugcgcugaccggcgcaaugcgcguuacaaaggacacuaacgauaauaaccucuacaagcugcaugggggacacgugucuugcagaguaaaacuuuccgcccugaccuugaaggguacaagcuauaaaauauguaccgacaagauguuuuucgucaaaaaucccacugauacgggccacgggacagugguuaugcaagugaaggucucgaagggagcuccuugcaggaucccagugauuguagccgacgaccucaccgcagccaucaacaaaggcauacuggugacuguuaaucccauugcuucuaccaacgaugacgaggucuuaaucgaagugaauccuccauucggugauuccuacaucauuguggggcggggcgacucacgccugacauaucaguggcauaaggagggaaguagcggcagcacccuggggaaggccuucuccacaacucucaaaggagcucagagacuugcagcccugggugacacggcgugggauuuuggcucuaucgggggaguguucaacucaauuggcagggcuguccaccaaguuuuugguggggccuuccggaccuuguuuggaggcaugaguuggauaacacagggcuuaaugggggcacugcuacucuggaugggagugaaugcccgcgaccgaagcaucgcucuggcauuccuugccacugguggcguacugguguuuuuggcuaccaacguccaugccuga

SEQ ID NO: 352 - RNA, 2058 nt, Artificial Sequence
  derived and/or modified CDS sequence (opt3) from YFV__NC_002031.1__SSIgE-prME-XX (polyprotein: aa122-788)
auggacuggaccuggauccuguuccucguggccgcugcaacaagaguccacagcguuacucuggugcguaaaaaccgauggcuacuccugaauguaacgucagaggaucuuggcaagaccuuuaguguggggacaggaaacugcacuaccaauauucuggaagccaaauacuggugucccgacagcauggaguauaacugcccuaauuuguccccaagagaggaaccggaugacauagauuguuggugcuacggcgucgaaaacgugaggguugcuuaugguaagugugacucugcagggcggucgcgcagaucaaggcgggccaucgaucuccccacacaugagaaucacggacugaaaacccgccaagagaaguggaugacuggccgaaugggcgaaagacagcugcagaagauugagaggugguucgugcggaacccuuucuucgcggucacagcucucaccaucgccuacuuaguggggagcaauaugacgcagcguguaguuauugcacugcuuguguuggccgucggaccagcuuauagugcacauugcaucgguauaacugaccgcgauuuuaucgaaggcgugcacgggggaaccuggguguccgccacacuggagcaagacaaaugugucacuguuauggcucccgauaagccuucucuagacauuagccucgagaccguggccaucgauagaccagcggaaguaaggaaagugugcuacaacgcaguccugacacaugugaagauuaaugacaaaugucccuccaccggcgaggcccaccuugcugaagagaacgaaggugacaaugccugcaagcggacguauucagaucgaggguggggaaacggcuguggccuguucgggaagggaaguaucguugcaugcgcuaaauuuacuugcgccaagagcaugucuuuguucgagguggaccagacaaaaauacaguacgucauucgcgcgcagcuccacgugggugccaagcaagagaauuggaacaccgauaucaaaacucugaaguuugacgcauuauccggcucacaggaaguagaguucauuggguacggaaaagcuacacuggaaugucagguucagaccgccguggauuuuggcaacagcuauaucgcugagauggaaacggagaguuggaucgucgacagacaaugggcccaggaucucacccuuccuuggcagucugguuccgggggcguguggagggagaugcaucaccuggucgaauuugagccaccgcaugcagccacaauucggguguuggcucuaggaaaucaagaaggcagccugaagacugcgcucaccggggcaaugcgcguuacaaaggacacuaacgauaauaaccuguacaaacuucacggaggucacgugucgugcagaguaaagcugucugccuugacccucaaaggcacauccuauaagauauguaccgacaaaauguuuuucgucaagaaucccacugauacggggcauggaacagugguuaugcaagugaaggucucaaaaggcgcuccuugcaggaucccagugauuguagccgacgaccugaccgcagccaucaacaaggguauauuagugacuguuaaucccauugcuaguaccaacgaugacgagguccugaucgaagugaauccuccauucggggauagcuacaucauugugggccguggagacucccggcuaacauaucaguggcacaaagagggcucuagcaucgggaagcucuuuacccagacuaugaaaggagucgagcgacuggccguuaugggugauacagcaugggacuucucaagugcgggcggguuuuucacguccgugggaaagggcauucauaccguguuugguagcgcuuuccaggggcuuuuuggcggauugaacuggauaacuaagguaaucaugggcgccguccugauuuggguggggaucaauacaagaaacaugaccaugucuaugucaaugauccucguuggagugauuaugauguuccugagucuuggcgucggugcagaucaggggugugccauaaauuuuggaaaauga

SEQ ID NO: 353 - RNA, 2046 nt, Artificial Sequence
  derived and/or modified CDS sequence (opt3) from YFV__NC_002031.1__SSIgE-prME-XX (polyprotein: aa126-788)
auggacuggaccuggauccuguuccucguggccgcugcaacaagaguccacagccguaaaaaccgauggcuacuccugaauguaacgucagaggaucuuggcaagaccuuuaguguggggacaggaaacugcacuaccaauauucuggaagccaaauacuggugucccgacagcauggaguauaacugcccuaauuuguccccaagagaggaaccggaugacauagauuguuggugcuacggcgucgaaaacgugaggguugcuuaugguaagugugacucugcagggcggucgcgcagaucaaggcgggccaucgaucuccccacacaugagaaucacggacugaaaacccgccaagagaaguggaugacuggccgaaugggcgaaagacagcugcagaagauugagaggugguucgugcggaacccuuucuucgcggucacagcucucaccaucgccuacuuaguggggagcaauaugacgcagcguguaguuauugcacugcuuguguuggccgucggaccagcuuauagugcacauugcaucgguauaacugaccgcgauuuuaucgaaggcgugcacgggggaaccuggguguccgccacacuggagcaagacaaaugugucacuguuauggcucccgauaagccuucucuagacauuagccucgagaccguggccaucgauagaccagcggaaguaaggaaagugugcuacaacgcaguccugacacaugugaagauuaaugacaaaugucccuccaccggcgaggcccaccuugcugaagagaacgaaggugacaaugccugcaagcggacguauucagaucgaggguggggaaacggcuguggccuguucgggaagggaaguaucguugcaugcgcuaaauuuacuugcgccaagagcaugucuuuguucgagguggaccagacaaaaauacaguacgucauucgcgcgcagcuccacgugggugccaagcaagagaauuggaacaccgauaucaaaacucugaaguuugacgcauuauccggcucacaggaaguagaguucauuggguacggaaaagcuacacuggaaugucagguucagaccgccguggauuuuggcaacagcuauaucgcugagauggaaacggagaguuggaucgucgacagacaaugggcccaggaucucacccuuccuuggcagucugguuccgggggcguguggagggagaugcaucaccuggucgaauuugagccaccgcaugcagccacaauucggguguuggcucuaggaaaucaagaaggcagccugaagacugcgcucaccggggcaaugcgcguuacaaaggacacuaacgauaauaaccuguacaaacuucacggaggucacgugucgugcagaguaaagcugucugccuugacccucaaaggcacauccuauaagauauguaccgacaaaauguuuuucgucaagaaucccacugauacggggcauggaacagugguuaugcaagugaaggucucaaaaggcgcuccuugcaggaucccagugauuguagccgacgaccugaccgcagccaucaacaaggguauauuagugacuguuaaucccauugcuaguaccaacgaugacgagguccugaucgaagugaauccuccauucggggauagcuacaucauugugggccguggagacucccggcuaacauaucaguggcacaaagagggcucuagcaucgggaagcucuuuacccagacuaugaaaggagucgagcgacuggccguuaugggugauacagcaugggacuucucaagugcgggcggguuuuucacguccgugggaaagggcauucauaccguguuugguagcgcuuuccaggggcuuuuuggcggauugaacuggauaacuaagguaaucaugggcgccguccugauuuggguggggaucaauacaagaaacaugaccaugucuaugucaaugauccucguuggagugauuaugauguuccugagucuuggcgucggugcagaucaggggugugccauaaauuuuggaaaauga

SEQ ID NO: 354 - RNA, 2028 nt, Artificial Sequence
  derived and/or modified CDS sequence (opt3) from YFV__NC_002031.1__SSIgE-prME (polyprotein: aa122-778)
auggacuggaccuggauccuguuccucguggccgcugcaacaagaguccacagcgugacccuggucagaaagaacagguggcuccuucugaauguuacaagcgaggacuugggcaaaacuuucuccguggggacgggaaacugcaccacaaauaucuuagaagccaaguacuggugucccgauucuauggaguauaacugcccuaaucugucaccacgggaggaaccggacgauauugacuguuggugcuacgguguagaaaacgugcgcgucgcuuauggcaaaugugauagugcagggcgaagccguagauccaggcgggccauagaccuacccacucacgagaaucauggacucaagacccgccaggagaaauggaugacaggcagaaugggugaaaggcaacugcagaagaucgagcggugguuugugcgcaacccuuucuuugcgguuaccgcucuuacuauugccuaccugguggggucuaauaugacacagcgagucgugaucgcauugcucguacuggccguuggaccagcuuauucggcacacugcauuggcaucaccgauagagacuucauagaaggcgugcaugggggaacgugggucucagccacucuggagcaggauaagugugugaccgugauggcucccgacaaaccuagccucgauaucaguuuagagacagucgccauugacaggccagcggaaguucggaaggugugcuacaacgcaguacugacucacgugaaaaucaaugauaagugucccuccaccggugaggcccaucuugcugaagagaacgaaggcgacaaugccugcaaacguacauauucugaccgcggguggggaaacggcugugguuuguuugggaagggaagcauugucgcaugcgcuaaguuuaccugcgccaaauccaugucacuguucgagguggaucaaacgaagauccaguacguuauaagagcgcagcuacacgugggcgccaaacaggagaauuggaacacugacauuaagacacucaaauucgaugcacugaguggcagccaagaagucgaguuuaucggguacggaaaggcuacccuugaaugucaggugcagacugccguagacuucgguaacucuuauauugcugagauggaaacagaguccuggaucguugauaggcagugggcccaagaccugaccuugccuuggcagucaggcagcgggggaguguggcgggagaugcaccaucucgucgaauuugagccaccgcacgcagccacgauccgagugcuggcuuuaggcaaucaggaagguagucugaaaaccgcgcucacaggggcaaugcgcgucacuaaggauaccaacgacaauaaccuuuacaagcugcauggcggacacgugucuugcagaguuaaauuguccgcccuaacacugaagggcacuagcuauaaaauuuguaccgauaagauguucuuugugaaaaaucccacagacaccgggcacggaacuguagucaugcaagugaagguuucgaagggugcuccuugcaggauaccagugaucgucgccgaugaccucacggcagccauuaacaaaggcauccuggugacaguaaaucccauagcuucuaccaacgacgaugaggugcuuauugaaguuaauccuccauucggggacuccuacaucaucgucggacggggcgauucacgccugacuuaucaguggcauaaggaggguaguagcauugggaaauuguucacccagacaaugaagggcguggagagacucgccgugaugggagacaccgcaugggauuuuuccucugcgggcggguucuuuacuagcgucggaaaagguauccacacaguuuucggcucagcuuuucaggggcuguucggaggcuuaaacuggauuacgaaggugauaaugggugccgugcugaucuggguagggauuaauaccaggaacaugacuaugaguauguccaugauccuagucggcgugaucaugauguuucucagccugggaguuggcgcauga

SEQ ID NO: 355 - RNA, 2016 nt, Artificial Sequence
  derived and/or modified CDS sequence (opt3) from YFV__NC_002031.1__SSIgE-prME (polyprotein: aa126-778)
auggacuggaccuggauccuguuccucguggccgcugcaacaagaguccacagcagaaagaacagguggcuccuucugaauguuacaagcgaggacuugggcaaaacuuucuccguggggacgggaaacugcaccacaaauaucuuagaagccaaguacuggugucccgauucuauggaguauaacugcccuaaucugucaccacgggaggaaccggacgauauugacuguuggugcuacgguguagaaaacgugcgcgucgcuuauggcaaaugugauagugcagggcgaagccguagauccaggcgggccauagaccuacccacucacgagaaucauggacucaagacccgccaggagaaauggaugacaggcagaaugggugaaaggcaacugcagaagaucgagcggugguuugugcgcaacccuuucuuugcgguuaccgcucuuacuauugccuaccugguggggucuaauaugacacagcgagucgugaucgcauugcucguacuggccguuggaccagcuuauucggcacacugcauuggcaucaccgauagagacuucauagaaggcgugcaugggggaacgugggucucagccacucuggagcaggauaagugugugaccgugauggcucccgacaaaccuagccucgauaucaguuuagagacagucgccauugacaggccagcggaaguucggaaggugugcuacaacgcaguacugacucacgugaaaaucaaugauaagugucccuccaccggugaggcccaucuugcugaagagaacgaaggcgacaaugccugcaaacguacauauucugaccgcggguggggaaacggcugugguuuguuugggaagggaagcauugucgcaugcgcuaaguuuaccugcgccaaauccaugucacuguucgagguggaucaaacgaagauccaguacguuauaagagcgcagcuacacgugggcgccaaacaggagaauuggaacacugacauuaagacacucaaauucgaugcacugaguggcagccaagaagucgaguuuaucggguacggaaaggcuacccuugaaugucaggugcagacugccguagacuucgguaacucuuauauugcugagauggaaacagaguccuggaucguugauaggcagugggcccaagaccugaccuugccuuggcagucaggcagcgggggaguguggcgggagaugcaccaucucgucgaauuugagccaccgcacgcagccacgauccgagugcuggcuuuaggcaaucaggaagguagucugaaaaccgcgcucacaggggcaaugcgcgucacuaaggauaccaacgacaauaaccuuuacaagcugcauggcggacacgugucuugcagaguuaaauuguccgcccuaacacugaagggcacuagcuauaaaauuuguaccgauaagauguucuuugugaaaaaucccacagacaccgggcacggaacuguagucaugcaagugaagguuucgaagggugcuccuugcaggauaccagugaucgucgccgaugaccucacggcagccauuaacaaaggcauccuggugacaguaaaucccauagcuucuaccaacgacgaugaggugcuuauugaaguuaauccuccauucggggacuccuacaucaucgucggacggggcgauucacgccugacuuaucaguggcauaaggaggguaguagcauugggaaauuguucacccagacaaugaagggcguggagagacucgccgugaugggagacaccgcaugggauuuuuccucugcgggcggguucuuuacuagcgucggaaaagguauccacacaguuuucggcucagcuuuucaggggcuguucggaggcuuaaacuggauuacgaaggugauaaugggugccgugcugaucuggguagggauuaauaccaggaacaugacuaugaguauguccaugauccuagucggcgugaucaugauguuucucagccugggaguuggcgcauga

SEQ ID NO: 356 - RNA, 2076 nt, Artificial Sequence
  derived and/or modified CDS sequence (opt3) from YFV__NC_002031.1__SSjev-prME-XX (polyprotein: aa122-788)
augggcaagagaagcgccggguccaucauguggcuggcuucucucgcaguggucauugccugcgcgggagcuguuacucuggugcguaaaaaccgauggcuacuccugaauguaacgucagaggaucuuggcaagaccuuuaguguggggacaggaaacugcacuaccaauauucuggaagccaaauacuggugucccgacagcauggaguauaacugcccuaauuuguccccaagagaggaaccggaugacauagauuguuggugcuacggcgucgaaaacgugaggguugcuuaugguaagugugacucugcagggcggucgcgcagaucaaggcgggccaucgaucuccccacacaugagaaucacggacugaaaacccgccaagagaaguggaugacuggccgaaugggcgaaagacagcugcagaagauugagaggugguucgugcggaacccuuucuucgcggucacagcucucaccaucgccuacuuaguggggagcaauaugacgcagcguguaguuauugcacugcuuguguuggccgucggaccagcuuauagugcacauugcaucgguauaacugaccgcgauuuuaucgaaggcgugcacgggggaaccuggguguccgccacacuggagcaagacaaaugugucacuguuauggcucccgauaagccuucucuagacauuagccucgagaccguggccaucgauagaccagcggaaguaaggaaagugugcuacaacgcaguccugacacaugugaagauuaaugacaaaugucccuccaccggcgaggcccaccuugcugaagagaacgaaggugacaaugccugcaagcggacguauucagaucgaggguggggaaacggcuguggccuguucgggaagggaaguaucguugcaugcgcuaaauuuacuugcgccaagagcaugucuuuguucgagguggaccagacaaaaauacaguacgucauucgcgcgcagcuccacgugggugccaagcaagagaauuggaacaccgauaucaaaacucugaaguuugacgcauuauccggcucacaggaaguagaguucauuggguacggaaaagcuacacuggaaugucagguucagaccgccguggauuuuggcaacagcuauaucgcugagauggaaacggagaguuggaucgucgacagacaaugggcccaggaucucacccuuccuuggcagucugguuccgggggcguguggagggagaugcaucaccuggucgaauuugagccaccgcaugcagccacaauucggguguuggcucuaggaaaucaagaaggcagccugaagacugcgcucaccggggcaaugcgcguuacaaaggacacuaacgauaauaaccuguacaaacuucacggaggucacgugucgugcagaguaaagcugucugccuugacccucaaaggcacauccuauaagauauguaccgacaaaauguuuuucgucaagaaucccacugauacggggcauggaacagugguuaugcaagugaaggucucaaaaggcgcuccuugcaggaucccagugauuguagccgacgaccugaccgcagccaucaacaaggguauauuagugacuguuaaucccauugcuaguaccaacgaugacgagguccugaucgaagugaauccuccauucggggauagcuacaucauugugggccguggagacucccggcuaacauaucaguggcacaaagagggcucuagcaucgggaagcucuuuacccagacuaugaaaggagucgagcgacuggccguuaugggugauacagcaugggacuucucaagugcgggcggguuuuucacguccgugggaaagggcauucauaccguguuugguagcgcuuuccaggggcuuuuuggcggauugaacuggauaacuaagguaaucaugggcgccguccugauuuggguggggaucaauacaagaaacaugaccaugucuaugucaaugauccucguuggagugauuaugauguuccugagucuuggcgucggugcagaucaggggugugccauaaauuuuggaaaauga

SEQ ID NO: 357 - RNA, 2064 nt, Artificial Sequence
  derived and/or modified CDS sequence (opt3) from YFV__NC_002031.1__SSjev-prME-XX (polyprotein: aa126-788)
augggcaagagaagcgccggguccaucauguggcuggcuucucucgcaguggucauugccugcgcgggagcucguaaaaaccgauggcuacuccugaauguaacgucagaggaucuuggcaagaccuuuaguguggggacaggaaacugcacuaccaauauucuggaagccaaauacuggugucccgacagcauggaguauaacugcccuaauuuguccccaagagaggaaccggaugacauagauuguuggugcuacggcgucgaaaacgugaggguugcuuaugguaagugugacucugcagggcggucgcgcagaucaaggcgggccaucgaucuccccacacaugagaaucacggacugaaaacccgccaagagaaguggaugacuggccgaaugggcgaaagacagcugcagaagauugagaggugguucgugcggaacccuuucuucgcggucacagcucucaccaucgccuacuuaguggggagcaauaugacgcagcguguaguuauugcacugcuuguguuggccgucggaccagcuuauagugcacauugcaucgguauaacugaccgcgauuuuaucgaaggcgugcacgggggaaccuggguguccgccacacuggagcaagacaaaugugucacuguuauggcucccgauaagccuucucuagacauuagccucgagaccguggccaucgauagaccagcggaaguaaggaaagugugcuacaacgcaguccugacacaugugaagauuaaugacaaaugucccuccaccggcgaggcccaccuugcugaagagaacgaaggugacaaugccugcaagcggacguauucagaucgaggguggggaaacggcuguggccuguucgggaagggaaguaucguugcaugcgcuaaauuuacuugcgccaagagcaugucuuuguucgagguggaccagacaaaaauacaguacgucauucgcgcgcagcuccacgugggugccaagcaagagaauuggaacaccgauaucaaaacucugaaguuugacgcauuauccggcucacaggaaguagaguucauuggguacggaaaagcuacacuggaaugucagguucagaccgccguggauuuuggcaacagcuauaucgcugagauggaaacggagaguuggaucgucgacagacaaugggcccaggaucucacccuuccuuggcagucugguuccgggggcguguggagggagaugcaucaccuggucgaauuugagccaccgcaugcagccacaauucggguguuggcucuaggaaaucaagaaggcagccugaagacugcgcucaccggggcaaugcgcguuacaaaggacacuaacgauaauaaccuguacaaacuucacggaggucacgugucgugcagaguaaagcugucugccuugacccucaaaggcacauccuauaagauauguaccgacaaaauguuuuucgucaagaaucccacugauacggggcauggaacagugguuaugcaagugaaggucucaaaaggcgcuccuugcaggaucccagugauuguagccgacgaccugaccgcagccaucaacaaggguauauuagugacuguuaaucccauugcuaguaccaacgaugacgagguccugaucgaagugaauccuccauucggggauagcuacaucauugugggccguggagacucccggcuaacauaucaguggcacaaagagggcucuagcaucgggaagcucuuuacccagacuaugaaaggagucgagcgacuggccguuaugggugauacagcaugggacuucucaagugcgggcggguuuuucacguccgugggaaagggcauucauaccguguuugguagcgcuuuccaggggcuuuuuggcggauugaacuggauaacuaagguaaucaugggcgccguccugauuuggguggggaucaauacaagaaacaugaccaugucuaugucaaugauccucguuggagugauuaugauguuccugagucuuggcgucggugcagaucaggggugugccauaaauuuuggaaaauga

SEQ ID NO: 358 - RNA, 2046 nt, Artificial Sequence
  derived and/or modified CDS sequence (opt3) from YFV__NC_002031.1__SSjev-prME (polyprotein: aa122-778)
augggcaagagaagcgccggguccaucauguggcuggcuucucucgcaguggucauugccugcgcgggagcugugacccuggucagaaagaacagguggcuccuucugaauguuacaagcgaggacuugggcaaaacuuucuccguggggacgggaaacugcaccacaaauaucuuagaagccaaguacuggugucccgauucuauggaguauaacugcccuaaucugucaccacgggaggaaccggacgauauugacuguuggugcuacgguguagaaaacgugcgcgucgcuuauggcaaaugugauagugcagggcgaagccguagauccaggcgggccauagaccuacccacucacgagaaucauggacucaagacccgccaggagaaauggaugacaggcagaaugggugaaaggcaacugcagaagaucgagcggugguuugugcgcaacccuuucuuugcgguuaccgcucuuacuauugccuaccugguggggucuaauaugacacagcgagucgugaucgcauugcucguacuggccguuggaccagcuuauucggcacacugcauuggcaucaccgauagagacuucauagaaggcgugcaugggggaacgugggucucagccacucuggagcaggauaagugugugaccgugauggcucccgacaaaccuagccucgauaucaguuuagagacagucgccauugacaggccagcggaaguucggaaggugugcuacaacgcaguacugacucacgugaaaaucaaugauaagugucccuccaccggugaggcccaucuugcugaagagaacgaaggcgacaaugccugcaaacguacauauucugaccgcggguggggaaacggcugugguuuguuugggaagggaagcauugucgcaugcgcuaaguuuaccugcgccaaauccaugucacuguucgagguggaucaaacgaagauccaguacguuauaagagcgcagcuacacgugggcgccaaacaggagaauuggaacacugacauuaagacacucaaauucgaugcacugaguggcagccaagaagucgaguuuaucggguacggaaaggcuacccuugaaugucaggugcagacugccguagacuucgguaacucuuauauugcugagauggaaacagaguccuggaucguugauaggcagugggcccaagaccugaccuugccuuggcagucaggcagcgggggaguguggcgggagaugcaccaucucgucgaauuugagccaccgcacgcagccacgauccgagugcuggcuuuaggcaaucaggaagguagucugaaaaccgcgcucacaggggcaaugcgcgucacuaaggauaccaacgacaauaaccuuuacaagcugcauggcggacacgugucuugcagaguuaaauuguccgcccuaacacugaagggcacuagcuauaaaauuuguaccgauaagauguucuuugugaaaaaucccacagacaccgggcacggaacuguagucaugcaagugaagguuucgaagggugcuccuugcaggauaccagugaucgucgccgaugaccucacggcagccauuaacaaaggcauccuggugacaguaaaucccauagcuucuaccaacgacgaugaggugcuuauugaaguuaauccuccauucggggacuccuacaucaucgucggacggggcgauucacgccugacuuaucaguggcauaaggaggguaguagcauugggaaauuguucacccagacaaugaagggcguggagagacucgccgugaugggagacaccgcaugggauuuuuccucugcgggcggguucuuuacuagcgucggaaaagguauccacacaguuuucggcucagcuuuucaggggcuguucggaggcuuaaacuggauuacgaaggugauaaugggugccgugcugaucuggguagggauuaauaccaggaacaugacuaugaguauguccaugauccuagucggcgugaucaugauguuucucagccugggaguuggcgcauga

SEQ ID NO: 359 - RNA, 2034 nt, Artificial Sequence
  derived and/or modified CDS sequence (opt3) from YFV__NC_002031.1__SSjev-prME (polyprotein: aa126-778)
augggcaagagaagcgccggguccaucauguggcuggcuucucucgcaguggucauugccugcgcgggagcuagaaagaacagguggcuccuucugaauguuacaagcgaggacuugggcaaaacuuucuccguggggacgggaaacugcaccacaaauaucuuagaagccaaguacuggugucccgauucuauggaguauaacugcccuaaucugucaccacgggaggaaccggacgauauugacuguuggugcuacgguguagaaaacgugcgcgucgcuuauggcaaaugugauagugcagggcgaagccguagauccaggcgggccauagaccuacccacucacgagaaucauggacucaagacccgccaggagaaauggaugacaggcagaaugggugaaaggcaacugcagaagaucgagcggugguuugugcgcaacccuuucuuugcgguuaccgcucuuacuauugccuaccugguggggucuaauaugacacagcgagucgugaucgcauugcucguacuggccguuggaccagcuuauucggcacacugcauuggcaucaccgauagagacuucauagaaggcgugcaugggggaacgugggucucagccacucuggagcaggauaagugugugaccgugauggcucccgacaaaccuagccucgauaucaguuuagagacagucgccauugacaggccagcggaaguucggaaggugugcuacaacgcaguacugacucacgugaaaaucaaugauaagugucccuccaccggugaggcccaucuugcugaagagaacgaaggcgacaaugccugcaaacguacauauucugaccgcggguggggaaacggcugugguuuguuugggaagggaagcauugucgcaugcgcuaaguuuaccugcgccaaauccaugucacuguucgagguggaucaaacgaagauccaguacguuauaagagcgcagcuacacgugggcgccaaacaggagaauuggaacacugacauuaagacacucaaauucgaugcacugaguggcagccaagaagucgaguuuaucggguacggaaaggcuacccuugaaugucaggugcagacugccguagacuucgguaacucuuauauugcugagauggaaacagaguccuggaucguugauaggcagugggcccaagaccugaccuugccuuggcagucaggcagcgggggaguguggcgggagaugcaccaucucgucgaauuugagccaccgcacgcagccacgauccgagugcuggcuuuaggcaaucaggaagguagucugaaaaccgcgcucacaggggcaaugcgcgucacuaaggauaccaacgacaauaaccuuuacaagcugcauggcggacacgugucuugcagaguuaaauuguccgcccuaacacugaagggcacuagcuauaaaauuuguaccgauaagauguucuuugugaaaaaucccacagacaccgggcacggaacuguagucaugcaagugaagguuucgaagggugcuccuugcaggauaccagugaucgucgccgaugaccucacggcagccauuaacaaaggcauccuggugacaguaaaucccauagcuucuaccaacgacgaugaggugcuuauugaaguuaauccuccauucggggacuccuacaucaucgucggacggggcgauucacgccugacuuaucaguggcauaaggaggguaguagcauugggaaauuguucacccagacaaugaagggcguggagagacucgccgugaugggagacaccgcaugggauuuuuccucugcgggcggguucuuuacuagcgucggaaaagguauccacacaguuuucggcucagcuuuucaggggcuguucggaggcuuaaacuggauuacgaaggugauaaugggugccgugcugaucuggguagggauuaauaccaggaacaugacuaugaguauguccaugauccuagucggcgugaucaugauguuucucagccugggaguuggcgcauga

SEQ ID NO: 360 - RNA, 2094 nt, Artificial Sequence
  derived and/or modified CDS sequence (opt3) from YFV__NC_002031.1__SSjev(V2)-prME-XX (polyprotein: aa122-788)
augggcaggaagcagaacaaaagagggggaaaugaggguagcaucauguggcuggccucccucgcuguggucauugcaugcgccggcgcgguuacucuggugcguaaaaaccgauggcuacuccugaauguaacgucagaggaucuuggcaagaccuuuaguguggggacaggaaacugcacuaccaauauucuggaagccaaauacuggugucccgacagcauggaguauaacugcccuaauuuguccccaagagaggaaccggaugacauagauuguuggugcuacggcgucgaaaacgugaggguugcuuaugguaagugugacucugcagggcggucgcgcagaucaaggcgggccaucgaucuccccacacaugagaaucacggacugaaaacccgccaagagaaguggaugacuggccgaaugggcgaaagacagcugcagaagauugagaggugguucgugcggaacccuuucuucgcggucacagcucucaccaucgccuacuuaguggggagcaauaugacgcagcguguaguuauugcacugcuuguguuggccgucggaccagcuuauagugcacauugcaucgguauaacugaccgcgauuuuaucgaaggcgugcacgggggaaccuggguguccgccacacuggagcaagacaaaugugucacuguuauggcucccgauaagccuucucuagacauuagccucgagaccguggccaucgauagaccagcggaaguaaggaaagugugcuacaacgcaguccugacacaugugaagauuaaugacaaaugucccuccaccggcgaggcccaccuugcugaagagaacgaaggugacaaugccugcaagcggacguauucagaucgaggguggggaaacggcuguggccuguucgggaagggaaguaucguugcaugcgcuaaauuuacuugcgccaagagcaugucuuuguucgagguggaccagacaaaaauacaguacgucauucgcgcgcagcuccacgugggugccaagcaagagaauuggaacaccgauaucaaaacucugaaguuugacgcauuauccggcucacaggaaguagaguucauuggguacggaaaagcuacacuggaaugucagguucagaccgccguggauuuuggcaacagcuauaucgcugagauggaaacggagaguuggaucgucgacagacaaugggcccaggaucucacccuuccuuggcagucugguuccgggggcguguggagggagaugcaucaccuggucgaauuugagccaccgcaugcagccacaauucggguguuggcucuaggaaaucaagaaggcagccugaagacugcgcucaccggggcaaugcgcguuacaaaggacacuaacgauaauaaccuguacaaacuucacggaggucacgugucgugcagaguaaagcugucugccuugacccucaaaggcacauccuauaagauauguaccgacaaaauguuuuucgucaagaaucccacugauacggggcauggaacagugguuaugcaagugaaggucucaaaaggcgcuccuugcaggaucccagugauuguagccgacgaccugaccgcagccaucaacaaggguauauuagugacuguuaaucccauugcuaguaccaacgaugacgagguccugaucgaagugaauccuccauucggggauagcuacaucauugugggccguggagacucccggcuaacauaucaguggcacaaagagggcucuagcaucgggaagcucuuuacccagacuaugaaaggagucgagcgacuggccguuaugggugauacagcaugggacuucucaagugcgggcggguuuuucacguccgugggaaagggcauucauaccguguuugguagcgcuuuccaggggcuuuuuggcggauugaacuggauaacuaagguaaucaugggcgccguccugauuuggguggggaucaauacaagaaacaugaccaugucuaugucaaugauccucguuggagugauuaugauguuccugagucuuggcgucggugcagaucaggggugugccauaaauuuuggaaaauga

SEQ ID NO: 361 - RNA, 2082 nt, Artificial Sequence
  derived and/or modified CDS sequence (opt3) from YFV__NC_002031.1__SSjev(V2)-prME-XX (polyprotein: aa126-788)
augggcaggaagcagaacaaaagagggggaaaugaggguagcaucauguggcuggccucccucgcuguggucauugcaugcgccggcgcgcguaaaaaccgauggcuacuccugaauguaacgucagaggaucuuggcaagaccuuuaguguggggacaggaaacugcacuaccaauauucuggaagccaaauacuggugucccgacagcauggaguauaacugcccuaauuuguccccaagagaggaaccggaugacauagauuguuggugcuacggcgucgaaaacgugaggguugcuuaugguaagugugacucugcagggcggucgcgcagaucaaggcgggccaucgaucuccccacacaugagaaucacggacugaaaacccgccaagagaaguggaugacuggccgaaugggcgaaagacagcugcagaagauugagaggugguucgugcggaacccuuucuucgcggucacagcucucaccaucgccuacuuaguggggagcaauaugacgcagcguguaguuauugcacugcuuguguuggccgucggaccagcuuauagugcacauugcaucgguauaacugaccgcgauuuuaucgaaggcgugcacgggggaaccuggguguccgccacacuggagcaagacaaaugugucacuguuauggcucccgauaagccuucucuagacauuagccucgagaccguggccaucgauagaccagcggaaguaaggaaagugugcuacaacgcaguccugacacaugugaagauuaaugacaaaugucccuccaccggcgaggcccaccuugcugaagagaacgaaggugacaaugccugcaagcggacguauucagaucgaggguggggaaacggcuguggccuguucgggaagggaaguaucguugcaugcgcuaaauuuacuugcgccaagagcaugucuuuguucgagguggaccagacaaaaauacaguacgucauucgcgcgcagcuccacgugggugccaagcaagagaauuggaacaccgauaucaaaacucugaaguuugacgcauuauccggcucacaggaaguagaguucauuggguacggaaaagcuacacuggaaugucagguucagaccgccguggauuuuggcaacagcuauaucgcugagauggaaacggagaguuggaucgucgacagacaaugggcccaggaucucacccuuccuuggcagucugguuccgggggcguguggagggagaugcaucaccuggucgaauuugagccaccgcaugcagccacaauucggguguuggcucuaggaaaucaagaaggcagccugaagacugcgcucaccggggcaaugcgcguuacaaaggacacuaacgauaauaaccuguacaaacuucacggaggucacgugucgugcagaguaaagcugucugccuugacccucaaaggcacauccuauaagauauguaccgacaaaauguuuuucgucaagaaucccacugauacggggcauggaacagugguuaugcaagugaaggucucaaaaggcgcuccuugcaggaucccagugauuguagccgacgaccugaccgcagccaucaacaaggguauauuagugacuguuaaucccauugcuaguaccaacgaugacgagguccugaucgaagugaauccuccauucggggauagcuacaucauugugggccguggagacucccggcuaacauaucaguggcacaaagagggcucuagcaucgggaagcucuuuacccagacuaugaaaggagucgagcgacuggccguuaugggugauacagcaugggacuucucaagugcgggcggguuuuucacguccgugggaaagggcauucauaccguguuugguagcgcuuuccaggggcuuuuuggcggauugaacuggauaacuaagguaaucaugggcgccguccugauuuggguggggaucaauacaagaaacaugaccaugucuaugucaaugauccucguuggagugauuaugauguuccugagucuuggcgucggugcagaucaggggugugccauaaauuuuggaaaauga

SEQ ID NO: 362 - RNA, 2064 nt, Artificial Sequence
  derived and/or modified CDS sequence (opt3) from YFV__NC_002031.1__SSjev(V2)-prME (polyprotein: aa122-778)
augggcaggaagcagaacaaaagagggggaaaugaggguagcaucauguggcuggccucccucgcuguggucauugcaugcgccggcgcggugacccuggucagaaagaacagguggcuccuucugaauguuacaagcgaggacuugggcaaaacuuucuccguggggacgggaaacugcaccacaaauaucuuagaagccaaguacuggugucccgauucuauggaguauaacugcccuaaucugucaccacgggaggaaccggacgauauugacuguuggugcuacgguguagaaaacgugcgcgucgcuuauggcaaaugugauagugcagggcgaagccguagauccaggcgggccauagaccuacccacucacgagaaucauggacucaagacccgccaggagaaauggaugacaggcagaaugggugaaaggcaacugcagaagaucgagcggugguuugugcgcaacccuuucuuugcgguuaccgcucuuacuauugccuaccugguggggucuaauaugacacagcgagucgugaucgcauugcucguacuggccguuggaccagcuuauucggcacacugcauuggcaucaccgauagagacuucauagaaggcgugcaugggggaacgugggucucagccacucuggagcaggauaagugugugaccgugauggcucccgacaaaccuagccucgauaucaguuuagagacagucgccauugacaggccagcggaaguucggaaggugugcuacaacgcaguacugacucacgugaaaaucaaugauaagugucccuccaccggugaggcccaucuugcugaagagaacgaaggcgacaaugccugcaaacguacauauucugaccgcggguggggaaacggcugugguuuguuugggaagggaagcauugucgcaugcgcuaaguuuaccugcgccaaauccaugucacuguucgagguggaucaaacgaagauccaguacguuauaagagcgcagcuacacgugggcgccaaacaggagaauuggaacacugacauuaagacacucaaauucgaugcacugaguggcagccaagaagucgaguuuaucggguacggaaaggcuacccuugaaugucaggugcagacugccguagacuucgguaacucuuauauugcugagauggaaacagaguccuggaucguugauaggcagugggcccaagaccugaccuugccuuggcagucaggcagcgggggaguguggcgggagaugcaccaucucgucgaauuugagccaccgcacgcagccacgauccgagugcuggcuuuaggcaaucaggaagguagucugaaaaccgcgcucacaggggcaaugcgcgucacuaaggauaccaacgacaauaaccuuuacaagcugcauggcggacacgugucuugcagaguuaaauuguccgcccuaacacugaagggcacuagcuauaaaauuuguaccgauaagauguucuuugugaaaaaucccacagacaccgggcacggaacuguagucaugcaagugaagguuucgaagggugcuccuugcaggauaccagugaucgucgccgaugaccucacggcagccauuaacaaaggcauccuggugacaguaaaucccauagcuucuaccaacgacgaugaggugcuuauugaaguuaauccuccauucggggacuccuacaucaucgucggacggggcgauucacgccugacuuaucaguggcauaaggaggguaguagcauugggaaauuguucacccagacaaugaagggcguggagagacucgccgugaugggagacaccgcaugggauuuuuccucugcgggcggguucuuuacuagcgucggaaaagguauccacacaguuuucggcucagcuuuucaggggcuguucggaggcuuaaacuggauuacgaaggugauaaugggugccgugcugaucuggguagggauuaauaccaggaacaugacuaugaguauguccaugauccuagucggcgugaucaugauguuucucagccugggaguuggcgcauga

SEQ ID NO: 363 - RNA, 2052 nt, Artificial Sequence
  derived and/or modified CDS sequence (opt3) from YFV__NC_002031.1__SSjev(V2)-prME (polyprotein: aa126-778)
augggcaggaagcagaacaaaagagggggaaaugaggguagcaucauguggcuggccucccucgcuguggucauugcaugcgccggcgcgagaaagaacagguggcuccuucugaauguuacaagcgaggacuugggcaaaacuuucuccguggggacgggaaacugcaccacaaauaucuuagaagccaaguacuggugucccgauucuauggaguauaacugcccuaaucugucaccacgggaggaaccggacgauauugacuguuggugcuacgguguagaaaacgugcgcgucgcuuauggcaaaugugauagugcagggcgaagccguagauccaggcgggccauagaccuacccacucacgagaaucauggacucaagacccgccaggagaaauggaugacaggcagaaugggugaaaggcaacugcagaagaucgagcggugguuugugcgcaacccuuucuuugcgguuaccgcucuuacuauugccuaccugguggggucuaauaugacacagcgagucgugaucgcauugcucguacuggccguuggaccagcuuauucggcacacugcauuggcaucaccgauagagacuucauagaaggcgugcaugggggaacgugggucucagccacucuggagcaggauaagugugugaccgugauggcucccgacaaaccuagccucgauaucaguuuagagacagucgccauugacaggccagcggaaguucggaaggugugcuacaacgcaguacugacucacgugaaaaucaaugauaagugucccuccaccggugaggcccaucuugcugaagagaacgaaggcgacaaugccugcaaacguacauauucugaccgcggguggggaaacggcugugguuuguuugggaagggaagcauugucgcaugcgcuaaguuuaccugcgccaaauccaugucacuguucgagguggaucaaacgaagauccaguacguuauaagagcgcagcuacacgugggcgccaaacaggagaauuggaacacugacauuaagacacucaaauucgaugcacugaguggcagccaagaagucgaguuuaucggguacggaaaggcuacccuugaaugucaggugcagacugccguagacuucgguaacucuuauauugcugagauggaaacagaguccuggaucguugauaggcagugggcccaagaccugaccuugccuuggcagucaggcagcgggggaguguggcgggagaugcaccaucucgucgaauuugagccaccgcacgcagccacgauccgagugcuggcuuuaggcaaucaggaagguagucugaaaaccgcgcucacaggggcaaugcgcgucacuaaggauaccaacgacaauaaccuuuacaagcugcauggcggacacgugucuugcagaguuaaauuguccgcccuaacacugaagggcacuagcuauaaaauuuguaccgauaagauguucuuugugaaaaaucccacagacaccgggcacggaacuguagucaugcaagugaagguuucgaagggugcuccuugcaggauaccagugaucgucgccgaugaccucacggcagccauuaacaaaggcauccuggugacaguaaaucccauagcuucuaccaacgacgaugaggugcuuauugaaguuaauccuccauucggggacuccuacaucaucgucggacggggcgauucacgccugacuuaucaguggcauaaggaggguaguagcauugggaaauuguucacccagacaaugaagggcguggagagacucgccgugaugggagacaccgcaugggauuuuuccucugcgggcggguucuuuacuagcgucggaaaagguauccacacaguuuucggcucagcuuuucaggggcuguucggaggcuuaaacuggauuacgaaggugauaaugggugccgugcugaucuggguagggauuaauaccaggaacaugacuaugaguauguccaugauccuagucggcgugaucaugauguuucucagccugggaguuggcgcauga

SEQ ID NO: 364 - RNA, 2067 nt, Artificial Sequence
  derived and/or modified CDS sequence (opt3) from YFV__NC_002031.1__SSjev(V3)-prME-XX (polyprotein: aa122-788)
augaacgagggcagcaucauguggcuggccucccucgcuguggucauugcaugcgccggggcgguuacucuggugcguaaaaaccgauggcuacuccugaauguaacgucagaggaucuuggcaagaccuuuaguguggggacaggaaacugcacuaccaauauucuggaagccaaauacuggugucccgacagcauggaguauaacugcccuaauuuguccccaagagaggaaccggaugacauagauuguuggugcuacggcgucgaaaacgugaggguugcuuaugguaagugugacucugcagggcggucgcgcagaucaaggcgggccaucgaucuccccacacaugagaaucacggacugaaaacccgccaagagaaguggaugacuggccgaaugggcgaaagacagcugcagaagauugagaggugguucgugcggaacccuuucuucgcggucacagcucucaccaucgccuacuuaguggggagcaauaugacgcagcguguaguuauugcacugcuuguguuggccgucggaccagcuuauagugcacauugcaucgguauaacugaccgcgauuuuaucgaaggcgugcacgggggaaccuggguguccgccacacuggagcaagacaaaugugucacuguuauggcucccgauaagccuucucuagacauuagccucgagaccguggccaucgauagaccagcggaaguaaggaaagugugcuacaacgcaguccugacacaugugaagauuaaugacaaaugucccuccaccggcgaggcccaccuugcugaagagaacgaaggugacaaugccugcaagcggacguauucagaucgaggguggggaaacggcuguggccuguucgggaagggaaguaucguugcaugcgcuaaauuuacuugcgccaagagcaugucuuuguucgagguggaccagacaaaaauacaguacgucauucgcgcgcagcuccacgugggugccaagcaagagaauuggaacaccgauaucaaaacucugaaguuugacgcauuauccggcucacaggaaguagaguucauuggguacggaaaagcuacacuggaaugucagguucagaccgccguggauuuuggcaacagcuauaucgcugagauggaaacggagaguuggaucgucgacagacaaugggcccaggaucucacccuuccuuggcagucugguuccgggggcguguggagggagaugcaucaccuggucgaauuugagccaccgcaugcagccacaauucggguguuggcucuaggaaaucaagaaggcagccugaagacugcgcucaccggggcaaugcgcguuacaaaggacacuaacgauaauaaccuguacaaacuucacggaggucacgugucgugcagaguaaagcugucugccuugacccucaaaggcacauccuauaagauauguaccgacaaaauguuuuucgucaagaaucccacugauacggggcauggaacagugguuaugcaagugaaggucucaaaaggcgcuccuugcaggaucccagugauuguagccgacgaccugaccgcagccaucaacaaggguauauuagugacuguuaaucccauugcuaguaccaacgaugacgagguccugaucgaagugaauccuccauucggggauagcuacaucauugugggccguggagacucccggcuaacauaucaguggcacaaagagggcucuagcaucgggaagcucuuuacccagacuaugaaaggagucgagcgacuggccguuaugggugauacagcaugggacuucucaagugcgggcggguuuuucacguccgugggaaagggcauucauaccguguuugguagcgcuuuccaggggcuuuuuggcggauugaacuggauaacuaagguaaucaugggcgccguccugauuuggguggggaucaauacaagaaacaugaccaugucuaugucaaugauccucguuggagugauuaugauguuccugagucuuggcgucggugcagaucaggggugugccauaaauuuuggaaaauga

SEQ ID NO: 365 - RNA, 2055 nt, Artificial Sequence
  derived and/or modified CDS sequence (opt3) from YFV__NC_002031.1__SSjev(V3)-prME-XX (polyprotein: aa126-788)
augaacgagggcagcaucauguggcuggccucccucgcuguggucauugcaugcgccggggcgcguaaaaaccgauggcuacuccugaauguaacgucagaggaucuuggcaagaccuuuaguguggggacaggaaacugcacuaccaauauucuggaagccaaauacuggugucccgacagcauggaguauaacugcccuaauuuguccccaagagaggaaccggaugacauagauuguuggugcuacggcgucgaaaacgugaggguugcuuaugguaagugugacucugcagggcggucgcgcagaucaaggcgggccaucgaucuccccacacaugagaaucacggacugaaaacccgccaagagaaguggaugacuggccgaaugggcgaaagacagcugcagaagauugagaggugguucgugcggaacccuuucuucgcggucacagcucucaccaucgccuacuuaguggggagcaauaugacgcagcguguaguuauugcacugcuuguguuggccgucggaccagcuuauagugcacauugcaucgguauaacugaccgcgauuuuaucgaaggcgugcacgggggaaccuggguguccgccacacuggagcaagacaaaugugucacuguuauggcucccgauaagccuucucuagacauuagccucgagaccguggccaucgauagaccagcggaaguaaggaaagugugcuacaacgcaguccugacacaugugaagauuaaugacaaaugucccuccaccggcgaggcccaccuugcugaagagaacgaaggugacaaugccugcaagcggacguauucagaucgaggguggggaaacggcuguggccuguucgggaagggaaguaucguugcaugcgcuaaauuuacuugcgccaagagcaugucuuuguucgagguggaccagacaaaaauacaguacgucauucgcgcgcagcuccacgugggugccaagcaagagaauuggaacaccgauaucaaaacucugaaguuugacgcauuauccggcucacaggaaguagaguucauuggguacggaaaagcuacacuggaaugucagguucagaccgccguggauuuuggcaacagcuauaucgcugagauggaaacggagaguuggaucgucgacagacaaugggcccaggaucucacccuuccuuggcagucugguuccgggggcguguggagggagaugcaucaccuggucgaauuugagccaccgcaugcagccacaauucggguguuggcucuaggaaaucaagaaggcagccugaagacugcgcucaccggggcaaugcgcguuacaaaggacacuaacgauaauaaccuguacaaacuucacggaggucacgugucgugcagaguaaagcugucugccuugacccucaaaggcacauccuauaagauauguaccgacaaaauguuuuucgucaagaaucccacugauacggggcauggaacagugguuaugcaagugaaggucucaaaaggcgcuccuugcaggaucccagugauuguagccgacgaccugaccgcagccaucaacaaggguauauuagugacuguuaaucccauugcuaguaccaacgaugacgagguccugaucgaagugaauccuccauucggggauagcuacaucauugugggccguggagacucccggcuaacauaucaguggcacaaagagggcucuagcaucgggaagcucuuuacccagacuaugaaaggagucgagcgacuggccguuaugggugauacagcaugggacuucucaagugcgggcggguuuuucacguccgugggaaagggcauucauaccguguuugguagcgcuuuccaggggcuuuuuggcggauugaacuggauaacuaagguaaucaugggcgccguccugauuuggguggggaucaauacaagaaacaugaccaugucuaugucaaugauccucguuggagugauuaugauguuccugagucuuggcgucggugcagaucaggggugugccauaaauuuuggaaaauga

SEQ ID NO: 366 - RNA, 2037 nt, Artificial Sequence
  derived and/or modified CDS sequence (opt3) from YFV__NC_002031.1__SSjev(V3)-prME (polyprotein: aa122-778)
augaacgagggcagcaucauguggcuggccucccucgcuguggucauugcaugcgccggggcggugacccuggucagaaagaacagguggcuccuucugaauguuacaagcgaggacuugggcaaaacuuucuccguggggacgggaaacugcaccacaaauaucuuagaagccaaguacuggugucccgauucuauggaguauaacugcccuaaucugucaccacgggaggaaccggacgauauugacuguuggugcuacgguguagaaaacgugcgcgucgcuuauggcaaaugugauagugcagggcgaagccguagauccaggcgggccauagaccuacccacucacgagaaucauggacucaagacccgccaggagaaauggaugacaggcagaaugggugaaaggcaacugcagaagaucgagcggugguuugugcgcaacccuuucuuugcgguuaccgcucuuacuauugccuaccugguggggucuaauaugacacagcgagucgugaucgcauugcucguacuggccguuggaccagcuuauucggcacacugcauuggcaucaccgauagagacuucauagaaggcgugcaugggggaacgugggucucagccacucuggagcaggauaagugugugaccgugauggcucccgacaaaccuagccucgauaucaguuuagagacagucgccauugacaggccagcggaaguucggaaggugugcuacaacgcaguacugacucacgugaaaaucaaugauaagugucccuccaccggugaggcccaucuugcugaagagaacgaaggcgacaaugccugcaaacguacauauucugaccgcggguggggaaacggcugugguuuguuugggaagggaagcauugucgcaugcgcuaaguuuaccugcgccaaauccaugucacuguucgagguggaucaaacgaagauccaguacguuauaagagcgcagcuacacgugggcgccaaacaggagaauuggaacacugacauuaagacacucaaauucgaugcacugaguggcagccaagaagucgaguuuaucggguacggaaaggcuacccuugaaugucaggugcagacugccguagacuucgguaacucuuauauugcugagauggaaacagaguccuggaucguugauaggcagugggcccaagaccugaccuugccuuggcagucaggcagcgggggaguguggcgggagaugcaccaucucgucgaauuugagccaccgcacgcagccacgauccgagugcuggcuuuaggcaaucaggaagguagucugaaaaccgcgcucacaggggcaaugcgcgucacuaaggauaccaacgacaauaaccuuuacaagcugcauggcggacacgugucuugcagaguuaaauuguccgcccuaacacugaagggcacuagcuauaaaauuuguaccgauaagauguucuuugugaaaaaucccacagacaccgggcacggaacuguagucaugcaagugaagguuucgaagggugcuccuugcaggauaccagugaucgucgccgaugaccucacggcagccauuaacaaaggcauccuggugacaguaaaucccauagcuucuaccaacgacgaugaggugcuuauugaaguuaauccuccauucggggacuccuacaucaucgucggacggggcgauucacgccugacuuaucaguggcauaaggaggguaguagcauugggaaauuguucacccagacaaugaagggcguggagagacucgccgugaugggagacaccgcaugggauuuuuccucugcgggcggguucuuuacuagcgucggaaaagguauccacacaguuuucggcucagcuuuucaggggcuguucggaggcuuaaacuggauuacgaaggugauaaugggugccgugcugaucuggguagggauuaauaccaggaacaugacuaugaguauguccaugauccuagucggcgugaucaugauguuucucagccugggaguuggcgcauga

SEQ ID NO: 367 - RNA, 2025 nt, Artificial Sequence
  derived and/or modified CDS sequence (opt3) from YFV__NC_002031.1__SSjev(V3)-prME (polyprotein: aa126-778)
augaacgagggcagcaucauguggcuggccucccucgcuguggucauugcaugcgccggggcgagaaagaacagguggcuccuucugaauguuacaagcgaggacuugggcaaaacuuucuccguggggacgggaaacugcaccacaaauaucuuagaagccaaguacuggugucccgauucuauggaguauaacugcccuaaucugucaccacgggaggaaccggacgauauugacuguuggugcuacgguguagaaaacgugcgcgucgcuuauggcaaaugugauagugcagggcgaagccguagauccaggcgggccauagaccuacccacucacgagaaucauggacucaagacccgccaggagaaauggaugacaggcagaaugggugaaaggcaacugcagaagaucgagcggugguuugugcgcaacccuuucuuugcgguuaccgcucuuacuauugccuaccugguggggucuaauaugacacagcgagucgugaucgcauugcucguacuggccguuggaccagcuuauucggcacacugcauuggcaucaccgauagagacuucauagaaggcgugcaugggggaacgugggucucagccacucuggagcaggauaagugugugaccgugauggcucccgacaaaccuagccucgauaucaguuuagagacagucgccauugacaggccagcggaaguucggaaggugugcuacaacgcaguacugacucacgugaaaaucaaugauaagugucccuccaccggugaggcccaucuugcugaagagaacgaaggcgacaaugccugcaaacguacauauucugaccgcggguggggaaacggcugugguuuguuugggaagggaagcauugucgcaugcgcuaaguuuaccugcgccaaauccaugucacuguucgagguggaucaaacgaagauccaguacguuauaagagcgcagcuacacgugggcgccaaacaggagaauuggaacacugacauuaagacacucaaauucgaugcacugaguggcagccaagaagucgaguuuaucggguacggaaaggcuacccuugaaugucaggugcagacugccguagacuucgguaacucuuauauugcugagauggaaacagaguccuggaucguugauaggcagugggcccaagaccugaccuugccuuggcagucaggcagcgggggaguguggcgggagaugcaccaucucgucgaauuugagccaccgcacgcagccacgauccgagugcuggcuuuaggcaaucaggaagguagucugaaaaccgcgcucacaggggcaaugcgcgucacuaaggauaccaacgacaauaaccuuuacaagcugcauggcggacacgugucuugcagaguuaaauuguccgcccuaacacugaagggcacuagcuauaaaauuuguaccgauaagauguucuuugugaaaaaucccacagacaccgggcacggaacuguagucaugcaagugaagguuucgaagggugcuccuugcaggauaccagugaucgucgccgaugaccucacggcagccauuaacaaaggcauccuggugacaguaaaucccauagcuucuaccaacgacgaugaggugcuuauugaaguuaauccuccauucggggacuccuacaucaucgucggacggggcgauucacgccugacuuaucaguggcauaaggaggguaguagcauugggaaauuguucacccagacaaugaagggcguggagagacucgccgugaugggagacaccgcaugggauuuuuccucugcgggcggguucuuuacuagcgucggaaaagguauccacacaguuuucggcucagcuuuucaggggcuguucggaggcuuaaacuggauuacgaaggugauaaugggugccgugcugaucuggguagggauuaauaccaggaacaugacuaugaguauguccaugauccuagucggcgugaucaugauguuucucagccugggaguuggcgcauga

SEQ ID NO: 368 - RNA, 2076 nt, Artificial Sequence
  derived and/or modified CDS sequence (opt3) from YFV__NC_002031.1__SSjev(V4)-prME-XX (polyprotein: aa122-788)
augcugggcagcaacuccgggcagagaguggucuucaccauccuccuucuguugguugcccccgcuuacucuguuacucuggugcguaaaaaccgauggcuacuccugaauguaacgucagaggaucuuggcaagaccuuuaguguggggacaggaaacugcacuaccaauauucuggaagccaaauacuggugucccgacagcauggaguauaacugcccuaauuuguccccaagagaggaaccggaugacauagauuguuggugcuacggcgucgaaaacgugaggguugcuuaugguaagugugacucugcagggcggucgcgcagaucaaggcgggccaucgaucuccccacacaugagaaucacggacugaaaacccgccaagagaaguggaugacuggccgaaugggcgaaagacagcugcagaagauugagaggugguucgugcggaacccuuucuucgcggucacagcucucaccaucgccuacuuaguggggagcaauaugacgcagcguguaguuauugcacugcuuguguuggccgucggaccagcuuauagugcacauugcaucgguauaacugaccgcgauuuuaucgaaggcgugcacgggggaaccuggguguccgccacacuggagcaagacaaaugugucacuguuauggcucccgauaagccuucucuagacauuagccucgagaccguggccaucgauagaccagcggaaguaaggaaagugugcuacaacgcaguccugacacaugugaagauuaaugacaaaugucccuccaccggcgaggcccaccuugcugaagagaacgaaggugacaaugccugcaagcggacguauucagaucgaggguggggaaacggcuguggccuguucgggaagggaaguaucguugcaugcgcuaaauuuacuugcgccaagagcaugucuuuguucgagguggaccagacaaaaauacaguacgucauucgcgcgcagcuccacgugggugccaagcaagagaauuggaacaccgauaucaaaacucugaaguuugacgcauuauccggcucacaggaaguagaguucauuggguacggaaaagcuacacuggaaugucagguucagaccgccguggauuuuggcaacagcuauaucgcugagauggaaacggagaguuggaucgucgacagacaaugggcccaggaucucacccuuccuuggcagucugguuccgggggcguguggagggagaugcaucaccuggucgaauuugagccaccgcaugcagccacaauucggguguuggcucuaggaaaucaagaaggcagccugaagacugcgcucaccggggcaaugcgcguuacaaaggacacuaacgauaauaaccuguacaaacuucacggaggucacgugucgugcagaguaaagcugucugccuugacccucaaaggcacauccuauaagauauguaccgacaaaauguuuuucgucaagaaucccacugauacggggcauggaacagugguuaugcaagugaaggucucaaaaggcgcuccuugcaggaucccagugauuguagccgacgaccugaccgcagccaucaacaaggguauauuagugacuguuaaucccauugcuaguaccaacgaugacgagguccugaucgaagugaauccuccauucggggauagcuacaucauugugggccguggagacucccggcuaacauaucaguggcacaaagagggcucuagcaucgggaagcucuuuacccagacuaugaaaggagucgagcgacuggccguuaugggugauacagcaugggacuucucaagugcgggcggguuuuucacguccgugggaaagggcauucauaccguguuugguagcgcuuuccaggggcuuuuuggcggauugaacuggauaacuaagguaaucaugggcgccguccugauuuggguggggaucaauacaagaaacaugaccaugucuaugucaaugauccucguuggagugauuaugauguuccugagucuuggcgucggugcagaucaggggugugccauaaauuuuggaaaauga

SEQ ID NO: 369 - RNA, 2064 nt, Artificial Sequence
  derived and/or modified CDS sequence (opt3) from YFV__NC_002031.1__SSjev(V4)-prME-XX (polyprotein: aa126-788)
augcugggcagcaacuccgggcagagaguggucuucaccauccuccuucuguugguugcccccgcuuacucucguaaaaaccgauggcuacuccugaauguaacgucagaggaucuuggcaagaccuuuaguguggggacaggaaacugcacuaccaauauucuggaagccaaauacuggugucccgacagcauggaguauaacugcccuaauuuguccccaagagaggaaccggaugacauagauuguuggugcuacggcgucgaaaacgugaggguugcuuaugguaagugugacucugcagggcggucgcgcagaucaaggcgggccaucgaucuccccacacaugagaaucacggacugaaaacccgccaagagaaguggaugacuggccgaaugggcgaaagacagcugcagaagauugagaggugguucgugcggaacccuuucuucgcggucacagcucucaccaucgccuacuuaguggggagcaauaugacgcagcguguaguuauugcacugcuuguguuggccgucggaccagcuuauagugcacauugcaucgguauaacugaccgcgauuuuaucgaaggcgugcacgggggaaccuggguguccgccacacuggagcaagacaaaugugucacuguuauggcucccgauaagccuucucuagacauuagccucgagaccguggccaucgauagaccagcggaaguaaggaaagugugcuacaacgcaguccugacacaugugaagauuaaugacaaaugucccuccaccggcgaggcccaccuugcugaagagaacgaaggugacaaugccugcaagcggacguauucagaucgaggguggggaaacggcuguggccuguucgggaagggaaguaucguugcaugcgcuaaauuuacuugcgccaagagcaugucuuuguucgagguggaccagacaaaaauacaguacgucauucgcgcgcagcuccacgugggugccaagcaagagaauuggaacaccgauaucaaaacucugaaguuugacgcauuauccggcucacaggaaguagaguucauuggguacggaaaagcuacacuggaaugucagguucagaccgccguggauuuuggcaacagcuauaucgcugagauggaaacggagaguuggaucgucgacagacaaugggcccaggaucucacccuuccuuggcagucugguuccgggggcguguggagggagaugcaucaccuggucgaauuugagccaccgcaugcagccacaauucggguguuggcucuaggaaaucaagaaggcagccugaagacugcgcucaccggggcaaugcgcguuacaaaggacacuaacgauaauaaccuguacaaacuucacggaggucacgugucgugcagaguaaagcugucugccuugacccucaaaggcacauccuauaagauauguaccgacaaaauguuuuucgucaagaaucccacugauacggggcauggaacagugguuaugcaagugaaggucucaaaaggcgcuccuugcaggaucccagugauuguagccgacgaccugaccgcagccaucaacaaggguauauuagugacuguuaaucccauugcuaguaccaacgaugacgagguccugaucgaagugaauccuccauucggggauagcuacaucauugugggccguggagacucccggcuaacauaucaguggcacaaagagggcucuagcaucgggaagcucuuuacccagacuaugaaaggagucgagcgacuggccguuaugggugauacagcaugggacuucucaagugcgggcggguuuuucacguccgugggaaagggcauucauaccguguuugguagcgcuuuccaggggcuuuuuggcggauugaacuggauaacuaagguaaucaugggcgccguccugauuuggguggggaucaauacaagaaacaugaccaugucuaugucaaugauccucguuggagugauuaugauguuccugagucuuggcgucggugcagaucaggggugugccauaaauuuuggaaaauga

SEQ ID NO: 370 - RNA, 2046 nt, Artificial Sequence
  derived and/or modified CDS sequence (opt3) from YFV__NC_002031.1__SSjev(V4)-prME (polyprotein: aa122-778)
augcugggcagcaacuccgggcagagaguggucuucaccauccuccuucuguugguugcccccgcuuacucugugacccuggucagaaagaacagguggcuccuucugaauguuacaagcgaggacuugggcaaaacuuucuccguggggacgggaaacugcaccacaaauaucuuagaagccaaguacuggugucccgauucuauggaguauaacugcccuaaucugucaccacgggaggaaccggacgauauugacuguuggugcuacgguguagaaaacgugcgcgucgcuuauggcaaaugugauagugcagggcgaagccguagauccaggcgggccauagaccuacccacucacgagaaucauggacucaagacccgccaggagaaauggaugacaggcagaaugggugaaaggcaacugcagaagaucgagcggugguuugugcgcaacccuuucuuugcgguuaccgcucuuacuauugccuaccugguggggucuaauaugacacagcgagucgugaucgcauugcucguacuggccguuggaccagcuuauucggcacacugcauuggcaucaccgauagagacuucauagaaggcgugcaugggggaacgugggucucagccacucuggagcaggauaagugugugaccgugauggcucccgacaaaccuagccucgauaucaguuuagagacagucgccauugacaggccagcggaaguucggaaggugugcuacaacgcaguacugacucacgugaaaaucaaugauaagugucccuccaccggugaggcccaucuugcugaagagaacgaaggcgacaaugccugcaaacguacauauucugaccgcggguggggaaacggcugugguuuguuugggaagggaagcauugucgcaugcgcuaaguuuaccugcgccaaauccaugucacuguucgagguggaucaaacgaagauccaguacguuauaagagcgcagcuacacgugggcgccaaacaggagaauuggaacacugacauuaagacacucaaauucgaugcacugaguggcagccaagaagucgaguuuaucggguacggaaaggcuacccuugaaugucaggugcagacugccguagacuucgguaacucuuauauugcugagauggaaacagaguccuggaucguugauaggcagugggcccaagaccugaccuugccuuggcagucaggcagcgggggaguguggcgggagaugcaccaucucgucgaauuugagccaccgcacgcagccacgauccgagugcuggcuuuaggcaaucaggaagguagucugaaaaccgcgcucacaggggcaaugcgcgucacuaaggauaccaacgacaauaaccuuuacaagcugcauggcggacacgugucuugcagaguuaaauuguccgcccuaacacugaagggcacuagcuauaaaauuuguaccgauaagauguucuuugugaaaaaucccacagacaccgggcacggaacuguagucaugcaagugaagguuucgaagggugcuccuugcaggauaccagugaucgucgccgaugaccucacggcagccauuaacaaaggcauccuggugacaguaaaucccauagcuucuaccaacgacgaugaggugcuuauugaaguuaauccuccauucggggacuccuacaucaucgucggacggggcgauucacgccugacuuaucaguggcauaaggaggguaguagcauugggaaauuguucacccagacaaugaagggcguggagagacucgccgugaugggagacaccgcaugggauuuuuccucugcgggcggguucuuuacuagcgucggaaaagguauccacacaguuuucggcucagcuuuucaggggcuguucggaggcuuaaacuggauuacgaaggugauaaugggugccgugcugaucuggguagggauuaauaccaggaacaugacuaugaguauguccaugauccuagucggcgugaucaugauguuucucagccugggaguuggcgcauga

SEQ ID NO: 371 - RNA, 2034 nt, Artificial Sequence
  derived and/or modified CDS sequence (opt3) from YFV__NC_002031.1__SSjev(V4)-prME (polyprotein: aa126-778)
augcugggcagcaacuccgggcagagaguggucuucaccauccuccuucuguugguugcccccgcuuacucuagaaagaacagguggcuccuucugaauguuacaagcgaggacuugggcaaaacuuucuccguggggacgggaaacugcaccacaaauaucuuagaagccaaguacuggugucccgauucuauggaguauaacugcccuaaucugucaccacgggaggaaccggacgauauugacuguuggugcuacgguguagaaaacgugcgcgucgcuuauggcaaaugugauagugcagggcgaagccguagauccaggcgggccauagaccuacccacucacgagaaucauggacucaagacccgccaggagaaauggaugacaggcagaaugggugaaaggcaacugcagaagaucgagcggugguuugugcgcaacccuuucuuugcgguuaccgcucuuacuauugccuaccugguggggucuaauaugacacagcgagucgugaucgcauugcucguacuggccguuggaccagcuuauucggcacacugcauuggcaucaccgauagagacuucauagaaggcgugcaugggggaacgugggucucagccacucuggagcaggauaagugugugaccgugauggcucccgacaaaccuagccucgauaucaguuuagagacagucgccauugacaggccagcggaaguucggaaggugugcuacaacgcaguacugacucacgugaaaaucaaugauaagugucccuccaccggugaggcccaucuugcugaagagaacgaaggcgacaaugccugcaaacguacauauucugaccgcggguggggaaacggcugugguuuguuugggaagggaagcauugucgcaugcgcuaaguuuaccugcgccaaauccaugucacuguucgagguggaucaaacgaagauccaguacguuauaagagcgcagcuacacgugggcgccaaacaggagaauuggaacacugacauuaagacacucaaauucgaugcacugaguggcagccaagaagucgaguuuaucggguacggaaaggcuacccuugaaugucaggugcagacugccguagacuucgguaacucuuauauugcugagauggaaacagaguccuggaucguugauaggcagugggcccaagaccugaccuugccuuggcagucaggcagcgggggaguguggcgggagaugcaccaucucgucgaauuugagccaccgcacgcagccacgauccgagugcuggcuuuaggcaaucaggaagguagucugaaaaccgcgcucacaggggcaaugcgcgucacuaaggauaccaacgacaauaaccuuuacaagcugcauggcggacacgugucuugcagaguuaaauuguccgcccuaacacugaagggcacuagcuauaaaauuuguaccgauaagauguucuuugugaaaaaucccacagacaccgggcacggaacuguagucaugcaagugaagguuucgaagggugcuccuugcaggauaccagugaucgucgccgaugaccucacggcagccauuaacaaaggcauccuggugacaguaaaucccauagcuucuaccaacgacgaugaggugcuuauugaaguuaauccuccauucggggacuccuacaucaucgucggacggggcgauucacgccugacuuaucaguggcauaaggaggguaguagcauugggaaauuguucacccagacaaugaagggcguggagagacucgccgugaugggagacaccgcaugggauuuuuccucugcgggcggguucuuuacuagcgucggaaaagguauccacacaguuuucggcucagcuuuucaggggcuguucggaggcuuaaacuggauuacgaaggugauaaugggugccgugcugaucuggguagggauuaauaccaggaacaugacuaugaguauguccaugauccuagucggcgugaucaugauguuucucagccugggaguuggcgcauga

SEQ ID NO: 372 - RNA, 2049 nt, Artificial Sequence
  derived and/or modified CDS sequence (opt3) from YFV__NC_002031.1__SSjev(V5)-prME-XX (polyprotein: aa122-788)
auguggcuggugagccucgccaucgucaccgcuugcgcaggcgccguuacucuggugcguaaaaaccgauggcuacuccugaauguaacgucagaggaucuuggcaagaccuuuaguguggggacaggaaacugcacuaccaauauucuggaagccaaauacuggugucccgacagcauggaguauaacugcccuaauuuguccccaagagaggaaccggaugacauagauuguuggugcuacggcgucgaaaacgugaggguugcuuaugguaagugugacucugcagggcggucgcgcagaucaaggcgggccaucgaucuccccacacaugagaaucacggacugaaaacccgccaagagaaguggaugacuggccgaaugggcgaaagacagcugcagaagauugagaggugguucgugcggaacccuuucuucgcggucacagcucucaccaucgccuacuuaguggggagcaauaugacgcagcguguaguuauugcacugcuuguguuggccgucggaccagcuuauagugcacauugcaucgguauaacugaccgcgauuuuaucgaaggcgugcacgggggaaccuggguguccgccacacuggagcaagacaaaugugucacuguuauggcucccgauaagccuucucuagacauuagccucgagaccguggccaucgauagaccagcggaaguaaggaaagugugcuacaacgcaguccugacacaugugaagauuaaugacaaaugucccuccaccggcgaggcccaccuugcugaagagaacgaaggugacaaugccugcaagcggacguauucagaucgaggguggggaaacggcuguggccuguucgggaagggaaguaucguugcaugcgcuaaauuuacuugcgccaagagcaugucuuuguucgagguggaccagacaaaaauacaguacgucauucgcgcgcagcuccacgugggugccaagcaagagaauuggaacaccgauaucaaaacucugaaguuugacgcauuauccggcucacaggaaguagaguucauuggguacggaaaagcuacacuggaaugucagguucagaccgccguggauuuuggcaacagcuauaucgcugagauggaaacggagaguuggaucgucgacagacaaugggcccaggaucucacccuuccuuggcagucugguuccgggggcguguggagggagaugcaucaccuggucgaauuugagccaccgcaugcagccacaauucggguguuggcucuaggaaaucaagaaggcagccugaagacugcgcucaccggggcaaugcgcguuacaaaggacacuaacgauaauaaccuguacaaacuucacggaggucacgugucgugcagaguaaagcugucugccuugacccucaaaggcacauccuauaagauauguaccgacaaaauguuuuucgucaagaaucccacugauacggggcauggaacagugguuaugcaagugaaggucucaaaaggcgcuccuugcaggaucccagugauuguagccgacgaccugaccgcagccaucaacaaggguauauuagugacuguuaaucccauugcuaguaccaacgaugacgagguccugaucgaagugaauccuccauucggggauagcuacaucauugugggccguggagacucccggcuaacauaucaguggcacaaagagggcucuagcaucgggaagcucuuuacccagacuaugaaaggagucgagcgacuggccguuaugggugauacagcaugggacuucucaagugcgggcggguuuuucacguccgugggaaagggcauucauaccguguuugguagcgcuuuccaggggcuuuuuggcggauugaacuggauaacuaagguaaucaugggcgccguccugauuuggguggggaucaauacaagaaacaugaccaugucuaugucaaugauccucguuggagugauuaugauguuccugagucuuggcgucggugcagaucaggggugugccauaaauuuuggaaaauga

SEQ ID NO: 373 - RNA, 2037 nt, Artificial Sequence
  derived and/or modified CDS sequence (opt3) from YFV__NC_002031.1__SSjev(V5)-prME-XX (polyprotein: aa126-788)
auguggcuggugagccucgccaucgucaccgcuugcgcaggcgcccguaaaaaccgauggcuacuccugaauguaacgucagaggaucuuggcaagaccuuuaguguggggacaggaaacugcacuaccaauauucuggaagccaaauacuggugucccgacagcauggaguauaacugcccuaauuuguccccaagagaggaaccggaugacauagauuguuggugcuacggcgucgaaaacgugaggguugcuuaugguaagugugacucugcagggcggucgcgcagaucaaggcgggccaucgaucuccccacacaugagaaucacggacugaaaacccgccaagagaaguggaugacuggccgaaugggcgaaagacagcugcagaagauugagaggugguucgugcggaacccuuucuucgcggucacagcucucaccaucgccuacuuaguggggagcaauaugacgcagcguguaguuauugcacugcuuguguuggccgucggaccagcuuauagugcacauugcaucgguauaacugaccgcgauuuuaucgaaggcgugcacgggggaaccuggguguccgccacacuggagcaagacaaaugugucacuguuauggcucccgauaagccuucucuagacauuagccucgagaccguggccaucgauagaccagcggaaguaaggaaagugugcuacaacgcaguccugacacaugugaagauuaaugacaaaugucccuccaccggcgaggcccaccuugcugaagagaacgaaggugacaaugccugcaagcggacguauucagaucgaggguggggaaacggcuguggccuguucgggaagggaaguaucguugcaugcgcuaaauuuacuugcgccaagagcaugucuuuguucgagguggaccagacaaaaauacaguacgucauucgcgcgcagcuccacgugggugccaagcaagagaauuggaacaccgauaucaaaacucugaaguuugacgcauuauccggcucacaggaaguagaguucauuggguacggaaaagcuacacuggaaugucagguucagaccgccguggauuuuggcaacagcuauaucgcugagauggaaacggagaguuggaucgucgacagacaaugggcccaggaucucacccuuccuuggcagucugguuccgggggcguguggagggagaugcaucaccuggucgaauuugagccaccgcaugcagccacaauucggguguuggcucuaggaaaucaagaaggcagccugaagacugcgcucaccggggcaaugcgcguuacaaaggacacuaacgauaauaaccuguacaaacuucacggaggucacgugucgugcagaguaaagcugucugccuugacccucaaaggcacauccuauaagauauguaccgacaaaauguuuuucgucaagaaucccacugauacggggcauggaacagugguuaugcaagugaaggucucaaaaggcgcuccuugcaggaucccagugauuguagccgacgaccugaccgcagccaucaacaaggguauauuagugacuguuaaucccauugcuaguaccaacgaugacgagguccugaucgaagugaauccuccauucggggauagcuacaucauugugggccguggagacucccggcuaacauaucaguggcacaaagagggcucuagcaucgggaagcucuuuacccagacuaugaaaggagucgagcgacuggccguuaugggugauacagcaugggacuucucaagugcgggcggguuuuucacguccgugggaaagggcauucauaccguguuugguagcgcuuuccaggggcuuuuuggcggauugaacuggauaacuaagguaaucaugggcgccguccugauuuggguggggaucaauacaagaaacaugaccaugucuaugucaaugauccucguuggagugauuaugauguuccugagucuuggcgucggugcagaucaggggugugccauaaauuuuggaaaauga

SEQ ID NO: 374 - RNA, 2019 nt, Artificial Sequence
  derived and/or modified CDS sequence (opt3) from YFV__NC_002031.1__SSjev(V5)-prME (polyprotein: aa122-778)
auguggcuggugagccucgccaucgucaccgcuugcgcaggcgccgugacccuggucagaaagaacagguggcuccuucugaauguuacaagcgaggacuugggcaaaacuuucuccguggggacgggaaacugcaccacaaauaucuuagaagccaaguacuggugucccgauucuauggaguauaacugcccuaaucugucaccacgggaggaaccggacgauauugacuguuggugcuacgguguagaaaacgugcgcgucgcuuauggcaaaugugauagugcagggcgaagccguagauccaggcgggccauagaccuacccacucacgagaaucauggacucaagacccgccaggagaaauggaugacaggcagaaugggugaaaggcaacugcagaagaucgagcggugguuugugcgcaacccuuucuuugcgguuaccgcucuuacuauugccuaccugguggggucuaauaugacacagcgagucgugaucgcauugcucguacuggccguuggaccagcuuauucggcacacugcauuggcaucaccgauagagacuucauagaaggcgugcaugggggaacgugggucucagccacucuggagcaggauaagugugugaccgugauggcucccgacaaaccuagccucgauaucaguuuagagacagucgccauugacaggccagcggaaguucggaaggugugcuacaacgcaguacugacucacgugaaaaucaaugauaagugucccuccaccggugaggcccaucuugcugaagagaacgaaggcgacaaugccugcaaacguacauauucugaccgcggguggggaaacggcugugguuuguuugggaagggaagcauugucgcaugcgcuaaguuuaccugcgccaaauccaugucacuguucgagguggaucaaacgaagauccaguacguuauaagagcgcagcuacacgugggcgccaaacaggagaauuggaacacugacauuaagacacucaaauucgaugcacugaguggcagccaagaagucgaguuuaucggguacggaaaggcuacccuugaaugucaggugcagacugccguagacuucgguaacucuuauauugcugagauggaaacagaguccuggaucguugauaggcagugggcccaagaccugaccuugccuuggcagucaggcagcgggggaguguggcgggagaugcaccaucucgucgaauuugagccaccgcacgcagccacgauccgagugcuggcuuuaggcaaucaggaagguagucugaaaaccgcgcucacaggggcaaugcgcgucacuaaggauaccaacgacaauaaccuuuacaagcugcauggcggacacgugucuugcagaguuaaauuguccgcccuaacacugaagggcacuagcuauaaaauuuguaccgauaagauguucuuugugaaaaaucccacagacaccgggcacggaacuguagucaugcaagugaagguuucgaagggugcuccuugcaggauaccagugaucgucgccgaugaccucacggcagccauuaacaaaggcauccuggugacaguaaaucccauagcuucuaccaacgacgaugaggugcuuauugaaguuaauccuccauucggggacuccuacaucaucgucggacggggcgauucacgccugacuuaucaguggcauaaggaggguaguagcauugggaaauuguucacccagacaaugaagggcguggagagacucgccgugaugggagacaccgcaugggauuuuuccucugcgggcggguucuuuacuagcgucggaaaagguauccacacaguuuucggcucagcuuuucaggggcuguucggaggcuuaaacuggauuacgaaggugauaaugggugccgugcugaucuggguagggauuaauaccaggaacaugacuaugaguauguccaugauccuagucggcgugaucaugauguuucucagccugggaguuggcgcauga

SEQ ID NO: 375 - RNA, 2007 nt, Artificial Sequence
  derived and/or modified CDS sequence (opt3) from YFV__NC_002031.1__SSjev(V5)-prME (polyprotein: aa126-778)
auguggcuggugagccucgccaucgucaccgcuugcgcaggcgccagaaagaacagguggcuccuucugaauguuacaagcgaggacuugggcaaaacuuucuccguggggacgggaaacugcaccacaaauaucuuagaagccaaguacuggugucccgauucuauggaguauaacugcccuaaucugucaccacgggaggaaccggacgauauugacuguuggugcuacgguguagaaaacgugcgcgucgcuuauggcaaaugugauagugcagggcgaagccguagauccaggcgggccauagaccuacccacucacgagaaucauggacucaagacccgccaggagaaauggaugacaggcagaaugggugaaaggcaacugcagaagaucgagcggugguuugugcgcaacccuuucuuugcgguuaccgcucuuacuauugccuaccugguggggucuaauaugacacagcgagucgugaucgcauugcucguacuggccguuggaccagcuuauucggcacacugcauuggcaucaccgauagagacuucauagaaggcgugcaugggggaacgugggucucagccacucuggagcaggauaagugugugaccgugauggcucccgacaaaccuagccucgauaucaguuuagagacagucgccauugacaggccagcggaaguucggaaggugugcuacaacgcaguacugacucacgugaaaaucaaugauaagugucccuccaccggugaggcccaucuugcugaagagaacgaaggcgacaaugccugcaaacguacauauucugaccgcggguggggaaacggcugugguuuguuugggaagggaagcauugucgcaugcgcuaaguuuaccugcgccaaauccaugucacuguucgagguggaucaaacgaagauccaguacguuauaagagcgcagcuacacgugggcgccaaacaggagaauuggaacacugacauuaagacacucaaauucgaugcacugaguggcagccaagaagucgaguuuaucggguacggaaaggcuacccuugaaugucaggugcagacugccguagacuucgguaacucuuauauugcugagauggaaacagaguccuggaucguugauaggcagugggcccaagaccugaccuugccuuggcagucaggcagcgggggaguguggcgggagaugcaccaucucgucgaauuugagccaccgcacgcagccacgauccgagugcuggcuuuaggcaaucaggaagguagucugaaaaccgcgcucacaggggcaaugcgcgucacuaaggauaccaacgacaauaaccuuuacaagcugcauggcggacacgugucuugcagaguuaaauuguccgcccuaacacugaagggcacuagcuauaaaauuuguaccgauaagauguucuuugugaaaaaucccacagacaccgggcacggaacuguagucaugcaagugaagguuucgaagggugcuccuugcaggauaccagugaucgucgccgaugaccucacggcagccauuaacaaaggcauccuggugacaguaaaucccauagcuucuaccaacgacgaugaggugcuuauugaaguuaauccuccauucggggacuccuacaucaucgucggacggggcgauucacgccugacuuaucaguggcauaaggaggguaguagcauugggaaauuguucacccagacaaugaagggcguggagagacucgccgugaugggagacaccgcaugggauuuuuccucugcgggcggguucuuuacuagcgucggaaaagguauccacacaguuuucggcucagcuuuucaggggcuguucggaggcuuaaacuggauuacgaaggugauaaugggugccgugcugaucuggguagggauuaauaccaggaacaugacuaugaguauguccaugauccuagucggcgugaucaugauguuucucagccugggaguuggcgcauga

SEQ ID NO: 376 - RNA, 2037 nt, Artificial Sequence
  derived and/or modified CDS sequence (opt3) from YFV__NC_002031.1__SSIgE-prMEdelstem_TM-JEV (polyprotein: aa122-680)
auggacuggaccuggauccuguuccucguggccgcugcaacaagaguccacagcgugacccuggucagaaagaacagguggcuccuucugaauguuacaagcgaggacuugggcaaaacuuucuccguggggacgggaaacugcaccacaaauaucuuagaagccaaguacuggugucccgauucuauggaguauaacugcccuaaucugucaccacgggaggaaccggacgauauugacuguuggugcuacgguguagaaaacgugcgcgucgcuuauggcaaaugugauagugcagggcgaagccguagauccaggcgggccauagaccuacccacucacgagaaucauggacucaagacccgccaggagaaauggaugacaggcagaaugggugaaaggcaacugcagaagaucgagcggugguuugugcgcaacccuuucuuugcgguuaccgcucuuacuauugccuaccugguggggucuaauaugacacagcgagucgugaucgcauugcucguacuggccguuggaccagcuuauucggcacacugcauuggcaucaccgauagagacuucauagaaggcgugcaugggggaacgugggucucagccacucuggagcaggauaagugugugaccgugauggcucccgacaaaccuagccucgauaucaguuuagagacagucgccauugacaggccagcggaaguucggaaggugugcuacaacgcaguacugacucacgugaaaaucaaugauaagugucccuccaccggugaggcccaucuugcugaagagaacgaaggcgacaaugccugcaaacguacauauucugaccgcggguggggaaacggcugugguuuguuugggaagggaagcauugucgcaugcgcuaaguuuaccugcgccaaauccaugucacuguucgagguggaucaaacgaagauccaguacguuauaagagcgcagcuacacgugggcgccaaacaggagaauuggaacacugacauuaagacacucaaauucgaugcacugaguggcagccaagaagucgaguuuaucggguacggaaaggcuacccuugaaugucaggugcagacugccguagacuucgguaacucuuauauugcugagauggaaacagaguccuggaucguugauaggcagugggcccaagaccugaccuugccuuggcagucaggcagcgggggaguguggcgggagaugcaccaucucgucgaauuugagccaccgcacgcagccacgauccgagugcuggcuuuaggcaaucaggaagguagucugaaaaccgcgcucacaggggcaaugcgcgucacuaaggauaccaacgacaauaaccuuuacaagcugcauggcggacacgugucuugcagaguuaaauuguccgcccuaacacugaagggcacuagcuauaaaauuuguaccgauaagauguucuuugugaaaaaucccacagacaccgggcacggaacuguagucaugcaagugaagguuucgaagggugcuccuugcaggauaccagugaucgucgccgaugaccucacggcagccauuaacaaaggcauccuggugacaguaaaucccauagcuucuaccaacgacgaugaggugcuuauugaaguuaauccuccauucggggacuccuacaucaucgucggacggggcgauucacgccugacuuaucaguggcauaaggaggguaguagcggcagcacccuggggaaggccuucuccacaacucucaaaggagcucagagacuugcagcccugggugacacggcgugggauuuuggcucuaucgggggaguguucaacucaauuggcagggcuguccaccaaguuuuugguggggccuuccggaccuuguuuggaggcaugaguuggauaacacagggcuuaaugggggcacugcuacucuggaugggagugaaugcccgcgaccgaagcaucgcucuggcauuccuugccacugguggcguacugguguuuuuggcuaccaacguccaugccuga

SEQ ID NO: 377 - RNA, 2025 nt, Artificial Sequence
  derived and/or modified CDS sequence (opt3) from YFV__NC_002031.1__SSIgE-prMEdelstem_TM-JEV (polyprotein: aa126-680)
auggacuggaccuggauccuguuccucguggccgcugcaacaagaguccacagcagaaagaacagguggcuccuucugaauguuacaagcgaggacuugggcaaaacuuucuccguggggacgggaaacugcaccacaaauaucuuagaagccaaguacuggugucccgauucuauggaguauaacugcccuaaucugucaccacgggaggaaccggacgauauugacuguuggugcuacgguguagaaaacgugcgcgucgcuuauggcaaaugugauagugcagggcgaagccguagauccaggcgggccauagaccuacccacucacgagaaucauggacucaagacccgccaggagaaauggaugacaggcagaaugggugaaaggcaacugcagaagaucgagcggugguuugugcgcaacccuuucuuugcgguuaccgcucuuacuauugccuaccugguggggucuaauaugacacagcgagucgugaucgcauugcucguacuggccguuggaccagcuuauucggcacacugcauuggcaucaccgauagagacuucauagaaggcgugcaugggggaacgugggucucagccacucuggagcaggauaagugugugaccgugauggcucccgacaaaccuagccucgauaucaguuuagagacagucgccauugacaggccagcggaaguucggaaggugugcuacaacgcaguacugacucacgugaaaaucaaugauaagugucccuccaccggugaggcccaucuugcugaagagaacgaaggcgacaaugccugcaaacguacauauucugaccgcggguggggaaacggcugugguuuguuugggaagggaagcauugucgcaugcgcuaaguuuaccugcgccaaauccaugucacuguucgagguggaucaaacgaagauccaguacguuauaagagcgcagcuacacgugggcgccaaacaggagaauuggaacacugacauuaagacacucaaauucgaugcacugaguggcagccaagaagucgaguuuaucggguacggaaaggcuacccuugaaugucaggugcagacugccguagacuucgguaacucuuauauugcugagauggaaacagaguccuggaucguugauaggcagugggcccaagaccugaccuugccuuggcagucaggcagcgggggaguguggcgggagaugcaccaucucgucgaauuugagccaccgcacgcagccacgauccgagugcuggcuuuaggcaaucaggaagguagucugaaaaccgcgcucacaggggcaaugcgcgucacuaaggauaccaacgacaauaaccuuuacaagcugcauggcggacacgugucuugcagaguuaaauuguccgcccuaacacugaagggcacuagcuauaaaauuuguaccgauaagauguucuuugugaaaaaucccacagacaccgggcacggaacuguagucaugcaagugaagguuucgaagggugcuccuugcaggauaccagugaucgucgccgaugaccucacggcagccauuaacaaaggcauccuggugacaguaaaucccauagcuucuaccaacgacgaugaggugcuuauugaaguuaauccuccauucggggacuccuacaucaucgucggacggggcgauucacgccugacuuaucaguggcauaaggaggguaguagcggcagcacccuggggaaggccuucuccacaacucucaaaggagcucagagacuugcagcccugggugacacggcgugggauuuuggcucuaucgggggaguguucaacucaauuggcagggcuguccaccaaguuuuugguggggccuuccggaccuuguuuggaggcaugaguuggauaacacagggcuuaaugggggcacugcuacucuggaugggagugaaugcccgcgaccgaagcaucgcucuggcauuccuugccacugguggcguacugguguuuuuggcuaccaacguccaugccuga

SEQ ID NO: 378 - RNA, 2055 nt, Artificial Sequence
  derived and/or modified CDS sequence (opt3) from YFV__NC_002031.1__SSjev-prMEdelstem_TM-JEV (polyprotein: aa122-680)
augggcaagagaagcgccggguccaucauguggcuggcuucucucgcaguggucauugccugcgcgggagcugugacccuggucagaaagaacagguggcuccuucugaauguuacaagcgaggacuugggcaaaacuuucuccguggggacgggaaacugcaccacaaauaucuuagaagccaaguacuggugucccgauucuauggaguauaacugcccuaaucugucaccacgggaggaaccggacgauauugacuguuggugcuacgguguagaaaacgugcgcgucgcuuauggcaaaugugauagugcagggcgaagccguagauccaggcgggccauagaccuacccacucacgagaaucauggacucaagacccgccaggagaaauggaugacaggcagaaugggugaaaggcaacugcagaagaucgagcggugguuugugcgcaacccuuucuuugcgguuaccgcucuuacuauugccuaccugguggggucuaauaugacacagcgagucgugaucgcauugcucguacuggccguuggaccagcuuauucggcacacugcauuggcaucaccgauagagacuucauagaaggcgugcaugggggaacgugggucucagccacucuggagcaggauaagugugugaccgugauggcucccgacaaaccuagccucgauaucaguuuagagacagucgccauugacaggccagcggaaguucggaaggugugcuacaacgcaguacugacucacgugaaaaucaaugauaagugucccuccaccggugaggcccaucuugcugaagagaacgaaggcgacaaugccugcaaacguacauauucugaccgcggguggggaaacggcugugguuuguuugggaagggaagcauugucgcaugcgcuaaguuuaccugcgccaaauccaugucacuguucgagguggaucaaacgaagauccaguacguuauaagagcgcagcuacacgugggcgccaaacaggagaauuggaacacugacauuaagacacucaaauucgaugcacugaguggcagccaagaagucgaguuuaucggguacggaaaggcuacccuugaaugucaggugcagacugccguagacuucgguaacucuuauauugcugagauggaaacagaguccuggaucguugauaggcagugggcccaagaccugaccuugccuuggcagucaggcagcgggggaguguggcgggagaugcaccaucucgucgaauuugagccaccgcacgcagccacgauccgagugcuggcuuuaggcaaucaggaagguagucugaaaaccgcgcucacaggggcaaugcgcgucacuaaggauaccaacgacaauaaccuuuacaagcugcauggcggacacgugucuugcagaguuaaauuguccgcccuaacacugaagggcacuagcuauaaaauuuguaccgauaagauguucuuugugaaaaaucccacagacaccgggcacggaacuguagucaugcaagugaagguuucgaagggugcuccuugcaggauaccagugaucgucgccgaugaccucacggcagccauuaacaaaggcauccuggugacaguaaaucccauagcuucuaccaacgacgaugaggugcuuauugaaguuaauccuccauucggggacuccuacaucaucgucggacggggcgauucacgccugacuuaucaguggcauaaggaggguaguagcggcagcacccuggggaaggccuucuccacaacucucaaaggagcucagagacuugcagcccugggugacacggcgugggauuuuggcucuaucgggggaguguucaacucaauuggcagggcuguccaccaaguuuuugguggggccuuccggaccuuguuuggaggcaugaguuggauaacacagggcuuaaugggggcacugcuacucuggaugggagugaaugcccgcgaccgaagcaucgcucuggcauuccuugccacugguggcguacugguguuuuuggcuaccaacguccaugccuga

SEQ ID NO: 379 - RNA, 2043 nt, Artificial Sequence
  derived and/or modified CDS sequence (opt3) from YFV__NC_002031.1__SSjev-prMEdelstem_TM-JEV (polyprotein: aa126-680)
augggcaagagaagcgccggguccaucauguggcuggcuucucucgcaguggucauugccugcgcgggagcuagaaagaacagguggcuccuucugaauguuacaagcgaggacuugggcaaaacuuucuccguggggacgggaaacugcaccacaaauaucuuagaagccaaguacuggugucccgauucuauggaguauaacugcccuaaucugucaccacgggaggaaccggacgauauugacuguuggugcuacgguguagaaaacgugcgcgucgcuuauggcaaaugugauagugcagggcgaagccguagauccaggcgggccauagaccuacccacucacgagaaucauggacucaagacccgccaggagaaauggaugacaggcagaaugggugaaaggcaacugcagaagaucgagcggugguuugugcgcaacccuuucuuugcgguuaccgcucuuacuauugccuaccugguggggucuaauaugacacagcgagucgugaucgcauugcucguacuggccguuggaccagcuuauucggcacacugcauuggcaucaccgauagagacuucauagaaggcgugcaugggggaacgugggucucagccacucuggagcaggauaagugugugaccgugauggcucccgacaaaccuagccucgauaucaguuuagagacagucgccauugacaggccagcggaaguucggaaggugugcuacaacgcaguacugacucacgugaaaaucaaugauaagugucccuccaccggugaggcccaucuugcugaagagaacgaaggcgacaaugccugcaaacguacauauucugaccgcggguggggaaacggcugugguuuguuugggaagggaagcauugucgcaugcgcuaaguuuaccugcgccaaauccaugucacuguucgagguggaucaaacgaagauccaguacguuauaagagcgcagcuacacgugggcgccaaacaggagaauuggaacacugacauuaagacacucaaauucgaugcacugaguggcagccaagaagucgaguuuaucggguacggaaaggcuacccuugaaugucaggugcagacugccguagacuucgguaacucuuauauugcugagauggaaacagaguccuggaucguugauaggcagugggcccaagaccugaccuugccuuggcagucaggcagcgggggaguguggcgggagaugcaccaucucgucgaauuugagccaccgcacgcagccacgauccgagugcuggcuuuaggcaaucaggaagguagucugaaaaccgcgcucacaggggcaaugcgcgucacuaaggauaccaacgacaauaaccuuuacaagcugcauggcggacacgugucuugcagaguuaaauuguccgcccuaacacugaagggcacuagcuauaaaauuuguaccgauaagauguucuuugugaaaaaucccacagacaccgggcacggaacuguagucaugcaagugaagguuucgaagggugcuccuugcaggauaccagugaucgucgccgaugaccucacggcagccauuaacaaaggcauccuggugacaguaaaucccauagcuucuaccaacgacgaugaggugcuuauugaaguuaauccuccauucggggacuccuacaucaucgucggacggggcgauucacgccugacuuaucaguggcauaaggaggguaguagcggcagcacccuggggaaggccuucuccacaacucucaaaggagcucagagacuugcagcccugggugacacggcgugggauuuuggcucuaucgggggaguguucaacucaauuggcagggcuguccaccaaguuuuugguggggccuuccggaccuuguuuggaggcaugaguuggauaacacagggcuuaaugggggcacugcuacucuggaugggagugaaugcccgcgaccgaagcaucgcucuggcauuccuugccacugguggcguacugguguuuuuggcuaccaacguccaugccuga

SEQ ID NO: 380 - RNA, 2094 nt, Artificial Sequence
  derived and/or modified CDS sequence (opt4) from YFV__NC_002031.1__X-SS-prME-XX (polyprotein: aa92-788)
augagaggccugagcagcagaaagagaagaagccacgacgugcugaccgugcaguuccugauccugggcaugcugcugaugaccggcggcgugacccuggugagaaagaacagauggcugcugcugaacgugaccagcgaggaccugggcaagaccuucagcgugggcaccggcaacugcaccaccaacauccuggaggccaaguacuggugccccgacagcauggaguacaacugccccaaccugagccccagagaggagcccgacgacaucgacugcuggugcuacggcguggagaacgugagaguggccuacggcaagugcgacagcgccggcagaagcagaagaagcagaagagccaucgaccugcccacccacgagaaccacggccugaagaccagacaggagaaguggaugaccggcagaaugggcgagagacagcugcagaagaucgagagaugguucgugagaaaccccuucuucgccgugaccgcccugaccaucgccuaccuggugggcagcaacaugacccagagaguggugaucgcccugcuggugcuggccgugggccccgccuacagcgcccacugcaucggcaucaccgacagagacuucaucgagggcgugcacggcggcaccugggugagcgccacccuggagcaggacaagugcgugaccgugauggcccccgacaagcccagccuggacaucagccuggagaccguggccaucgacagacccgccgaggugagaaaggugugcuacaacgccgugcugacccacgugaagaucaacgacaagugccccagcaccggcgaggcccaccuggccgaggagaacgagggcgacaacgccugcaagagaaccuacagcgacagaggcuggggcaacggcugcggccuguucggcaagggcagcaucguggccugcgccaaguucaccugcgccaagagcaugagccuguucgagguggaccagaccaagauccaguacgugaucagagcccagcugcacgugggcgccaagcaggagaacuggaacaccgacaucaagacccugaaguucgacgcccugagcggcagccaggagguggaguucaucggcuacggcaaggccacccuggagugccaggugcagaccgccguggacuucggcaacagcuacaucgccgagauggagaccgagagcuggaucguggacagacagugggcccaggaccugacccugcccuggcagagcggcagcggcggcguguggagagagaugcaccaccugguggaguucgagcccccccacgccgccaccaucagagugcuggcccugggcaaccaggagggcagccugaagaccgcccugaccggcgccaugagagugaccaaggacaccaacgacaacaaccuguacaagcugcacggcggccacgugagcugcagagugaagcugagcgcccugacccugaagggcaccagcuacaagaucugcaccgacaagauguucuucgugaagaaccccaccgacaccggccacggcaccguggugaugcaggugaaggugagcaagggcgcccccugcagaauccccgugaucguggccgacgaccugaccgccgccaucaacaagggcauccuggugaccgugaaccccaucgccagcaccaacgacgacgaggugcugaucgaggugaacccccccuucggcgacagcuacaucaucgugggcagaggcgacagcagacugaccuaccaguggcacaaggagggcagcagcaucggcaagcuguucacccagaccaugaagggcguggagagacuggccgugaugggcgacaccgccugggacuucagcagcgccggcggcuucuucaccagcgugggcaagggcauccacaccguguucggcagcgccuuccagggccuguucggcggccugaacuggaucaccaaggugaucaugggcgccgugcugaucugggugggcaucaacaccagaaacaugaccaugagcaugagcaugauccuggugggcgugaucaugauguuccugagccugggcgugggcgccgaccagggcugcgccaucaacuucggcaaguga

SEQ ID NO: 381 - RNA, 2064 nt, Artificial Sequence
  derived and/or modified CDS sequence (opt4) from YFV__NC_002031.1__X-SS-prME (polyprotein: aa92-778)
augagaggccugagcagcagaaagagaagaagccacgacgugcugaccgugcaguuccugauccugggcaugcugcugaugaccggcggcgugacccuggugagaaagaacagauggcugcugcugaacgugaccagcgaggaccugggcaagaccuucagcgugggcaccggcaacugcaccaccaacauccuggaggccaaguacuggugccccgacagcauggaguacaacugccccaaccugagccccagagaggagcccgacgacaucgacugcuggugcuacggcguggagaacgugagaguggccuacggcaagugcgacagcgccggcagaagcagaagaagcagaagagccaucgaccugcccacccacgagaaccacggccugaagaccagacaggagaaguggaugaccggcagaaugggcgagagacagcugcagaagaucgagagaugguucgugagaaaccccuucuucgccgugaccgcccugaccaucgccuaccuggugggcagcaacaugacccagagaguggugaucgcccugcuggugcuggccgugggccccgccuacagcgcccacugcaucggcaucaccgacagagacuucaucgagggcgugcacggcggcaccugggugagcgccacccuggagcaggacaagugcgugaccgugauggcccccgacaagcccagccuggacaucagccuggagaccguggccaucgacagacccgccgaggugagaaaggugugcuacaacgccgugcugacccacgugaagaucaacgacaagugccccagcaccggcgaggcccaccuggccgaggagaacgagggcgacaacgccugcaagagaaccuacagcgacagaggcuggggcaacggcugcggccuguucggcaagggcagcaucguggccugcgccaaguucaccugcgccaagagcaugagccuguucgagguggaccagaccaagauccaguacgugaucagagcccagcugcacgugggcgccaagcaggagaacuggaacaccgacaucaagacccugaaguucgacgcccugagcggcagccaggagguggaguucaucggcuacggcaaggccacccuggagugccaggugcagaccgccguggacuucggcaacagcuacaucgccgagauggagaccgagagcuggaucguggacagacagugggcccaggaccugacccugcccuggcagagcggcagcggcggcguguggagagagaugcaccaccugguggaguucgagcccccccacgccgccaccaucagagugcuggcccugggcaaccaggagggcagccugaagaccgcccugaccggcgccaugagagugaccaaggacaccaacgacaacaaccuguacaagcugcacggcggccacgugagcugcagagugaagcugagcgcccugacccugaagggcaccagcuacaagaucugcaccgacaagauguucuucgugaagaaccccaccgacaccggccacggcaccguggugaugcaggugaaggugagcaagggcgcccccugcagaauccccgugaucguggccgacgaccugaccgccgccaucaacaagggcauccuggugaccgugaaccccaucgccagcaccaacgacgacgaggugcugaucgaggugaacccccccuucggcgacagcuacaucaucgugggcagaggcgacagcagacugaccuaccaguggcacaaggagggcagcagcaucggcaagcuguucacccagaccaugaagggcguggagagacuggccgugaugggcgacaccgccugggacuucagcagcgccggcggcuucuucaccagcgugggcaagggcauccacaccguguucggcagcgccuuccagggccuguucggcggccugaacuggaucaccaaggugaucaugggcgccgugcugaucugggugggcaucaacaccagaaacaugaccaugagcaugagcaugauccuggugggcgugaucaugauguuccugagccugggcgugggcgccuga

SEQ ID NO: 382 - RNA, 2067 nt, Artificial Sequence
  derived and/or modified CDS sequence (opt4) from YFV__NC_002031.1__SS-prME-XX (polyprotein: M,aa102-788)
augagccacgacgugcugaccgugcaguuccugauccugggcaugcugcugaugaccggcggcgugacccuggugagaaagaacagauggcugcugcugaacgugaccagcgaggaccugggcaagaccuucagcgugggcaccggcaacugcaccaccaacauccuggaggccaaguacuggugccccgacagcauggaguacaacugccccaaccugagccccagagaggagcccgacgacaucgacugcuggugcuacggcguggagaacgugagaguggccuacggcaagugcgacagcgccggcagaagcagaagaagcagaagagccaucgaccugcccacccacgagaaccacggccugaagaccagacaggagaaguggaugaccggcagaaugggcgagagacagcugcagaagaucgagagaugguucgugagaaaccccuucuucgccgugaccgcccugaccaucgccuaccuggugggcagcaacaugacccagagaguggugaucgcccugcuggugcuggccgugggccccgccuacagcgcccacugcaucggcaucaccgacagagacuucaucgagggcgugcacggcggcaccugggugagcgccacccuggagcaggacaagugcgugaccgugauggcccccgacaagcccagccuggacaucagccuggagaccguggccaucgacagacccgccgaggugagaaaggugugcuacaacgccgugcugacccacgugaagaucaacgacaagugccccagcaccggcgaggcccaccuggccgaggagaacgagggcgacaacgccugcaagagaaccuacagcgacagaggcuggggcaacggcugcggccuguucggcaagggcagcaucguggccugcgccaaguucaccugcgccaagagcaugagccuguucgagguggaccagaccaagauccaguacgugaucagagcccagcugcacgugggcgccaagcaggagaacuggaacaccgacaucaagacccugaaguucgacgcccugagcggcagccaggagguggaguucaucggcuacggcaaggccacccuggagugccaggugcagaccgccguggacuucggcaacagcuacaucgccgagauggagaccgagagcuggaucguggacagacagugggcccaggaccugacccugcccuggcagagcggcagcggcggcguguggagagagaugcaccaccugguggaguucgagcccccccacgccgccaccaucagagugcuggcccugggcaaccaggagggcagccugaagaccgcccugaccggcgccaugagagugaccaaggacaccaacgacaacaaccuguacaagcugcacggcggccacgugagcugcagagugaagcugagcgcccugacccugaagggcaccagcuacaagaucugcaccgacaagauguucuucgugaagaaccccaccgacaccggccacggcaccguggugaugcaggugaaggugagcaagggcgcccccugcagaauccccgugaucguggccgacgaccugaccgccgccaucaacaagggcauccuggugaccgugaaccccaucgccagcaccaacgacgacgaggugcugaucgaggugaacccccccuucggcgacagcuacaucaucgugggcagaggcgacagcagacugaccuaccaguggcacaaggagggcagcagcaucggcaagcuguucacccagaccaugaagggcguggagagacuggccgugaugggcgacaccgccugggacuucagcagcgccggcggcuucuucaccagcgugggcaagggcauccacaccguguucggcagcgccuuccagggccuguucggcggccugaacuggaucaccaaggugaucaugggcgccgugcugaucugggugggcaucaacaccagaaacaugaccaugagcaugagcaugauccuggugggcgugaucaugauguuccugagccugggcgugggcgccgaccagggcugcgccaucaacuucggcaaguga

SEQ ID NO: 383 - RNA, 2061 nt, Artificial Sequence
  derived and/or modified CDS sequence (opt4) from YFV__NC_002031.1__SS-prME-XX (polyprotein: M,aa104-788)
auggacgugcugaccgugcaguuccugauccugggcaugcugcugaugaccggcggcgugacccuggugagaaagaacagauggcugcugcugaacgugaccagcgaggaccugggcaagaccuucagcgugggcaccggcaacugcaccaccaacauccuggaggccaaguacuggugccccgacagcauggaguacaacugccccaaccugagccccagagaggagcccgacgacaucgacugcuggugcuacggcguggagaacgugagaguggccuacggcaagugcgacagcgccggcagaagcagaagaagcagaagagccaucgaccugcccacccacgagaaccacggccugaagaccagacaggagaaguggaugaccggcagaaugggcgagagacagcugcagaagaucgagagaugguucgugagaaaccccuucuucgccgugaccgcccugaccaucgccuaccuggugggcagcaacaugacccagagaguggugaucgcccugcuggugcuggccgugggccccgccuacagcgcccacugcaucggcaucaccgacagagacuucaucgagggcgugcacggcggcaccugggugagcgccacccuggagcaggacaagugcgugaccgugauggcccccgacaagcccagccuggacaucagccuggagaccguggccaucgacagacccgccgaggugagaaaggugugcuacaacgccgugcugacccacgugaagaucaacgacaagugccccagcaccggcgaggcccaccuggccgaggagaacgagggcgacaacgccugcaagagaaccuacagcgacagaggcuggggcaacggcugcggccuguucggcaagggcagcaucguggccugcgccaaguucaccugcgccaagagcaugagccuguucgagguggaccagaccaagauccaguacgugaucagagcccagcugcacgugggcgccaagcaggagaacuggaacaccgacaucaagacccugaaguucgacgcccugagcggcagccaggagguggaguucaucggcuacggcaaggccacccuggagugccaggugcagaccgccguggacuucggcaacagcuacaucgccgagauggagaccgagagcuggaucguggacagacagugggcccaggaccugacccugcccuggcagagcggcagcggcggcguguggagagagaugcaccaccugguggaguucgagcccccccacgccgccaccaucagagugcuggcccugggcaaccaggagggcagccugaagaccgcccugaccggcgccaugagagugaccaaggacaccaacgacaacaaccuguacaagcugcacggcggccacgugagcugcagagugaagcugagcgcccugacccugaagggcaccagcuacaagaucugcaccgacaagauguucuucgugaagaaccccaccgacaccggccacggcaccguggugaugcaggugaaggugagcaagggcgcccccugcagaauccccgugaucguggccgacgaccugaccgccgccaucaacaagggcauccuggugaccgugaaccccaucgccagcaccaacgacgacgaggugcugaucgaggugaacccccccuucggcgacagcuacaucaucgugggcagaggcgacagcagacugaccuaccaguggcacaaggagggcagcagcaucggcaagcuguucacccagaccaugaagggcguggagagacuggccgugaugggcgacaccgccugggacuucagcagcgccggcggcuucuucaccagcgugggcaagggcauccacaccguguucggcagcgccuuccagggccuguucggcggccugaacuggaucaccaaggugaucaugggcgccgugcugaucugggugggcaucaacaccagaaacaugaccaugagcaugagcaugauccuggugggcgugaucaugauguuccugagccugggcgugggcgccgaccagggcugcgccaucaacuucggcaaguga

SEQ ID NO: 384 - RNA, 2037 nt, Artificial Sequence
  derived and/or modified CDS sequence (opt4) from YFV__NC_002031.1__SS-prME (polyprotein: M,aa102-778)
augagccacgacgugcugaccgugcaguuccugauccugggcaugcugcugaugaccggcggcgugacccuggugagaaagaacagauggcugcugcugaacgugaccagcgaggaccugggcaagaccuucagcgugggcaccggcaacugcaccaccaacauccuggaggccaaguacuggugccccgacagcauggaguacaacugccccaaccugagccccagagaggagcccgacgacaucgacugcuggugcuacggcguggagaacgugagaguggccuacggcaagugcgacagcgccggcagaagcagaagaagcagaagagccaucgaccugcccacccacgagaaccacggccugaagaccagacaggagaaguggaugaccggcagaaugggcgagagacagcugcagaagaucgagagaugguucgugagaaaccccuucuucgccgugaccgcccugaccaucgccuaccuggugggcagcaacaugacccagagaguggugaucgcccugcuggugcuggccgugggccccgccuacagcgcccacugcaucggcaucaccgacagagacuucaucgagggcgugcacggcggcaccugggugagcgccacccuggagcaggacaagugcgugaccgugauggcccccgacaagcccagccuggacaucagccuggagaccguggccaucgacagacccgccgaggugagaaaggugugcuacaacgccgugcugacccacgugaagaucaacgacaagugccccagcaccggcgaggcccaccuggccgaggagaacgagggcgacaacgccugcaagagaaccuacagcgacagaggcuggggcaacggcugcggccuguucggcaagggcagcaucguggccugcgccaaguucaccugcgccaagagcaugagccuguucgagguggaccagaccaagauccaguacgugaucagagcccagcugcacgugggcgccaagcaggagaacuggaacaccgacaucaagacccugaaguucgacgcccugagcggcagccaggagguggaguucaucggcuacggcaaggccacccuggagugccaggugcagaccgccguggacuucggcaacagcuacaucgccgagauggagaccgagagcuggaucguggacagacagugggcccaggaccugacccugcccuggcagagcggcagcggcggcguguggagagagaugcaccaccugguggaguucgagcccccccacgccgccaccaucagagugcuggcccugggcaaccaggagggcagccugaagaccgcccugaccggcgccaugagagugaccaaggacaccaacgacaacaaccuguacaagcugcacggcggccacgugagcugcagagugaagcugagcgcccugacccugaagggcaccagcuacaagaucugcaccgacaagauguucuucgugaagaaccccaccgacaccggccacggcaccguggugaugcaggugaaggugagcaagggcgcccccugcagaauccccgugaucguggccgacgaccugaccgccgccaucaacaagggcauccuggugaccgugaaccccaucgccagcaccaacgacgacgaggugcugaucgaggugaacccccccuucggcgacagcuacaucaucgugggcagaggcgacagcagacugaccuaccaguggcacaaggagggcagcagcaucggcaagcuguucacccagaccaugaagggcguggagagacuggccgugaugggcgacaccgccugggacuucagcagcgccggcggcuucuucaccagcgugggcaagggcauccacaccguguucggcagcgccuuccagggccuguucggcggccugaacuggaucaccaaggugaucaugggcgccgugcugaucugggugggcaucaacaccagaaacaugaccaugagcaugagcaugauccuggugggcgugaucaugauguuccugagccugggcgugggcgccuga

SEQ ID NO: 385 - RNA, 2031 nt, Artificial Sequence
  derived and/or modified CDS sequence (opt4) from YFV__NC_002031.1__SS-prME (polyprotein: M,aa104-778)
auggacgugcugaccgugcaguuccugauccugggcaugcugcugaugaccggcggcgugacccuggugagaaagaacagauggcugcugcugaacgugaccagcgaggaccugggcaagaccuucagcgugggcaccggcaacugcaccaccaacauccuggaggccaaguacuggugccccgacagcauggaguacaacugccccaaccugagccccagagaggagcccgacgacaucgacugcuggugcuacggcguggagaacgugagaguggccuacggcaagugcgacagcgccggcagaagcagaagaagcagaagagccaucgaccugcccacccacgagaaccacggccugaagaccagacaggagaaguggaugaccggcagaaugggcgagagacagcugcagaagaucgagagaugguucgugagaaaccccuucuucgccgugaccgcccugaccaucgccuaccuggugggcagcaacaugacccagagaguggugaucgcccugcuggugcuggccgugggccccgccuacagcgcccacugcaucggcaucaccgacagagacuucaucgagggcgugcacggcggcaccugggugagcgccacccuggagcaggacaagugcgugaccgugauggcccccgacaagcccagccuggacaucagccuggagaccguggccaucgacagacccgccgaggugagaaaggugugcuacaacgccgugcugacccacgugaagaucaacgacaagugccccagcaccggcgaggcccaccuggccgaggagaacgagggcgacaacgccugcaagagaaccuacagcgacagaggcuggggcaacggcugcggccuguucggcaagggcagcaucguggccugcgccaaguucaccugcgccaagagcaugagccuguucgagguggaccagaccaagauccaguacgugaucagagcccagcugcacgugggcgccaagcaggagaacuggaacaccgacaucaagacccugaaguucgacgcccugagcggcagccaggagguggaguucaucggcuacggcaaggccacccuggagugccaggugcagaccgccguggacuucggcaacagcuacaucgccgagauggagaccgagagcuggaucguggacagacagugggcccaggaccugacccugcccuggcagagcggcagcggcggcguguggagagagaugcaccaccugguggaguucgagcccccccacgccgccaccaucagagugcuggcccugggcaaccaggagggcagccugaagaccgcccugaccggcgccaugagagugaccaaggacaccaacgacaacaaccuguacaagcugcacggcggccacgugagcugcagagugaagcugagcgcccugacccugaagggcaccagcuacaagaucugcaccgacaagauguucuucgugaagaaccccaccgacaccggccacggcaccguggugaugcaggugaaggugagcaagggcgcccccugcagaauccccgugaucguggccgacgaccugaccgccgccaucaacaagggcauccuggugaccgugaaccccaucgccagcaccaacgacgacgaggugcugaucgaggugaacccccccuucggcgacagcuacaucaucgugggcagaggcgacagcagacugaccuaccaguggcacaaggagggcagcagcaucggcaagcuguucacccagaccaugaagggcguggagagacuggccgugaugggcgacaccgccugggacuucagcagcgccggcggcuucuucaccagcgugggcaagggcauccacaccguguucggcagcgccuuccagggccuguucggcggccugaacuggaucaccaaggugaucaugggcgccgugcugaucugggugggcaucaacaccagaaacaugaccaugagcaugagcaugauccuggugggcgugaucaugauguuccugagccugggcgugggcgccuga

SEQ ID NO: 386 - RNA, 2073 nt, Artificial Sequence
  derived and/or modified CDS sequence (opt4) from YFV__NC_002031.1__X-SS-prMEdelstem_TM-JEV (polyprotein: aa92-680)
augagaggccugagcagcagaaagagaagaagccacgacgugcugaccgugcaguuccugauccugggcaugcugcugaugaccggcggcgugacccuggugagaaagaacagauggcugcugcugaacgugaccagcgaggaccugggcaagaccuucagcgugggcaccggcaacugcaccaccaacauccuggaggccaaguacuggugccccgacagcauggaguacaacugccccaaccugagccccagagaggagcccgacgacaucgacugcuggugcuacggcguggagaacgugagaguggccuacggcaagugcgacagcgccggcagaagcagaagaagcagaagagccaucgaccugcccacccacgagaaccacggccugaagaccagacaggagaaguggaugaccggcagaaugggcgagagacagcugcagaagaucgagagaugguucgugagaaaccccuucuucgccgugaccgcccugaccaucgccuaccuggugggcagcaacaugacccagagaguggugaucgcccugcuggugcuggccgugggccccgccuacagcgcccacugcaucggcaucaccgacagagacuucaucgagggcgugcacggcggcaccugggugagcgccacccuggagcaggacaagugcgugaccgugauggcccccgacaagcccagccuggacaucagccuggagaccguggccaucgacagacccgccgaggugagaaaggugugcuacaacgccgugcugacccacgugaagaucaacgacaagugccccagcaccggcgaggcccaccuggccgaggagaacgagggcgacaacgccugcaagagaaccuacagcgacagaggcuggggcaacggcugcggccuguucggcaagggcagcaucguggccugcgccaaguucaccugcgccaagagcaugagccuguucgagguggaccagaccaagauccaguacgugaucagagcccagcugcacgugggcgccaagcaggagaacuggaacaccgacaucaagacccugaaguucgacgcccugagcggcagccaggagguggaguucaucggcuacggcaaggccacccuggagugccaggugcagaccgccguggacuucggcaacagcuacaucgccgagauggagaccgagagcuggaucguggacagacagugggcccaggaccugacccugcccuggcagagcggcagcggcggcguguggagagagaugcaccaccugguggaguucgagcccccccacgccgccaccaucagagugcuggcccugggcaaccaggagggcagccugaagaccgcccugaccggcgccaugagagugaccaaggacaccaacgacaacaaccuguacaagcugcacggcggccacgugagcugcagagugaagcugagcgcccugacccugaagggcaccagcuacaagaucugcaccgacaagauguucuucgugaagaaccccaccgacaccggccacggcaccguggugaugcaggugaaggugagcaagggcgcccccugcagaauccccgugaucguggccgacgaccugaccgccgccaucaacaagggcauccuggugaccgugaaccccaucgccagcaccaacgacgacgaggugcugaucgaggugaacccccccuucggcgacagcuacaucaucgugggcagaggcgacagcagacugaccuaccaguggcacaaggagggcagcagcggcagcacccugggcaaggccuucagcaccacccugaagggcgcccagagacuggccgcccugggcgacaccgccugggacuucggcagcaucggcggcguguucaacagcaucggcagagccgugcaccagguguucggcggcgccuucagaacccuguucggcggcaugagcuggaucacccagggccugaugggcgcccugcugcuguggaugggcgugaacgccagagacagaagcaucgcccuggccuuccuggccaccggcggcgugcugguguuccuggccaccaacgugcacgccuga

SEQ ID NO: 387 - RNA, 2046 nt, Artificial Sequence
  derived and/or modified CDS sequence (opt4) from YFV__NC_002031.1__SS-prMEdelstem_TM-JEV (polyprotein: M,aa102-680)
augagccacgacgugcugaccgugcaguuccugauccugggcaugcugcugaugaccggcggcgugacccuggugagaaagaacagauggcugcugcugaacgugaccagcgaggaccugggcaagaccuucagcgugggcaccggcaacugcaccaccaacauccuggaggccaaguacuggugccccgacagcauggaguacaacugccccaaccugagccccagagaggagcccgacgacaucgacugcuggugcuacggcguggagaacgugagaguggccuacggcaagugcgacagcgccggcagaagcagaagaagcagaagagccaucgaccugcccacccacgagaaccacggccugaagaccagacaggagaaguggaugaccggcagaaugggcgagagacagcugcagaagaucgagagaugguucgugagaaaccccuucuucgccgugaccgcccugaccaucgccuaccuggugggcagcaacaugacccagagaguggugaucgcccugcuggugcuggccgugggccccgccuacagcgcccacugcaucggcaucaccgacagagacuucaucgagggcgugcacggcggcaccugggugagcgccacccuggagcaggacaagugcgugaccgugauggcccccgacaagcccagccuggacaucagccuggagaccguggccaucgacagacccgccgaggugagaaaggugugcuacaacgccgugcugacccacgugaagaucaacgacaagugccccagcaccggcgaggcccaccuggccgaggagaacgagggcgacaacgccugcaagagaaccuacagcgacagaggcuggggcaacggcugcggccuguucggcaagggcagcaucguggccugcgccaaguucaccugcgccaagagcaugagccuguucgagguggaccagaccaagauccaguacgugaucagagcccagcugcacgugggcgccaagcaggagaacuggaacaccgacaucaagacccugaaguucgacgcccugagcggcagccaggagguggaguucaucggcuacggcaaggccacccuggagugccaggugcagaccgccguggacuucggcaacagcuacaucgccgagauggagaccgagagcuggaucguggacagacagugggcccaggaccugacccugcccuggcagagcggcagcggcggcguguggagagagaugcaccaccugguggaguucgagcccccccacgccgccaccaucagagugcuggcccugggcaaccaggagggcagccugaagaccgcccugaccggcgccaugagagugaccaaggacaccaacgacaacaaccuguacaagcugcacggcggccacgugagcugcagagugaagcugagcgcccugacccugaagggcaccagcuacaagaucugcaccgacaagauguucuucgugaagaaccccaccgacaccggccacggcaccguggugaugcaggugaaggugagcaagggcgcccccugcagaauccccgugaucguggccgacgaccugaccgccgccaucaacaagggcauccuggugaccgugaaccccaucgccagcaccaacgacgacgaggugcugaucgaggugaacccccccuucggcgacagcuacaucaucgugggcagaggcgacagcagacugaccuaccaguggcacaaggagggcagcagcggcagcacccugggcaaggccuucagcaccacccugaagggcgcccagagacuggccgcccugggcgacaccgccugggacuucggcagcaucggcggcguguucaacagcaucggcagagccgugcaccagguguucggcggcgccuucagaacccuguucggcggcaugagcuggaucacccagggccugaugggcgcccugcugcuguggaugggcgugaacgccagagacagaagcaucgcccuggccuuccuggccaccggcggcgugcugguguuccuggccaccaacgugcacgccuga

SEQ ID NO: 388 - RNA, 2040 nt, Artificial Sequence
  derived and/or modified CDS sequence (opt4) from YFV__NC_002031.1__SS-prMEdelstem_TM-JEV (polyprotein: M,aa104-680)
auggacgugcugaccgugcaguuccugauccugggcaugcugcugaugaccggcggcgugacccuggugagaaagaacagauggcugcugcugaacgugaccagcgaggaccugggcaagaccuucagcgugggcaccggcaacugcaccaccaacauccuggaggccaaguacuggugccccgacagcauggaguacaacugccccaaccugagccccagagaggagcccgacgacaucgacugcuggugcuacggcguggagaacgugagaguggccuacggcaagugcgacagcgccggcagaagcagaagaagcagaagagccaucgaccugcccacccacgagaaccacggccugaagaccagacaggagaaguggaugaccggcagaaugggcgagagacagcugcagaagaucgagagaugguucgugagaaaccccuucuucgccgugaccgcccugaccaucgccuaccuggugggcagcaacaugacccagagaguggugaucgcccugcuggugcuggccgugggccccgccuacagcgcccacugcaucggcaucaccgacagagacuucaucgagggcgugcacggcggcaccugggugagcgccacccuggagcaggacaagugcgugaccgugauggcccccgacaagcccagccuggacaucagccuggagaccguggccaucgacagacccgccgaggugagaaaggugugcuacaacgccgugcugacccacgugaagaucaacgacaagugccccagcaccggcgaggcccaccuggccgaggagaacgagggcgacaacgccugcaagagaaccuacagcgacagaggcuggggcaacggcugcggccuguucggcaagggcagcaucguggccugcgccaaguucaccugcgccaagagcaugagccuguucgagguggaccagaccaagauccaguacgugaucagagcccagcugcacgugggcgccaagcaggagaacuggaacaccgacaucaagacccugaaguucgacgcccugagcggcagccaggagguggaguucaucggcuacggcaaggccacccuggagugccaggugcagaccgccguggacuucggcaacagcuacaucgccgagauggagaccgagagcuggaucguggacagacagugggcccaggaccugacccugcccuggcagagcggcagcggcggcguguggagagagaugcaccaccugguggaguucgagcccccccacgccgccaccaucagagugcuggcccugggcaaccaggagggcagccugaagaccgcccugaccggcgccaugagagugaccaaggacaccaacgacaacaaccuguacaagcugcacggcggccacgugagcugcagagugaagcugagcgcccugacccugaagggcaccagcuacaagaucugcaccgacaagauguucuucgugaagaaccccaccgacaccggccacggcaccguggugaugcaggugaaggugagcaagggcgcccccugcagaauccccgugaucguggccgacgaccugaccgccgccaucaacaagggcauccuggugaccgugaaccccaucgccagcaccaacgacgacgaggugcugaucgaggugaacccccccuucggcgacagcuacaucaucgugggcagaggcgacagcagacugaccuaccaguggcacaaggagggcagcagcggcagcacccugggcaaggccuucagcaccacccugaagggcgcccagagacuggccgcccugggcgacaccgccugggacuucggcagcaucggcggcguguucaacagcaucggcagagccgugcaccagguguucggcggcgccuucagaacccuguucggcggcaugagcuggaucacccagggccugaugggcgcccugcugcuguggaugggcgugaacgccagagacagaagcaucgcccuggccuuccuggccaccggcggcgugcugguguuccuggccaccaacgugcacgccuga

SEQ ID NO: 389 - RNA, 2058 nt, Artificial Sequence
  derived and/or modified CDS sequence (opt4) from YFV__NC_002031.1__SSIgE-prME-XX (polyprotein: aa122-788)
auggacuggaccuggauccuguuccugguggccgccgccaccagagugcacagcgugacccuggugagaaagaacagauggcugcugcugaacgugaccagcgaggaccugggcaagaccuucagcgugggcaccggcaacugcaccaccaacauccuggaggccaaguacuggugccccgacagcauggaguacaacugccccaaccugagccccagagaggagcccgacgacaucgacugcuggugcuacggcguggagaacgugagaguggccuacggcaagugcgacagcgccggcagaagcagaagaagcagaagagccaucgaccugcccacccacgagaaccacggccugaagaccagacaggagaaguggaugaccggcagaaugggcgagagacagcugcagaagaucgagagaugguucgugagaaaccccuucuucgccgugaccgcccugaccaucgccuaccuggugggcagcaacaugacccagagaguggugaucgcccugcuggugcuggccgugggccccgccuacagcgcccacugcaucggcaucaccgacagagacuucaucgagggcgugcacggcggcaccugggugagcgccacccuggagcaggacaagugcgugaccgugauggcccccgacaagcccagccuggacaucagccuggagaccguggccaucgacagacccgccgaggugagaaaggugugcuacaacgccgugcugacccacgugaagaucaacgacaagugccccagcaccggcgaggcccaccuggccgaggagaacgagggcgacaacgccugcaagagaaccuacagcgacagaggcuggggcaacggcugcggccuguucggcaagggcagcaucguggccugcgccaaguucaccugcgccaagagcaugagccuguucgagguggaccagaccaagauccaguacgugaucagagcccagcugcacgugggcgccaagcaggagaacuggaacaccgacaucaagacccugaaguucgacgcccugagcggcagccaggagguggaguucaucggcuacggcaaggccacccuggagugccaggugcagaccgccguggacuucggcaacagcuacaucgccgagauggagaccgagagcuggaucguggacagacagugggcccaggaccugacccugcccuggcagagcggcagcggcggcguguggagagagaugcaccaccugguggaguucgagcccccccacgccgccaccaucagagugcuggcccugggcaaccaggagggcagccugaagaccgcccugaccggcgccaugagagugaccaaggacaccaacgacaacaaccuguacaagcugcacggcggccacgugagcugcagagugaagcugagcgcccugacccugaagggcaccagcuacaagaucugcaccgacaagauguucuucgugaagaaccccaccgacaccggccacggcaccguggugaugcaggugaaggugagcaagggcgcccccugcagaauccccgugaucguggccgacgaccugaccgccgccaucaacaagggcauccuggugaccgugaaccccaucgccagcaccaacgacgacgaggugcugaucgaggugaacccccccuucggcgacagcuacaucaucgugggcagaggcgacagcagacugaccuaccaguggcacaaggagggcagcagcaucggcaagcuguucacccagaccaugaagggcguggagagacuggccgugaugggcgacaccgccugggacuucagcagcgccggcggcuucuucaccagcgugggcaagggcauccacaccguguucggcagcgccuuccagggccuguucggcggccugaacuggaucaccaaggugaucaugggcgccgugcugaucugggugggcaucaacaccagaaacaugaccaugagcaugagcaugauccuggugggcgugaucaugauguuccugagccugggcgugggcgccgaccagggcugcgccaucaacuucggcaaguga

SEQ ID NO: 390 - RNA, 2046 nt, Artificial Sequence
  derived and/or modified CDS sequence (opt4) from YFV__NC_002031.1__SSIgE-prME-XX (polyprotein: aa126-788)
auggacuggaccuggauccuguuccugguggccgccgccaccagagugcacagcagaaagaacagauggcugcugcugaacgugaccagcgaggaccugggcaagaccuucagcgugggcaccggcaacugcaccaccaacauccuggaggccaaguacuggugccccgacagcauggaguacaacugccccaaccugagccccagagaggagcccgacgacaucgacugcuggugcuacggcguggagaacgugagaguggccuacggcaagugcgacagcgccggcagaagcagaagaagcagaagagccaucgaccugcccacccacgagaaccacggccugaagaccagacaggagaaguggaugaccggcagaaugggcgagagacagcugcagaagaucgagagaugguucgugagaaaccccuucuucgccgugaccgcccugaccaucgccuaccuggugggcagcaacaugacccagagaguggugaucgcccugcuggugcuggccgugggccccgccuacagcgcccacugcaucggcaucaccgacagagacuucaucgagggcgugcacggcggcaccugggugagcgccacccuggagcaggacaagugcgugaccgugauggcccccgacaagcccagccuggacaucagccuggagaccguggccaucgacagacccgccgaggugagaaaggugugcuacaacgccgugcugacccacgugaagaucaacgacaagugccccagcaccggcgaggcccaccuggccgaggagaacgagggcgacaacgccugcaagagaaccuacagcgacagaggcuggggcaacggcugcggccuguucggcaagggcagcaucguggccugcgccaaguucaccugcgccaagagcaugagccuguucgagguggaccagaccaagauccaguacgugaucagagcccagcugcacgugggcgccaagcaggagaacuggaacaccgacaucaagacccugaaguucgacgcccugagcggcagccaggagguggaguucaucggcuacggcaaggccacccuggagugccaggugcagaccgccguggacuucggcaacagcuacaucgccgagauggagaccgagagcuggaucguggacagacagugggcccaggaccugacccugcccuggcagagcggcagcggcggcguguggagagagaugcaccaccugguggaguucgagcccccccacgccgccaccaucagagugcuggcccugggcaaccaggagggcagccugaagaccgcccugaccggcgccaugagagugaccaaggacaccaacgacaacaaccuguacaagcugcacggcggccacgugagcugcagagugaagcugagcgcccugacccugaagggcaccagcuacaagaucugcaccgacaagauguucuucgugaagaaccccaccgacaccggccacggcaccguggugaugcaggugaaggugagcaagggcgcccccugcagaauccccgugaucguggccgacgaccugaccgccgccaucaacaagggcauccuggugaccgugaaccccaucgccagcaccaacgacgacgaggugcugaucgaggugaacccccccuucggcgacagcuacaucaucgugggcagaggcgacagcagacugaccuaccaguggcacaaggagggcagcagcaucggcaagcuguucacccagaccaugaagggcguggagagacuggccgugaugggcgacaccgccugggacuucagcagcgccggcggcuucuucaccagcgugggcaagggcauccacaccguguucggcagcgccuuccagggccuguucggcggccugaacuggaucaccaaggugaucaugggcgccgugcugaucugggugggcaucaacaccagaaacaugaccaugagcaugagcaugauccuggugggcgugaucaugauguuccugagccugggcgugggcgccgaccagggcugcgccaucaacuucggcaaguga

SEQ ID NO: 391 - RNA, 2028 nt, Artificial Sequence
  derived and/or modified CDS sequence (opt4) from YFV__NC_002031.1__SSIgE-prME (polyprotein: aa122-778)
auggacuggaccuggauccuguuccugguggccgccgccaccagagugcacagcgugacccuggugagaaagaacagauggcugcugcugaacgugaccagcgaggaccugggcaagaccuucagcgugggcaccggcaacugcaccaccaacauccuggaggccaaguacuggugccccgacagcauggaguacaacugccccaaccugagccccagagaggagcccgacgacaucgacugcuggugcuacggcguggagaacgugagaguggccuacggcaagugcgacagcgccggcagaagcagaagaagcagaagagccaucgaccugcccacccacgagaaccacggccugaagaccagacaggagaaguggaugaccggcagaaugggcgagagacagcugcagaagaucgagagaugguucgugagaaaccccuucuucgccgugaccgcccugaccaucgccuaccuggugggcagcaacaugacccagagaguggugaucgcccugcuggugcuggccgugggccccgccuacagcgcccacugcaucggcaucaccgacagagacuucaucgagggcgugcacggcggcaccugggugagcgccacccuggagcaggacaagugcgugaccgugauggcccccgacaagcccagccuggacaucagccuggagaccguggccaucgacagacccgccgaggugagaaaggugugcuacaacgccgugcugacccacgugaagaucaacgacaagugccccagcaccggcgaggcccaccuggccgaggagaacgagggcgacaacgccugcaagagaaccuacagcgacagaggcuggggcaacggcugcggccuguucggcaagggcagcaucguggccugcgccaaguucaccugcgccaagagcaugagccuguucgagguggaccagaccaagauccaguacgugaucagagcccagcugcacgugggcgccaagcaggagaacuggaacaccgacaucaagacccugaaguucgacgcccugagcggcagccaggagguggaguucaucggcuacggcaaggccacccuggagugccaggugcagaccgccguggacuucggcaacagcuacaucgccgagauggagaccgagagcuggaucguggacagacagugggcccaggaccugacccugcccuggcagagcggcagcggcggcguguggagagagaugcaccaccugguggaguucgagcccccccacgccgccaccaucagagugcuggcccugggcaaccaggagggcagccugaagaccgcccugaccggcgccaugagagugaccaaggacaccaacgacaacaaccuguacaagcugcacggcggccacgugagcugcagagugaagcugagcgcccugacccugaagggcaccagcuacaagaucugcaccgacaagauguucuucgugaagaaccccaccgacaccggccacggcaccguggugaugcaggugaaggugagcaagggcgcccccugcagaauccccgugaucguggccgacgaccugaccgccgccaucaacaagggcauccuggugaccgugaaccccaucgccagcaccaacgacgacgaggugcugaucgaggugaacccccccuucggcgacagcuacaucaucgugggcagaggcgacagcagacugaccuaccaguggcacaaggagggcagcagcaucggcaagcuguucacccagaccaugaagggcguggagagacuggccgugaugggcgacaccgccugggacuucagcagcgccggcggcuucuucaccagcgugggcaagggcauccacaccguguucggcagcgccuuccagggccuguucggcggccugaacuggaucaccaaggugaucaugggcgccgugcugaucugggugggcaucaacaccagaaacaugaccaugagcaugagcaugauccuggugggcgugaucaugauguuccugagccugggcgugggcgccuga

SEQ ID NO: 392 - RNA, 2016 nt, Artificial Sequence
  derived and/or modified CDS sequence (opt4) from YFV__NC_002031.1__SSIgE-prME (polyprotein: aa126-778)
auggacuggaccuggauccuguuccugguggccgccgccaccagagugcacagcagaaagaacagauggcugcugcugaacgugaccagcgaggaccugggcaagaccuucagcgugggcaccggcaacugcaccaccaacauccuggaggccaaguacuggugccccgacagcauggaguacaacugccccaaccugagccccagagaggagcccgacgacaucgacugcuggugcuacggcguggagaacgugagaguggccuacggcaagugcgacagcgccggcagaagcagaagaagcagaagagccaucgaccugcccacccacgagaaccacggccugaagaccagacaggagaaguggaugaccggcagaaugggcgagagacagcugcagaagaucgagagaugguucgugagaaaccccuucuucgccgugaccgcccugaccaucgccuaccuggugggcagcaacaugacccagagaguggugaucgcccugcuggugcuggccgugggccccgccuacagcgcccacugcaucggcaucaccgacagagacuucaucgagggcgugcacggcggcaccugggugagcgccacccuggagcaggacaagugcgugaccgugauggcccccgacaagcccagccuggacaucagccuggagaccguggccaucgacagacccgccgaggugagaaaggugugcuacaacgccgugcugacccacgugaagaucaacgacaagugccccagcaccggcgaggcccaccuggccgaggagaacgagggcgacaacgccugcaagagaaccuacagcgacagaggcuggggcaacggcugcggccuguucggcaagggcagcaucguggccugcgccaaguucaccugcgccaagagcaugagccuguucgagguggaccagaccaagauccaguacgugaucagagcccagcugcacgugggcgccaagcaggagaacuggaacaccgacaucaagacccugaaguucgacgcccugagcggcagccaggagguggaguucaucggcuacggcaaggccacccuggagugccaggugcagaccgccguggacuucggcaacagcuacaucgccgagauggagaccgagagcuggaucguggacagacagugggcccaggaccugacccugcccuggcagagcggcagcggcggcguguggagagagaugcaccaccugguggaguucgagcccccccacgccgccaccaucagagugcuggcccugggcaaccaggagggcagccugaagaccgcccugaccggcgccaugagagugaccaaggacaccaacgacaacaaccuguacaagcugcacggcggccacgugagcugcagagugaagcugagcgcccugacccugaagggcaccagcuacaagaucugcaccgacaagauguucuucgugaagaaccccaccgacaccggccacggcaccguggugaugcaggugaaggugagcaagggcgcccccugcagaauccccgugaucguggccgacgaccugaccgccgccaucaacaagggcauccuggugaccgugaaccccaucgccagcaccaacgacgacgaggugcugaucgaggugaacccccccuucggcgacagcuacaucaucgugggcagaggcgacagcagacugaccuaccaguggcacaaggagggcagcagcaucggcaagcuguucacccagaccaugaagggcguggagagacuggccgugaugggcgacaccgccugggacuucagcagcgccggcggcuucuucaccagcgugggcaagggcauccacaccguguucggcagcgccuuccagggccuguucggcggccugaacuggaucaccaaggugaucaugggcgccgugcugaucugggugggcaucaacaccagaaacaugaccaugagcaugagcaugauccuggugggcgugaucaugauguuccugagccugggcgugggcgccuga

SEQ ID NO: 393 - RNA, 2076 nt, Artificial Sequence
  derived and/or modified CDS sequence (opt4) from YFV__NC_002031.1__SSjev-prME-XX (polyprotein: aa122-788)
augggcaagagaagcgccggcagcaucauguggcuggccagccuggccguggugaucgccugcgccggcgccgugacccuggugagaaagaacagauggcugcugcugaacgugaccagcgaggaccugggcaagaccuucagcgugggcaccggcaacugcaccaccaacauccuggaggccaaguacuggugccccgacagcauggaguacaacugccccaaccugagccccagagaggagcccgacgacaucgacugcuggugcuacggcguggagaacgugagaguggccuacggcaagugcgacagcgccggcagaagcagaagaagcagaagagccaucgaccugcccacccacgagaaccacggccugaagaccagacaggagaaguggaugaccggcagaaugggcgagagacagcugcagaagaucgagagaugguucgugagaaaccccuucuucgccgugaccgcccugaccaucgccuaccuggugggcagcaacaugacccagagaguggugaucgcccugcuggugcuggccgugggccccgccuacagcgcccacugcaucggcaucaccgacagagacuucaucgagggcgugcacggcggcaccugggugagcgccacccuggagcaggacaagugcgugaccgugauggcccccgacaagcccagccuggacaucagccuggagaccguggccaucgacagacccgccgaggugagaaaggugugcuacaacgccgugcugacccacgugaagaucaacgacaagugccccagcaccggcgaggcccaccuggccgaggagaacgagggcgacaacgccugcaagagaaccuacagcgacagaggcuggggcaacggcugcggccuguucggcaagggcagcaucguggccugcgccaaguucaccugcgccaagagcaugagccuguucgagguggaccagaccaagauccaguacgugaucagagcccagcugcacgugggcgccaagcaggagaacuggaacaccgacaucaagacccugaaguucgacgcccugagcggcagccaggagguggaguucaucggcuacggcaaggccacccuggagugccaggugcagaccgccguggacuucggcaacagcuacaucgccgagauggagaccgagagcuggaucguggacagacagugggcccaggaccugacccugcccuggcagagcggcagcggcggcguguggagagagaugcaccaccugguggaguucgagcccccccacgccgccaccaucagagugcuggcccugggcaaccaggagggcagccugaagaccgcccugaccggcgccaugagagugaccaaggacaccaacgacaacaaccuguacaagcugcacggcggccacgugagcugcagagugaagcugagcgcccugacccugaagggcaccagcuacaagaucugcaccgacaagauguucuucgugaagaaccccaccgacaccggccacggcaccguggugaugcaggugaaggugagcaagggcgcccccugcagaauccccgugaucguggccgacgaccugaccgccgccaucaacaagggcauccuggugaccgugaaccccaucgccagcaccaacgacgacgaggugcugaucgaggugaacccccccuucggcgacagcuacaucaucgugggcagaggcgacagcagacugaccuaccaguggcacaaggagggcagcagcaucggcaagcuguucacccagaccaugaagggcguggagagacuggccgugaugggcgacaccgccugggacuucagcagcgccggcggcuucuucaccagcgugggcaagggcauccacaccguguucggcagcgccuuccagggccuguucggcggccugaacuggaucaccaaggugaucaugggcgccgugcugaucugggugggcaucaacaccagaaacaugaccaugagcaugagcaugauccuggugggcgugaucaugauguuccugagccugggcgugggcgccgaccagggcugcgccaucaacuucggcaaguga

SEQ ID NO: 394 - RNA, 2064 nt, Artificial Sequence
  derived and/or modified CDS sequence (opt4) from YFV__NC_002031.1__SSjev-prME-XX (polyprotein: aa126-788)
augggcaagagaagcgccggcagcaucauguggcuggccagccuggccguggugaucgccugcgccggcgccagaaagaacagauggcugcugcugaacgugaccagcgaggaccugggcaagaccuucagcgugggcaccggcaacugcaccaccaacauccuggaggccaaguacuggugccccgacagcauggaguacaacugccccaaccugagccccagagaggagcccgacgacaucgacugcuggugcuacggcguggagaacgugagaguggccuacggcaagugcgacagcgccggcagaagcagaagaagcagaagagccaucgaccugcccacccacgagaaccacggccugaagaccagacaggagaaguggaugaccggcagaaugggcgagagacagcugcagaagaucgagagaugguucgugagaaaccccuucuucgccgugaccgcccugaccaucgccuaccuggugggcagcaacaugacccagagaguggugaucgcccugcuggugcuggccgugggccccgccuacagcgcccacugcaucggcaucaccgacagagacuucaucgagggcgugcacggcggcaccugggugagcgccacccuggagcaggacaagugcgugaccgugauggcccccgacaagcccagccuggacaucagccuggagaccguggccaucgacagacccgccgaggugagaaaggugugcuacaacgccgugcugacccacgugaagaucaacgacaagugccccagcaccggcgaggcccaccuggccgaggagaacgagggcgacaacgccugcaagagaaccuacagcgacagaggcuggggcaacggcugcggccuguucggcaagggcagcaucguggccugcgccaaguucaccugcgccaagagcaugagccuguucgagguggaccagaccaagauccaguacgugaucagagcccagcugcacgugggcgccaagcaggagaacuggaacaccgacaucaagacccugaaguucgacgcccugagcggcagccaggagguggaguucaucggcuacggcaaggccacccuggagugccaggugcagaccgccguggacuucggcaacagcuacaucgccgagauggagaccgagagcuggaucguggacagacagugggcccaggaccugacccugcccuggcagagcggcagcggcggcguguggagagagaugcaccaccugguggaguucgagcccccccacgccgccaccaucagagugcuggcccugggcaaccaggagggcagccugaagaccgcccugaccggcgccaugagagugaccaaggacaccaacgacaacaaccuguacaagcugcacggcggccacgugagcugcagagugaagcugagcgcccugacccugaagggcaccagcuacaagaucugcaccgacaagauguucuucgugaagaaccccaccgacaccggccacggcaccguggugaugcaggugaaggugagcaagggcgcccccugcagaauccccgugaucguggccgacgaccugaccgccgccaucaacaagggcauccuggugaccgugaaccccaucgccagcaccaacgacgacgaggugcugaucgaggugaacccccccuucggcgacagcuacaucaucgugggcagaggcgacagcagacugaccuaccaguggcacaaggagggcagcagcaucggcaagcuguucacccagaccaugaagggcguggagagacuggccgugaugggcgacaccgccugggacuucagcagcgccggcggcuucuucaccagcgugggcaagggcauccacaccguguucggcagcgccuuccagggccuguucggcggccugaacuggaucaccaaggugaucaugggcgccgugcugaucugggugggcaucaacaccagaaacaugaccaugagcaugagcaugauccuggugggcgugaucaugauguuccugagccugggcgugggcgccgaccagggcugcgccaucaacuucggcaaguga

SEQ ID NO: 395 - RNA, 2046 nt, Artificial Sequence
  derived and/or modified CDS sequence (opt4) from YFV__NC_002031.1__SSjev-prME (polyprotein: aa122-778)
augggcaagagaagcgccggcagcaucauguggcuggccagccuggccguggugaucgccugcgccggcgccgugacccuggugagaaagaacagauggcugcugcugaacgugaccagcgaggaccugggcaagaccuucagcgugggcaccggcaacugcaccaccaacauccuggaggccaaguacuggugccccgacagcauggaguacaacugccccaaccugagccccagagaggagcccgacgacaucgacugcuggugcuacggcguggagaacgugagaguggccuacggcaagugcgacagcgccggcagaagcagaagaagcagaagagccaucgaccugcccacccacgagaaccacggccugaagaccagacaggagaaguggaugaccggcagaaugggcgagagacagcugcagaagaucgagagaugguucgugagaaaccccuucuucgccgugaccgcccugaccaucgccuaccuggugggcagcaacaugacccagagaguggugaucgcccugcuggugcuggccgugggccccgccuacagcgcccacugcaucggcaucaccgacagagacuucaucgagggcgugcacggcggcaccugggugagcgccacccuggagcaggacaagugcgugaccgugauggcccccgacaagcccagccuggacaucagccuggagaccguggccaucgacagacccgccgaggugagaaaggugugcuacaacgccgugcugacccacgugaagaucaacgacaagugccccagcaccggcgaggcccaccuggccgaggagaacgagggcgacaacgccugcaagagaaccuacagcgacagaggcuggggcaacggcugcggccuguucggcaagggcagcaucguggccugcgccaaguucaccugcgccaagagcaugagccuguucgagguggaccagaccaagauccaguacgugaucagagcccagcugcacgugggcgccaagcaggagaacuggaacaccgacaucaagacccugaaguucgacgcccugagcggcagccaggagguggaguucaucggcuacggcaaggccacccuggagugccaggugcagaccgccguggacuucggcaacagcuacaucgccgagauggagaccgagagcuggaucguggacagacagugggcccaggaccugacccugcccuggcagagcggcagcggcggcguguggagagagaugcaccaccugguggaguucgagcccccccacgccgccaccaucagagugcuggcccugggcaaccaggagggcagccugaagaccgcccugaccggcgccaugagagugaccaaggacaccaacgacaacaaccuguacaagcugcacggcggccacgugagcugcagagugaagcugagcgcccugacccugaagggcaccagcuacaagaucugcaccgacaagauguucuucgugaagaaccccaccgacaccggccacggcaccguggugaugcaggugaaggugagcaagggcgcccccugcagaauccccgugaucguggccgacgaccugaccgccgccaucaacaagggcauccuggugaccgugaaccccaucgccagcaccaacgacgacgaggugcugaucgaggugaacccccccuucggcgacagcuacaucaucgugggcagaggcgacagcagacugaccuaccaguggcacaaggagggcagcagcaucggcaagcuguucacccagaccaugaagggcguggagagacuggccgugaugggcgacaccgccugggacuucagcagcgccggcggcuucuucaccagcgugggcaagggcauccacaccguguucggcagcgccuuccagggccuguucggcggccugaacuggaucaccaaggugaucaugggcgccgugcugaucugggugggcaucaacaccagaaacaugaccaugagcaugagcaugauccuggugggcgugaucaugauguuccugagccugggcgugggcgccuga

SEQ ID NO: 396 - RNA, 2034 nt, Artificial Sequence
  derived and/or modified CDS sequence (opt4) from YFV__NC_002031.1__SSjev-prME (polyprotein: aa126-778)
augggcaagagaagcgccggcagcaucauguggcuggccagccuggccguggugaucgccugcgccggcgccagaaagaacagauggcugcugcugaacgugaccagcgaggaccugggcaagaccuucagcgugggcaccggcaacugcaccaccaacauccuggaggccaaguacuggugccccgacagcauggaguacaacugccccaaccugagccccagagaggagcccgacgacaucgacugcuggugcuacggcguggagaacgugagaguggccuacggcaagugcgacagcgccggcagaagcagaagaagcagaagagccaucgaccugcccacccacgagaaccacggccugaagaccagacaggagaaguggaugaccggcagaaugggcgagagacagcugcagaagaucgagagaugguucgugagaaaccccuucuucgccgugaccgcccugaccaucgccuaccuggugggcagcaacaugacccagagaguggugaucgcccugcuggugcuggccgugggccccgccuacagcgcccacugcaucggcaucaccgacagagacuucaucgagggcgugcacggcggcaccugggugagcgccacccuggagcaggacaagugcgugaccgugauggcccccgacaagcccagccuggacaucagccuggagaccguggccaucgacagacccgccgaggugagaaaggugugcuacaacgccgugcugacccacgugaagaucaacgacaagugccccagcaccggcgaggcccaccuggccgaggagaacgagggcgacaacgccugcaagagaaccuacagcgacagaggcuggggcaacggcugcggccuguucggcaagggcagcaucguggccugcgccaaguucaccugcgccaagagcaugagccuguucgagguggaccagaccaagauccaguacgugaucagagcccagcugcacgugggcgccaagcaggagaacuggaacaccgacaucaagacccugaaguucgacgcccugagcggcagccaggagguggaguucaucggcuacggcaaggccacccuggagugccaggugcagaccgccguggacuucggcaacagcuacaucgccgagauggagaccgagagcuggaucguggacagacagugggcccaggaccugacccugcccuggcagagcggcagcggcggcguguggagagagaugcaccaccugguggaguucgagcccccccacgccgccaccaucagagugcuggcccugggcaaccaggagggcagccugaagaccgcccugaccggcgccaugagagugaccaaggacaccaacgacaacaaccuguacaagcugcacggcggccacgugagcugcagagugaagcugagcgcccugacccugaagggcaccagcuacaagaucugcaccgacaagauguucuucgugaagaaccccaccgacaccggccacggcaccguggugaugcaggugaaggugagcaagggcgcccccugcagaauccccgugaucguggccgacgaccugaccgccgccaucaacaagggcauccuggugaccgugaaccccaucgccagcaccaacgacgacgaggugcugaucgaggugaacccccccuucggcgacagcuacaucaucgugggcagaggcgacagcagacugaccuaccaguggcacaaggagggcagcagcaucggcaagcuguucacccagaccaugaagggcguggagagacuggccgugaugggcgacaccgccugggacuucagcagcgccggcggcuucuucaccagcgugggcaagggcauccacaccguguucggcagcgccuuccagggccuguucggcggccugaacuggaucaccaaggugaucaugggcgccgugcugaucugggugggcaucaacaccagaaacaugaccaugagcaugagcaugauccuggugggcgugaucaugauguuccugagccugggcgugggcgccuga

SEQ ID NO: 397 - RNA, 2094 nt, Artificial Sequence
  derived and/or modified CDS sequence (opt4) from YFV__NC_002031.1__SSjev(V2)-prME-XX (polyprotein: aa122-788)
augggcagaaagcagaacaagagaggcggcaacgagggcagcaucauguggcuggccagccuggccguggugaucgccugcgccggcgccgugacccuggugagaaagaacagauggcugcugcugaacgugaccagcgaggaccugggcaagaccuucagcgugggcaccggcaacugcaccaccaacauccuggaggccaaguacuggugccccgacagcauggaguacaacugccccaaccugagccccagagaggagcccgacgacaucgacugcuggugcuacggcguggagaacgugagaguggccuacggcaagugcgacagcgccggcagaagcagaagaagcagaagagccaucgaccugcccacccacgagaaccacggccugaagaccagacaggagaaguggaugaccggcagaaugggcgagagacagcugcagaagaucgagagaugguucgugagaaaccccuucuucgccgugaccgcccugaccaucgccuaccuggugggcagcaacaugacccagagaguggugaucgcccugcuggugcuggccgugggccccgccuacagcgcccacugcaucggcaucaccgacagagacuucaucgagggcgugcacggcggcaccugggugagcgccacccuggagcaggacaagugcgugaccgugauggcccccgacaagcccagccuggacaucagccuggagaccguggccaucgacagacccgccgaggugagaaaggugugcuacaacgccgugcugacccacgugaagaucaacgacaagugccccagcaccggcgaggcccaccuggccgaggagaacgagggcgacaacgccugcaagagaaccuacagcgacagaggcuggggcaacggcugcggccuguucggcaagggcagcaucguggccugcgccaaguucaccugcgccaagagcaugagccuguucgagguggaccagaccaagauccaguacgugaucagagcccagcugcacgugggcgccaagcaggagaacuggaacaccgacaucaagacccugaaguucgacgcccugagcggcagccaggagguggaguucaucggcuacggcaaggccacccuggagugccaggugcagaccgccguggacuucggcaacagcuacaucgccgagauggagaccgagagcuggaucguggacagacagugggcccaggaccugacccugcccuggcagagcggcagcggcggcguguggagagagaugcaccaccugguggaguucgagcccccccacgccgccaccaucagagugcuggcccugggcaaccaggagggcagccugaagaccgcccugaccggcgccaugagagugaccaaggacaccaacgacaacaaccuguacaagcugcacggcggccacgugagcugcagagugaagcugagcgcccugacccugaagggcaccagcuacaagaucugcaccgacaagauguucuucgugaagaaccccaccgacaccggccacggcaccguggugaugcaggugaaggugagcaagggcgcccccugcagaauccccgugaucguggccgacgaccugaccgccgccaucaacaagggcauccuggugaccgugaaccccaucgccagcaccaacgacgacgaggugcugaucgaggugaacccccccuucggcgacagcuacaucaucgugggcagaggcgacagcagacugaccuaccaguggcacaaggagggcagcagcaucggcaagcuguucacccagaccaugaagggcguggagagacuggccgugaugggcgacaccgccugggacuucagcagcgccggcggcuucuucaccagcgugggcaagggcauccacaccguguucggcagcgccuuccagggccuguucggcggccugaacuggaucaccaaggugaucaugggcgccgugcugaucugggugggcaucaacaccagaaacaugaccaugagcaugagcaugauccuggugggcgugaucaugauguuccugagccugggcgugggcgccgaccagggcugcgccaucaacuucggcaaguga

SEQ ID NO: 398 - RNA, 2082 nt, Artificial Sequence
  derived and/or modified CDS sequence (opt4) from YFV__NC_002031.1__SSjev(V2)-prME-XX (polyprotein: aa126-788)
augggcagaaagcagaacaagagaggcggcaacgagggcagcaucauguggcuggccagccuggccguggugaucgccugcgccggcgccagaaagaacagauggcugcugcugaacgugaccagcgaggaccugggcaagaccuucagcgugggcaccggcaacugcaccaccaacauccuggaggccaaguacuggugccccgacagcauggaguacaacugccccaaccugagccccagagaggagcccgacgacaucgacugcuggugcuacggcguggagaacgugagaguggccuacggcaagugcgacagcgccggcagaagcagaagaagcagaagagccaucgaccugcccacccacgagaaccacggccugaagaccagacaggagaaguggaugaccggcagaaugggcgagagacagcugcagaagaucgagagaugguucgugagaaaccccuucuucgccgugaccgcccugaccaucgccuaccuggugggcagcaacaugacccagagaguggugaucgcccugcuggugcuggccgugggccccgccuacagcgcccacugcaucggcaucaccgacagagacuucaucgagggcgugcacggcggcaccugggugagcgccacccuggagcaggacaagugcgugaccgugauggcccccgacaagcccagccuggacaucagccuggagaccguggccaucgacagacccgccgaggugagaaaggugugcuacaacgccgugcugacccacgugaagaucaacgacaagugccccagcaccggcgaggcccaccuggccgaggagaacgagggcgacaacgccugcaagagaaccuacagcgacagaggcuggggcaacggcugcggccuguucggcaagggcagcaucguggccugcgccaaguucaccugcgccaagagcaugagccuguucgagguggaccagaccaagauccaguacgugaucagagcccagcugcacgugggcgccaagcaggagaacuggaacaccgacaucaagacccugaaguucgacgcccugagcggcagccaggagguggaguucaucggcuacggcaaggccacccuggagugccaggugcagaccgccguggacuucggcaacagcuacaucgccgagauggagaccgagagcuggaucguggacagacagugggcccaggaccugacccugcccuggcagagcggcagcggcggcguguggagagagaugcaccaccugguggaguucgagcccccccacgccgccaccaucagagugcuggcccugggcaaccaggagggcagccugaagaccgcccugaccggcgccaugagagugaccaaggacaccaacgacaacaaccuguacaagcugcacggcggccacgugagcugcagagugaagcugagcgcccugacccugaagggcaccagcuacaagaucugcaccgacaagauguucuucgugaagaaccccaccgacaccggccacggcaccguggugaugcaggugaaggugagcaagggcgcccccugcagaauccccgugaucguggccgacgaccugaccgccgccaucaacaagggcauccuggugaccgugaaccccaucgccagcaccaacgacgacgaggugcugaucgaggugaacccccccuucggcgacagcuacaucaucgugggcagaggcgacagcagacugaccuaccaguggcacaaggagggcagcagcaucggcaagcuguucacccagaccaugaagggcguggagagacuggccgugaugggcgacaccgccugggacuucagcagcgccggcggcuucuucaccagcgugggcaagggcauccacaccguguucggcagcgccuuccagggccuguucggcggccugaacuggaucaccaaggugaucaugggcgccgugcugaucugggugggcaucaacaccagaaacaugaccaugagcaugagcaugauccuggugggcgugaucaugauguuccugagccugggcgugggcgccgaccagggcugcgccaucaacuucggcaaguga

SEQ ID NO: 399 - RNA, 2064 nt, Artificial Sequence
  derived and/or modified CDS sequence (opt4) from YFV__NC_002031.1__SSjev(V2)-prME (polyprotein: aa122-778)
augggcagaaagcagaacaagagaggcggcaacgagggcagcaucauguggcuggccagccuggccguggugaucgccugcgccggcgccgugacccuggugagaaagaacagauggcugcugcugaacgugaccagcgaggaccugggcaagaccuucagcgugggcaccggcaacugcaccaccaacauccuggaggccaaguacuggugccccgacagcauggaguacaacugccccaaccugagccccagagaggagcccgacgacaucgacugcuggugcuacggcguggagaacgugagaguggccuacggcaagugcgacagcgccggcagaagcagaagaagcagaagagccaucgaccugcccacccacgagaaccacggccugaagaccagacaggagaaguggaugaccggcagaaugggcgagagacagcugcagaagaucgagagaugguucgugagaaaccccuucuucgccgugaccgcccugaccaucgccuaccuggugggcagcaacaugacccagagaguggugaucgcccugcuggugcuggccgugggccccgccuacagcgcccacugcaucggcaucaccgacagagacuucaucgagggcgugcacggcggcaccugggugagcgccacccuggagcaggacaagugcgugaccgugauggcccccgacaagcccagccuggacaucagccuggagaccguggccaucgacagacccgccgaggugagaaaggugugcuacaacgccgugcugacccacgugaagaucaacgacaagugccccagcaccggcgaggcccaccuggccgaggagaacgagggcgacaacgccugcaagagaaccuacagcgacagaggcuggggcaacggcugcggccuguucggcaagggcagcaucguggccugcgccaaguucaccugcgccaagagcaugagccuguucgagguggaccagaccaagauccaguacgugaucagagcccagcugcacgugggcgccaagcaggagaacuggaacaccgacaucaagacccugaaguucgacgcccugagcggcagccaggagguggaguucaucggcuacggcaaggccacccuggagugccaggugcagaccgccguggacuucggcaacagcuacaucgccgagauggagaccgagagcuggaucguggacagacagugggcccaggaccugacccugcccuggcagagcggcagcggcggcguguggagagagaugcaccaccugguggaguucgagcccccccacgccgccaccaucagagugcuggcccugggcaaccaggagggcagccugaagaccgcccugaccggcgccaugagagugaccaaggacaccaacgacaacaaccuguacaagcugcacggcggccacgugagcugcagagugaagcugagcgcccugacccugaagggcaccagcuacaagaucugcaccgacaagauguucuucgugaagaaccccaccgacaccggccacggcaccguggugaugcaggugaaggugagcaagggcgcccccugcagaauccccgugaucguggccgacgaccugaccgccgccaucaacaagggcauccuggugaccgugaaccccaucgccagcaccaacgacgacgaggugcugaucgaggugaacccccccuucggcgacagcuacaucaucgugggcagaggcgacagcagacugaccuaccaguggcacaaggagggcagcagcaucggcaagcuguucacccagaccaugaagggcguggagagacuggccgugaugggcgacaccgccugggacuucagcagcgccggcggcuucuucaccagcgugggcaagggcauccacaccguguucggcagcgccuuccagggccuguucggcggccugaacuggaucaccaaggugaucaugggcgccgugcugaucugggugggcaucaacaccagaaacaugaccaugagcaugagcaugauccuggugggcgugaucaugauguuccugagccugggcgugggcgccuga

SEQ ID NO: 400 - RNA, 2052 nt, Artificial Sequence
  derived and/or modified CDS sequence (opt4) from YFV__NC_002031.1__SSjev(V2)-prME (polyprotein: aa126-778)
augggcagaaagcagaacaagagaggcggcaacgagggcagcaucauguggcuggccagccuggccguggugaucgccugcgccggcgccagaaagaacagauggcugcugcugaacgugaccagcgaggaccugggcaagaccuucagcgugggcaccggcaacugcaccaccaacauccuggaggccaaguacuggugccccgacagcauggaguacaacugccccaaccugagccccagagaggagcccgacgacaucgacugcuggugcuacggcguggagaacgugagaguggccuacggcaagugcgacagcgccggcagaagcagaagaagcagaagagccaucgaccugcccacccacgagaaccacggccugaagaccagacaggagaaguggaugaccggcagaaugggcgagagacagcugcagaagaucgagagaugguucgugagaaaccccuucuucgccgugaccgcccugaccaucgccuaccuggugggcagcaacaugacccagagaguggugaucgcccugcuggugcuggccgugggccccgccuacagcgcccacugcaucggcaucaccgacagagacuucaucgagggcgugcacggcggcaccugggugagcgccacccuggagcaggacaagugcgugaccgugauggcccccgacaagcccagccuggacaucagccuggagaccguggccaucgacagacccgccgaggugagaaaggugugcuacaacgccgugcugacccacgugaagaucaacgacaagugccccagcaccggcgaggcccaccuggccgaggagaacgagggcgacaacgccugcaagagaaccuacagcgacagaggcuggggcaacggcugcggccuguucggcaagggcagcaucguggccugcgccaaguucaccugcgccaagagcaugagccuguucgagguggaccagaccaagauccaguacgugaucagagcccagcugcacgugggcgccaagcaggagaacuggaacaccgacaucaagacccugaaguucgacgcccugagcggcagccaggagguggaguucaucggcuacggcaaggccacccuggagugccaggugcagaccgccguggacuucggcaacagcuacaucgccgagauggagaccgagagcuggaucguggacagacagugggcccaggaccugacccugcccuggcagagcggcagcggcggcguguggagagagaugcaccaccugguggaguucgagcccccccacgccgccaccaucagagugcuggcccugggcaaccaggagggcagccugaagaccgcccugaccggcgccaugagagugaccaaggacaccaacgacaacaaccuguacaagcugcacggcggccacgugagcugcagagugaagcugagcgcccugacccugaagggcaccagcuacaagaucugcaccgacaagauguucuucgugaagaaccccaccgacaccggccacggcaccguggugaugcaggugaaggugagcaagggcgcccccugcagaauccccgugaucguggccgacgaccugaccgccgccaucaacaagggcauccuggugaccgugaaccccaucgccagcaccaacgacgacgaggugcugaucgaggugaacccccccuucggcgacagcuacaucaucgugggcagaggcgacagcagacugaccuaccaguggcacaaggagggcagcagcaucggcaagcuguucacccagaccaugaagggcguggagagacuggccgugaugggcgacaccgccugggacuucagcagcgccggcggcuucuucaccagcgugggcaagggcauccacaccguguucggcagcgccuuccagggccuguucggcggccugaacuggaucaccaaggugaucaugggcgccgugcugaucugggugggcaucaacaccagaaacaugaccaugagcaugagcaugauccuggugggcgugaucaugauguuccugagccugggcgugggcgccuga

SEQ ID NO: 401 - RNA, 2067 nt, Artificial Sequence
  derived and/or modified CDS sequence (opt4) from YFV__NC_002031.1__SSjev(V3)-prME-XX (polyprotein: aa122-788)
augaacgagggcagcaucauguggcuggccagccuggccguggugaucgccugcgccggcgccgugacccuggugagaaagaacagauggcugcugcugaacgugaccagcgaggaccugggcaagaccuucagcgugggcaccggcaacugcaccaccaacauccuggaggccaaguacuggugccccgacagcauggaguacaacugccccaaccugagccccagagaggagcccgacgacaucgacugcuggugcuacggcguggagaacgugagaguggccuacggcaagugcgacagcgccggcagaagcagaagaagcagaagagccaucgaccugcccacccacgagaaccacggccugaagaccagacaggagaaguggaugaccggcagaaugggcgagagacagcugcagaagaucgagagaugguucgugagaaaccccuucuucgccgugaccgcccugaccaucgccuaccuggugggcagcaacaugacccagagaguggugaucgcccugcuggugcuggccgugggccccgccuacagcgcccacugcaucggcaucaccgacagagacuucaucgagggcgugcacggcggcaccugggugagcgccacccuggagcaggacaagugcgugaccgugauggcccccgacaagcccagccuggacaucagccuggagaccguggccaucgacagacccgccgaggugagaaaggugugcuacaacgccgugcugacccacgugaagaucaacgacaagugccccagcaccggcgaggcccaccuggccgaggagaacgagggcgacaacgccugcaagagaaccuacagcgacagaggcuggggcaacggcugcggccuguucggcaagggcagcaucguggccugcgccaaguucaccugcgccaagagcaugagccuguucgagguggaccagaccaagauccaguacgugaucagagcccagcugcacgugggcgccaagcaggagaacuggaacaccgacaucaagacccugaaguucgacgcccugagcggcagccaggagguggaguucaucggcuacggcaaggccacccuggagugccaggugcagaccgccguggacuucggcaacagcuacaucgccgagauggagaccgagagcuggaucguggacagacagugggcccaggaccugacccugcccuggcagagcggcagcggcggcguguggagagagaugcaccaccugguggaguucgagcccccccacgccgccaccaucagagugcuggcccugggcaaccaggagggcagccugaagaccgcccugaccggcgccaugagagugaccaaggacaccaacgacaacaaccuguacaagcugcacggcggccacgugagcugcagagugaagcugagcgcccugacccugaagggcaccagcuacaagaucugcaccgacaagauguucuucgugaagaaccccaccgacaccggccacggcaccguggugaugcaggugaaggugagcaagggcgcccccugcagaauccccgugaucguggccgacgaccugaccgccgccaucaacaagggcauccuggugaccgugaaccccaucgccagcaccaacgacgacgaggugcugaucgaggugaacccccccuucggcgacagcuacaucaucgugggcagaggcgacagcagacugaccuaccaguggcacaaggagggcagcagcaucggcaagcuguucacccagaccaugaagggcguggagagacuggccgugaugggcgacaccgccugggacuucagcagcgccggcggcuucuucaccagcgugggcaagggcauccacaccguguucggcagcgccuuccagggccuguucggcggccugaacuggaucaccaaggugaucaugggcgccgugcugaucugggugggcaucaacaccagaaacaugaccaugagcaugagcaugauccuggugggcgugaucaugauguuccugagccugggcgugggcgccgaccagggcugcgccaucaacuucggcaaguga

SEQ ID NO: 402 - RNA, 2055 nt, Artificial Sequence
  derived and/or modified CDS sequence (opt4) from YFV__NC_002031.1__SSjev(V3)-prME-XX (polyprotein: aa126-788)
augaacgagggcagcaucauguggcuggccagccuggccguggugaucgccugcgccggcgccagaaagaacagauggcugcugcugaacgugaccagcgaggaccugggcaagaccuucagcgugggcaccggcaacugcaccaccaacauccuggaggccaaguacuggugccccgacagcauggaguacaacugccccaaccugagccccagagaggagcccgacgacaucgacugcuggugcuacggcguggagaacgugagaguggccuacggcaagugcgacagcgccggcagaagcagaagaagcagaagagccaucgaccugcccacccacgagaaccacggccugaagaccagacaggagaaguggaugaccggcagaaugggcgagagacagcugcagaagaucgagagaugguucgugagaaaccccuucuucgccgugaccgcccugaccaucgccuaccuggugggcagcaacaugacccagagaguggugaucgcccugcuggugcuggccgugggccccgccuacagcgcccacugcaucggcaucaccgacagagacuucaucgagggcgugcacggcggcaccugggugagcgccacccuggagcaggacaagugcgugaccgugauggcccccgacaagcccagccuggacaucagccuggagaccguggccaucgacagacccgccgaggugagaaaggugugcuacaacgccgugcugacccacgugaagaucaacgacaagugccccagcaccggcgaggcccaccuggccgaggagaacgagggcgacaacgccugcaagagaaccuacagcgacagaggcuggggcaacggcugcggccuguucggcaagggcagcaucguggccugcgccaaguucaccugcgccaagagcaugagccuguucgagguggaccagaccaagauccaguacgugaucagagcccagcugcacgugggcgccaagcaggagaacuggaacaccgacaucaagacccugaaguucgacgcccugagcggcagccaggagguggaguucaucggcuacggcaaggccacccuggagugccaggugcagaccgccguggacuucggcaacagcuacaucgccgagauggagaccgagagcuggaucguggacagacagugggcccaggaccugacccugcccuggcagagcggcagcggcggcguguggagagagaugcaccaccugguggaguucgagcccccccacgccgccaccaucagagugcuggcccugggcaaccaggagggcagccugaagaccgcccugaccggcgccaugagagugaccaaggacaccaacgacaacaaccuguacaagcugcacggcggccacgugagcugcagagugaagcugagcgcccugacccugaagggcaccagcuacaagaucugcaccgacaagauguucuucgugaagaaccccaccgacaccggccacggcaccguggugaugcaggugaaggugagcaagggcgcccccugcagaauccccgugaucguggccgacgaccugaccgccgccaucaacaagggcauccuggugaccgugaaccccaucgccagcaccaacgacgacgaggugcugaucgaggugaacccccccuucggcgacagcuacaucaucgugggcagaggcgacagcagacugaccuaccaguggcacaaggagggcagcagcaucggcaagcuguucacccagaccaugaagggcguggagagacuggccgugaugggcgacaccgccugggacuucagcagcgccggcggcuucuucaccagcgugggcaagggcauccacaccguguucggcagcgccuuccagggccuguucggcggccugaacuggaucaccaaggugaucaugggcgccgugcugaucugggugggcaucaacaccagaaacaugaccaugagcaugagcaugauccuggugggcgugaucaugauguuccugagccugggcgugggcgccgaccagggcugcgccaucaacuucggcaaguga

SEQ ID NO: 403 - RNA, 2037 nt, Artificial Sequence
  derived and/or modified CDS sequence (opt4) from YFV__NC_002031.1__SSjev(V3)-prME (polyprotein: aa122-778)
augaacgagggcagcaucauguggcuggccagccuggccguggugaucgccugcgccggcgccgugacccuggugagaaagaacagauggcugcugcugaacgugaccagcgaggaccugggcaagaccuucagcgugggcaccggcaacugcaccaccaacauccuggaggccaaguacuggugccccgacagcauggaguacaacugccccaaccugagccccagagaggagcccgacgacaucgacugcuggugcuacggcguggagaacgugagaguggccuacggcaagugcgacagcgccggcagaagcagaagaagcagaagagccaucgaccugcccacccacgagaaccacggccugaagaccagacaggagaaguggaugaccggcagaaugggcgagagacagcugcagaagaucgagagaugguucgugagaaaccccuucuucgccgugaccgcccugaccaucgccuaccuggugggcagcaacaugacccagagaguggugaucgcccugcuggugcuggccgugggccccgccuacagcgcccacugcaucggcaucaccgacagagacuucaucgagggcgugcacggcggcaccugggugagcgccacccuggagcaggacaagugcgugaccgugauggcccccgacaagcccagccuggacaucagccuggagaccguggccaucgacagacccgccgaggugagaaaggugugcuacaacgccgugcugacccacgugaagaucaacgacaagugccccagcaccggcgaggcccaccuggccgaggagaacgagggcgacaacgccugcaagagaaccuacagcgacagaggcuggggcaacggcugcggccuguucggcaagggcagcaucguggccugcgccaaguucaccugcgccaagagcaugagccuguucgagguggaccagaccaagauccaguacgugaucagagcccagcugcacgugggcgccaagcaggagaacuggaacaccgacaucaagacccugaaguucgacgcccugagcggcagccaggagguggaguucaucggcuacggcaaggccacccuggagugccaggugcagaccgccguggacuucggcaacagcuacaucgccgagauggagaccgagagcuggaucguggacagacagugggcccaggaccugacccugcccuggcagagcggcagcggcggcguguggagagagaugcaccaccugguggaguucgagcccccccacgccgccaccaucagagugcuggcccugggcaaccaggagggcagccugaagaccgcccugaccggcgccaugagagugaccaaggacaccaacgacaacaaccuguacaagcugcacggcggccacgugagcugcagagugaagcugagcgcccugacccugaagggcaccagcuacaagaucugcaccgacaagauguucuucgugaagaaccccaccgacaccggccacggcaccguggugaugcaggugaaggugagcaagggcgcccccugcagaauccccgugaucguggccgacgaccugaccgccgccaucaacaagggcauccuggugaccgugaaccccaucgccagcaccaacgacgacgaggugcugaucgaggugaacccccccuucggcgacagcuacaucaucgugggcagaggcgacagcagacugaccuaccaguggcacaaggagggcagcagcaucggcaagcuguucacccagaccaugaagggcguggagagacuggccgugaugggcgacaccgccugggacuucagcagcgccggcggcuucuucaccagcgugggcaagggcauccacaccguguucggcagcgccuuccagggccuguucggcggccugaacuggaucaccaaggugaucaugggcgccgugcugaucugggugggcaucaacaccagaaacaugaccaugagcaugagcaugauccuggugggcgugaucaugauguuccugagccugggcgugggcgccuga

SEQ ID NO: 404 - RNA, 2025 nt, Artificial Sequence
  derived and/or modified CDS sequence (opt4) from YFV__NC_002031.1__SSjev(V3)-prME (polyprotein: aa126-778)
augaacgagggcagcaucauguggcuggccagccuggccguggugaucgccugcgccggcgccagaaagaacagauggcugcugcugaacgugaccagcgaggaccugggcaagaccuucagcgugggcaccggcaacugcaccaccaacauccuggaggccaaguacuggugccccgacagcauggaguacaacugccccaaccugagccccagagaggagcccgacgacaucgacugcuggugcuacggcguggagaacgugagaguggccuacggcaagugcgacagcgccggcagaagcagaagaagcagaagagccaucgaccugcccacccacgagaaccacggccugaagaccagacaggagaaguggaugaccggcagaaugggcgagagacagcugcagaagaucgagagaugguucgugagaaaccccuucuucgccgugaccgcccugaccaucgccuaccuggugggcagcaacaugacccagagaguggugaucgcccugcuggugcuggccgugggccccgccuacagcgcccacugcaucggcaucaccgacagagacuucaucgagggcgugcacggcggcaccugggugagcgccacccuggagcaggacaagugcgugaccgugauggcccccgacaagcccagccuggacaucagccuggagaccguggccaucgacagacccgccgaggugagaaaggugugcuacaacgccgugcugacccacgugaagaucaacgacaagugccccagcaccggcgaggcccaccuggccgaggagaacgagggcgacaacgccugcaagagaaccuacagcgacagaggcuggggcaacggcugcggccuguucggcaagggcagcaucguggccugcgccaaguucaccugcgccaagagcaugagccuguucgagguggaccagaccaagauccaguacgugaucagagcccagcugcacgugggcgccaagcaggagaacuggaacaccgacaucaagacccugaaguucgacgcccugagcggcagccaggagguggaguucaucggcuacggcaaggccacccuggagugccaggugcagaccgccguggacuucggcaacagcuacaucgccgagauggagaccgagagcuggaucguggacagacagugggcccaggaccugacccugcccuggcagagcggcagcggcggcguguggagagagaugcaccaccugguggaguucgagcccccccacgccgccaccaucagagugcuggcccugggcaaccaggagggcagccugaagaccgcccugaccggcgccaugagagugaccaaggacaccaacgacaacaaccuguacaagcugcacggcggccacgugagcugcagagugaagcugagcgcccugacccugaagggcaccagcuacaagaucugcaccgacaagauguucuucgugaagaaccccaccgacaccggccacggcaccguggugaugcaggugaaggugagcaagggcgcccccugcagaauccccgugaucguggccgacgaccugaccgccgccaucaacaagggcauccuggugaccgugaaccccaucgccagcaccaacgacgacgaggugcugaucgaggugaacccccccuucggcgacagcuacaucaucgugggcagaggcgacagcagacugaccuaccaguggcacaaggagggcagcagcaucggcaagcuguucacccagaccaugaagggcguggagagacuggccgugaugggcgacaccgccugggacuucagcagcgccggcggcuucuucaccagcgugggcaagggcauccacaccguguucggcagcgccuuccagggccuguucggcggccugaacuggaucaccaaggugaucaugggcgccgugcugaucugggugggcaucaacaccagaaacaugaccaugagcaugagcaugauccuggugggcgugaucaugauguuccugagccugggcgugggcgccuga

SEQ ID NO: 405 - RNA, 2076 nt, Artificial Sequence
  derived and/or modified CDS sequence (opt4) from YFV__NC_002031.1__SSjev(V4)-prME-XX (polyprotein: aa122-788)
augcugggcagcaacagcggccagagagugguguucaccauccugcugcugcugguggcccccgccuacagcgugacccuggugagaaagaacagauggcugcugcugaacgugaccagcgaggaccugggcaagaccuucagcgugggcaccggcaacugcaccaccaacauccuggaggccaaguacuggugccccgacagcauggaguacaacugccccaaccugagccccagagaggagcccgacgacaucgacugcuggugcuacggcguggagaacgugagaguggccuacggcaagugcgacagcgccggcagaagcagaagaagcagaagagccaucgaccugcccacccacgagaaccacggccugaagaccagacaggagaaguggaugaccggcagaaugggcgagagacagcugcagaagaucgagagaugguucgugagaaaccccuucuucgccgugaccgcccugaccaucgccuaccuggugggcagcaacaugacccagagaguggugaucgcccugcuggugcuggccgugggccccgccuacagcgcccacugcaucggcaucaccgacagagacuucaucgagggcgugcacggcggcaccugggugagcgccacccuggagcaggacaagugcgugaccgugauggcccccgacaagcccagccuggacaucagccuggagaccguggccaucgacagacccgccgaggugagaaaggugugcuacaacgccgugcugacccacgugaagaucaacgacaagugccccagcaccggcgaggcccaccuggccgaggagaacgagggcgacaacgccugcaagagaaccuacagcgacagaggcuggggcaacggcugcggccuguucggcaagggcagcaucguggccugcgccaaguucaccugcgccaagagcaugagccuguucgagguggaccagaccaagauccaguacgugaucagagcccagcugcacgugggcgccaagcaggagaacuggaacaccgacaucaagacccugaaguucgacgcccugagcggcagccaggagguggaguucaucggcuacggcaaggccacccuggagugccaggugcagaccgccguggacuucggcaacagcuacaucgccgagauggagaccgagagcuggaucguggacagacagugggcccaggaccugacccugcccuggcagagcggcagcggcggcguguggagagagaugcaccaccugguggaguucgagcccccccacgccgccaccaucagagugcuggcccugggcaaccaggagggcagccugaagaccgcccugaccggcgccaugagagugaccaaggacaccaacgacaacaaccuguacaagcugcacggcggccacgugagcugcagagugaagcugagcgcccugacccugaagggcaccagcuacaagaucugcaccgacaagauguucuucgugaagaaccccaccgacaccggccacggcaccguggugaugcaggugaaggugagcaagggcgcccccugcagaauccccgugaucguggccgacgaccugaccgccgccaucaacaagggcauccuggugaccgugaaccccaucgccagcaccaacgacgacgaggugcugaucgaggugaacccccccuucggcgacagcuacaucaucgugggcagaggcgacagcagacugaccuaccaguggcacaaggagggcagcagcaucggcaagcuguucacccagaccaugaagggcguggagagacuggccgugaugggcgacaccgccugggacuucagcagcgccggcggcuucuucaccagcgugggcaagggcauccacaccguguucggcagcgccuuccagggccuguucggcggccugaacuggaucaccaaggugaucaugggcgccgugcugaucugggugggcaucaacaccagaaacaugaccaugagcaugagcaugauccuggugggcgugaucaugauguuccugagccugggcgugggcgccgaccagggcugcgccaucaacuucggcaaguga

SEQ ID NO: 406 - RNA, 2064 nt, Artificial Sequence
  derived and/or modified CDS sequence (opt4) from YFV__NC_002031.1__SSjev(V4)-prME-XX (polyprotein: aa126-788)
augcugggcagcaacagcggccagagagugguguucaccauccugcugcugcugguggcccccgccuacagcagaaagaacagauggcugcugcugaacgugaccagcgaggaccugggcaagaccuucagcgugggcaccggcaacugcaccaccaacauccuggaggccaaguacuggugccccgacagcauggaguacaacugccccaaccugagccccagagaggagcccgacgacaucgacugcuggugcuacggcguggagaacgugagaguggccuacggcaagugcgacagcgccggcagaagcagaagaagcagaagagccaucgaccugcccacccacgagaaccacggccugaagaccagacaggagaaguggaugaccggcagaaugggcgagagacagcugcagaagaucgagagaugguucgugagaaaccccuucuucgccgugaccgcccugaccaucgccuaccuggugggcagcaacaugacccagagaguggugaucgcccugcuggugcuggccgugggccccgccuacagcgcccacugcaucggcaucaccgacagagacuucaucgagggcgugcacggcggcaccugggugagcgccacccuggagcaggacaagugcgugaccgugauggcccccgacaagcccagccuggacaucagccuggagaccguggccaucgacagacccgccgaggugagaaaggugugcuacaacgccgugcugacccacgugaagaucaacgacaagugccccagcaccggcgaggcccaccuggccgaggagaacgagggcgacaacgccugcaagagaaccuacagcgacagaggcuggggcaacggcugcggccuguucggcaagggcagcaucguggccugcgccaaguucaccugcgccaagagcaugagccuguucgagguggaccagaccaagauccaguacgugaucagagcccagcugcacgugggcgccaagcaggagaacuggaacaccgacaucaagacccugaaguucgacgcccugagcggcagccaggagguggaguucaucggcuacggcaaggccacccuggagugccaggugcagaccgccguggacuucggcaacagcuacaucgccgagauggagaccgagagcuggaucguggacagacagugggcccaggaccugacccugcccuggcagagcggcagcggcggcguguggagagagaugcaccaccugguggaguucgagcccccccacgccgccaccaucagagugcuggcccugggcaaccaggagggcagccugaagaccgcccugaccggcgccaugagagugaccaaggacaccaacgacaacaaccuguacaagcugcacggcggccacgugagcugcagagugaagcugagcgcccugacccugaagggcaccagcuacaagaucugcaccgacaagauguucuucgugaagaaccccaccgacaccggccacggcaccguggugaugcaggugaaggugagcaagggcgcccccugcagaauccccgugaucguggccgacgaccugaccgccgccaucaacaagggcauccuggugaccgugaaccccaucgccagcaccaacgacgacgaggugcugaucgaggugaacccccccuucggcgacagcuacaucaucgugggcagaggcgacagcagacugaccuaccaguggcacaaggagggcagcagcaucggcaagcuguucacccagaccaugaagggcguggagagacuggccgugaugggcgacaccgccugggacuucagcagcgccggcggcuucuucaccagcgugggcaagggcauccacaccguguucggcagcgccuuccagggccuguucggcggccugaacuggaucaccaaggugaucaugggcgccgugcugaucugggugggcaucaacaccagaaacaugaccaugagcaugagcaugauccuggugggcgugaucaugauguuccugagccugggcgugggcgccgaccagggcugcgccaucaacuucggcaaguga

SEQ ID NO: 407 - RNA, 2046 nt, Artificial Sequence
  derived and/or modified CDS sequence (opt4) from YFV__NC_002031.1__SSjev(V4)-prME (polyprotein: aa122-778)
augcugggcagcaacagcggccagagagugguguucaccauccugcugcugcugguggcccccgccuacagcgugacccuggugagaaagaacagauggcugcugcugaacgugaccagcgaggaccugggcaagaccuucagcgugggcaccggcaacugcaccaccaacauccuggaggccaaguacuggugccccgacagcauggaguacaacugccccaaccugagccccagagaggagcccgacgacaucgacugcuggugcuacggcguggagaacgugagaguggccuacggcaagugcgacagcgccggcagaagcagaagaagcagaagagccaucgaccugcccacccacgagaaccacggccugaagaccagacaggagaaguggaugaccggcagaaugggcgagagacagcugcagaagaucgagagaugguucgugagaaaccccuucuucgccgugaccgcccugaccaucgccuaccuggugggcagcaacaugacccagagaguggugaucgcccugcuggugcuggccgugggccccgccuacagcgcccacugcaucggcaucaccgacagagacuucaucgagggcgugcacggcggcaccugggugagcgccacccuggagcaggacaagugcgugaccgugauggcccccgacaagcccagccuggacaucagccuggagaccguggccaucgacagacccgccgaggugagaaaggugugcuacaacgccgugcugacccacgugaagaucaacgacaagugccccagcaccggcgaggcccaccuggccgaggagaacgagggcgacaacgccugcaagagaaccuacagcgacagaggcuggggcaacggcugcggccuguucggcaagggcagcaucguggccugcgccaaguucaccugcgccaagagcaugagccuguucgagguggaccagaccaagauccaguacgugaucagagcccagcugcacgugggcgccaagcaggagaacuggaacaccgacaucaagacccugaaguucgacgcccugagcggcagccaggagguggaguucaucggcuacggcaaggccacccuggagugccaggugcagaccgccguggacuucggcaacagcuacaucgccgagauggagaccgagagcuggaucguggacagacagugggcccaggaccugacccugcccuggcagagcggcagcggcggcguguggagagagaugcaccaccugguggaguucgagcccccccacgccgccaccaucagagugcuggcccugggcaaccaggagggcagccugaagaccgcccugaccggcgccaugagagugaccaaggacaccaacgacaacaaccuguacaagcugcacggcggccacgugagcugcagagugaagcugagcgcccugacccugaagggcaccagcuacaagaucugcaccgacaagauguucuucgugaagaaccccaccgacaccggccacggcaccguggugaugcaggugaaggugagcaagggcgcccccugcagaauccccgugaucguggccgacgaccugaccgccgccaucaacaagggcauccuggugaccgugaaccccaucgccagcaccaacgacgacgaggugcugaucgaggugaacccccccuucggcgacagcuacaucaucgugggcagaggcgacagcagacugaccuaccaguggcacaaggagggcagcagcaucggcaagcuguucacccagaccaugaagggcguggagagacuggccgugaugggcgacaccgccugggacuucagcagcgccggcggcuucuucaccagcgugggcaagggcauccacaccguguucggcagcgccuuccagggccuguucggcggccugaacuggaucaccaaggugaucaugggcgccgugcugaucugggugggcaucaacaccagaaacaugaccaugagcaugagcaugauccuggugggcgugaucaugauguuccugagccugggcgugggcgccuga

SEQ ID NO: 408 - RNA, 2034 nt, Artificial Sequence
  derived and/or modified CDS sequence (opt4) from YFV__NC_002031.1__SSjev(V4)-prME (polyprotein: aa126-778)
augcugggcagcaacagcggccagagagugguguucaccauccugcugcugcugguggcccccgccuacagcagaaagaacagauggcugcugcugaacgugaccagcgaggaccugggcaagaccuucagcgugggcaccggcaacugcaccaccaacauccuggaggccaaguacuggugccccgacagcauggaguacaacugccccaaccugagccccagagaggagcccgacgacaucgacugcuggugcuacggcguggagaacgugagaguggccuacggcaagugcgacagcgccggcagaagcagaagaagcagaagagccaucgaccugcccacccacgagaaccacggccugaagaccagacaggagaaguggaugaccggcagaaugggcgagagacagcugcagaagaucgagagaugguucgugagaaaccccuucuucgccgugaccgcccugaccaucgccuaccuggugggcagcaacaugacccagagaguggugaucgcccugcuggugcuggccgugggccccgccuacagcgcccacugcaucggcaucaccgacagagacuucaucgagggcgugcacggcggcaccugggugagcgccacccuggagcaggacaagugcgugaccgugauggcccccgacaagcccagccuggacaucagccuggagaccguggccaucgacagacccgccgaggugagaaaggugugcuacaacgccgugcugacccacgugaagaucaacgacaagugccccagcaccggcgaggcccaccuggccgaggagaacgagggcgacaacgccugcaagagaaccuacagcgacagaggcuggggcaacggcugcggccuguucggcaagggcagcaucguggccugcgccaaguucaccugcgccaagagcaugagccuguucgagguggaccagaccaagauccaguacgugaucagagcccagcugcacgugggcgccaagcaggagaacuggaacaccgacaucaagacccugaaguucgacgcccugagcggcagccaggagguggaguucaucggcuacggcaaggccacccuggagugccaggugcagaccgccguggacuucggcaacagcuacaucgccgagauggagaccgagagcuggaucguggacagacagugggcccaggaccugacccugcccuggcagagcggcagcggcggcguguggagagagaugcaccaccugguggaguucgagcccccccacgccgccaccaucagagugcuggcccugggcaaccaggagggcagccugaagaccgcccugaccggcgccaugagagugaccaaggacaccaacgacaacaaccuguacaagcugcacggcggccacgugagcugcagagugaagcugagcgcccugacccugaagggcaccagcuacaagaucugcaccgacaagauguucuucgugaagaaccccaccgacaccggccacggcaccguggugaugcaggugaaggugagcaagggcgcccccugcagaauccccgugaucguggccgacgaccugaccgccgccaucaacaagggcauccuggugaccgugaaccccaucgccagcaccaacgacgacgaggugcugaucgaggugaacccccccuucggcgacagcuacaucaucgugggcagaggcgacagcagacugaccuaccaguggcacaaggagggcagcagcaucggcaagcuguucacccagaccaugaagggcguggagagacuggccgugaugggcgacaccgccugggacuucagcagcgccggcggcuucuucaccagcgugggcaagggcauccacaccguguucggcagcgccuuccagggccuguucggcggccugaacuggaucaccaaggugaucaugggcgccgugcugaucugggugggcaucaacaccagaaacaugaccaugagcaugagcaugauccuggugggcgugaucaugauguuccugagccugggcgugggcgccuga

SEQ ID NO: 409 - RNA, 2049 nt, Artificial Sequence
  derived and/or modified CDS sequence (opt4) from YFV__NC_002031.1__SSjev(V5)-prME-XX (polyprotein: aa122-788)
auguggcuggugagccuggccaucgugaccgccugcgccggcgccgugacccuggugagaaagaacagauggcugcugcugaacgugaccagcgaggaccugggcaagaccuucagcgugggcaccggcaacugcaccaccaacauccuggaggccaaguacuggugccccgacagcauggaguacaacugccccaaccugagccccagagaggagcccgacgacaucgacugcuggugcuacggcguggagaacgugagaguggccuacggcaagugcgacagcgccggcagaagcagaagaagcagaagagccaucgaccugcccacccacgagaaccacggccugaagaccagacaggagaaguggaugaccggcagaaugggcgagagacagcugcagaagaucgagagaugguucgugagaaaccccuucuucgccgugaccgcccugaccaucgccuaccuggugggcagcaacaugacccagagaguggugaucgcccugcuggugcuggccgugggccccgccuacagcgcccacugcaucggcaucaccgacagagacuucaucgagggcgugcacggcggcaccugggugagcgccacccuggagcaggacaagugcgugaccgugauggcccccgacaagcccagccuggacaucagccuggagaccguggccaucgacagacccgccgaggugagaaaggugugcuacaacgccgugcugacccacgugaagaucaacgacaagugccccagcaccggcgaggcccaccuggccgaggagaacgagggcgacaacgccugcaagagaaccuacagcgacagaggcuggggcaacggcugcggccuguucggcaagggcagcaucguggccugcgccaaguucaccugcgccaagagcaugagccuguucgagguggaccagaccaagauccaguacgugaucagagcccagcugcacgugggcgccaagcaggagaacuggaacaccgacaucaagacccugaaguucgacgcccugagcggcagccaggagguggaguucaucggcuacggcaaggccacccuggagugccaggugcagaccgccguggacuucggcaacagcuacaucgccgagauggagaccgagagcuggaucguggacagacagugggcccaggaccugacccugcccuggcagagcggcagcggcggcguguggagagagaugcaccaccugguggaguucgagcccccccacgccgccaccaucagagugcuggcccugggcaaccaggagggcagccugaagaccgcccugaccggcgccaugagagugaccaaggacaccaacgacaacaaccuguacaagcugcacggcggccacgugagcugcagagugaagcugagcgcccugacccugaagggcaccagcuacaagaucugcaccgacaagauguucuucgugaagaaccccaccgacaccggccacggcaccguggugaugcaggugaaggugagcaagggcgcccccugcagaauccccgugaucguggccgacgaccugaccgccgccaucaacaagggcauccuggugaccgugaaccccaucgccagcaccaacgacgacgaggugcugaucgaggugaacccccccuucggcgacagcuacaucaucgugggcagaggcgacagcagacugaccuaccaguggcacaaggagggcagcagcaucggcaagcuguucacccagaccaugaagggcguggagagacuggccgugaugggcgacaccgccugggacuucagcagcgccggcggcuucuucaccagcgugggcaagggcauccacaccguguucggcagcgccuuccagggccuguucggcggccugaacuggaucaccaaggugaucaugggcgccgugcugaucugggugggcaucaacaccagaaacaugaccaugagcaugagcaugauccuggugggcgugaucaugauguuccugagccugggcgugggcgccgaccagggcugcgccaucaacuucggcaaguga

SEQ ID NO: 410 - RNA, 2037 nt, Artificial Sequence
  derived and/or modified CDS sequence (opt4) from YFV__NC_002031.1__SSjev(V5)-prME-XX (polyprotein: aa126-788)
auguggcuggugagccuggccaucgugaccgccugcgccggcgccagaaagaacagauggcugcugcugaacgugaccagcgaggaccugggcaagaccuucagcgugggcaccggcaacugcaccaccaacauccuggaggccaaguacuggugccccgacagcauggaguacaacugccccaaccugagccccagagaggagcccgacgacaucgacugcuggugcuacggcguggagaacgugagaguggccuacggcaagugcgacagcgccggcagaagcagaagaagcagaagagccaucgaccugcccacccacgagaaccacggccugaagaccagacaggagaaguggaugaccggcagaaugggcgagagacagcugcagaagaucgagagaugguucgugagaaaccccuucuucgccgugaccgcccugaccaucgccuaccuggugggcagcaacaugacccagagaguggugaucgcccugcuggugcuggccgugggccccgccuacagcgcccacugcaucggcaucaccgacagagacuucaucgagggcgugcacggcggcaccugggugagcgccacccuggagcaggacaagugcgugaccgugauggcccccgacaagcccagccuggacaucagccuggagaccguggccaucgacagacccgccgaggugagaaaggugugcuacaacgccgugcugacccacgugaagaucaacgacaagugccccagcaccggcgaggcccaccuggccgaggagaacgagggcgacaacgccugcaagagaaccuacagcgacagaggcuggggcaacggcugcggccuguucggcaagggcagcaucguggccugcgccaaguucaccugcgccaagagcaugagccuguucgagguggaccagaccaagauccaguacgugaucagagcccagcugcacgugggcgccaagcaggagaacuggaacaccgacaucaagacccugaaguucgacgcccugagcggcagccaggagguggaguucaucggcuacggcaaggccacccuggagugccaggugcagaccgccguggacuucggcaacagcuacaucgccgagauggagaccgagagcuggaucguggacagacagugggcccaggaccugacccugcccuggcagagcggcagcggcggcguguggagagagaugcaccaccugguggaguucgagcccccccacgccgccaccaucagagugcuggcccugggcaaccaggagggcagccugaagaccgcccugaccggcgccaugagagugaccaaggacaccaacgacaacaaccuguacaagcugcacggcggccacgugagcugcagagugaagcugagcgcccugacccugaagggcaccagcuacaagaucugcaccgacaagauguucuucgugaagaaccccaccgacaccggccacggcaccguggugaugcaggugaaggugagcaagggcgcccccugcagaauccccgugaucguggccgacgaccugaccgccgccaucaacaagggcauccuggugaccgugaaccccaucgccagcaccaacgacgacgaggugcugaucgaggugaacccccccuucggcgacagcuacaucaucgugggcagaggcgacagcagacugaccuaccaguggcacaaggagggcagcagcaucggcaagcuguucacccagaccaugaagggcguggagagacuggccgugaugggcgacaccgccugggacuucagcagcgccggcggcuucuucaccagcgugggcaagggcauccacaccguguucggcagcgccuuccagggccuguucggcggccugaacuggaucaccaaggugaucaugggcgccgugcugaucugggugggcaucaacaccagaaacaugaccaugagcaugagcaugauccuggugggcgugaucaugauguuccugagccugggcgugggcgccgaccagggcugcgccaucaacuucggcaaguga

SEQ ID NO: 411 - RNA, 2019 nt, Artificial Sequence
  derived and/or modified CDS sequence (opt4) from YFV__NC_002031.1__SSjev(V5)-prME (polyprotein: aa122-778)
auguggcuggugagccuggccaucgugaccgccugcgccggcgccgugacccuggugagaaagaacagauggcugcugcugaacgugaccagcgaggaccugggcaagaccuucagcgugggcaccggcaacugcaccaccaacauccuggaggccaaguacuggugccccgacagcauggaguacaacugccccaaccugagccccagagaggagcccgacgacaucgacugcuggugcuacggcguggagaacgugagaguggccuacggcaagugcgacagcgccggcagaagcagaagaagcagaagagccaucgaccugcccacccacgagaaccacggccugaagaccagacaggagaaguggaugaccggcagaaugggcgagagacagcugcagaagaucgagagaugguucgugagaaaccccuucuucgccgugaccgcccugaccaucgccuaccuggugggcagcaacaugacccagagaguggugaucgcccugcuggugcuggccgugggccccgccuacagcgcccacugcaucggcaucaccgacagagacuucaucgagggcgugcacggcggcaccugggugagcgccacccuggagcaggacaagugcgugaccgugauggcccccgacaagcccagccuggacaucagccuggagaccguggccaucgacagacccgccgaggugagaaaggugugcuacaacgccgugcugacccacgugaagaucaacgacaagugccccagcaccggcgaggcccaccuggccgaggagaacgagggcgacaacgccugcaagagaaccuacagcgacagaggcuggggcaacggcugcggccuguucggcaagggcagcaucguggccugcgccaaguucaccugcgccaagagcaugagccuguucgagguggaccagaccaagauccaguacgugaucagagcccagcugcacgugggcgccaagcaggagaacuggaacaccgacaucaagacccugaaguucgacgcccugagcggcagccaggagguggaguucaucggcuacggcaaggccacccuggagugccaggugcagaccgccguggacuucggcaacagcuacaucgccgagauggagaccgagagcuggaucguggacagacagugggcccaggaccugacccugcccuggcagagcggcagcggcggcguguggagagagaugcaccaccugguggaguucgagcccccccacgccgccaccaucagagugcuggcccugggcaaccaggagggcagccugaagaccgcccugaccggcgccaugagagugaccaaggacaccaacgacaacaaccuguacaagcugcacggcggccacgugagcugcagagugaagcugagcgcccugacccugaagggcaccagcuacaagaucugcaccgacaagauguucuucgugaagaaccccaccgacaccggccacggcaccguggugaugcaggugaaggugagcaagggcgcccccugcagaauccccgugaucguggccgacgaccugaccgccgccaucaacaagggcauccuggugaccgugaaccccaucgccagcaccaacgacgacgaggugcugaucgaggugaacccccccuucggcgacagcuacaucaucgugggcagaggcgacagcagacugaccuaccaguggcacaaggagggcagcagcaucggcaagcuguucacccagaccaugaagggcguggagagacuggccgugaugggcgacaccgccugggacuucagcagcgccggcggcuucuucaccagcgugggcaagggcauccacaccguguucggcagcgccuuccagggccuguucggcggccugaacuggaucaccaaggugaucaugggcgccgugcugaucugggugggcaucaacaccagaaacaugaccaugagcaugagcaugauccuggugggcgugaucaugauguuccugagccugggcgugggcgccuga

SEQ ID NO: 412 - RNA, 2007 nt, Artificial Sequence
  derived and/or modified CDS sequence (opt4) from YFV__NC_002031.1__SSjev(V5)-prME (polyprotein: aa126-778)
auguggcuggugagccuggccaucgugaccgccugcgccggcgccagaaagaacagauggcugcugcugaacgugaccagcgaggaccugggcaagaccuucagcgugggcaccggcaacugcaccaccaacauccuggaggccaaguacuggugccccgacagcauggaguacaacugccccaaccugagccccagagaggagcccgacgacaucgacugcuggugcuacggcguggagaacgugagaguggccuacggcaagugcgacagcgccggcagaagcagaagaagcagaagagccaucgaccugcccacccacgagaaccacggccugaagaccagacaggagaaguggaugaccggcagaaugggcgagagacagcugcagaagaucgagagaugguucgugagaaaccccuucuucgccgugaccgcccugaccaucgccuaccuggugggcagcaacaugacccagagaguggugaucgcccugcuggugcuggccgugggccccgccuacagcgcccacugcaucggcaucaccgacagagacuucaucgagggcgugcacggcggcaccugggugagcgccacccuggagcaggacaagugcgugaccgugauggcccccgacaagcccagccuggacaucagccuggagaccguggccaucgacagacccgccgaggugagaaaggugugcuacaacgccgugcugacccacgugaagaucaacgacaagugccccagcaccggcgaggcccaccuggccgaggagaacgagggcgacaacgccugcaagagaaccuacagcgacagaggcuggggcaacggcugcggccuguucggcaagggcagcaucguggccugcgccaaguucaccugcgccaagagcaugagccuguucgagguggaccagaccaagauccaguacgugaucagagcccagcugcacgugggcgccaagcaggagaacuggaacaccgacaucaagacccugaaguucgacgcccugagcggcagccaggagguggaguucaucggcuacggcaaggccacccuggagugccaggugcagaccgccguggacuucggcaacagcuacaucgccgagauggagaccgagagcuggaucguggacagacagugggcccaggaccugacccugcccuggcagagcggcagcggcggcguguggagagagaugcaccaccugguggaguucgagcccccccacgccgccaccaucagagugcuggcccugggcaaccaggagggcagccugaagaccgcccugaccggcgccaugagagugaccaaggacaccaacgacaacaaccuguacaagcugcacggcggccacgugagcugcagagugaagcugagcgcccugacccugaagggcaccagcuacaagaucugcaccgacaagauguucuucgugaagaaccccaccgacaccggccacggcaccguggugaugcaggugaaggugagcaagggcgcccccugcagaauccccgugaucguggccgacgaccugaccgccgccaucaacaagggcauccuggugaccgugaaccccaucgccagcaccaacgacgacgaggugcugaucgaggugaacccccccuucggcgacagcuacaucaucgugggcagaggcgacagcagacugaccuaccaguggcacaaggagggcagcagcaucggcaagcuguucacccagaccaugaagggcguggagagacuggccgugaugggcgacaccgccugggacuucagcagcgccggcggcuucuucaccagcgugggcaagggcauccacaccguguucggcagcgccuuccagggccuguucggcggccugaacuggaucaccaaggugaucaugggcgccgugcugaucugggugggcaucaacaccagaaacaugaccaugagcaugagcaugauccuggugggcgugaucaugauguuccugagccugggcgugggcgccuga

SEQ ID NO: 413 - RNA, 2037 nt, Artificial Sequence
  derived and/or modified CDS sequence (opt4) from YFV__NC_002031.1__SSIgE-prMEdelstem_TM-JEV (polyprotein: aa122-680)
auggacuggaccuggauccuguuccugguggccgccgccaccagagugcacagcgugacccuggugagaaagaacagauggcugcugcugaacgugaccagcgaggaccugggcaagaccuucagcgugggcaccggcaacugcaccaccaacauccuggaggccaaguacuggugccccgacagcauggaguacaacugccccaaccugagccccagagaggagcccgacgacaucgacugcuggugcuacggcguggagaacgugagaguggccuacggcaagugcgacagcgccggcagaagcagaagaagcagaagagccaucgaccugcccacccacgagaaccacggccugaagaccagacaggagaaguggaugaccggcagaaugggcgagagacagcugcagaagaucgagagaugguucgugagaaaccccuucuucgccgugaccgcccugaccaucgccuaccuggugggcagcaacaugacccagagaguggugaucgcccugcuggugcuggccgugggccccgccuacagcgcccacugcaucggcaucaccgacagagacuucaucgagggcgugcacggcggcaccugggugagcgccacccuggagcaggacaagugcgugaccgugauggcccccgacaagcccagccuggacaucagccuggagaccguggccaucgacagacccgccgaggugagaaaggugugcuacaacgccgugcugacccacgugaagaucaacgacaagugccccagcaccggcgaggcccaccuggccgaggagaacgagggcgacaacgccugcaagagaaccuacagcgacagaggcuggggcaacggcugcggccuguucggcaagggcagcaucguggccugcgccaaguucaccugcgccaagagcaugagccuguucgagguggaccagaccaagauccaguacgugaucagagcccagcugcacgugggcgccaagcaggagaacuggaacaccgacaucaagacccugaaguucgacgcccugagcggcagccaggagguggaguucaucggcuacggcaaggccacccuggagugccaggugcagaccgccguggacuucggcaacagcuacaucgccgagauggagaccgagagcuggaucguggacagacagugggcccaggaccugacccugcccuggcagagcggcagcggcggcguguggagagagaugcaccaccugguggaguucgagcccccccacgccgccaccaucagagugcuggcccugggcaaccaggagggcagccugaagaccgcccugaccggcgccaugagagugaccaaggacaccaacgacaacaaccuguacaagcugcacggcggccacgugagcugcagagugaagcugagcgcccugacccugaagggcaccagcuacaagaucugcaccgacaagauguucuucgugaagaaccccaccgacaccggccacggcaccguggugaugcaggugaaggugagcaagggcgcccccugcagaauccccgugaucguggccgacgaccugaccgccgccaucaacaagggcauccuggugaccgugaaccccaucgccagcaccaacgacgacgaggugcugaucgaggugaacccccccuucggcgacagcuacaucaucgugggcagaggcgacagcagacugaccuaccaguggcacaaggagggcagcagcggcagcacccugggcaaggccuucagcaccacccugaagggcgcccagagacuggccgcccugggcgacaccgccugggacuucggcagcaucggcggcguguucaacagcaucggcagagccgugcaccagguguucggcggcgccuucagaacccuguucggcggcaugagcuggaucacccagggccugaugggcgcccugcugcuguggaugggcgugaacgccagagacagaagcaucgcccuggccuuccuggccaccggcggcgugcugguguuccuggccaccaacgugcacgccuga

SEQ ID NO: 414 - RNA, 2025 nt, Artificial Sequence
  derived and/or modified CDS sequence (opt4) from YFV__NC_002031.1__SSIgE-prMEdelstem_TM-JEV (polyprotein: aa126-680)
auggacuggaccuggauccuguuccugguggccgccgccaccagagugcacagcagaaagaacagauggcugcugcugaacgugaccagcgaggaccugggcaagaccuucagcgugggcaccggcaacugcaccaccaacauccuggaggccaaguacuggugccccgacagcauggaguacaacugccccaaccugagccccagagaggagcccgacgacaucgacugcuggugcuacggcguggagaacgugagaguggccuacggcaagugcgacagcgccggcagaagcagaagaagcagaagagccaucgaccugcccacccacgagaaccacggccugaagaccagacaggagaaguggaugaccggcagaaugggcgagagacagcugcagaagaucgagagaugguucgugagaaaccccuucuucgccgugaccgcccugaccaucgccuaccuggugggcagcaacaugacccagagaguggugaucgcccugcuggugcuggccgugggccccgccuacagcgcccacugcaucggcaucaccgacagagacuucaucgagggcgugcacggcggcaccugggugagcgccacccuggagcaggacaagugcgugaccgugauggcccccgacaagcccagccuggacaucagccuggagaccguggccaucgacagacccgccgaggugagaaaggugugcuacaacgccgugcugacccacgugaagaucaacgacaagugccccagcaccggcgaggcccaccuggccgaggagaacgagggcgacaacgccugcaagagaaccuacagcgacagaggcuggggcaacggcugcggccuguucggcaagggcagcaucguggccugcgccaaguucaccugcgccaagagcaugagccuguucgagguggaccagaccaagauccaguacgugaucagagcccagcugcacgugggcgccaagcaggagaacuggaacaccgacaucaagacccugaaguucgacgcccugagcggcagccaggagguggaguucaucggcuacggcaaggccacccuggagugccaggugcagaccgccguggacuucggcaacagcuacaucgccgagauggagaccgagagcuggaucguggacagacagugggcccaggaccugacccugcccuggcagagcggcagcggcggcguguggagagagaugcaccaccugguggaguucgagcccccccacgccgccaccaucagagugcuggcccugggcaaccaggagggcagccugaagaccgcccugaccggcgccaugagagugaccaaggacaccaacgacaacaaccuguacaagcugcacggcggccacgugagcugcagagugaagcugagcgcccugacccugaagggcaccagcuacaagaucugcaccgacaagauguucuucgugaagaaccccaccgacaccggccacggcaccguggugaugcaggugaaggugagcaagggcgcccccugcagaauccccgugaucguggccgacgaccugaccgccgccaucaacaagggcauccuggugaccgugaaccccaucgccagcaccaacgacgacgaggugcugaucgaggugaacccccccuucggcgacagcuacaucaucgugggcagaggcgacagcagacugaccuaccaguggcacaaggagggcagcagcggcagcacccugggcaaggccuucagcaccacccugaagggcgcccagagacuggccgcccugggcgacaccgccugggacuucggcagcaucggcggcguguucaacagcaucggcagagccgugcaccagguguucggcggcgccuucagaacccuguucggcggcaugagcuggaucacccagggccugaugggcgcccugcugcuguggaugggcgugaacgccagagacagaagcaucgcccuggccuuccuggccaccggcggcgugcugguguuccuggccaccaacgugcacgccuga

SEQ ID NO: 415 - RNA, 2055 nt, Artificial Sequence
  derived and/or modified CDS sequence (opt4) from YFV__NC_002031.1__SSjev-prMEdelstem_TM-JEV (polyprotein: aa122-680)
augggcaagagaagcgccggcagcaucauguggcuggccagccuggccguggugaucgccugcgccggcgccgugacccuggugagaaagaacagauggcugcugcugaacgugaccagcgaggaccugggcaagaccuucagcgugggcaccggcaacugcaccaccaacauccuggaggccaaguacuggugccccgacagcauggaguacaacugccccaaccugagccccagagaggagcccgacgacaucgacugcuggugcuacggcguggagaacgugagaguggccuacggcaagugcgacagcgccggcagaagcagaagaagcagaagagccaucgaccugcccacccacgagaaccacggccugaagaccagacaggagaaguggaugaccggcagaaugggcgagagacagcugcagaagaucgagagaugguucgugagaaaccccuucuucgccgugaccgcccugaccaucgccuaccuggugggcagcaacaugacccagagaguggugaucgcccugcuggugcuggccgugggccccgccuacagcgcccacugcaucggcaucaccgacagagacuucaucgagggcgugcacggcggcaccugggugagcgccacccuggagcaggacaagugcgugaccgugauggcccccgacaagcccagccuggacaucagccuggagaccguggccaucgacagacccgccgaggugagaaaggugugcuacaacgccgugcugacccacgugaagaucaacgacaagugccccagcaccggcgaggcccaccuggccgaggagaacgagggcgacaacgccugcaagagaaccuacagcgacagaggcuggggcaacggcugcggccuguucggcaagggcagcaucguggccugcgccaaguucaccugcgccaagagcaugagccuguucgagguggaccagaccaagauccaguacgugaucagagcccagcugcacgugggcgccaagcaggagaacuggaacaccgacaucaagacccugaaguucgacgcccugagcggcagccaggagguggaguucaucggcuacggcaaggccacccuggagugccaggugcagaccgccguggacuucggcaacagcuacaucgccgagauggagaccgagagcuggaucguggacagacagugggcccaggaccugacccugcccuggcagagcggcagcggcggcguguggagagagaugcaccaccugguggaguucgagcccccccacgccgccaccaucagagugcuggcccugggcaaccaggagggcagccugaagaccgcccugaccggcgccaugagagugaccaaggacaccaacgacaacaaccuguacaagcugcacggcggccacgugagcugcagagugaagcugagcgcccugacccugaagggcaccagcuacaagaucugcaccgacaagauguucuucgugaagaaccccaccgacaccggccacggcaccguggugaugcaggugaaggugagcaagggcgcccccugcagaauccccgugaucguggccgacgaccugaccgccgccaucaacaagggcauccuggugaccgugaaccccaucgccagcaccaacgacgacgaggugcugaucgaggugaacccccccuucggcgacagcuacaucaucgugggcagaggcgacagcagacugaccuaccaguggcacaaggagggcagcagcggcagcacccugggcaaggccuucagcaccacccugaagggcgcccagagacuggccgcccugggcgacaccgccugggacuucggcagcaucggcggcguguucaacagcaucggcagagccgugcaccagguguucggcggcgccuucagaacccuguucggcggcaugagcuggaucacccagggccugaugggcgcccugcugcuguggaugggcgugaacgccagagacagaagcaucgcccuggccuuccuggccaccggcggcgugcugguguuccuggccaccaacgugcacgccuga

SEQ ID NO: 416 - RNA, 2043 nt, Artificial Sequence
  derived and/or modified CDS sequence (opt4) from YFV__NC_002031.1__SSjev-prMEdelstem_TM-JEV (polyprotein: aa126-680)
augggcaagagaagcgccggcagcaucauguggcuggccagccuggccguggugaucgccugcgccggcgccagaaagaacagauggcugcugcugaacgugaccagcgaggaccugggcaagaccuucagcgugggcaccggcaacugcaccaccaacauccuggaggccaaguacuggugccccgacagcauggaguacaacugccccaaccugagccccagagaggagcccgacgacaucgacugcuggugcuacggcguggagaacgugagaguggccuacggcaagugcgacagcgccggcagaagcagaagaagcagaagagccaucgaccugcccacccacgagaaccacggccugaagaccagacaggagaaguggaugaccggcagaaugggcgagagacagcugcagaagaucgagagaugguucgugagaaaccccuucuucgccgugaccgcccugaccaucgccuaccuggugggcagcaacaugacccagagaguggugaucgcccugcuggugcuggccgugggccccgccuacagcgcccacugcaucggcaucaccgacagagacuucaucgagggcgugcacggcggcaccugggugagcgccacccuggagcaggacaagugcgugaccgugauggcccccgacaagcccagccuggacaucagccuggagaccguggccaucgacagacccgccgaggugagaaaggugugcuacaacgccgugcugacccacgugaagaucaacgacaagugccccagcaccggcgaggcccaccuggccgaggagaacgagggcgacaacgccugcaagagaaccuacagcgacagaggcuggggcaacggcugcggccuguucggcaagggcagcaucguggccugcgccaaguucaccugcgccaagagcaugagccuguucgagguggaccagaccaagauccaguacgugaucagagcccagcugcacgugggcgccaagcaggagaacuggaacaccgacaucaagacccugaaguucgacgcccugagcggcagccaggagguggaguucaucggcuacggcaaggccacccuggagugccaggugcagaccgccguggacuucggcaacagcuacaucgccgagauggagaccgagagcuggaucguggacagacagugggcccaggaccugacccugcccuggcagagcggcagcggcggcguguggagagagaugcaccaccugguggaguucgagcccccccacgccgccaccaucagagugcuggcccugggcaaccaggagggcagccugaagaccgcccugaccggcgccaugagagugaccaaggacaccaacgacaacaaccuguacaagcugcacggcggccacgugagcugcagagugaagcugagcgcccugacccugaagggcaccagcuacaagaucugcaccgacaagauguucuucgugaagaaccccaccgacaccggccacggcaccguggugaugcaggugaaggugagcaagggcgcccccugcagaauccccgugaucguggccgacgaccugaccgccgccaucaacaagggcauccuggugaccgugaaccccaucgccagcaccaacgacgacgaggugcugaucgaggugaacccccccuucggcgacagcuacaucaucgugggcagaggcgacagcagacugaccuaccaguggcacaaggagggcagcagcggcagcacccugggcaaggccuucagcaccacccugaagggcgcccagagacuggccgcccugggcgacaccgccugggacuucggcagcaucggcggcguguucaacagcaucggcagagccgugcaccagguguucggcggcgccuucagaacccuguucggcggcaugagcuggaucacccagggccugaugggcgcccugcugcuguggaugggcgugaacgccagagacagaagcaucgcccuggccuuccuggccaccggcggcgugcugguguuccuggccaccaacgugcacgccuga

SEQ ID NO: 417 - RNA, 2094 nt, Artificial Sequence
  derived and/or modified CDS sequence (opt5) from YFV__NC_002031.1__X-SS-prME-XX (polyprotein: aa92-788)
augagaggccugagcucccggaagcgcagaucucacgacgugcucaccguccaguuccugauccuugggaugcugcucaugacaggaggcguuacgcuggugcggaaaaaccgcuggcuucugcucaaugugaccagcgaggaucuggggaagacauuuuccgucggaaccggcaacugcacaaccaauauucuggaagccaaauacuggugucccgacucuauggaguauaacugcccuaaucucagcccgagagaagaacccgaugacaucgauuguuggugcuacgggguggaaaacguucggguggcuuauggaaagugugacuccgccggccgcucuagacggagccgcagagcgauugaucugccuacacaugagaaucacggccuuaaaacccggcaagagaaguggaugacggggcgcaugggagaaagacagcugcagaagaucgagcggugguucguccgcaaccccuuuuucgcugugaccgcccucacaauugccuaccugguuggcuccaauaugacccagagaguggucaucgcccuucuggugcucgcuguggggccugcuuauagcgcccauugcaucggaauuacagaccgggauuuuaucgaaggcguccacgggggaaccuggguuucugcgacgcuggagcaagacaaaugugugacagugauggcccccgauaagccuucccuggacauuagccucgagaccgucgcuaucgauagaccggccgaagugcgcaaaguuugcuacaacgcugugcugacacaugucaagauuaaugacaaaugucccucuaccggcgaggcccaccuugcggaagagaacgaaggcgacaaugccugcaagcggaccuauuccgauagaggguggggaaacggcugugggcuguucggaaagggcagcaucguggcuugcgccaaauuuacaugcgcuaagucuaugucccucuucgagguugaccagacgaaaauucaguacgugauccgcgcccagcugcacgucggggccaagcaagagaauuggaacaccgauaucaaaacacuuaaguuugacgcucugagcggaucccaggaaguggaguucauuggcuacggcaaagcgacccucgaaugucagguccagacagccguggauuuugggaacucuuauaucgcugagauggaaaccgagagcuggauuguugaccggcaaugggcccaggaucugacgcugccuuggcaguccggaagcggcgggguguggagagagaugcaucaccucgucgaguucgagcccccucaugccgcuacaauccgcgugcuggcccuuggaaaucaagaaggcucucugaagaccgcgcucaccggggcuaugcggguuacaaaggacaccaacgauaauaaccuguacaaacuucacggcggacacguguccugcagagucaagcugagcgcccucacacugaaaggcacgucuuauaagauuuguaccgacaaaauguuuuucgugaagaaucccacagauaccgggcauggaacagugguuaugcaggucaaggugagcaaaggcgccccgugccgcaucccugugaucgucgcugacgaccugaccgccgcuauuaacaaggggauccucgugacgguuaaucccauugccuccaccaacgaugacgaggugcugaucgaagucaauccucccuucggagauucuuacauuaucgugggccggggagacagcagacuuacauaucaguggcacaaagagggcuccagcaucggaaagcuguuuacccagacaaugaaaggcguugagcgccucgcggugaugggggauaccgccugggacuucucuuccgcuggaggcuuuuucacgagcgucgggaaggggauucauacaguguuuggcucugccuuccaagggcuguuuggcggacugaacuggaucaccaagguuauuaugggcgcugugcuuaucugggucgggauuaauacacggaacaugaccauguccaugagcaugauccucgugggagugauuaugauguuccugucccugggcgucggggccgaucagggaugugcgaucaauuuuggcaaauga

SEQ ID NO: 418 - RNA, 2064 nt, Artificial Sequence
  derived and/or modified CDS sequence (opt5) from YFV__NC_002031.1__X-SS-prME (polyprotein: aa92-778)
augagaggccugagcucccggaagcgcagaucucacgacgugcucaccguccaguuccugauccuugggaugcugcucaugacaggaggcguuacgcuggugcggaaaaaccgcuggcuucugcucaaugugaccagcgaggaucuggggaagacauuuuccgucggaaccggcaacugcacaaccaauauucuggaagccaaauacuggugucccgacucuauggaguauaacugcccuaaucucagcccgagagaagaacccgaugacaucgauuguuggugcuacgggguggaaaacguucggguggcuuauggaaagugugacuccgccggccgcucuagacggagccgcagagcgauugaucugccuacacaugagaaucacggccuuaaaacccggcaagagaaguggaugacggggcgcaugggagaaagacagcugcagaagaucgagcggugguucguccgcaaccccuuuuucgcugugaccgcccucacaauugccuaccugguuggcuccaauaugacccagagaguggucaucgcccuucuggugcucgcuguggggccugcuuauagcgcccauugcaucggaauuacagaccgggauuuuaucgaaggcguccacgggggaaccuggguuucugcgacgcuggagcaagacaaaugugugacagugauggcccccgauaagccuucccuggacauuagccucgagaccgucgcuaucgauagaccggccgaagugcgcaaaguuugcuacaacgcugugcugacacaugucaagauuaaugacaaaugucccucuaccggcgaggcccaccuugcggaagagaacgaaggcgacaaugccugcaagcggaccuauuccgauagaggguggggaaacggcugugggcuguucggaaagggcagcaucguggcuugcgccaaauuuacaugcgcuaagucuaugucccucuucgagguugaccagacgaaaauucaguacgugauccgcgcccagcugcacgucggggccaagcaagagaauuggaacaccgauaucaaaacacuuaaguuugacgcucugagcggaucccaggaaguggaguucauuggcuacggcaaagcgacccucgaaugucagguccagacagccguggauuuugggaacucuuauaucgcugagauggaaaccgagagcuggauuguugaccggcaaugggcccaggaucugacgcugccuuggcaguccggaagcggcgggguguggagagagaugcaucaccucgucgaguucgagcccccucaugccgcuacaauccgcgugcuggcccuuggaaaucaagaaggcucucugaagaccgcgcucaccggggcuaugcggguuacaaaggacaccaacgauaauaaccuguacaaacuucacggcggacacguguccugcagagucaagcugagcgcccucacacugaaaggcacgucuuauaagauuuguaccgacaaaauguuuuucgugaagaaucccacagauaccgggcauggaacagugguuaugcaggucaaggugagcaaaggcgccccgugccgcaucccugugaucgucgcugacgaccugaccgccgcuauuaacaaggggauccucgugacgguuaaucccauugccuccaccaacgaugacgaggugcugaucgaagucaauccucccuucggagauucuuacauuaucgugggccggggagacagcagacuuacauaucaguggcacaaagagggcuccagcaucggaaagcuguuuacccagacaaugaaaggcguugagcgccucgcggugaugggggauaccgccugggacuucucuuccgcuggaggcuuuuucacgagcgucgggaaggggauucauacaguguuuggcucugccuuccaagggcuguuuggcggacugaacuggaucaccaagguuauuaugggcgcugugcuuaucugggucgggauuaauacacggaacaugaccauguccaugagcaugauccucgugggagugauuaugauguuccugucccugggcgucggggccuga

SEQ ID NO: 419 - RNA, 2067 nt, Artificial Sequence
  derived and/or modified CDS sequence (opt5) from YFV__NC_002031.1__SS-prME-XX (polyprotein: M,aa102-788)
augucucacgacgugcucaccguccaguuccugauccuugggaugcugcucaugacaggaggcguuacgcuggugcggaaaaaccgcuggcuucugcucaaugugaccagcgaggaucuggggaagacauuuuccgucggaaccggcaacugcacaaccaauauucuggaagccaaauacuggugucccgacucuauggaguauaacugcccuaaucucagcccgagagaagaacccgaugacaucgauuguuggugcuacgggguggaaaacguucggguggcuuauggaaagugugacuccgccggccgcucuagacggagccgcagagcgauugaucugccuacacaugagaaucacggccuuaaaacccggcaagagaaguggaugacggggcgcaugggagaaagacagcugcagaagaucgagcggugguucguccgcaaccccuuuuucgcugugaccgcccucacaauugccuaccugguuggcuccaauaugacccagagaguggucaucgcccuucuggugcucgcuguggggccugcuuauagcgcccauugcaucggaauuacagaccgggauuuuaucgaaggcguccacgggggaaccuggguuucugcgacgcuggagcaagacaaaugugugacagugauggcccccgauaagccuucccuggacauuagccucgagaccgucgcuaucgauagaccggccgaagugcgcaaaguuugcuacaacgcugugcugacacaugucaagauuaaugacaaaugucccucuaccggcgaggcccaccuugcggaagagaacgaaggcgacaaugccugcaagcggaccuauuccgauagaggguggggaaacggcugugggcuguucggaaagggcagcaucguggcuugcgccaaauuuacaugcgcuaagucuaugucccucuucgagguugaccagacgaaaauucaguacgugauccgcgcccagcugcacgucggggccaagcaagagaauuggaacaccgauaucaaaacacuuaaguuugacgcucugagcggaucccaggaaguggaguucauuggcuacggcaaagcgacccucgaaugucagguccagacagccguggauuuugggaacucuuauaucgcugagauggaaaccgagagcuggauuguugaccggcaaugggcccaggaucugacgcugccuuggcaguccggaagcggcgggguguggagagagaugcaucaccucgucgaguucgagcccccucaugccgcuacaauccgcgugcuggcccuuggaaaucaagaaggcucucugaagaccgcgcucaccggggcuaugcggguuacaaaggacaccaacgauaauaaccuguacaaacuucacggcggacacguguccugcagagucaagcugagcgcccucacacugaaaggcacgucuuauaagauuuguaccgacaaaauguuuuucgugaagaaucccacagauaccgggcauggaacagugguuaugcaggucaaggugagcaaaggcgccccgugccgcaucccugugaucgucgcugacgaccugaccgccgcuauuaacaaggggauccucgugacgguuaaucccauugccuccaccaacgaugacgaggugcugaucgaagucaauccucccuucggagauucuuacauuaucgugggccggggagacagcagacuuacauaucaguggcacaaagagggcuccagcaucggaaagcuguuuacccagacaaugaaaggcguugagcgccucgcggugaugggggauaccgccugggacuucucuuccgcuggaggcuuuuucacgagcgucgggaaggggauucauacaguguuuggcucugccuuccaagggcuguuuggcggacugaacuggaucaccaagguuauuaugggcgcugugcuuaucugggucgggauuaauacacggaacaugaccauguccaugagcaugauccucgugggagugauuaugauguuccugucccugggcgucggggccgaucagggaugugcgaucaauuuuggcaaauga

SEQ ID NO: 420 - RNA, 2061 nt, Artificial Sequence
  derived and/or modified CDS sequence (opt5) from YFV__NC_002031.1__SS-prME-XX (polyprotein: M,aa104-788)
auggacgugcucaccguccaguuccugauccuugggaugcugcucaugacaggaggcguuacgcuggugcggaaaaaccgcuggcuucugcucaaugugaccagcgaggaucuggggaagacauuuuccgucggaaccggcaacugcacaaccaauauucuggaagccaaauacuggugucccgacucuauggaguauaacugcccuaaucucagcccgagagaagaacccgaugacaucgauuguuggugcuacgggguggaaaacguucggguggcuuauggaaagugugacuccgccggccgcucuagacggagccgcagagcgauugaucugccuacacaugagaaucacggccuuaaaacccggcaagagaaguggaugacggggcgcaugggagaaagacagcugcagaagaucgagcggugguucguccgcaaccccuuuuucgcugugaccgcccucacaauugccuaccugguuggcuccaauaugacccagagaguggucaucgcccuucuggugcucgcuguggggccugcuuauagcgcccauugcaucggaauuacagaccgggauuuuaucgaaggcguccacgggggaaccuggguuucugcgacgcuggagcaagacaaaugugugacagugauggcccccgauaagccuucccuggacauuagccucgagaccgucgcuaucgauagaccggccgaagugcgcaaaguuugcuacaacgcugugcugacacaugucaagauuaaugacaaaugucccucuaccggcgaggcccaccuugcggaagagaacgaaggcgacaaugccugcaagcggaccuauuccgauagaggguggggaaacggcugugggcuguucggaaagggcagcaucguggcuugcgccaaauuuacaugcgcuaagucuaugucccucuucgagguugaccagacgaaaauucaguacgugauccgcgcccagcugcacgucggggccaagcaagagaauuggaacaccgauaucaaaacacuuaaguuugacgcucugagcggaucccaggaaguggaguucauuggcuacggcaaagcgacccucgaaugucagguccagacagccguggauuuugggaacucuuauaucgcugagauggaaaccgagagcuggauuguugaccggcaaugggcccaggaucugacgcugccuuggcaguccggaagcggcgggguguggagagagaugcaucaccucgucgaguucgagcccccucaugccgcuacaauccgcgugcuggcccuuggaaaucaagaaggcucucugaagaccgcgcucaccggggcuaugcggguuacaaaggacaccaacgauaauaaccuguacaaacuucacggcggacacguguccugcagagucaagcugagcgcccucacacugaaaggcacgucuuauaagauuuguaccgacaaaauguuuuucgugaagaaucccacagauaccgggcauggaacagugguuaugcaggucaaggugagcaaaggcgccccgugccgcaucccugugaucgucgcugacgaccugaccgccgcuauuaacaaggggauccucgugacgguuaaucccauugccuccaccaacgaugacgaggugcugaucgaagucaauccucccuucggagauucuuacauuaucgugggccggggagacagcagacuuacauaucaguggcacaaagagggcuccagcaucggaaagcuguuuacccagacaaugaaaggcguugagcgccucgcggugaugggggauaccgccugggacuucucuuccgcuggaggcuuuuucacgagcgucgggaaggggauucauacaguguuuggcucugccuuccaagggcuguuuggcggacugaacuggaucaccaagguuauuaugggcgcugugcuuaucugggucgggauuaauacacggaacaugaccauguccaugagcaugauccucgugggagugauuaugauguuccugucccugggcgucggggccgaucagggaugugcgaucaauuuuggcaaauga

SEQ ID NO: 421 - RNA, 2037 nt, Artificial Sequence
  derived and/or modified CDS sequence (opt5) from YFV__NC_002031.1__SS-prME (polyprotein: M,aa102-778)
augagccacgacgugcugaccguccaguuccucauccugggcaugcuucugaugacagggggaguuacgcucgugagaaagaaccgguggcugcuucugaaugugaccuccgaggaucucggcaaaacauuuucugucgggaccggaaacugcacaaccaauauucuggaagccaaguacuggugucccgacagcauggaguauaacugcccuaaucuguccccgcgcgaagaacccgaugacaucgauuguuggugcuacggcguggaaaacguuagaguggcuuaugggaaaugugacucugccggacggagccgcagaucccggcgcgcgauugaucucccuacacaugagaaucacggccugaagaccagacaagagaaauggaugacgggccggaugggggaacgccagcuucagaagaucgagagaugguucguccggaaccccuuuuucgcugugaccgcccugacaauugccuaccucguuggaucuaauaugacccagcgcguggucaucgcucugcuugugcuggccgugggcccugcuuauagcgcccauugcaucgggauuacagacagagauuuuaucgaaggaguccacggcgggaccuggguuuccgcgacgcucgagcaagacaagugugugacagugauggcccccgauaaaccuagccuggacauuucucuggagaccgucgcuaucgaucggccggccgaagugcgcaagguuugcuacaacgcugugcucacacaugucaaaauuaaugacaagugucccuccaccggagaggcccaccuggcggaagagaacgaaggcgacaaugccugcaaaagaaccuauagcgaucggggcugggggaacggauguggccuuuucgggaagggaucuaucguggcuugcgccaaguuuacaugcgcuaaauccaugagccuguucgagguugaccagacgaagauucaguacgugaucagagcccagcuccacgucggcgccaaacaagagaauuggaacaccgauaucaagacacugaaauuugacgcucuuucugggucccaggaaguggaguucauuggauacggcaaggcgacccuggaaugucagguccagacagccguggauuuuggcaacagcuauaucgcugagauggaaaccgaguccuggauuguugaccgccaaugggcccaggaucucacgcugccuuggcagucugggagcggaggcguguggcgggagaugcaucaccuggucgaguucgagcccccucaugccgcuacaaucagagugcucgcccuggggaaucaagaaggaucccuuaaaaccgcgcugaccggcgcuaugcgcguuacaaaggacaccaacgauaauaaccucuacaagcugcacgggggccacgugagcugccgggucaaacuuucugcccugacacucaagggaacguccuauaaaauuuguaccgacaagauguuuuucgugaaaaaucccacagauaccggccaugggacagugguuaugcaggucaaggugagcaagggagccccgugcagaaucccugugaucgucgcugacgaccugaccgccgcuauuaacaaaggcauccuggugacgguuaaucccauugccucuaccaacgaugacgaggugcucaucgaagucaauccucccuucggggauagcuacauuaucgugggacgcggcgacucccggcugacauaucaguggcacaaggaggggucuagcaucggcaaacuuuuuacccagacaaugaagggaguugagagacuggcggugaugggcgauaccgccugggacuucuccagcgcugggggauuuuucacgucugucggcaaagggauucauacaguguuuggauccgccuuccaaggccucuuugggggccugaacuggaucaccaagguuauuaugggagcugugcugaucugggucggcauuaauacacgcaacaugaccaugagcaugucuaugauccuugugggggugauuaugauguuccucucccugggagucggcgccuga

SEQ ID NO: 422 - RNA, 2031 nt, Artificial Sequence
  derived and/or modified CDS sequence (opt5) from YFV__NC_002031.1__SS-prME (polyprotein: M,aa104-778)
auggacgugcugaccguccaguuccucauccugggcaugcuucugaugacagggggaguuacgcucgugagaaagaaccgguggcugcuucugaaugugaccagcgaggaucucggcaaaacauuuuccgucgggaccggaaacugcacaaccaauauucuggaagccaaguacuggugucccgacucuauggaguauaacugcccuaaucugagcccgcgcgaagaacccgaugacaucgauuguuggugcuacggcguggaaaacguuagaguggcuuaugggaaaugugacuccgccggacggucucgcagaagccggcgcgcgauugaucucccuacacacgagaaucauggccugaagaccagacaagagaaauggaugacgggccggaugggggaacgccagcuucagaagaucgagagaugguucguccggaaccccuuuuucgcugugaccgcccugacaauugccuaccucguuggauccaauaugacccagcgcguggucaucgcucugcuugugcuggccgugggcccugcuuauucugcccacugcaucgggauuacagacagagauuuuaucgaaggaguccauggcgggaccuggguuagcgcgacgcucgagcaagacaagugugugacagugauggcccccgauaaaccuucccuggacauuagccuggagaccgucgcuaucgaucggccggccgaagugcgcaagguuugcuacaacgcugugcucacacacgucaaaauuaaugacaagugucccucuaccggagaggcccaucuggcggaagagaacgaaggcgacaaugccugcaaaagaaccuauuccgaucggggcugggggaacggauguggccuuuucgggaagggaagcaucguggcuugcgccaaguuuacaugcgcuaaaucuaugucccuguucgagguugaccagacgaagauucaguacgugaucagagcccagcuccacgucggcgccaaacaagagaauuggaacaccgauaucaagacacugaaauuugacgcucuuagcgggucucaggaaguggaguucauuggauacggcaaggcgacccuggaaugucagguccagacagccguggauuuuggcaacuccuauaucgcugagauggaaaccgagagcuggauuguugaccgccaaugggcccaggaucucacgcugccuuggcaguccgggucuggaggcguguggcgggagaugcaccaucuggucgaguucgagcccccucacgccgcuacaaucagagugcucgcccuggggaaucaagaaggaagccuuaaaaccgcgcugaccggcgcuaugcgcguuacaaaggacaccaacgauaauaaccucuacaagcugcaugggggccacguguccugccgggucaaacuuagcgcccugacacucaagggaacgucuuauaaaauuuguaccgacaagauguuuuucgugaaaaaucccacagauaccggccacgggacagugguuaugcaggucaagguguccaagggagccccgugcagaaucccugugaucgucgcugacgaccugaccgccgcuauuaacaaaggcauccuggugacgguuaaucccauugccagcaccaacgaugacgaggugcucaucgaagucaauccucccuucggggauucuuacauuaucgugggacgcggcgacagccggcugacauaucaguggcauaaggagggguccucuaucggcaaacuuuuuacccagacaaugaagggaguugagagacuggcggugaugggcgauaccgccugggacuucagcuccgcugggggauuuuucacgagcgucggcaaagggauucacacaguguuuggaucugccuuccaaggccucuuugggggccugaacuggaucaccaagguuauuaugggagcugugcugaucugggucggcauuaauacacgcaacaugaccauguccaugagcaugauccuugugggggugauuaugauguuccucucucugggagucggcgccuga

SEQ ID NO: 423 - RNA, 2073 nt, Artificial Sequence
  derived and/or modified CDS sequence (opt5) from YFV__NC_002031.1__X-SS-prMEdelstem_TM-JEV (polyprotein: aa92-680)
augagaggccugagcucccggaagcgcagaucucacgacgugcucaccguccaguuccugauccuugggaugcugcucaugacaggaggcguuacgcuggugcggaaaaaccgcuggcuucugcucaaugugaccagcgaggaucuggggaagacauuuuccgucggaaccggcaacugcacaaccaauauucuggaagccaaauacuggugucccgacucuauggaguauaacugcccuaaucucagcccgagagaagaacccgaugacaucgauuguuggugcuacgggguggaaaacguucggguggcuuauggaaagugugacuccgccggccgcucuagacggagccgcagagcgauugaucugccuacacaugagaaucacggccuuaaaacccggcaagagaaguggaugacggggcgcaugggagaaagacagcugcagaagaucgagcggugguucguccgcaaccccuuuuucgcugugaccgcccucacaauugccuaccugguuggcuccaauaugacccagagaguggucaucgcccuucuggugcucgcuguggggccugcuuauagcgcccauugcaucggaauuacagaccgggauuuuaucgaaggcguccacgggggaaccuggguuucugcgacgcuggagcaagacaaaugugugacagugauggcccccgauaagccuucccuggacauuagccucgagaccgucgcuaucgauagaccggccgaagugcgcaaaguuugcuacaacgcugugcugacacaugucaagauuaaugacaaaugucccucuaccggcgaggcccaccuugcggaagagaacgaaggcgacaaugccugcaagcggaccuauuccgauagaggguggggaaacggcugugggcuguucggaaagggcagcaucguggcuugcgccaaauuuacaugcgcuaagucuaugucccucuucgagguugaccagacgaaaauucaguacgugauccgcgcccagcugcacgucggggccaagcaagagaauuggaacaccgauaucaaaacacuuaaguuugacgcucugagcggaucccaggaaguggaguucauuggcuacggcaaagcgacccucgaaugucagguccagacagccguggauuuugggaacucuuauaucgcugagauggaaaccgagagcuggauuguugaccggcaaugggcccaggaucugacgcugccuuggcaguccggaagcggcgggguguggagagagaugcaucaccucgucgaguucgagcccccucaugccgcuacaauccgcgugcuggcccuuggaaaucaagaaggcucucugaagaccgcgcucaccggggcuaugcggguuacaaaggacaccaacgauaauaaccuguacaaacuucacggcggacacguguccugcagagucaagcugagcgcccucacacugaaaggcacgucuuauaagauuuguaccgacaaaauguuuuucgugaagaaucccacagauaccgggcauggaacagugguuaugcaggucaaggugagcaaaggcgccccgugccgcaucccugugaucgucgcugacgaccugaccgccgcuauuaacaaggggauccucgugacgguuaaucccauugccuccaccaacgaugacgaggugcugaucgaagucaauccucccuucggagauucuuacauuaucgugggccggggagacagcagacuuacauaucaguggcacaaagagggcuccagcggcagcacccuggggaaggccuucuccacaacgcucaaaggagcucagagacuggccgcgcuuggcgacaccgcuugggauuuugggucuaucggaggcguguucaacagcauugggcgggccguccaccaaguuuuuggaggcgccuuccgcacacuguuuggcgggauguccuggaucacccagggacucaugggcgcucugcuucuguggaugggggugaaugccagagaccggucuauugcucucgccuuccuggcgacaggaggcgugcuggucuuucucgccaccaacgugcaugcuuga

SEQ ID NO: 424 - RNA, 2046 nt, Artificial Sequence
  derived and/or modified CDS sequence (opt5) from YFV__NC_002031.1__SS-prMEdelstem_TM-JEV (polyprotein: M,aa102-680)
augagccacgacgugcugaccguccaguuccucauccugggcaugcuucugaugacagggggaguuacgcucgugagaaagaaccgguggcugcuucugaaugugaccuccgaggaucucggcaaaacauuuucugucgggaccggaaacugcacaaccaauauucuggaagccaaguacuggugucccgacagcauggaguauaacugcccuaaucuguccccgcgcgaagaacccgaugacaucgauuguuggugcuacggcguggaaaacguuagaguggcuuaugggaaaugugacucugccggacggagccgcagaucccggcgcgcgauugaucucccuacacaugagaaucacggccugaagaccagacaagagaaauggaugacgggccggaugggggaacgccagcuucagaagaucgagagaugguucguccggaaccccuuuuucgcugugaccgcccugacaauugccuaccucguuggaucuaauaugacccagcgcguggucaucgcucugcuugugcuggccgugggcccugcuuauagcgcccauugcaucgggauuacagacagagauuuuaucgaaggaguccacggcgggaccuggguuuccgcgacgcucgagcaagacaagugugugacagugauggcccccgauaaaccuagccuggacauuucucuggagaccgucgcuaucgaucggccggccgaagugcgcaagguuugcuacaacgcugugcucacacaugucaaaauuaaugacaagugucccuccaccggagaggcccaccuggcggaagagaacgaaggcgacaaugccugcaaaagaaccuauagcgaucggggcugggggaacggauguggccuuuucgggaagggaucuaucguggcuugcgccaaguuuacaugcgcuaaauccaugagccuguucgagguugaccagacgaagauucaguacgugaucagagcccagcuccacgucggcgccaaacaagagaauuggaacaccgauaucaagacacugaaauuugacgcucuuucugggucccaggaaguggaguucauuggauacggcaaggcgacccuggaaugucagguccagacagccguggauuuuggcaacagcuauaucgcugagauggaaaccgaguccuggauuguugaccgccaaugggcccaggaucucacgcugccuuggcagucugggagcggaggcguguggcgggagaugcaucaccuggucgaguucgagcccccucaugccgcuacaaucagagugcucgcccuggggaaucaagaaggaucccuuaaaaccgcgcugaccggcgcuaugcgcguuacaaaggacaccaacgauaauaaccucuacaagcugcacgggggccacgugagcugccgggucaaacuuucugcccugacacucaagggaacguccuauaaaauuuguaccgacaagauguuuuucgugaaaaaucccacagauaccggccaugggacagugguuaugcaggucaaggugagcaagggagccccgugcagaaucccugugaucgucgcugacgaccugaccgccgcuauuaacaaaggcauccuggugacgguuaaucccauugccucuaccaacgaugacgaggugcucaucgaagucaauccucccuucggggauagcuacauuaucgugggacgcggcgacucccggcugacauaucaguggcacaaggaggggucuagcggcagcacccuggggaaggccuucuccacaacgcucaaaggagcucagagacuggccgcgcuuggcgacaccgcuugggauuuugggucuaucggaggcguguucaacagcauugggcgggccguccaccaaguuuuuggaggcgccuuccgcacacuguuuggcgggauguccuggaucacccagggacucaugggcgcucugcuucuguggaugggggugaaugccagagaccggucuauugcucucgccuuccuggcgacaggaggcgugcuggucuuucucgccaccaacgugcaugcuuga

SEQ ID NO: 425 - RNA, 2040 nt, Artificial Sequence
  derived and/or modified CDS sequence (opt5) from YFV__NC_002031.1__SS-prMEdelstem_TM-JEV (polyprotein: M,aa104-680)
auggacgugcugaccguccaguuccucauccugggcaugcuucugaugacagggggaguuacgcucgugagaaagaaccgguggcugcuucugaaugugaccagcgaggaucucggcaaaacauuuuccgucgggaccggaaacugcacaaccaauauucuggaagccaaguacuggugucccgacucuauggaguauaacugcccuaaucugagcccgcgcgaagaacccgaugacaucgauuguuggugcuacggcguggaaaacguuagaguggcuuaugggaaaugugacuccgccggacggucucgcagaagccggcgcgcgauugaucucccuacacacgagaaucauggccugaagaccagacaagagaaauggaugacgggccggaugggggaacgccagcuucagaagaucgagagaugguucguccggaaccccuuuuucgcugugaccgcccugacaauugccuaccucguuggauccaauaugacccagcgcguggucaucgcucugcuugugcuggccgugggcccugcuuauucugcccacugcaucgggauuacagacagagauuuuaucgaaggaguccauggcgggaccuggguuagcgcgacgcucgagcaagacaagugugugacagugauggcccccgauaaaccuucccuggacauuagccuggagaccgucgcuaucgaucggccggccgaagugcgcaagguuugcuacaacgcugugcucacacacgucaaaauuaaugacaagugucccucuaccggagaggcccaucuggcggaagagaacgaaggcgacaaugccugcaaaagaaccuauuccgaucggggcugggggaacggauguggccuuuucgggaagggaagcaucguggcuugcgccaaguuuacaugcgcuaaaucuaugucccuguucgagguugaccagacgaagauucaguacgugaucagagcccagcuccacgucggcgccaaacaagagaauuggaacaccgauaucaagacacugaaauuugacgcucuuagcgggucucaggaaguggaguucauuggauacggcaaggcgacccuggaaugucagguccagacagccguggauuuuggcaacuccuauaucgcugagauggaaaccgagagcuggauuguugaccgccaaugggcccaggaucucacgcugccuuggcaguccgggucuggaggcguguggcgggagaugcaccaucuggucgaguucgagcccccucacgccgcuacaaucagagugcucgcccuggggaaucaagaaggaagccuuaaaaccgcgcugaccggcgcuaugcgcguuacaaaggacaccaacgauaauaaccucuacaagcugcaugggggccacguguccugccgggucaaacuuagcgcccugacacucaagggaacgucuuauaaaauuuguaccgacaagauguuuuucgugaaaaaucccacagauaccggccacgggacagugguuaugcaggucaagguguccaagggagccccgugcagaaucccugugaucgucgcugacgaccugaccgccgcuauuaacaaaggcauccuggugacgguuaaucccauugccagcaccaacgaugacgaggugcucaucgaagucaauccucccuucggggauucuuacauuaucgugggacgcggcgacagccggcugacauaucaguggcauaaggagggguccucuggcagcacccuggggaaggccuucuccacaacgcucaaaggagcucagagacuggccgcgcuuggcgacaccgcuugggauuuugggucuaucggaggcguguucaacagcauugggcgggccguccaccaaguuuuuggaggcgccuuccgcacacuguuuggcgggauguccuggaucacccagggacucaugggcgcucugcuucuguggaugggggugaaugccagagaccggucuauugcucucgccuuccuggcgacaggaggcgugcuggucuuucucgccaccaacgugcaugcuuga

SEQ ID NO: 426 - RNA, 2058 nt, Artificial Sequence
  derived and/or modified CDS sequence (opt5) from YFV__NC_002031.1__SSIgE-prME-XX (polyprotein: aa122-788)
auggacuggaccuggauccuguuccucguggccgcugccacaagaguccacagcguuacgcuggugcggaaaaaccgcuggcuucugcucaaugugaccagcgaggaucuggggaagacauuuuccgucggaaccggcaacugcacaaccaauauucuggaagccaaauacuggugucccgacucuauggaguauaacugcccuaaucucagcccgagagaagaacccgaugacaucgauuguuggugcuacgggguggaaaacguucggguggcuuauggaaagugugacuccgccggccgcucuagacggagccgcagagcgauugaucugccuacacaugagaaucacggccuuaaaacccggcaagagaaguggaugacggggcgcaugggagaaagacagcugcagaagaucgagcggugguucguccgcaaccccuuuuucgcugugaccgcccucacaauugccuaccugguuggcuccaauaugacccagagaguggucaucgcccuucuggugcucgcuguggggccugcuuauagcgcccauugcaucggaauuacagaccgggauuuuaucgaaggcguccacgggggaaccuggguuucugcgacgcuggagcaagacaaaugugugacagugauggcccccgauaagccuucccuggacauuagccucgagaccgucgcuaucgauagaccggccgaagugcgcaaaguuugcuacaacgcugugcugacacaugucaagauuaaugacaaaugucccucuaccggcgaggcccaccuugcggaagagaacgaaggcgacaaugccugcaagcggaccuauuccgauagaggguggggaaacggcugugggcuguucggaaagggcagcaucguggcuugcgccaaauuuacaugcgcuaagucuaugucccucuucgagguugaccagacgaaaauucaguacgugauccgcgcccagcugcacgucggggccaagcaagagaauuggaacaccgauaucaaaacacuuaaguuugacgcucugagcggaucccaggaaguggaguucauuggcuacggcaaagcgacccucgaaugucagguccagacagccguggauuuugggaacucuuauaucgcugagauggaaaccgagagcuggauuguugaccggcaaugggcccaggaucugacgcugccuuggcaguccggaagcggcgggguguggagagagaugcaucaccucgucgaguucgagcccccucaugccgcuacaauccgcgugcuggcccuuggaaaucaagaaggcucucugaagaccgcgcucaccggggcuaugcggguuacaaaggacaccaacgauaauaaccuguacaaacuucacggcggacacguguccugcagagucaagcugagcgcccucacacugaaaggcacgucuuauaagauuuguaccgacaaaauguuuuucgugaagaaucccacagauaccgggcauggaacagugguuaugcaggucaaggugagcaaaggcgccccgugccgcaucccugugaucgucgcugacgaccugaccgccgcuauuaacaaggggauccucgugacgguuaaucccauugccuccaccaacgaugacgaggugcugaucgaagucaauccucccuucggagauucuuacauuaucgugggccggggagacagcagacuuacauaucaguggcacaaagagggcuccagcaucggaaagcuguuuacccagacaaugaaaggcguugagcgccucgcggugaugggggauaccgccugggacuucucuuccgcuggaggcuuuuucacgagcgucgggaaggggauucauacaguguuuggcucugccuuccaagggcuguuuggcggacugaacuggaucaccaagguuauuaugggcgcugugcuuaucugggucgggauuaauacacggaacaugaccauguccaugagcaugauccucgugggagugauuaugauguuccugucccugggcgucggggccgaucagggaugugcgaucaauuuuggcaaauga

SEQ ID NO: 427 - RNA, 2046 nt, Artificial Sequence
  derived and/or modified CDS sequence (opt5) from YFV__NC_002031.1__SSIgE-prME-XX (polyprotein: aa126-788)
auggacuggaccuggauccuguuccucguggccgcugccacaagaguccacagccggaaaaaccgcuggcuucugcucaaugugaccagcgaggaucuggggaagacauuuuccgucggaaccggcaacugcacaaccaauauucuggaagccaaauacuggugucccgacucuauggaguauaacugcccuaaucucagcccgagagaagaacccgaugacaucgauuguuggugcuacgggguggaaaacguucggguggcuuauggaaagugugacuccgccggccgcucuagacggagccgcagagcgauugaucugccuacacaugagaaucacggccuuaaaacccggcaagagaaguggaugacggggcgcaugggagaaagacagcugcagaagaucgagcggugguucguccgcaaccccuuuuucgcugugaccgcccucacaauugccuaccugguuggcuccaauaugacccagagaguggucaucgcccuucuggugcucgcuguggggccugcuuauagcgcccauugcaucggaauuacagaccgggauuuuaucgaaggcguccacgggggaaccuggguuucugcgacgcuggagcaagacaaaugugugacagugauggcccccgauaagccuucccuggacauuagccucgagaccgucgcuaucgauagaccggccgaagugcgcaaaguuugcuacaacgcugugcugacacaugucaagauuaaugacaaaugucccucuaccggcgaggcccaccuugcggaagagaacgaaggcgacaaugccugcaagcggaccuauuccgauagaggguggggaaacggcugugggcuguucggaaagggcagcaucguggcuugcgccaaauuuacaugcgcuaagucuaugucccucuucgagguugaccagacgaaaauucaguacgugauccgcgcccagcugcacgucggggccaagcaagagaauuggaacaccgauaucaaaacacuuaaguuugacgcucugagcggaucccaggaaguggaguucauuggcuacggcaaagcgacccucgaaugucagguccagacagccguggauuuugggaacucuuauaucgcugagauggaaaccgagagcuggauuguugaccggcaaugggcccaggaucugacgcugccuuggcaguccggaagcggcgggguguggagagagaugcaucaccucgucgaguucgagcccccucaugccgcuacaauccgcgugcuggcccuuggaaaucaagaaggcucucugaagaccgcgcucaccggggcuaugcggguuacaaaggacaccaacgauaauaaccuguacaaacuucacggcggacacguguccugcagagucaagcugagcgcccucacacugaaaggcacgucuuauaagauuuguaccgacaaaauguuuuucgugaagaaucccacagauaccgggcauggaacagugguuaugcaggucaaggugagcaaaggcgccccgugccgcaucccugugaucgucgcugacgaccugaccgccgcuauuaacaaggggauccucgugacgguuaaucccauugccuccaccaacgaugacgaggugcugaucgaagucaauccucccuucggagauucuuacauuaucgugggccggggagacagcagacuuacauaucaguggcacaaagagggcuccagcaucggaaagcuguuuacccagacaaugaaaggcguugagcgccucgcggugaugggggauaccgccugggacuucucuuccgcuggaggcuuuuucacgagcgucgggaaggggauucauacaguguuuggcucugccuuccaagggcuguuuggcggacugaacuggaucaccaagguuauuaugggcgcugugcuuaucugggucgggauuaauacacggaacaugaccauguccaugagcaugauccucgugggagugauuaugauguuccugucccugggcgucggggccgaucagggaugugcgaucaauuuuggcaaauga

SEQ ID NO: 428 - RNA, 2028 nt, Artificial Sequence
  derived and/or modified CDS sequence (opt5) from YFV__NC_002031.1__SSIgE-prME (polyprotein: aa122-778)
auggacuggaccuggauccuguuccucguggccgcugccacaagaguccacagcgugacccuggucagaaagaaccgguggcuccugcuuaauguuacaagcgaggaccugggcaaaacguucuccguggggaccggaaacugcacaaccaauauccucgaagccaaguacuggugucccgauucuauggaguauaacugcccuaaucugagcccgcgcgaggaacccgacgauauugacuguuggugcuacggcguggaaaacgucagaguggcuuaugggaaaugugauuccgccggacggucucgcagaagccggcgcgcgaucgaccuuccuacacacgagaaucauggccugaagaccagacaggagaaauggaugacagggcggaugggagaacgccaacuccagaagauugagagaugguuuguucggaaccccuucuuugcugugaccgcccugacgaucgccuaccuggucggcuccaauaugacccagcgcgugguuauugcucuccuggugcuugccgucggcccugcuuauucugcccacugcaucgggaucacagauagagacuucauugaaggagugcauggcgggaccugggugagcgcgacacuggagcaggauaagugugucaccguuauggcccccgacaaaccuucccucgauaucagccuggagacgguggcuauugaccggccggccgaagugcgcaaggucugcuacaacgcugugcuuacacacguuaaaaucaaugauaagugucccucuaccggagaggcccaucuggcggaagagaacgaaggcgacaaugccugcaaaagaacauauuccgaccggggguggggaaacggcuguggccucuuugggaagggaagcauuguggcuugcgccaaguuuaccugcgcuaaaucuaugucccuguucgaggucgaucaaaccaagauccaguacgugauuagagcccagcugcacguuggcgccaaacaggagaauuggaacacagacaucaagacgcucaaauucgaugcucugagcgggucucaagaaguggaguuuaucggauacggcaaggcgacccuugaaugucagguccagacagccguggacuucgggaacuccuauauugcugagauggaaaccgagagcuggaucgucgaucgccagugggcccaagaccugacacucccuuggcaguccggaucuggcggcguguggcgggagaugcaccaucugguugaauuugagcccccucacgccgcuaccauuagagugcuugcccuggggaaucaggaaggaagccucaaaacggcgcugacaggcgcuaugcgcgucaccaaggauaccaacgacaauaaccuguacaagcuccaugggggacacguguccugccggguuaaacugagcgcccuuacacugaagggcaccucuuauaaaaucuguacagauaagauguucuuugugaaaaaucccacggacaccgggcacggcacagucgugaugcaagugaagguuuccaagggagccccgugccgcauuccugucaucguggcugaugaccucaccgccgcuaucaacaaaggcauucuggugacagucaaucccaucgccagcaccaacgacgaugaggugcuuauugaaguuaauccucccuucggggacucuuacaucauugugggaagaggcgauagccggcugacguaucaguggcauaaggagggguccucuaucggaaaacucuucacccagacaaugaagggcgucgagagacuggcggugaugggggacaccgccugggauuuuagcuccgcuggcggauucuuuacaagcguuggcaaagggauccacaccguguucggaucugccuuucagggccuguucgggggacucaacuggauuacgaaggucaucaugggcgcugugcugauuuggguugggaucaauacacgcaacaugaccauguccaugagcaugauucuugugggcgucaucaugauguuucugucucucggagugggcgccuga

SEQ ID NO: 429 - RNA, 2016 nt, Artificial Sequence
  derived and/or modified CDS sequence (opt5) from YFV__NC_002031.1__SSIgE-prME (polyprotein: aa126-778)
auggacuggaccuggauccuguuccucguggccgcugccacaagaguccacagcagaaagaaccgguggcuccugcuuaauguuacaagcgaggaccugggcaaaacguucuccguggggaccggaaacugcacaaccaauauccucgaagccaaguacuggugucccgauucuauggaguauaacugcccuaaucugagcccgcgcgaggaacccgacgauauugacuguuggugcuacggcguggaaaacgucagaguggcuuaugggaaaugugauuccgccggacggucucgcagaagccggcgcgcgaucgaccuuccuacacacgagaaucauggccugaagaccagacaggagaaauggaugacagggcggaugggagaacgccaacuccagaagauugagagaugguuuguucggaaccccuucuuugcugugaccgcccugacgaucgccuaccuggucggcuccaauaugacccagcgcgugguuauugcucuccuggugcuugccgucggcccugcuuauucugcccacugcaucgggaucacagauagagacuucauugaaggagugcauggcgggaccugggugagcgcgacacuggagcaggauaagugugucaccguuauggcccccgacaaaccuucccucgauaucagccuggagacgguggcuauugaccggccggccgaagugcgcaaggucugcuacaacgcugugcuuacacacguuaaaaucaaugauaagugucccucuaccggagaggcccaucuggcggaagagaacgaaggcgacaaugccugcaaaagaacauauuccgaccggggguggggaaacggcuguggccucuuugggaagggaagcauuguggcuugcgccaaguuuaccugcgcuaaaucuaugucccuguucgaggucgaucaaaccaagauccaguacgugauuagagcccagcugcacguuggcgccaaacaggagaauuggaacacagacaucaagacgcucaaauucgaugcucugagcgggucucaagaaguggaguuuaucggauacggcaaggcgacccuugaaugucagguccagacagccguggacuucgggaacuccuauauugcugagauggaaaccgagagcuggaucgucgaucgccagugggcccaagaccugacacucccuuggcaguccggaucuggcggcguguggcgggagaugcaccaucugguugaauuugagcccccucacgccgcuaccauuagagugcuugcccuggggaaucaggaaggaagccucaaaacggcgcugacaggcgcuaugcgcgucaccaaggauaccaacgacaauaaccuguacaagcuccaugggggacacguguccugccggguuaaacugagcgcccuuacacugaagggcaccucuuauaaaaucuguacagauaagauguucuuugugaaaaaucccacggacaccgggcacggcacagucgugaugcaagugaagguuuccaagggagccccgugccgcauuccugucaucguggcugaugaccucaccgccgcuaucaacaaaggcauucuggugacagucaaucccaucgccagcaccaacgacgaugaggugcuuauugaaguuaauccucccuucggggacucuuacaucauugugggaagaggcgauagccggcugacguaucaguggcauaaggagggguccucuaucggaaaacucuucacccagacaaugaagggcgucgagagacuggcggugaugggggacaccgccugggauuuuagcuccgcuggcggauucuuuacaagcguuggcaaagggauccacaccguguucggaucugccuuucagggccuguucgggggacucaacuggauuacgaaggucaucaugggcgcugugcugauuuggguugggaucaauacacgcaacaugaccauguccaugagcaugauucuugugggcgucaucaugauguuucugucucucggagugggcgccuga

SEQ ID NO: 430 - RNA, 2076 nt, Artificial Sequence
  derived and/or modified CDS sequence (opt5) from YFV__NC_002031.1__SSjev-prME-XX (polyprotein: aa122-788)
augggcaagagaagcgccggguccaucauguggcuggcuucucucgccguggucauugcgugcgcuggagccguuacgcuggugcggaaaaaccgcuggcuucugcucaaugugaccagcgaggaucuggggaagacauuuuccgucggaaccggcaacugcacaaccaauauucuggaagccaaauacuggugucccgacucuauggaguauaacugcccuaaucucagcccgagagaagaacccgaugacaucgauuguuggugcuacgggguggaaaacguucggguggcuuauggaaagugugacuccgccggccgcucuagacggagccgcagagcgauugaucugccuacacaugagaaucacggccuuaaaacccggcaagagaaguggaugacggggcgcaugggagaaagacagcugcagaagaucgagcggugguucguccgcaaccccuuuuucgcugugaccgcccucacaauugccuaccugguuggcuccaauaugacccagagaguggucaucgcccuucuggugcucgcuguggggccugcuuauagcgcccauugcaucggaauuacagaccgggauuuuaucgaaggcguccacgggggaaccuggguuucugcgacgcuggagcaagacaaaugugugacagugauggcccccgauaagccuucccuggacauuagccucgagaccgucgcuaucgauagaccggccgaagugcgcaaaguuugcuacaacgcugugcugacacaugucaagauuaaugacaaaugucccucuaccggcgaggcccaccuugcggaagagaacgaaggcgacaaugccugcaagcggaccuauuccgauagaggguggggaaacggcugugggcuguucggaaagggcagcaucguggcuugcgccaaauuuacaugcgcuaagucuaugucccucuucgagguugaccagacgaaaauucaguacgugauccgcgcccagcugcacgucggggccaagcaagagaauuggaacaccgauaucaaaacacuuaaguuugacgcucugagcggaucccaggaaguggaguucauuggcuacggcaaagcgacccucgaaugucagguccagacagccguggauuuugggaacucuuauaucgcugagauggaaaccgagagcuggauuguugaccggcaaugggcccaggaucugacgcugccuuggcaguccggaagcggcgggguguggagagagaugcaucaccucgucgaguucgagcccccucaugccgcuacaauccgcgugcuggcccuuggaaaucaagaaggcucucugaagaccgcgcucaccggggcuaugcggguuacaaaggacaccaacgauaauaaccuguacaaacuucacggcggacacguguccugcagagucaagcugagcgcccucacacugaaaggcacgucuuauaagauuuguaccgacaaaauguuuuucgugaagaaucccacagauaccgggcauggaacagugguuaugcaggucaaggugagcaaaggcgccccgugccgcaucccugugaucgucgcugacgaccugaccgccgcuauuaacaaggggauccucgugacgguuaaucccauugccuccaccaacgaugacgaggugcugaucgaagucaauccucccuucggagauucuuacauuaucgugggccggggagacagcagacuuacauaucaguggcacaaagagggcuccagcaucggaaagcuguuuacccagacaaugaaaggcguugagcgccucgcggugaugggggauaccgccugggacuucucuuccgcuggaggcuuuuucacgagcgucgggaaggggauucauacaguguuuggcucugccuuccaagggcuguuuggcggacugaacuggaucaccaagguuauuaugggcgcugugcuuaucugggucgggauuaauacacggaacaugaccauguccaugagcaugauccucgugggagugauuaugauguuccugucccugggcgucggggccgaucagggaugugcgaucaauuuuggcaaauga

SEQ ID NO: 431 - RNA, 2064 nt, Artificial Sequence
  derived and/or modified CDS sequence (opt5) from YFV__NC_002031.1__SSjev-prME-XX (polyprotein: aa126-788)
augggcaagagaagcgccggguccaucauguggcuggcuucucucgccguggucauugcgugcgcuggagcccggaaaaaccgcuggcuucugcucaaugugaccagcgaggaucuggggaagacauuuuccgucggaaccggcaacugcacaaccaauauucuggaagccaaauacuggugucccgacucuauggaguauaacugcccuaaucucagcccgagagaagaacccgaugacaucgauuguuggugcuacgggguggaaaacguucggguggcuuauggaaagugugacuccgccggccgcucuagacggagccgcagagcgauugaucugccuacacaugagaaucacggccuuaaaacccggcaagagaaguggaugacggggcgcaugggagaaagacagcugcagaagaucgagcggugguucguccgcaaccccuuuuucgcugugaccgcccucacaauugccuaccugguuggcuccaauaugacccagagaguggucaucgcccuucuggugcucgcuguggggccugcuuauagcgcccauugcaucggaauuacagaccgggauuuuaucgaaggcguccacgggggaaccuggguuucugcgacgcuggagcaagacaaaugugugacagugauggcccccgauaagccuucccuggacauuagccucgagaccgucgcuaucgauagaccggccgaagugcgcaaaguuugcuacaacgcugugcugacacaugucaagauuaaugacaaaugucccucuaccggcgaggcccaccuugcggaagagaacgaaggcgacaaugccugcaagcggaccuauuccgauagaggguggggaaacggcugugggcuguucggaaagggcagcaucguggcuugcgccaaauuuacaugcgcuaagucuaugucccucuucgagguugaccagacgaaaauucaguacgugauccgcgcccagcugcacgucggggccaagcaagagaauuggaacaccgauaucaaaacacuuaaguuugacgcucugagcggaucccaggaaguggaguucauuggcuacggcaaagcgacccucgaaugucagguccagacagccguggauuuugggaacucuuauaucgcugagauggaaaccgagagcuggauuguugaccggcaaugggcccaggaucugacgcugccuuggcaguccggaagcggcgggguguggagagagaugcaucaccucgucgaguucgagcccccucaugccgcuacaauccgcgugcuggcccuuggaaaucaagaaggcucucugaagaccgcgcucaccggggcuaugcggguuacaaaggacaccaacgauaauaaccuguacaaacuucacggcggacacguguccugcagagucaagcugagcgcccucacacugaaaggcacgucuuauaagauuuguaccgacaaaauguuuuucgugaagaaucccacagauaccgggcauggaacagugguuaugcaggucaaggugagcaaaggcgccccgugccgcaucccugugaucgucgcugacgaccugaccgccgcuauuaacaaggggauccucgugacgguuaaucccauugccuccaccaacgaugacgaggugcugaucgaagucaauccucccuucggagauucuuacauuaucgugggccggggagacagcagacuuacauaucaguggcacaaagagggcuccagcaucggaaagcuguuuacccagacaaugaaaggcguugagcgccucgcggugaugggggauaccgccugggacuucucuuccgcuggaggcuuuuucacgagcgucgggaaggggauucauacaguguuuggcucugccuuccaagggcuguuuggcggacugaacuggaucaccaagguuauuaugggcgcugugcuuaucugggucgggauuaauacacggaacaugaccauguccaugagcaugauccucgugggagugauuaugauguuccugucccugggcgucggggccgaucagggaugugcgaucaauuuuggcaaauga

SEQ ID NO: 432 - RNA, 2046 nt, Artificial Sequence
  derived and/or modified CDS sequence (opt5) from YFV__NC_002031.1__SSjev-prME (polyprotein: aa122-778)
augggcaagagaagcgccggguccaucauguggcuggcuucucucgccguggucauugcgugcgcuggagccgugacccuggucagaaagaaccgguggcuccugcuuaauguuacaagcgaggaccugggcaaaacguucuccguggggaccggaaacugcacaaccaauauccucgaagccaaguacuggugucccgauucuauggaguauaacugcccuaaucugagcccgcgcgaggaacccgacgauauugacuguuggugcuacggcguggaaaacgucagaguggcuuaugggaaaugugauuccgccggacggucucgcagaagccggcgcgcgaucgaccuuccuacacacgagaaucauggccugaagaccagacaggagaaauggaugacagggcggaugggagaacgccaacuccagaagauugagagaugguuuguucggaaccccuucuuugcugugaccgcccugacgaucgccuaccuggucggcuccaauaugacccagcgcgugguuauugcucuccuggugcuugccgucggcccugcuuauucugcccacugcaucgggaucacagauagagacuucauugaaggagugcauggcgggaccugggugagcgcgacacuggagcaggauaagugugucaccguuauggcccccgacaaaccuucccucgauaucagccuggagacgguggcuauugaccggccggccgaagugcgcaaggucugcuacaacgcugugcuuacacacguuaaaaucaaugauaagugucccucuaccggagaggcccaucuggcggaagagaacgaaggcgacaaugccugcaaaagaacauauuccgaccggggguggggaaacggcuguggccucuuugggaagggaagcauuguggcuugcgccaaguuuaccugcgcuaaaucuaugucccuguucgaggucgaucaaaccaagauccaguacgugauuagagcccagcugcacguuggcgccaaacaggagaauuggaacacagacaucaagacgcucaaauucgaugcucugagcgggucucaagaaguggaguuuaucggauacggcaaggcgacccuugaaugucagguccagacagccguggacuucgggaacuccuauauugcugagauggaaaccgagagcuggaucgucgaucgccagugggcccaagaccugacacucccuuggcaguccggaucuggcggcguguggcgggagaugcaccaucugguugaauuugagcccccucacgccgcuaccauuagagugcuugcccuggggaaucaggaaggaagccucaaaacggcgcugacaggcgcuaugcgcgucaccaaggauaccaacgacaauaaccuguacaagcuccaugggggacacguguccugccggguuaaacugagcgcccuuacacugaagggcaccucuuauaaaaucuguacagauaagauguucuuugugaaaaaucccacggacaccgggcacggcacagucgugaugcaagugaagguuuccaagggagccccgugccgcauuccugucaucguggcugaugaccucaccgccgcuaucaacaaaggcauucuggugacagucaaucccaucgccagcaccaacgacgaugaggugcuuauugaaguuaauccucccuucggggacucuuacaucauugugggaagaggcgauagccggcugacguaucaguggcauaaggagggguccucuaucggaaaacucuucacccagacaaugaagggcgucgagagacuggcggugaugggggacaccgccugggauuuuagcuccgcuggcggauucuuuacaagcguuggcaaagggauccacaccguguucggaucugccuuucagggccuguucgggggacucaacuggauuacgaaggucaucaugggcgcugugcugauuuggguugggaucaauacacgcaacaugaccauguccaugagcaugauucuugugggcgucaucaugauguuucugucucucggagugggcgccuga

SEQ ID NO: 433 - RNA, 2034 nt, Artificial Sequence
  derived and/or modified CDS sequence (opt5) from YFV__NC_002031.1__SSjev-prME (polyprotein: aa126-778)
augggcaagagaagcgccggguccaucauguggcuggcuucucucgccguggucauugcgugcgcuggagccagaaagaaccgguggcuccugcuuaauguuacaagcgaggaccugggcaaaacguucuccguggggaccggaaacugcacaaccaauauccucgaagccaaguacuggugucccgauucuauggaguauaacugcccuaaucugagcccgcgcgaggaacccgacgauauugacuguuggugcuacggcguggaaaacgucagaguggcuuaugggaaaugugauuccgccggacggucucgcagaagccggcgcgcgaucgaccuuccuacacacgagaaucauggccugaagaccagacaggagaaauggaugacagggcggaugggagaacgccaacuccagaagauugagagaugguuuguucggaaccccuucuuugcugugaccgcccugacgaucgccuaccuggucggcuccaauaugacccagcgcgugguuauugcucuccuggugcuugccgucggcccugcuuauucugcccacugcaucgggaucacagauagagacuucauugaaggagugcauggcgggaccugggugagcgcgacacuggagcaggauaagugugucaccguuauggcccccgacaaaccuucccucgauaucagccuggagacgguggcuauugaccggccggccgaagugcgcaaggucugcuacaacgcugugcuuacacacguuaaaaucaaugauaagugucccucuaccggagaggcccaucuggcggaagagaacgaaggcgacaaugccugcaaaagaacauauuccgaccggggguggggaaacggcuguggccucuuugggaagggaagcauuguggcuugcgccaaguuuaccugcgcuaaaucuaugucccuguucgaggucgaucaaaccaagauccaguacgugauuagagcccagcugcacguuggcgccaaacaggagaauuggaacacagacaucaagacgcucaaauucgaugcucugagcgggucucaagaaguggaguuuaucggauacggcaaggcgacccuugaaugucagguccagacagccguggacuucgggaacuccuauauugcugagauggaaaccgagagcuggaucgucgaucgccagugggcccaagaccugacacucccuuggcaguccggaucuggcggcguguggcgggagaugcaccaucugguugaauuugagcccccucacgccgcuaccauuagagugcuugcccuggggaaucaggaaggaagccucaaaacggcgcugacaggcgcuaugcgcgucaccaaggauaccaacgacaauaaccuguacaagcuccaugggggacacguguccugccggguuaaacugagcgcccuuacacugaagggcaccucuuauaaaaucuguacagauaagauguucuuugugaaaaaucccacggacaccgggcacggcacagucgugaugcaagugaagguuuccaagggagccccgugccgcauuccugucaucguggcugaugaccucaccgccgcuaucaacaaaggcauucuggugacagucaaucccaucgccagcaccaacgacgaugaggugcuuauugaaguuaauccucccuucggggacucuuacaucauugugggaagaggcgauagccggcugacguaucaguggcauaaggagggguccucuaucggaaaacucuucacccagacaaugaagggcgucgagagacuggcggugaugggggacaccgccugggauuuuagcuccgcuggcggauucuuuacaagcguuggcaaagggauccacaccguguucggaucugccuuucagggccuguucgggggacucaacuggauuacgaaggucaucaugggcgcugugcugauuuggguugggaucaauacacgcaacaugaccauguccaugagcaugauucuugugggcgucaucaugauguuucugucucucggagugggcgccuga

SEQ ID NO: 434 - RNA, 2094 nt, Artificial Sequence
  derived and/or modified CDS sequence (opt5) from YFV__NC_002031.1__SSjev(V2)-prME-XX (polyprotein: aa122-788)
augggccggaagcagaacaaaagagggggaaaugagggcagcaucauguggcuggccucccucgcuguggucauugccugcgcgggggcuguuacgcuggugcggaaaaaccgcuggcuucugcucaaugugaccagcgaggaucuggggaagacauuuuccgucggaaccggcaacugcacaaccaauauucuggaagccaaauacuggugucccgacucuauggaguauaacugcccuaaucucagcccgagagaagaacccgaugacaucgauuguuggugcuacgggguggaaaacguucggguggcuuauggaaagugugacuccgccggccgcucuagacggagccgcagagcgauugaucugccuacacaugagaaucacggccuuaaaacccggcaagagaaguggaugacggggcgcaugggagaaagacagcugcagaagaucgagcggugguucguccgcaaccccuuuuucgcugugaccgcccucacaauugccuaccugguuggcuccaauaugacccagagaguggucaucgcccuucuggugcucgcuguggggccugcuuauagcgcccauugcaucggaauuacagaccgggauuuuaucgaaggcguccacgggggaaccuggguuucugcgacgcuggagcaagacaaaugugugacagugauggcccccgauaagccuucccuggacauuagccucgagaccgucgcuaucgauagaccggccgaagugcgcaaaguuugcuacaacgcugugcugacacaugucaagauuaaugacaaaugucccucuaccggcgaggcccaccuugcggaagagaacgaaggcgacaaugccugcaagcggaccuauuccgauagaggguggggaaacggcugugggcuguucggaaagggcagcaucguggcuugcgccaaauuuacaugcgcuaagucuaugucccucuucgagguugaccagacgaaaauucaguacgugauccgcgcccagcugcacgucggggccaagcaagagaauuggaacaccgauaucaaaacacuuaaguuugacgcucugagcggaucccaggaaguggaguucauuggcuacggcaaagcgacccucgaaugucagguccagacagccguggauuuugggaacucuuauaucgcugagauggaaaccgagagcuggauuguugaccggcaaugggcccaggaucugacgcugccuuggcaguccggaagcggcgggguguggagagagaugcaucaccucgucgaguucgagcccccucaugccgcuacaauccgcgugcuggcccuuggaaaucaagaaggcucucugaagaccgcgcucaccggggcuaugcggguuacaaaggacaccaacgauaauaaccuguacaaacuucacggcggacacguguccugcagagucaagcugagcgcccucacacugaaaggcacgucuuauaagauuuguaccgacaaaauguuuuucgugaagaaucccacagauaccgggcauggaacagugguuaugcaggucaaggugagcaaaggcgccccgugccgcaucccugugaucgucgcugacgaccugaccgccgcuauuaacaaggggauccucgugacgguuaaucccauugccuccaccaacgaugacgaggugcugaucgaagucaauccucccuucggagauucuuacauuaucgugggccggggagacagcagacuuacauaucaguggcacaaagagggcuccagcaucggaaagcuguuuacccagacaaugaaaggcguugagcgccucgcggugaugggggauaccgccugggacuucucuuccgcuggaggcuuuuucacgagcgucgggaaggggauucauacaguguuuggcucugccuuccaagggcuguuuggcggacugaacuggaucaccaagguuauuaugggcgcugugcuuaucugggucgggauuaauacacggaacaugaccauguccaugagcaugauccucgugggagugauuaugauguuccugucccugggcgucggggccgaucagggaugugcgaucaauuuuggcaaauga

SEQ ID NO: 435 - RNA, 2082 nt, Artificial Sequence
  derived and/or modified CDS sequence (opt5) from YFV__NC_002031.1__SSjev(V2)-prME-XX (polyprotein: aa126-788)
augggccggaagcagaacaaaagagggggaaaugagggcagcaucauguggcuggccucccucgcuguggucauugccugcgcgggggcucggaaaaaccgcuggcuucugcucaaugugaccagcgaggaucuggggaagacauuuuccgucggaaccggcaacugcacaaccaauauucuggaagccaaauacuggugucccgacucuauggaguauaacugcccuaaucucagcccgagagaagaacccgaugacaucgauuguuggugcuacgggguggaaaacguucggguggcuuauggaaagugugacuccgccggccgcucuagacggagccgcagagcgauugaucugccuacacaugagaaucacggccuuaaaacccggcaagagaaguggaugacggggcgcaugggagaaagacagcugcagaagaucgagcggugguucguccgcaaccccuuuuucgcugugaccgcccucacaauugccuaccugguuggcuccaauaugacccagagaguggucaucgcccuucuggugcucgcuguggggccugcuuauagcgcccauugcaucggaauuacagaccgggauuuuaucgaaggcguccacgggggaaccuggguuucugcgacgcuggagcaagacaaaugugugacagugauggcccccgauaagccuucccuggacauuagccucgagaccgucgcuaucgauagaccggccgaagugcgcaaaguuugcuacaacgcugugcugacacaugucaagauuaaugacaaaugucccucuaccggcgaggcccaccuugcggaagagaacgaaggcgacaaugccugcaagcggaccuauuccgauagaggguggggaaacggcugugggcuguucggaaagggcagcaucguggcuugcgccaaauuuacaugcgcuaagucuaugucccucuucgagguugaccagacgaaaauucaguacgugauccgcgcccagcugcacgucggggccaagcaagagaauuggaacaccgauaucaaaacacuuaaguuugacgcucugagcggaucccaggaaguggaguucauuggcuacggcaaagcgacccucgaaugucagguccagacagccguggauuuugggaacucuuauaucgcugagauggaaaccgagagcuggauuguugaccggcaaugggcccaggaucugacgcugccuuggcaguccggaagcggcgggguguggagagagaugcaucaccucgucgaguucgagcccccucaugccgcuacaauccgcgugcuggcccuuggaaaucaagaaggcucucugaagaccgcgcucaccggggcuaugcggguuacaaaggacaccaacgauaauaaccuguacaaacuucacggcggacacguguccugcagagucaagcugagcgcccucacacugaaaggcacgucuuauaagauuuguaccgacaaaauguuuuucgugaagaaucccacagauaccgggcauggaacagugguuaugcaggucaaggugagcaaaggcgccccgugccgcaucccugugaucgucgcugacgaccugaccgccgcuauuaacaaggggauccucgugacgguuaaucccauugccuccaccaacgaugacgaggugcugaucgaagucaauccucccuucggagauucuuacauuaucgugggccggggagacagcagacuuacauaucaguggcacaaagagggcuccagcaucggaaagcuguuuacccagacaaugaaaggcguugagcgccucgcggugaugggggauaccgccugggacuucucuuccgcuggaggcuuuuucacgagcgucgggaaggggauucauacaguguuuggcucugccuuccaagggcuguuuggcggacugaacuggaucaccaagguuauuaugggcgcugugcuuaucugggucgggauuaauacacggaacaugaccauguccaugagcaugauccucgugggagugauuaugauguuccugucccugggcgucggggccgaucagggaugugcgaucaauuuuggcaaauga

SEQ ID NO: 436 - RNA, 2064 nt, Artificial Sequence
  derived and/or modified CDS sequence (opt5) from YFV__NC_002031.1__SSjev(V2)-prME (polyprotein: aa122-778)
augggccggaagcagaacaaaagagggggaaaugagggcagcaucauguggcuggccucccucgcuguggucauugccugcgcgggggcugugacccuggucagaaagaaccgguggcuccugcuuaauguuacaagcgaggaccugggcaaaacguucuccguggggaccggaaacugcacaaccaauauccucgaagccaaguacuggugucccgauucuauggaguauaacugcccuaaucugagcccgcgcgaggaacccgacgauauugacuguuggugcuacggcguggaaaacgucagaguggcuuaugggaaaugugauuccgccggacggucucgcagaagccggcgcgcgaucgaccuuccuacacacgagaaucauggccugaagaccagacaggagaaauggaugacagggcggaugggagaacgccaacuccagaagauugagagaugguuuguucggaaccccuucuuugcugugaccgcccugacgaucgccuaccuggucggcuccaauaugacccagcgcgugguuauugcucuccuggugcuugccgucggcccugcuuauucugcccacugcaucgggaucacagauagagacuucauugaaggagugcauggcgggaccugggugagcgcgacacuggagcaggauaagugugucaccguuauggcccccgacaaaccuucccucgauaucagccuggagacgguggcuauugaccggccggccgaagugcgcaaggucugcuacaacgcugugcuuacacacguuaaaaucaaugauaagugucccucuaccggagaggcccaucuggcggaagagaacgaaggcgacaaugccugcaaaagaacauauuccgaccggggguggggaaacggcuguggccucuuugggaagggaagcauuguggcuugcgccaaguuuaccugcgcuaaaucuaugucccuguucgaggucgaucaaaccaagauccaguacgugauuagagcccagcugcacguuggcgccaaacaggagaauuggaacacagacaucaagacgcucaaauucgaugcucugagcgggucucaagaaguggaguuuaucggauacggcaaggcgacccuugaaugucagguccagacagccguggacuucgggaacuccuauauugcugagauggaaaccgagagcuggaucgucgaucgccagugggcccaagaccugacacucccuuggcaguccggaucuggcggcguguggcgggagaugcaccaucugguugaauuugagcccccucacgccgcuaccauuagagugcuugcccuggggaaucaggaaggaagccucaaaacggcgcugacaggcgcuaugcgcgucaccaaggauaccaacgacaauaaccuguacaagcuccaugggggacacguguccugccggguuaaacugagcgcccuuacacugaagggcaccucuuauaaaaucuguacagauaagauguucuuugugaaaaaucccacggacaccgggcacggcacagucgugaugcaagugaagguuuccaagggagccccgugccgcauuccugucaucguggcugaugaccucaccgccgcuaucaacaaaggcauucuggugacagucaaucccaucgccagcaccaacgacgaugaggugcuuauugaaguuaauccucccuucggggacucuuacaucauugugggaagaggcgauagccggcugacguaucaguggcauaaggagggguccucuaucggaaaacucuucacccagacaaugaagggcgucgagagacuggcggugaugggggacaccgccugggauuuuagcuccgcuggcggauucuuuacaagcguuggcaaagggauccacaccguguucggaucugccuuucagggccuguucgggggacucaacuggauuacgaaggucaucaugggcgcugugcugauuuggguugggaucaauacacgcaacaugaccauguccaugagcaugauucuugugggcgucaucaugauguuucugucucucggagugggcgccuga

SEQ ID NO: 437 - RNA, 2052 nt, Artificial Sequence
  derived and/or modified CDS sequence (opt5) from YFV__NC_002031.1__SSjev(V2)-prME (polyprotein: aa126-778)
augggccggaagcagaacaaaagagggggaaaugagggcagcaucauguggcuggccucccucgcuguggucauugccugcgcgggggcuagaaagaaccgguggcuccugcuuaauguuacaagcgaggaccugggcaaaacguucuccguggggaccggaaacugcacaaccaauauccucgaagccaaguacuggugucccgauucuauggaguauaacugcccuaaucugagcccgcgcgaggaacccgacgauauugacuguuggugcuacggcguggaaaacgucagaguggcuuaugggaaaugugauuccgccggacggucucgcagaagccggcgcgcgaucgaccuuccuacacacgagaaucauggccugaagaccagacaggagaaauggaugacagggcggaugggagaacgccaacuccagaagauugagagaugguuuguucggaaccccuucuuugcugugaccgcccugacgaucgccuaccuggucggcuccaauaugacccagcgcgugguuauugcucuccuggugcuugccgucggcccugcuuauucugcccacugcaucgggaucacagauagagacuucauugaaggagugcauggcgggaccugggugagcgcgacacuggagcaggauaagugugucaccguuauggcccccgacaaaccuucccucgauaucagccuggagacgguggcuauugaccggccggccgaagugcgcaaggucugcuacaacgcugugcuuacacacguuaaaaucaaugauaagugucccucuaccggagaggcccaucuggcggaagagaacgaaggcgacaaugccugcaaaagaacauauuccgaccggggguggggaaacggcuguggccucuuugggaagggaagcauuguggcuugcgccaaguuuaccugcgcuaaaucuaugucccuguucgaggucgaucaaaccaagauccaguacgugauuagagcccagcugcacguuggcgccaaacaggagaauuggaacacagacaucaagacgcucaaauucgaugcucugagcgggucucaagaaguggaguuuaucggauacggcaaggcgacccuugaaugucagguccagacagccguggacuucgggaacuccuauauugcugagauggaaaccgagagcuggaucgucgaucgccagugggcccaagaccugacacucccuuggcaguccggaucuggcggcguguggcgggagaugcaccaucugguugaauuugagcccccucacgccgcuaccauuagagugcuugcccuggggaaucaggaaggaagccucaaaacggcgcugacaggcgcuaugcgcgucaccaaggauaccaacgacaauaaccuguacaagcuccaugggggacacguguccugccggguuaaacugagcgcccuuacacugaagggcaccucuuauaaaaucuguacagauaagauguucuuugugaaaaaucccacggacaccgggcacggcacagucgugaugcaagugaagguuuccaagggagccccgugccgcauuccugucaucguggcugaugaccucaccgccgcuaucaacaaaggcauucuggugacagucaaucccaucgccagcaccaacgacgaugaggugcuuauugaaguuaauccucccuucggggacucuuacaucauugugggaagaggcgauagccggcugacguaucaguggcauaaggagggguccucuaucggaaaacucuucacccagacaaugaagggcgucgagagacuggcggugaugggggacaccgccugggauuuuagcuccgcuggcggauucuuuacaagcguuggcaaagggauccacaccguguucggaucugccuuucagggccuguucgggggacucaacuggauuacgaaggucaucaugggcgcugugcugauuuggguugggaucaauacacgcaacaugaccauguccaugagcaugauucuugugggcgucaucaugauguuucugucucucggagugggcgccuga

SEQ ID NO: 438 - RNA, 2067 nt, Artificial Sequence
  derived and/or modified CDS sequence (opt5) from YFV__NC_002031.1__SSjev(V3)-prME-XX (polyprotein: aa122-788)
augaacgagggcagcaucauguggcuggccucccucgcuguggucauugccugcgcgggggcuguuacgcuggugcggaaaaaccgcuggcuucugcucaaugugaccagcgaggaucuggggaagacauuuuccgucggaaccggcaacugcacaaccaauauucuggaagccaaauacuggugucccgacucuauggaguauaacugcccuaaucucagcccgagagaagaacccgaugacaucgauuguuggugcuacgggguggaaaacguucggguggcuuauggaaagugugacuccgccggccgcucuagacggagccgcagagcgauugaucugccuacacaugagaaucacggccuuaaaacccggcaagagaaguggaugacggggcgcaugggagaaagacagcugcagaagaucgagcggugguucguccgcaaccccuuuuucgcugugaccgcccucacaauugccuaccugguuggcuccaauaugacccagagaguggucaucgcccuucuggugcucgcuguggggccugcuuauagcgcccauugcaucggaauuacagaccgggauuuuaucgaaggcguccacgggggaaccuggguuucugcgacgcuggagcaagacaaaugugugacagugauggcccccgauaagccuucccuggacauuagccucgagaccgucgcuaucgauagaccggccgaagugcgcaaaguuugcuacaacgcugugcugacacaugucaagauuaaugacaaaugucccucuaccggcgaggcccaccuugcggaagagaacgaaggcgacaaugccugcaagcggaccuauuccgauagaggguggggaaacggcugugggcuguucggaaagggcagcaucguggcuugcgccaaauuuacaugcgcuaagucuaugucccucuucgagguugaccagacgaaaauucaguacgugauccgcgcccagcugcacgucggggccaagcaagagaauuggaacaccgauaucaaaacacuuaaguuugacgcucugagcggaucccaggaaguggaguucauuggcuacggcaaagcgacccucgaaugucagguccagacagccguggauuuugggaacucuuauaucgcugagauggaaaccgagagcuggauuguugaccggcaaugggcccaggaucugacgcugccuuggcaguccggaagcggcgggguguggagagagaugcaucaccucgucgaguucgagcccccucaugccgcuacaauccgcgugcuggcccuuggaaaucaagaaggcucucugaagaccgcgcucaccggggcuaugcggguuacaaaggacaccaacgauaauaaccuguacaaacuucacggcggacacguguccugcagagucaagcugagcgcccucacacugaaaggcacgucuuauaagauuuguaccgacaaaauguuuuucgugaagaaucccacagauaccgggcauggaacagugguuaugcaggucaaggugagcaaaggcgccccgugccgcaucccugugaucgucgcugacgaccugaccgccgcuauuaacaaggggauccucgugacgguuaaucccauugccuccaccaacgaugacgaggugcugaucgaagucaauccucccuucggagauucuuacauuaucgugggccggggagacagcagacuuacauaucaguggcacaaagagggcuccagcaucggaaagcuguuuacccagacaaugaaaggcguugagcgccucgcggugaugggggauaccgccugggacuucucuuccgcuggaggcuuuuucacgagcgucgggaaggggauucauacaguguuuggcucugccuuccaagggcuguuuggcggacugaacuggaucaccaagguuauuaugggcgcugugcuuaucugggucgggauuaauacacggaacaugaccauguccaugagcaugauccucgugggagugauuaugauguuccugucccugggcgucggggccgaucagggaugugcgaucaauuuuggcaaauga

SEQ ID NO: 439 - RNA, 2055 nt, Artificial Sequence
  derived and/or modified CDS sequence (opt5) from YFV__NC_002031.1__SSjev(V3)-prME-XX (polyprotein: aa126-788)
augaacgagggcagcaucauguggcuggccucccucgcuguggucauugccugcgcgggggcucggaaaaaccgcuggcuucugcucaaugugaccagcgaggaucuggggaagacauuuuccgucggaaccggcaacugcacaaccaauauucuggaagccaaauacuggugucccgacucuauggaguauaacugcccuaaucucagcccgagagaagaacccgaugacaucgauuguuggugcuacgggguggaaaacguucggguggcuuauggaaagugugacuccgccggccgcucuagacggagccgcagagcgauugaucugccuacacaugagaaucacggccuuaaaacccggcaagagaaguggaugacggggcgcaugggagaaagacagcugcagaagaucgagcggugguucguccgcaaccccuuuuucgcugugaccgcccucacaauugccuaccugguuggcuccaauaugacccagagaguggucaucgcccuucuggugcucgcuguggggccugcuuauagcgcccauugcaucggaauuacagaccgggauuuuaucgaaggcguccacgggggaaccuggguuucugcgacgcuggagcaagacaaaugugugacagugauggcccccgauaagccuucccuggacauuagccucgagaccgucgcuaucgauagaccggccgaagugcgcaaaguuugcuacaacgcugugcugacacaugucaagauuaaugacaaaugucccucuaccggcgaggcccaccuugcggaagagaacgaaggcgacaaugccugcaagcggaccuauuccgauagaggguggggaaacggcugugggcuguucggaaagggcagcaucguggcuugcgccaaauuuacaugcgcuaagucuaugucccucuucgagguugaccagacgaaaauucaguacgugauccgcgcccagcugcacgucggggccaagcaagagaauuggaacaccgauaucaaaacacuuaaguuugacgcucugagcggaucccaggaaguggaguucauuggcuacggcaaagcgacccucgaaugucagguccagacagccguggauuuugggaacucuuauaucgcugagauggaaaccgagagcuggauuguugaccggcaaugggcccaggaucugacgcugccuuggcaguccggaagcggcgggguguggagagagaugcaucaccucgucgaguucgagcccccucaugccgcuacaauccgcgugcuggcccuuggaaaucaagaaggcucucugaagaccgcgcucaccggggcuaugcggguuacaaaggacaccaacgauaauaaccuguacaaacuucacggcggacacguguccugcagagucaagcugagcgcccucacacugaaaggcacgucuuauaagauuuguaccgacaaaauguuuuucgugaagaaucccacagauaccgggcauggaacagugguuaugcaggucaaggugagcaaaggcgccccgugccgcaucccugugaucgucgcugacgaccugaccgccgcuauuaacaaggggauccucgugacgguuaaucccauugccuccaccaacgaugacgaggugcugaucgaagucaauccucccuucggagauucuuacauuaucgugggccggggagacagcagacuuacauaucaguggcacaaagagggcuccagcaucggaaagcuguuuacccagacaaugaaaggcguugagcgccucgcggugaugggggauaccgccugggacuucucuuccgcuggaggcuuuuucacgagcgucgggaaggggauucauacaguguuuggcucugccuuccaagggcuguuuggcggacugaacuggaucaccaagguuauuaugggcgcugugcuuaucugggucgggauuaauacacggaacaugaccauguccaugagcaugauccucgugggagugauuaugauguuccugucccugggcgucggggccgaucagggaugugcgaucaauuuuggcaaauga

SEQ ID NO: 440 - RNA, 2037 nt, Artificial Sequence
  derived and/or modified CDS sequence (opt5) from YFV__NC_002031.1__SSjev(V3)-prME (polyprotein: aa122-778)
augaacgagggcagcaucauguggcuggccucccucgcuguggucauugccugcgcgggggcugugacccuggucagaaagaaccgguggcuccugcuuaauguuacaagcgaggaccugggcaaaacguucuccguggggaccggaaacugcacaaccaauauccucgaagccaaguacuggugucccgauucuauggaguauaacugcccuaaucugagcccgcgcgaggaacccgacgauauugacuguuggugcuacggcguggaaaacgucagaguggcuuaugggaaaugugauuccgccggacggucucgcagaagccggcgcgcgaucgaccuuccuacacacgagaaucauggccugaagaccagacaggagaaauggaugacagggcggaugggagaacgccaacuccagaagauugagagaugguuuguucggaaccccuucuuugcugugaccgcccugacgaucgccuaccuggucggcuccaauaugacccagcgcgugguuauugcucuccuggugcuugccgucggcccugcuuauucugcccacugcaucgggaucacagauagagacuucauugaaggagugcauggcgggaccugggugagcgcgacacuggagcaggauaagugugucaccguuauggcccccgacaaaccuucccucgauaucagccuggagacgguggcuauugaccggccggccgaagugcgcaaggucugcuacaacgcugugcuuacacacguuaaaaucaaugauaagugucccucuaccggagaggcccaucuggcggaagagaacgaaggcgacaaugccugcaaaagaacauauuccgaccggggguggggaaacggcuguggccucuuugggaagggaagcauuguggcuugcgccaaguuuaccugcgcuaaaucuaugucccuguucgaggucgaucaaaccaagauccaguacgugauuagagcccagcugcacguuggcgccaaacaggagaauuggaacacagacaucaagacgcucaaauucgaugcucugagcgggucucaagaaguggaguuuaucggauacggcaaggcgacccuugaaugucagguccagacagccguggacuucgggaacuccuauauugcugagauggaaaccgagagcuggaucgucgaucgccagugggcccaagaccugacacucccuuggcaguccggaucuggcggcguguggcgggagaugcaccaucugguugaauuugagcccccucacgccgcuaccauuagagugcuugcccuggggaaucaggaaggaagccucaaaacggcgcugacaggcgcuaugcgcgucaccaaggauaccaacgacaauaaccuguacaagcuccaugggggacacguguccugccggguuaaacugagcgcccuuacacugaagggcaccucuuauaaaaucuguacagauaagauguucuuugugaaaaaucccacggacaccgggcacggcacagucgugaugcaagugaagguuuccaagggagccccgugccgcauuccugucaucguggcugaugaccucaccgccgcuaucaacaaaggcauucuggugacagucaaucccaucgccagcaccaacgacgaugaggugcuuauugaaguuaauccucccuucggggacucuuacaucauugugggaagaggcgauagccggcugacguaucaguggcauaaggagggguccucuaucggaaaacucuucacccagacaaugaagggcgucgagagacuggcggugaugggggacaccgccugggauuuuagcuccgcuggcggauucuuuacaagcguuggcaaagggauccacaccguguucggaucugccuuucagggccuguucgggggacucaacuggauuacgaaggucaucaugggcgcugugcugauuuggguugggaucaauacacgcaacaugaccauguccaugagcaugauucuugugggcgucaucaugauguuucugucucucggagugggcgccuga

SEQ ID NO: 441 - RNA, 2025 nt, Artificial Sequence
  derived and/or modified CDS sequence (opt5) from YFV__NC_002031.1__SSjev(V3)-prME (polyprotein: aa126-778)
augaacgagggcagcaucauguggcuggccucccucgcuguggucauugccugcgcgggggcuagaaagaaccgguggcuccugcuuaauguuacaagcgaggaccugggcaaaacguucuccguggggaccggaaacugcacaaccaauauccucgaagccaaguacuggugucccgauucuauggaguauaacugcccuaaucugagcccgcgcgaggaacccgacgauauugacuguuggugcuacggcguggaaaacgucagaguggcuuaugggaaaugugauuccgccggacggucucgcagaagccggcgcgcgaucgaccuuccuacacacgagaaucauggccugaagaccagacaggagaaauggaugacagggcggaugggagaacgccaacuccagaagauugagagaugguuuguucggaaccccuucuuugcugugaccgcccugacgaucgccuaccuggucggcuccaauaugacccagcgcgugguuauugcucuccuggugcuugccgucggcccugcuuauucugcccacugcaucgggaucacagauagagacuucauugaaggagugcauggcgggaccugggugagcgcgacacuggagcaggauaagugugucaccguuauggcccccgacaaaccuucccucgauaucagccuggagacgguggcuauugaccggccggccgaagugcgcaaggucugcuacaacgcugugcuuacacacguuaaaaucaaugauaagugucccucuaccggagaggcccaucuggcggaagagaacgaaggcgacaaugccugcaaaagaacauauuccgaccggggguggggaaacggcuguggccucuuugggaagggaagcauuguggcuugcgccaaguuuaccugcgcuaaaucuaugucccuguucgaggucgaucaaaccaagauccaguacgugauuagagcccagcugcacguuggcgccaaacaggagaauuggaacacagacaucaagacgcucaaauucgaugcucugagcgggucucaagaaguggaguuuaucggauacggcaaggcgacccuugaaugucagguccagacagccguggacuucgggaacuccuauauugcugagauggaaaccgagagcuggaucgucgaucgccagugggcccaagaccugacacucccuuggcaguccggaucuggcggcguguggcgggagaugcaccaucugguugaauuugagcccccucacgccgcuaccauuagagugcuugcccuggggaaucaggaaggaagccucaaaacggcgcugacaggcgcuaugcgcgucaccaaggauaccaacgacaauaaccuguacaagcuccaugggggacacguguccugccggguuaaacugagcgcccuuacacugaagggcaccucuuauaaaaucuguacagauaagauguucuuugugaaaaaucccacggacaccgggcacggcacagucgugaugcaagugaagguuuccaagggagccccgugccgcauuccugucaucguggcugaugaccucaccgccgcuaucaacaaaggcauucuggugacagucaaucccaucgccagcaccaacgacgaugaggugcuuauugaaguuaauccucccuucggggacucuuacaucauugugggaagaggcgauagccggcugacguaucaguggcauaaggagggguccucuaucggaaaacucuucacccagacaaugaagggcgucgagagacuggcggugaugggggacaccgccugggauuuuagcuccgcuggcggauucuuuacaagcguuggcaaagggauccacaccguguucggaucugccuuucagggccuguucgggggacucaacuggauuacgaaggucaucaugggcgcugugcugauuuggguugggaucaauacacgcaacaugaccauguccaugagcaugauucuugugggcgucaucaugauguuucugucucucggagugggcgccuga

SEQ ID NO: 442 - RNA, 2076 nt, Artificial Sequence
  derived and/or modified CDS sequence (opt5) from YFV__NC_002031.1__SSjev(V4)-prME-XX (polyprotein: aa122-788)
augcugggcagcaacuccgggcagagaguggucuucaccauccuccugcuucugguugcccccgcuuacucuguuacgcuggugcggaaaaaccgcuggcuucugcucaaugugaccagcgaggaucuggggaagacauuuuccgucggaaccggcaacugcacaaccaauauucuggaagccaaauacuggugucccgacucuauggaguauaacugcccuaaucucagcccgagagaagaacccgaugacaucgauuguuggugcuacgggguggaaaacguucggguggcuuauggaaagugugacuccgccggccgcucuagacggagccgcagagcgauugaucugccuacacaugagaaucacggccuuaaaacccggcaagagaaguggaugacggggcgcaugggagaaagacagcugcagaagaucgagcggugguucguccgcaaccccuuuuucgcugugaccgcccucacaauugccuaccugguuggcuccaauaugacccagagaguggucaucgcccuucuggugcucgcuguggggccugcuuauagcgcccauugcaucggaauuacagaccgggauuuuaucgaaggcguccacgggggaaccuggguuucugcgacgcuggagcaagacaaaugugugacagugauggcccccgauaagccuucccuggacauuagccucgagaccgucgcuaucgauagaccggccgaagugcgcaaaguuugcuacaacgcugugcugacacaugucaagauuaaugacaaaugucccucuaccggcgaggcccaccuugcggaagagaacgaaggcgacaaugccugcaagcggaccuauuccgauagaggguggggaaacggcugugggcuguucggaaagggcagcaucguggcuugcgccaaauuuacaugcgcuaagucuaugucccucuucgagguugaccagacgaaaauucaguacgugauccgcgcccagcugcacgucggggccaagcaagagaauuggaacaccgauaucaaaacacuuaaguuugacgcucugagcggaucccaggaaguggaguucauuggcuacggcaaagcgacccucgaaugucagguccagacagccguggauuuugggaacucuuauaucgcugagauggaaaccgagagcuggauuguugaccggcaaugggcccaggaucugacgcugccuuggcaguccggaagcggcgggguguggagagagaugcaucaccucgucgaguucgagcccccucaugccgcuacaauccgcgugcuggcccuuggaaaucaagaaggcucucugaagaccgcgcucaccggggcuaugcggguuacaaaggacaccaacgauaauaaccuguacaaacuucacggcggacacguguccugcagagucaagcugagcgcccucacacugaaaggcacgucuuauaagauuuguaccgacaaaauguuuuucgugaagaaucccacagauaccgggcauggaacagugguuaugcaggucaaggugagcaaaggcgccccgugccgcaucccugugaucgucgcugacgaccugaccgccgcuauuaacaaggggauccucgugacgguuaaucccauugccuccaccaacgaugacgaggugcugaucgaagucaauccucccuucggagauucuuacauuaucgugggccggggagacagcagacuuacauaucaguggcacaaagagggcuccagcaucggaaagcuguuuacccagacaaugaaaggcguugagcgccucgcggugaugggggauaccgccugggacuucucuuccgcuggaggcuuuuucacgagcgucgggaaggggauucauacaguguuuggcucugccuuccaagggcuguuuggcggacugaacuggaucaccaagguuauuaugggcgcugugcuuaucugggucgggauuaauacacggaacaugaccauguccaugagcaugauccucgugggagugauuaugauguuccugucccugggcgucggggccgaucagggaugugcgaucaauuuuggcaaauga

SEQ ID NO: 443 - RNA, 2064 nt, Artificial Sequence
  derived and/or modified CDS sequence (opt5) from YFV__NC_002031.1__SSjev(V4)-prME-XX (polyprotein: aa126-788)
augcugggcagcaacuccgggcagagaguggucuucaccauccuccugcuucugguugcccccgcuuacucucggaaaaaccgcuggcuucugcucaaugugaccagcgaggaucuggggaagacauuuuccgucggaaccggcaacugcacaaccaauauucuggaagccaaauacuggugucccgacucuauggaguauaacugcccuaaucucagcccgagagaagaacccgaugacaucgauuguuggugcuacgggguggaaaacguucggguggcuuauggaaagugugacuccgccggccgcucuagacggagccgcagagcgauugaucugccuacacaugagaaucacggccuuaaaacccggcaagagaaguggaugacggggcgcaugggagaaagacagcugcagaagaucgagcggugguucguccgcaaccccuuuuucgcugugaccgcccucacaauugccuaccugguuggcuccaauaugacccagagaguggucaucgcccuucuggugcucgcuguggggccugcuuauagcgcccauugcaucggaauuacagaccgggauuuuaucgaaggcguccacgggggaaccuggguuucugcgacgcuggagcaagacaaaugugugacagugauggcccccgauaagccuucccuggacauuagccucgagaccgucgcuaucgauagaccggccgaagugcgcaaaguuugcuacaacgcugugcugacacaugucaagauuaaugacaaaugucccucuaccggcgaggcccaccuugcggaagagaacgaaggcgacaaugccugcaagcggaccuauuccgauagaggguggggaaacggcugugggcuguucggaaagggcagcaucguggcuugcgccaaauuuacaugcgcuaagucuaugucccucuucgagguugaccagacgaaaauucaguacgugauccgcgcccagcugcacgucggggccaagcaagagaauuggaacaccgauaucaaaacacuuaaguuugacgcucugagcggaucccaggaaguggaguucauuggcuacggcaaagcgacccucgaaugucagguccagacagccguggauuuugggaacucuuauaucgcugagauggaaaccgagagcuggauuguugaccggcaaugggcccaggaucugacgcugccuuggcaguccggaagcggcgggguguggagagagaugcaucaccucgucgaguucgagcccccucaugccgcuacaauccgcgugcuggcccuuggaaaucaagaaggcucucugaagaccgcgcucaccggggcuaugcggguuacaaaggacaccaacgauaauaaccuguacaaacuucacggcggacacguguccugcagagucaagcugagcgcccucacacugaaaggcacgucuuauaagauuuguaccgacaaaauguuuuucgugaagaaucccacagauaccgggcauggaacagugguuaugcaggucaaggugagcaaaggcgccccgugccgcaucccugugaucgucgcugacgaccugaccgccgcuauuaacaaggggauccucgugacgguuaaucccauugccuccaccaacgaugacgaggugcugaucgaagucaauccucccuucggagauucuuacauuaucgugggccggggagacagcagacuuacauaucaguggcacaaagagggcuccagcaucggaaagcuguuuacccagacaaugaaaggcguugagcgccucgcggugaugggggauaccgccugggacuucucuuccgcuggaggcuuuuucacgagcgucgggaaggggauucauacaguguuuggcucugccuuccaagggcuguuuggcggacugaacuggaucaccaagguuauuaugggcgcugugcuuaucugggucgggauuaauacacggaacaugaccauguccaugagcaugauccucgugggagugauuaugauguuccugucccugggcgucggggccgaucagggaugugcgaucaauuuuggcaaauga

SEQ ID NO: 444 - RNA, 2046 nt, Artificial Sequence
  derived and/or modified CDS sequence (opt5) from YFV__NC_002031.1__SSjev(V4)-prME (polyprotein: aa122-778)
augcugggcagcaacuccgggcagagaguggucuucaccauccuccugcuucugguugcccccgcuuacucugugacccuggucagaaagaaccgguggcuccugcuuaauguuacaagcgaggaccugggcaaaacguucuccguggggaccggaaacugcacaaccaauauccucgaagccaaguacuggugucccgauucuauggaguauaacugcccuaaucugagcccgcgcgaggaacccgacgauauugacuguuggugcuacggcguggaaaacgucagaguggcuuaugggaaaugugauuccgccggacggucucgcagaagccggcgcgcgaucgaccuuccuacacacgagaaucauggccugaagaccagacaggagaaauggaugacagggcggaugggagaacgccaacuccagaagauugagagaugguuuguucggaaccccuucuuugcugugaccgcccugacgaucgccuaccuggucggcuccaauaugacccagcgcgugguuauugcucuccuggugcuugccgucggcccugcuuauucugcccacugcaucgggaucacagauagagacuucauugaaggagugcauggcgggaccugggugagcgcgacacuggagcaggauaagugugucaccguuauggcccccgacaaaccuucccucgauaucagccuggagacgguggcuauugaccggccggccgaagugcgcaaggucugcuacaacgcugugcuuacacacguuaaaaucaaugauaagugucccucuaccggagaggcccaucuggcggaagagaacgaaggcgacaaugccugcaaaagaacauauuccgaccggggguggggaaacggcuguggccucuuugggaagggaagcauuguggcuugcgccaaguuuaccugcgcuaaaucuaugucccuguucgaggucgaucaaaccaagauccaguacgugauuagagcccagcugcacguuggcgccaaacaggagaauuggaacacagacaucaagacgcucaaauucgaugcucugagcgggucucaagaaguggaguuuaucggauacggcaaggcgacccuugaaugucagguccagacagccguggacuucgggaacuccuauauugcugagauggaaaccgagagcuggaucgucgaucgccagugggcccaagaccugacacucccuuggcaguccggaucuggcggcguguggcgggagaugcaccaucugguugaauuugagcccccucacgccgcuaccauuagagugcuugcccuggggaaucaggaaggaagccucaaaacggcgcugacaggcgcuaugcgcgucaccaaggauaccaacgacaauaaccuguacaagcuccaugggggacacguguccugccggguuaaacugagcgcccuuacacugaagggcaccucuuauaaaaucuguacagauaagauguucuuugugaaaaaucccacggacaccgggcacggcacagucgugaugcaagugaagguuuccaagggagccccgugccgcauuccugucaucguggcugaugaccucaccgccgcuaucaacaaaggcauucuggugacagucaaucccaucgccagcaccaacgacgaugaggugcuuauugaaguuaauccucccuucggggacucuuacaucauugugggaagaggcgauagccggcugacguaucaguggcauaaggagggguccucuaucggaaaacucuucacccagacaaugaagggcgucgagagacuggcggugaugggggacaccgccugggauuuuagcuccgcuggcggauucuuuacaagcguuggcaaagggauccacaccguguucggaucugccuuucagggccuguucgggggacucaacuggauuacgaaggucaucaugggcgcugugcugauuuggguugggaucaauacacgcaacaugaccauguccaugagcaugauucuugugggcgucaucaugauguuucugucucucggagugggcgccuga

SEQ ID NO: 445 - RNA, 2034 nt, Artificial Sequence
  derived and/or modified CDS sequence (opt5) from YFV__NC_002031.1__SSjev(V4)-prME (polyprotein: aa126-778)
augcugggcagcaacuccgggcagagaguggucuucaccauccuccugcuucugguugcccccgcuuacucuagaaagaaccgguggcuccugcuuaauguuacaagcgaggaccugggcaaaacguucuccguggggaccggaaacugcacaaccaauauccucgaagccaaguacuggugucccgauucuauggaguauaacugcccuaaucugagcccgcgcgaggaacccgacgauauugacuguuggugcuacggcguggaaaacgucagaguggcuuaugggaaaugugauuccgccggacggucucgcagaagccggcgcgcgaucgaccuuccuacacacgagaaucauggccugaagaccagacaggagaaauggaugacagggcggaugggagaacgccaacuccagaagauugagagaugguuuguucggaaccccuucuuugcugugaccgcccugacgaucgccuaccuggucggcuccaauaugacccagcgcgugguuauugcucuccuggugcuugccgucggcccugcuuauucugcccacugcaucgggaucacagauagagacuucauugaaggagugcauggcgggaccugggugagcgcgacacuggagcaggauaagugugucaccguuauggcccccgacaaaccuucccucgauaucagccuggagacgguggcuauugaccggccggccgaagugcgcaaggucugcuacaacgcugugcuuacacacguuaaaaucaaugauaagugucccucuaccggagaggcccaucuggcggaagagaacgaaggcgacaaugccugcaaaagaacauauuccgaccggggguggggaaacggcuguggccucuuugggaagggaagcauuguggcuugcgccaaguuuaccugcgcuaaaucuaugucccuguucgaggucgaucaaaccaagauccaguacgugauuagagcccagcugcacguuggcgccaaacaggagaauuggaacacagacaucaagacgcucaaauucgaugcucugagcgggucucaagaaguggaguuuaucggauacggcaaggcgacccuugaaugucagguccagacagccguggacuucgggaacuccuauauugcugagauggaaaccgagagcuggaucgucgaucgccagugggcccaagaccugacacucccuuggcaguccggaucuggcggcguguggcgggagaugcaccaucugguugaauuugagcccccucacgccgcuaccauuagagugcuugcccuggggaaucaggaaggaagccucaaaacggcgcugacaggcgcuaugcgcgucaccaaggauaccaacgacaauaaccuguacaagcuccaugggggacacguguccugccggguuaaacugagcgcccuuacacugaagggcaccucuuauaaaaucuguacagauaagauguucuuugugaaaaaucccacggacaccgggcacggcacagucgugaugcaagugaagguuuccaagggagccccgugccgcauuccugucaucguggcugaugaccucaccgccgcuaucaacaaaggcauucuggugacagucaaucccaucgccagcaccaacgacgaugaggugcuuauugaaguuaauccucccuucggggacucuuacaucauugugggaagaggcgauagccggcugacguaucaguggcauaaggagggguccucuaucggaaaacucuucacccagacaaugaagggcgucgagagacuggcggugaugggggacaccgccugggauuuuagcuccgcuggcggauucuuuacaagcguuggcaaagggauccacaccguguucggaucugccuuucagggccuguucgggggacucaacuggauuacgaaggucaucaugggcgcugugcugauuuggguugggaucaauacacgcaacaugaccauguccaugagcaugauucuugugggcgucaucaugauguuucugucucucggagugggcgccuga

SEQ ID NO: 446 - RNA, 2049 nt, Artificial Sequence
  derived and/or modified CDS sequence (opt5) from YFV__NC_002031.1__SSjev(V5)-prME-XX (polyprotein: aa122-788)
auguggcuggugagccucgccaucgucaccgcuugcgccggcgcgguuacgcuggugcggaaaaaccgcuggcuucugcucaaugugaccagcgaggaucuggggaagacauuuuccgucggaaccggcaacugcacaaccaauauucuggaagccaaauacuggugucccgacucuauggaguauaacugcccuaaucucagcccgagagaagaacccgaugacaucgauuguuggugcuacgggguggaaaacguucggguggcuuauggaaagugugacuccgccggccgcucuagacggagccgcagagcgauugaucugccuacacaugagaaucacggccuuaaaacccggcaagagaaguggaugacggggcgcaugggagaaagacagcugcagaagaucgagcggugguucguccgcaaccccuuuuucgcugugaccgcccucacaauugccuaccugguuggcuccaauaugacccagagaguggucaucgcccuucuggugcucgcuguggggccugcuuauagcgcccauugcaucggaauuacagaccgggauuuuaucgaaggcguccacgggggaaccuggguuucugcgacgcuggagcaagacaaaugugugacagugauggcccccgauaagccuucccuggacauuagccucgagaccgucgcuaucgauagaccggccgaagugcgcaaaguuugcuacaacgcugugcugacacaugucaagauuaaugacaaaugucccucuaccggcgaggcccaccuugcggaagagaacgaaggcgacaaugccugcaagcggaccuauuccgauagaggguggggaaacggcugugggcuguucggaaagggcagcaucguggcuugcgccaaauuuacaugcgcuaagucuaugucccucuucgagguugaccagacgaaaauucaguacgugauccgcgcccagcugcacgucggggccaagcaagagaauuggaacaccgauaucaaaacacuuaaguuugacgcucugagcggaucccaggaaguggaguucauuggcuacggcaaagcgacccucgaaugucagguccagacagccguggauuuugggaacucuuauaucgcugagauggaaaccgagagcuggauuguugaccggcaaugggcccaggaucugacgcugccuuggcaguccggaagcggcgggguguggagagagaugcaucaccucgucgaguucgagcccccucaugccgcuacaauccgcgugcuggcccuuggaaaucaagaaggcucucugaagaccgcgcucaccggggcuaugcggguuacaaaggacaccaacgauaauaaccuguacaaacuucacggcggacacguguccugcagagucaagcugagcgcccucacacugaaaggcacgucuuauaagauuuguaccgacaaaauguuuuucgugaagaaucccacagauaccgggcauggaacagugguuaugcaggucaaggugagcaaaggcgccccgugccgcaucccugugaucgucgcugacgaccugaccgccgcuauuaacaaggggauccucgugacgguuaaucccauugccuccaccaacgaugacgaggugcugaucgaagucaauccucccuucggagauucuuacauuaucgugggccggggagacagcagacuuacauaucaguggcacaaagagggcuccagcaucggaaagcuguuuacccagacaaugaaaggcguugagcgccucgcggugaugggggauaccgccugggacuucucuuccgcuggaggcuuuuucacgagcgucgggaaggggauucauacaguguuuggcucugccuuccaagggcuguuuggcggacugaacuggaucaccaagguuauuaugggcgcugugcuuaucugggucgggauuaauacacggaacaugaccauguccaugagcaugauccucgugggagugauuaugauguuccugucccugggcgucggggccgaucagggaugugcgaucaauuuuggcaaauga

SEQ ID NO: 447 - RNA, 2037 nt, Artificial Sequence
  derived and/or modified CDS sequence (opt5) from YFV__NC_002031.1__SSjev(V5)-prME-XX (polyprotein: aa126-788)
auguggcuggugagccucgccaucgucaccgcuugcgccggcgcgcggaaaaaccgcuggcuucugcucaaugugaccagcgaggaucuggggaagacauuuuccgucggaaccggcaacugcacaaccaauauucuggaagccaaauacuggugucccgacucuauggaguauaacugcccuaaucucagcccgagagaagaacccgaugacaucgauuguuggugcuacgggguggaaaacguucggguggcuuauggaaagugugacuccgccggccgcucuagacggagccgcagagcgauugaucugccuacacaugagaaucacggccuuaaaacccggcaagagaaguggaugacggggcgcaugggagaaagacagcugcagaagaucgagcggugguucguccgcaaccccuuuuucgcugugaccgcccucacaauugccuaccugguuggcuccaauaugacccagagaguggucaucgcccuucuggugcucgcuguggggccugcuuauagcgcccauugcaucggaauuacagaccgggauuuuaucgaaggcguccacgggggaaccuggguuucugcgacgcuggagcaagacaaaugugugacagugauggcccccgauaagccuucccuggacauuagccucgagaccgucgcuaucgauagaccggccgaagugcgcaaaguuugcuacaacgcugugcugacacaugucaagauuaaugacaaaugucccucuaccggcgaggcccaccuugcggaagagaacgaaggcgacaaugccugcaagcggaccuauuccgauagaggguggggaaacggcugugggcuguucggaaagggcagcaucguggcuugcgccaaauuuacaugcgcuaagucuaugucccucuucgagguugaccagacgaaaauucaguacgugauccgcgcccagcugcacgucggggccaagcaagagaauuggaacaccgauaucaaaacacuuaaguuugacgcucugagcggaucccaggaaguggaguucauuggcuacggcaaagcgacccucgaaugucagguccagacagccguggauuuugggaacucuuauaucgcugagauggaaaccgagagcuggauuguugaccggcaaugggcccaggaucugacgcugccuuggcaguccggaagcggcgggguguggagagagaugcaucaccucgucgaguucgagcccccucaugccgcuacaauccgcgugcuggcccuuggaaaucaagaaggcucucugaagaccgcgcucaccggggcuaugcggguuacaaaggacaccaacgauaauaaccuguacaaacuucacggcggacacguguccugcagagucaagcugagcgcccucacacugaaaggcacgucuuauaagauuuguaccgacaaaauguuuuucgugaagaaucccacagauaccgggcauggaacagugguuaugcaggucaaggugagcaaaggcgccccgugccgcaucccugugaucgucgcugacgaccugaccgccgcuauuaacaaggggauccucgugacgguuaaucccauugccuccaccaacgaugacgaggugcugaucgaagucaauccucccuucggagauucuuacauuaucgugggccggggagacagcagacuuacauaucaguggcacaaagagggcuccagcaucggaaagcuguuuacccagacaaugaaaggcguugagcgccucgcggugaugggggauaccgccugggacuucucuuccgcuggaggcuuuuucacgagcgucgggaaggggauucauacaguguuuggcucugccuuccaagggcuguuuggcggacugaacuggaucaccaagguuauuaugggcgcugugcuuaucugggucgggauuaauacacggaacaugaccauguccaugagcaugauccucgugggagugauuaugauguuccugucccugggcgucggggccgaucagggaugugcgaucaauuuuggcaaauga

SEQ ID NO: 448 - RNA, 2019 nt, Artificial Sequence
  derived and/or modified CDS sequence (opt5) from YFV__NC_002031.1__SSjev(V5)-prME (polyprotein: aa122-778)
auguggcuggugagccucgccaucgucaccgcuugcgccggcgcggugacccuggucagaaagaaccgguggcuccugcuuaauguuacaagcgaggaccugggcaaaacguucuccguggggaccggaaacugcacaaccaauauccucgaagccaaguacuggugucccgauucuauggaguauaacugcccuaaucugagcccgcgcgaggaacccgacgauauugacuguuggugcuacggcguggaaaacgucagaguggcuuaugggaaaugugauuccgccggacggucucgcagaagccggcgcgcgaucgaccuuccuacacacgagaaucauggccugaagaccagacaggagaaauggaugacagggcggaugggagaacgccaacuccagaagauugagagaugguuuguucggaaccccuucuuugcugugaccgcccugacgaucgccuaccuggucggcuccaauaugacccagcgcgugguuauugcucuccuggugcuugccgucggcccugcuuauucugcccacugcaucgggaucacagauagagacuucauugaaggagugcauggcgggaccugggugagcgcgacacuggagcaggauaagugugucaccguuauggcccccgacaaaccuucccucgauaucagccuggagacgguggcuauugaccggccggccgaagugcgcaaggucugcuacaacgcugugcuuacacacguuaaaaucaaugauaagugucccucuaccggagaggcccaucuggcggaagagaacgaaggcgacaaugccugcaaaagaacauauuccgaccggggguggggaaacggcuguggccucuuugggaagggaagcauuguggcuugcgccaaguuuaccugcgcuaaaucuaugucccuguucgaggucgaucaaaccaagauccaguacgugauuagagcccagcugcacguuggcgccaaacaggagaauuggaacacagacaucaagacgcucaaauucgaugcucugagcgggucucaagaaguggaguuuaucggauacggcaaggcgacccuugaaugucagguccagacagccguggacuucgggaacuccuauauugcugagauggaaaccgagagcuggaucgucgaucgccagugggcccaagaccugacacucccuuggcaguccggaucuggcggcguguggcgggagaugcaccaucugguugaauuugagcccccucacgccgcuaccauuagagugcuugcccuggggaaucaggaaggaagccucaaaacggcgcugacaggcgcuaugcgcgucaccaaggauaccaacgacaauaaccuguacaagcuccaugggggacacguguccugccggguuaaacugagcgcccuuacacugaagggcaccucuuauaaaaucuguacagauaagauguucuuugugaaaaaucccacggacaccgggcacggcacagucgugaugcaagugaagguuuccaagggagccccgugccgcauuccugucaucguggcugaugaccucaccgccgcuaucaacaaaggcauucuggugacagucaaucccaucgccagcaccaacgacgaugaggugcuuauugaaguuaauccucccuucggggacucuuacaucauugugggaagaggcgauagccggcugacguaucaguggcauaaggagggguccucuaucggaaaacucuucacccagacaaugaagggcgucgagagacuggcggugaugggggacaccgccugggauuuuagcuccgcuggcggauucuuuacaagcguuggcaaagggauccacaccguguucggaucugccuuucagggccuguucgggggacucaacuggauuacgaaggucaucaugggcgcugugcugauuuggguugggaucaauacacgcaacaugaccauguccaugagcaugauucuugugggcgucaucaugauguuucugucucucggagugggcgccuga

SEQ ID NO: 449 - RNA, 2007 nt, Artificial Sequence
  derived and/or modified CDS sequence (opt5) from YFV__NC_002031.1__SSjev(V5)-prME (polyprotein: aa126-778)
auguggcuggugagccucgccaucgucaccgcuugcgccggcgcgagaaagaaccgguggcuccugcuuaauguuacaagcgaggaccugggcaaaacguucuccguggggaccggaaacugcacaaccaauauccucgaagccaaguacuggugucccgauucuauggaguauaacugcccuaaucugagcccgcgcgaggaacccgacgauauugacuguuggugcuacggcguggaaaacgucagaguggcuuaugggaaaugugauuccgccggacggucucgcagaagccggcgcgcgaucgaccuuccuacacacgagaaucauggccugaagaccagacaggagaaauggaugacagggcggaugggagaacgccaacuccagaagauugagagaugguuuguucggaaccccuucuuugcugugaccgcccugacgaucgccuaccuggucggcuccaauaugacccagcgcgugguuauugcucuccuggugcuugccgucggcccugcuuauucugcccacugcaucgggaucacagauagagacuucauugaaggagugcauggcgggaccugggugagcgcgacacuggagcaggauaagugugucaccguuauggcccccgacaaaccuucccucgauaucagccuggagacgguggcuauugaccggccggccgaagugcgcaaggucugcuacaacgcugugcuuacacacguuaaaaucaaugauaagugucccucuaccggagaggcccaucuggcggaagagaacgaaggcgacaaugccugcaaaagaacauauuccgaccggggguggggaaacggcuguggccucuuugggaagggaagcauuguggcuugcgccaaguuuaccugcgcuaaaucuaugucccuguucgaggucgaucaaaccaagauccaguacgugauuagagcccagcugcacguuggcgccaaacaggagaauuggaacacagacaucaagacgcucaaauucgaugcucugagcgggucucaagaaguggaguuuaucggauacggcaaggcgacccuugaaugucagguccagacagccguggacuucgggaacuccuauauugcugagauggaaaccgagagcuggaucgucgaucgccagugggcccaagaccugacacucccuuggcaguccggaucuggcggcguguggcgggagaugcaccaucugguugaauuugagcccccucacgccgcuaccauuagagugcuugcccuggggaaucaggaaggaagccucaaaacggcgcugacaggcgcuaugcgcgucaccaaggauaccaacgacaauaaccuguacaagcuccaugggggacacguguccugccggguuaaacugagcgcccuuacacugaagggcaccucuuauaaaaucuguacagauaagauguucuuugugaaaaaucccacggacaccgggcacggcacagucgugaugcaagugaagguuuccaagggagccccgugccgcauuccugucaucguggcugaugaccucaccgccgcuaucaacaaaggcauucuggugacagucaaucccaucgccagcaccaacgacgaugaggugcuuauugaaguuaauccucccuucggggacucuuacaucauugugggaagaggcgauagccggcugacguaucaguggcauaaggagggguccucuaucggaaaacucuucacccagacaaugaagggcgucgagagacuggcggugaugggggacaccgccugggauuuuagcuccgcuggcggauucuuuacaagcguuggcaaagggauccacaccguguucggaucugccuuucagggccuguucgggggacucaacuggauuacgaaggucaucaugggcgcugugcugauuuggguugggaucaauacacgcaacaugaccauguccaugagcaugauucuugugggcgucaucaugauguuucugucucucggagugggcgccuga

SEQ ID NO: 450 - RNA, 2037 nt, Artificial Sequence
  derived and/or modified CDS sequence (opt5) from YFV__NC_002031.1__SSIgE-prMEdelstem_TM-JEV (polyprotein: aa122-680)
auggacuggaccuggauccuguuccucguggccgcugccacaagaguccacagcgugacccuggucagaaagaaccgguggcuccugcuuaauguuacaagcgaggaccugggcaaaacguucuccguggggaccggaaacugcacaaccaauauccucgaagccaaguacuggugucccgauucuauggaguauaacugcccuaaucugagcccgcgcgaggaacccgacgauauugacuguuggugcuacggcguggaaaacgucagaguggcuuaugggaaaugugauuccgccggacggucucgcagaagccggcgcgcgaucgaccuuccuacacacgagaaucauggccugaagaccagacaggagaaauggaugacagggcggaugggagaacgccaacuccagaagauugagagaugguuuguucggaaccccuucuuugcugugaccgcccugacgaucgccuaccuggucggcuccaauaugacccagcgcgugguuauugcucuccuggugcuugccgucggcccugcuuauucugcccacugcaucgggaucacagauagagacuucauugaaggagugcauggcgggaccugggugagcgcgacacuggagcaggauaagugugucaccguuauggcccccgacaaaccuucccucgauaucagccuggagacgguggcuauugaccggccggccgaagugcgcaaggucugcuacaacgcugugcuuacacacguuaaaaucaaugauaagugucccucuaccggagaggcccaucuggcggaagagaacgaaggcgacaaugccugcaaaagaacauauuccgaccggggguggggaaacggcuguggccucuuugggaagggaagcauuguggcuugcgccaaguuuaccugcgcuaaaucuaugucccuguucgaggucgaucaaaccaagauccaguacgugauuagagcccagcugcacguuggcgccaaacaggagaauuggaacacagacaucaagacgcucaaauucgaugcucugagcgggucucaagaaguggaguuuaucggauacggcaaggcgacccuugaaugucagguccagacagccguggacuucgggaacuccuauauugcugagauggaaaccgagagcuggaucgucgaucgccagugggcccaagaccugacacucccuuggcaguccggaucuggcggcguguggcgggagaugcaccaucugguugaauuugagcccccucacgccgcuaccauuagagugcuugcccuggggaaucaggaaggaagccucaaaacggcgcugacaggcgcuaugcgcgucaccaaggauaccaacgacaauaaccuguacaagcuccaugggggacacguguccugccggguuaaacugagcgcccuuacacugaagggcaccucuuauaaaaucuguacagauaagauguucuuugugaaaaaucccacggacaccgggcacggcacagucgugaugcaagugaagguuuccaagggagccccgugccgcauuccugucaucguggcugaugaccucaccgccgcuaucaacaaaggcauucuggugacagucaaucccaucgccagcaccaacgacgaugaggugcuuauugaaguuaauccucccuucggggacucuuacaucauugugggaagaggcgauagccggcugacguaucaguggcauaaggagggguccucuggcagcacccuggggaaggccuucuccacaacgcucaaaggagcucagagacuggccgcgcuuggcgacaccgcuugggauuuugggucuaucggaggcguguucaacagcauugggcgggccguccaccaaguuuuuggaggcgccuuccgcacacuguuuggcgggauguccuggaucacccagggacucaugggcgcucugcuucuguggaugggggugaaugccagagaccggucuauugcucucgccuuccuggcgacaggaggcgugcuggucuuucucgccaccaacgugcaugcuuga

SEQ ID NO: 451 - RNA, 2025 nt, Artificial Sequence
  derived and/or modified CDS sequence (opt5) from YFV__NC_002031.1__SSIgE-prMEdelstem_TM-JEV (polyprotein: aa126-680)
auggacuggaccuggauccuguuccucguggccgcugccacaagaguccacagcagaaagaaccgguggcuccugcuuaauguuacaagcgaggaccugggcaaaacguucuccguggggaccggaaacugcacaaccaauauccucgaagccaaguacuggugucccgauucuauggaguauaacugcccuaaucugagcccgcgcgaggaacccgacgauauugacuguuggugcuacggcguggaaaacgucagaguggcuuaugggaaaugugauuccgccggacggucucgcagaagccggcgcgcgaucgaccuuccuacacacgagaaucauggccugaagaccagacaggagaaauggaugacagggcggaugggagaacgccaacuccagaagauugagagaugguuuguucggaaccccuucuuugcugugaccgcccugacgaucgccuaccuggucggcuccaauaugacccagcgcgugguuauugcucuccuggugcuugccgucggcccugcuuauucugcccacugcaucgggaucacagauagagacuucauugaaggagugcauggcgggaccugggugagcgcgacacuggagcaggauaagugugucaccguuauggcccccgacaaaccuucccucgauaucagccuggagacgguggcuauugaccggccggccgaagugcgcaaggucugcuacaacgcugugcuuacacacguuaaaaucaaugauaagugucccucuaccggagaggcccaucuggcggaagagaacgaaggcgacaaugccugcaaaagaacauauuccgaccggggguggggaaacggcuguggccucuuugggaagggaagcauuguggcuugcgccaaguuuaccugcgcuaaaucuaugucccuguucgaggucgaucaaaccaagauccaguacgugauuagagcccagcugcacguuggcgccaaacaggagaauuggaacacagacaucaagacgcucaaauucgaugcucugagcgggucucaagaaguggaguuuaucggauacggcaaggcgacccuugaaugucagguccagacagccguggacuucgggaacuccuauauugcugagauggaaaccgagagcuggaucgucgaucgccagugggcccaagaccugacacucccuuggcaguccggaucuggcggcguguggcgggagaugcaccaucugguugaauuugagcccccucacgccgcuaccauuagagugcuugcccuggggaaucaggaaggaagccucaaaacggcgcugacaggcgcuaugcgcgucaccaaggauaccaacgacaauaaccuguacaagcuccaugggggacacguguccugccggguuaaacugagcgcccuuacacugaagggcaccucuuauaaaaucuguacagauaagauguucuuugugaaaaaucccacggacaccgggcacggcacagucgugaugcaagugaagguuuccaagggagccccgugccgcauuccugucaucguggcugaugaccucaccgccgcuaucaacaaaggcauucuggugacagucaaucccaucgccagcaccaacgacgaugaggugcuuauugaaguuaauccucccuucggggacucuuacaucauugugggaagaggcgauagccggcugacguaucaguggcauaaggagggguccucuggcagcacccuggggaaggccuucuccacaacgcucaaaggagcucagagacuggccgcgcuuggcgacaccgcuugggauuuugggucuaucggaggcguguucaacagcauugggcgggccguccaccaaguuuuuggaggcgccuuccgcacacuguuuggcgggauguccuggaucacccagggacucaugggcgcucugcuucuguggaugggggugaaugccagagaccggucuauugcucucgccuuccuggcgacaggaggcgugcuggucuuucucgccaccaacgugcaugcuuga

SEQ ID NO: 452 - RNA, 2055 nt, Artificial Sequence
  derived and/or modified CDS sequence (opt5) from YFV__NC_002031.1__SSjev-prMEdelstem_TM-JEV (polyprotein: aa122-680)
augggcaagagaagcgccggguccaucauguggcuggcuucucucgccguggucauugcgugcgcuggagccgugacccuggucagaaagaaccgguggcuccugcuuaauguuacaagcgaggaccugggcaaaacguucuccguggggaccggaaacugcacaaccaauauccucgaagccaaguacuggugucccgauucuauggaguauaacugcccuaaucugagcccgcgcgaggaacccgacgauauugacuguuggugcuacggcguggaaaacgucagaguggcuuaugggaaaugugauuccgccggacggucucgcagaagccggcgcgcgaucgaccuuccuacacacgagaaucauggccugaagaccagacaggagaaauggaugacagggcggaugggagaacgccaacuccagaagauugagagaugguuuguucggaaccccuucuuugcugugaccgcccugacgaucgccuaccuggucggcuccaauaugacccagcgcgugguuauugcucuccuggugcuugccgucggcccugcuuauucugcccacugcaucgggaucacagauagagacuucauugaaggagugcauggcgggaccugggugagcgcgacacuggagcaggauaagugugucaccguuauggcccccgacaaaccuucccucgauaucagccuggagacgguggcuauugaccggccggccgaagugcgcaaggucugcuacaacgcugugcuuacacacguuaaaaucaaugauaagugucccucuaccggagaggcccaucuggcggaagagaacgaaggcgacaaugccugcaaaagaacauauuccgaccggggguggggaaacggcuguggccucuuugggaagggaagcauuguggcuugcgccaaguuuaccugcgcuaaaucuaugucccuguucgaggucgaucaaaccaagauccaguacgugauuagagcccagcugcacguuggcgccaaacaggagaauuggaacacagacaucaagacgcucaaauucgaugcucugagcgggucucaagaaguggaguuuaucggauacggcaaggcgacccuugaaugucagguccagacagccguggacuucgggaacuccuauauugcugagauggaaaccgagagcuggaucgucgaucgccagugggcccaagaccugacacucccuuggcaguccggaucuggcggcguguggcgggagaugcaccaucugguugaauuugagcccccucacgccgcuaccauuagagugcuugcccuggggaaucaggaaggaagccucaaaacggcgcugacaggcgcuaugcgcgucaccaaggauaccaacgacaauaaccuguacaagcuccaugggggacacguguccugccggguuaaacugagcgcccuuacacugaagggcaccucuuauaaaaucuguacagauaagauguucuuugugaaaaaucccacggacaccgggcacggcacagucgugaugcaagugaagguuuccaagggagccccgugccgcauuccugucaucguggcugaugaccucaccgccgcuaucaacaaaggcauucuggugacagucaaucccaucgccagcaccaacgacgaugaggugcuuauugaaguuaauccucccuucggggacucuuacaucauugugggaagaggcgauagccggcugacguaucaguggcauaaggagggguccucuggcagcacccuggggaaggccuucuccacaacgcucaaaggagcucagagacuggccgcgcuuggcgacaccgcuugggauuuugggucuaucggaggcguguucaacagcauugggcgggccguccaccaaguuuuuggaggcgccuuccgcacacuguuuggcgggauguccuggaucacccagggacucaugggcgcucugcuucuguggaugggggugaaugccagagaccggucuauugcucucgccuuccuggcgacaggaggcgugcuggucuuucucgccaccaacgugcaugcuuga

SEQ ID NO: 453 - RNA, 2043 nt, Artificial Sequence
  derived and/or modified CDS sequence (opt5) from YFV__NC_002031.1__SSjev-prMEdelstem_TM-JEV (polyprotein: aa126-680)
augggcaagagaagcgccggguccaucauguggcuggcuucucucgccguggucauugcgugcgcuggagccagaaagaaccgguggcuccugcuuaauguuacaagcgaggaccugggcaaaacguucuccguggggaccggaaacugcacaaccaauauccucgaagccaaguacuggugucccgauucuauggaguauaacugcccuaaucugagcccgcgcgaggaacccgacgauauugacuguuggugcuacggcguggaaaacgucagaguggcuuaugggaaaugugauuccgccggacggucucgcagaagccggcgcgcgaucgaccuuccuacacacgagaaucauggccugaagaccagacaggagaaauggaugacagggcggaugggagaacgccaacuccagaagauugagagaugguuuguucggaaccccuucuuugcugugaccgcccugacgaucgccuaccuggucggcuccaauaugacccagcgcgugguuauugcucuccuggugcuugccgucggcccugcuuauucugcccacugcaucgggaucacagauagagacuucauugaaggagugcauggcgggaccugggugagcgcgacacuggagcaggauaagugugucaccguuauggcccccgacaaaccuucccucgauaucagccuggagacgguggcuauugaccggccggccgaagugcgcaaggucugcuacaacgcugugcuuacacacguuaaaaucaaugauaagugucccucuaccggagaggcccaucuggcggaagagaacgaaggcgacaaugccugcaaaagaacauauuccgaccggggguggggaaacggcuguggccucuuugggaagggaagcauuguggcuugcgccaaguuuaccugcgcuaaaucuaugucccuguucgaggucgaucaaaccaagauccaguacgugauuagagcccagcugcacguuggcgccaaacaggagaauuggaacacagacaucaagacgcucaaauucgaugcucugagcgggucucaagaaguggaguuuaucggauacggcaaggcgacccuugaaugucagguccagacagccguggacuucgggaacuccuauauugcugagauggaaaccgagagcuggaucgucgaucgccagugggcccaagaccugacacucccuuggcaguccggaucuggcggcguguggcgggagaugcaccaucugguugaauuugagcccccucacgccgcuaccauuagagugcuugcccuggggaaucaggaaggaagccucaaaacggcgcugacaggcgcuaugcgcgucaccaaggauaccaacgacaauaaccuguacaagcuccaugggggacacguguccugccggguuaaacugagcgcccuuacacugaagggcaccucuuauaaaaucuguacagauaagauguucuuugugaaaaaucccacggacaccgggcacggcacagucgugaugcaagugaagguuuccaagggagccccgugccgcauuccugucaucguggcugaugaccucaccgccgcuaucaacaaaggcauucuggugacagucaaucccaucgccagcaccaacgacgaugaggugcuuauugaaguuaauccucccuucggggacucuuacaucauugugggaagaggcgauagccggcugacguaucaguggcauaaggagggguccucuggcagcacccuggggaaggccuucuccacaacgcucaaaggagcucagagacuggccgcgcuuggcgacaccgcuugggauuuugggucuaucggaggcguguucaacagcauugggcgggccguccaccaaguuuuuggaggcgccuuccgcacacuguuuggcgggauguccuggaucacccagggacucaugggcgcucugcuucuguggaugggggugaaugccagagaccggucuauugcucucgccuuccuggcgacaggaggcgugcuggucuuucucgccaccaacgugcaugcuuga

SEQ ID NO: 454 - RNA, 2094 nt, Artificial Sequence
  derived and/or modified CDS sequence (opt6) from YFV__NC_002031.1__X-SS-prME-XX (polyprotein: aa92-788)
augagaggauuaucaaguagaaaaagaagaucacaugauguacuaaccgugcaauuuuugaucuuagggaugcucuuaaugacaggagguguuacauuaguaagaaagaaucgauggcugcuuuuaaaugugacaucagaggauuuagggaaaacauuuucgguaggaacaggaaauuguacuacaaauauacuugaagcaaaauauuggugcccagacucuauggaauauaauuguccaaauuuaaguccuagagaagaaccugacgauauagauuguugguguuaugguguagaaaauguaagaguagcauacggcaaaugcgauagugcaggacguucuagacguucaaggagagccauagaucugcccacucacgaaaaucacggauugaaaacacgacaagaaaaauggaugacugggcgaaugggagaaagacaacuacagaaaauugaaagaugguucguuagaaauccauucuuugccguaacagcuuuaacaauagccuauuuaguagguaguaauaugacacaaagaguaguaauagcauugcuaguguuagcaguuggaccagcuuauagugcacauugcauaggaauaacagauagagacuuuauagaaggaguacacgggggaacuuggguaagugccacuuuagaacaagauaaauguguuacagugauggcgccagauaaaccaagucuggacauaaguuuggaaacaguagcgauugauagacccgcagaaguaagaaaaguuuguuauaaugcuguucuaacccauguuaaaauaaaugauaaaugcccuagcaccggagaagcccaucuagcagaagaaaaugaaggagauaacgcauguaaacgaacauacucagauagaggauggggcaacggauguggcuuguuuggaaaagguagcauaguagcaugcgcuaaauuuacaugcgcaaagucaaugucauuauuugaaguagaucaaacaaaaauacaauauguaauaagagcucaauuacacgugggugcaaaacaagaaaauuggaauacagacauaaagacacuaaaguucgacgcauuaaguggaucacaagagguagaauuuauaggguacggaaaagcgacuuuagagugucaaguccaaacagcaguagauuucgguaacucauacauagcagaaauggaaacugaaaguuggauaguagauagacaaugggcacaagacuugacacuaccuuggcaaucaggaagcggaggaguauggagagaaaugcaucauuuaguagaauuugaaccaccucaugcagcaacaauaagaguauuagcccuaggaaaccaagaaggaaguuuaaaaacagcacuaacaggagcuaugagaguaacaaaagauacaaaugacaacaaucuauacaaauuacacggaggacauguaagcugccggguaaaguugagcgcacuaacauuaaaaggaacgaguuauaaaauaugcacagauaaaauguucuuuguuaaaaauccuacagauaccggucauggaacaguaguaaugcaaguaaaaguaaguaaaggcgcucccuguagaauaccuguaauagucgcagacgauuuaaccgcagcaauaaauaaaggaauauuagucacgguaaacccaauagcgucaacaaaugaugaugaaguauuaauagaaguuaacccaccuuuuggagacaguuauauaauagucggaaggggugauaguagacuaacauaccaauggcauaaagaaggaagcucaauaggaaaauuauuuacucaaaccaugaaagguguagaaaggcuagcuguuaugggugacacagcaugggauuuuucaagcgcaggaggguucuuuacaucaguagguaaaggaauacauacaguauuuggaagugcauuucaaggauuauuuggugguuuaaauuggauaacaaaaguaauaaugggcgcaguuuuaauauggguagguauaaacacaagaaauaugacaaugucuaugaguaugauauuggucggaguaauaaugauguuuuuaucacuaggagugggugcagaucaagguugcgcuauuaauuuuggaaaauga

SEQ ID NO: 455 - RNA, 2064 nt, Artificial Sequence
  derived and/or modified CDS sequence (opt6) from YFV__NC_002031.1__X-SS-prME (polyprotein: aa92-778)
augagaggauuaucaaguagaaaaagaagaucacaugauguacuaaccgugcaauuuuugaucuuagggaugcucuuaaugacaggagguguuacauuaguaagaaagaaucgauggcugcuuuuaaaugugacaucagaggauuuagggaaaacauuuucgguaggaacaggaaauuguacuacaaauauacuugaagcaaaauauuggugcccagacucuauggaauauaauuguccaaauuuaaguccuagagaagaaccugacgauauagauuguugguguuaugguguagaaaauguaagaguagcauacggcaaaugcgauagugcaggacguucuagacguucaaggagagccauagaucugcccacucacgaaaaucacggauugaaaacacgacaagaaaaauggaugacugggcgaaugggagaaagacaacuacagaaaauugaaagaugguucguuagaaauccauucuuugccguaacagcuuuaacaauagccuauuuaguagguaguaauaugacacaaagaguaguaauagcauugcuaguguuagcaguuggaccagcuuauagugcacauugcauaggaauaacagauagagacuuuauagaaggaguacacgggggaacuuggguaagugccacuuuagaacaagauaaauguguuacagugauggcgccagauaaaccaagucuggacauaaguuuggaaacaguagcgauugauagacccgcagaaguaagaaaaguuuguuauaaugcuguucuaacccauguuaaaauaaaugauaaaugcccuagcaccggagaagcccaucuagcagaagaaaaugaaggagauaacgcauguaaacgaacauacucagauagaggauggggcaacggauguggcuuguuuggaaaagguagcauaguagcaugcgcuaaauuuacaugcgcaaagucaaugucauuauuugaaguagaucaaacaaaaauacaauauguaauaagagcucaauuacacgugggugcaaaacaagaaaauuggaauacagacauaaagacacuaaaguucgacgcauuaaguggaucacaagagguagaauuuauaggguacggaaaagcgacuuuagagugucaaguccaaacagcaguagauuucgguaacucauacauagcagaaauggaaacugaaaguuggauaguagauagacaaugggcacaagacuugacacuaccuuggcaaucaggaagcggaggaguauggagagaaaugcaucauuuaguagaauuugaaccaccucaugcagcaacaauaagaguauuagcccuaggaaaccaagaaggaaguuuaaaaacagcacuaacaggagcuaugagaguaacaaaagauacaaaugacaacaaucuauacaaauuacacggaggacauguaagcugccggguaaaguugagcgcacuaacauuaaaaggaacgaguuauaaaauaugcacagauaaaauguucuuuguuaaaaauccuacagauaccggucauggaacaguaguaaugcaaguaaaaguaaguaaaggcgcucccuguagaauaccuguaauagucgcagacgauuuaaccgcagcaauaaauaaaggaauauuagucacgguaaacccaauagcgucaacaaaugaugaugaaguauuaauagaaguuaacccaccuuuuggagacaguuauauaauagucggaaggggugauaguagacuaacauaccaauggcauaaagaaggaagcucaauaggaaaauuauuuacucaaaccaugaaagguguagaaaggcuagcuguuaugggugacacagcaugggauuuuucaagcgcaggaggguucuuuacaucaguagguaaaggaauacauacaguauuuggaagugcauuucaaggauuauuuggugguuuaaauuggauaacaaaaguaauaaugggcgcaguuuuaauauggguagguauaaacacaagaaauaugacaaugucuaugaguaugauauuggucggaguaauaaugauguuuuuaucacuaggagugggugcauga

SEQ ID NO: 456 - RNA, 2067 nt, Artificial Sequence
  derived and/or modified CDS sequence (opt6) from YFV__NC_002031.1__SS-prME-XX (polyprotein: M,aa102-788)
augucacaugauguacuaaccgugcaauuuuugaucuuagggaugcucuuaaugacaggagguguuacauuaguaagaaagaaucgauggcugcuuuuaaaugugacaucagaggauuuagggaaaacauuuucgguaggaacaggaaauuguacuacaaauauacuugaagcaaaauauuggugcccagacucuauggaauauaauuguccaaauuuaaguccuagagaagaaccugacgauauagauuguugguguuaugguguagaaaauguaagaguagcauacggcaaaugcgauagugcaggacguucuagacguucaaggagagccauagaucugcccacucacgaaaaucacggauugaaaacacgacaagaaaaauggaugacugggcgaaugggagaaagacaacuacagaaaauugaaagaugguucguuagaaauccauucuuugccguaacagcuuuaacaauagccuauuuaguagguaguaauaugacacaaagaguaguaauagcauugcuaguguuagcaguuggaccagcuuauagugcacauugcauaggaauaacagauagagacuuuauagaaggaguacacgggggaacuuggguaagugccacuuuagaacaagauaaauguguuacagugauggcgccagauaaaccaagucuggacauaaguuuggaaacaguagcgauugauagacccgcagaaguaagaaaaguuuguuauaaugcuguucuaacccauguuaaaauaaaugauaaaugcccuagcaccggagaagcccaucuagcagaagaaaaugaaggagauaacgcauguaaacgaacauacucagauagaggauggggcaacggauguggcuuguuuggaaaagguagcauaguagcaugcgcuaaauuuacaugcgcaaagucaaugucauuauuugaaguagaucaaacaaaaauacaauauguaauaagagcucaauuacacgugggugcaaaacaagaaaauuggaauacagacauaaagacacuaaaguucgacgcauuaaguggaucacaagagguagaauuuauaggguacggaaaagcgacuuuagagugucaaguccaaacagcaguagauuucgguaacucauacauagcagaaauggaaacugaaaguuggauaguagauagacaaugggcacaagacuugacacuaccuuggcaaucaggaagcggaggaguauggagagaaaugcaucauuuaguagaauuugaaccaccucaugcagcaacaauaagaguauuagcccuaggaaaccaagaaggaaguuuaaaaacagcacuaacaggagcuaugagaguaacaaaagauacaaaugacaacaaucuauacaaauuacacggaggacauguaagcugccggguaaaguugagcgcacuaacauuaaaaggaacgaguuauaaaauaugcacagauaaaauguucuuuguuaaaaauccuacagauaccggucauggaacaguaguaaugcaaguaaaaguaaguaaaggcgcucccuguagaauaccuguaauagucgcagacgauuuaaccgcagcaauaaauaaaggaauauuagucacgguaaacccaauagcgucaacaaaugaugaugaaguauuaauagaaguuaacccaccuuuuggagacaguuauauaauagucggaaggggugauaguagacuaacauaccaauggcauaaagaaggaagcucaauaggaaaauuauuuacucaaaccaugaaagguguagaaaggcuagcuguuaugggugacacagcaugggauuuuucaagcgcaggaggguucuuuacaucaguagguaaaggaauacauacaguauuuggaagugcauuucaaggauuauuuggugguuuaaauuggauaacaaaaguaauaaugggcgcaguuuuaauauggguagguauaaacacaagaaauaugacaaugucuaugaguaugauauuggucggaguaauaaugauguuuuuaucacuaggagugggugcagaucaagguugcgcuauuaauuuuggaaaauga

SEQ ID NO: 457 - RNA, 2061 nt, Artificial Sequence
  derived and/or modified CDS sequence (opt6) from YFV__NC_002031.1__SS-prME-XX (polyprotein: M,aa104-788)
auggauguacuaaccgugcaauuuuugaucuuagggaugcucuuaaugacaggagguguuacauuaguaagaaagaaucgauggcugcuuuuaaaugugacaucagaggauuuagggaaaacauuuucgguaggaacaggaaauuguacuacaaauauacuugaagcaaaauauuggugcccagacucuauggaauauaauuguccaaauuuaaguccuagagaagaaccugacgauauagauuguugguguuaugguguagaaaauguaagaguagcauacggcaaaugcgauagugcaggacguucuagacguucaaggagagccauagaucugcccacucacgaaaaucacggauugaaaacacgacaagaaaaauggaugacugggcgaaugggagaaagacaacuacagaaaauugaaagaugguucguuagaaauccauucuuugccguaacagcuuuaacaauagccuauuuaguagguaguaauaugacacaaagaguaguaauagcauugcuaguguuagcaguuggaccagcuuauagugcacauugcauaggaauaacagauagagacuuuauagaaggaguacacgggggaacuuggguaagugccacuuuagaacaagauaaauguguuacagugauggcgccagauaaaccaagucuggacauaaguuuggaaacaguagcgauugauagacccgcagaaguaagaaaaguuuguuauaaugcuguucuaacccauguuaaaauaaaugauaaaugcccuagcaccggagaagcccaucuagcagaagaaaaugaaggagauaacgcauguaaacgaacauacucagauagaggauggggcaacggauguggcuuguuuggaaaagguagcauaguagcaugcgcuaaauuuacaugcgcaaagucaaugucauuauuugaaguagaucaaacaaaaauacaauauguaauaagagcucaauuacacgugggugcaaaacaagaaaauuggaauacagacauaaagacacuaaaguucgacgcauuaaguggaucacaagagguagaauuuauaggguacggaaaagcgacuuuagagugucaaguccaaacagcaguagauuucgguaacucauacauagcagaaauggaaacugaaaguuggauaguagauagacaaugggcacaagacuugacacuaccuuggcaaucaggaagcggaggaguauggagagaaaugcaucauuuaguagaauuugaaccaccucaugcagcaacaauaagaguauuagcccuaggaaaccaagaaggaaguuuaaaaacagcacuaacaggagcuaugagaguaacaaaagauacaaaugacaacaaucuauacaaauuacacggaggacauguaagcugccggguaaaguugagcgcacuaacauuaaaaggaacgaguuauaaaauaugcacagauaaaauguucuuuguuaaaaauccuacagauaccggucauggaacaguaguaaugcaaguaaaaguaaguaaaggcgcucccuguagaauaccuguaauagucgcagacgauuuaaccgcagcaauaaauaaaggaauauuagucacgguaaacccaauagcgucaacaaaugaugaugaaguauuaauagaaguuaacccaccuuuuggagacaguuauauaauagucggaaggggugauaguagacuaacauaccaauggcauaaagaaggaagcucaauaggaaaauuauuuacucaaaccaugaaagguguagaaaggcuagcuguuaugggugacacagcaugggauuuuucaagcgcaggaggguucuuuacaucaguagguaaaggaauacauacaguauuuggaagugcauuucaaggauuauuuggugguuuaaauuggauaacaaaaguaauaaugggcgcaguuuuaauauggguagguauaaacacaagaaauaugacaaugucuaugaguaugauauuggucggaguaauaaugauguuuuuaucacuaggagugggugcagaucaagguugcgcuauuaauuuuggaaaauga

SEQ ID NO: 458 - RNA, 2037 nt, Artificial Sequence
  derived and/or modified CDS sequence (opt6) from YFV__NC_002031.1__SS-prME (polyprotein: M,aa102-778)
augagccaugauguucuuacaguacaauucuugauacucggaauguuguuaaugacaggaggagugacauuaguaaggaaaaacagaugguuacuacuaaauguuacuagcgaagauuuaggaaaaacauucagcguaggaacgggaaauugcacaacuaacauauuagaagcaaaauauuggugcccugauucaauggaauacaacugucccaacuuaucuccuagagaagaacccgaugacauagauuguugguguuauggaguagaaaacgugagaguagcuuaugguaaaugcgacagcgcgggucgaaguagaagaagucguagagcuauagaucuaccuacacaugaaaaucacggacuuaaaaccagacaagaaaaauggaugacaggaagaaugggagaaagacaauuacagaaaauagaaagaugguucguaagaaauccauucuuugccgugacagcauuaacaauagcauauuuaguuggaucuaacaugacacaaagaguaguaauagcccuucuaguauuagcaguaggcccggcauacucagcacauuguauagguauaacagacagagauuuuauagagggaguacauggagguacauggguaucagcaacauuggaacaagauaaaugcguuacaguaauggcuccagauaaacccaguuuggauauaaguuuagaaacuguagcaauagaucgaccagccgaggucagaaaaguauguuauaaugcaguuuuaacacauguaaaaauaaacgauaaguguccaaguacaggagaagcacauuuagcagaagaaaacgaaggagauaaugcuugcaaaagaacauauucagacagagguuggggaaacggauguggauuauuuggaaaaggaucaauuguagcaugugcaaaauuuacaugcgcaaaaaguaugucuuuauuugaaguagaucaaacaaaaauacaauauguuauaagggcacaauugcacguaggagcaaaacaagaaaacuggaauacagauauaaaaacacuaaaauuugaugcacuaaguggaucacaagaaguggaauuuauaggauacggaaaagcaacucuagagugccaaguccaaacugcaguagacuuuggaaauaguuacauugcagaaauggaaacagaaucauggauaguagacagacaaugggcacaagauuuaacuuuaccauggcaaucagguucaggaggaguauggcgagagaugcaucaccuuguugaauuugagccgccccaugcugcaacaauaagaguacucgcauuaggaaaucaagaggguucuuuaaaaacagcauuaacaggagccaugagaguaacaaaagauacaaaugauaauaauuuauauaaauuacacggaggacauguuucuuguaggguaaaacuuucagcacuaacacuuaagggaacaaguuauaaaauauguacugacaaaauguucuuugucaaaaauccaacggauacggggcaugguacaguaguaaugcaaguaaaaguaaguaaaggagcaccaugcagaauaccaguaauagucgcagacgaccuaacagcugccauaaacaaaggcauacuggucacagucaaucccauagcaucaacuaacgacgaugaaguacuaauagaaguaaacccaccuuuuggugauaguuauauaauaguaggacgaggagauucacgacuaacuuaucaauggcauaaagaagggucaucaauaggaaaguuauuuacacaaacaaugaaaggaguagaacgauuagcagucaugggagauacggcaugggauuuuagcagugcaggggguuucuucacaucaguagggaaaggaauacacaccguauuugguucagcauuucaaggacuauuuggaggauuaaauuggauaacuaaaguaauaaugggugcaguauuaauaugggucggaauaaacacacgaaauaugacaaugucaaugaguaugauauuaguuggcguaauaaugauguucuuaucauuaggaguaggagcauga

SEQ ID NO: 459 - RNA, 2031 nt, Artificial Sequence
  derived and/or modified CDS sequence (opt6) from YFV__NC_002031.1__SS-prME (polyprotein: M,aa104-778)
auggauguucuaacaguacaauuuuuaauauuagggauguuauuaaugacaggaggcguaacauuaguacgaaagaaucgauggcuauuacuaaacguuacgucugaagauuuaggaaaaacauuuagcguaggaacaggaaauugcaccacgaauaucuuagaagcaaaauauugguguccagauaguauggaauacaauuguccaaauuuaaguccuagagaggaacccgacgauauagauugcugguguuacggaguggaaaauguaagaguagcauauggaaaaugugacagcgcagguagaaguagaagaucacgacgagcaauugaucuacccacucaugagaaccauggacuaaaaacaagacaagaaaaauggaugacagguagaaugggcgaaagacaauuacagaaaauagaaagaugguuuguacgaaauccuuucuuugcugucacugcauuaacuauagcuuauuuaguaggaaguaacaugacucaaagaguaguaauagcacuauuaguacuagcaguaggaccagcuuacagugcacacuguauagggauaacggauagagauuuuauagaaggaguacauggggguacaugggugucugccacuuuagaacaagacaaauguguuacaguuauggccccagauaaacccucuuuagacauaucauuagaaacuguagcaauagauagaccggcggaagugagaaagguauguuauaaugcaguacuaacccauguaaaaauuaaugacaaaugcccaucaacaggagaggcucaucuagcugaagaaaaugaaggagacaaugcuugcaaacguacauauucagacaggggguggggaaauggauguggauuauuugguaaagggucaauaguagcaugugcaaaauuuacaugcgcaaaaaguaugagcuuauuugaaguagaucaaacaaaaauccaauauguaauuagagcucaacuucacguaggagcaaaacaagagaauuggaacacagauauaaaaacauuaaaauuugacgcuuugucuggaagucaagaagucgaauuuauuggcuauggaaaggcaacauuagaaugccaaguucaaaccgcaguagauuuuggaaauucauacauagcagaaauggagacugaaaguuggauaguagauagacagugggcucaagaccuaacuuuaccauggcaaucaggaaguggugguguauggagagaaaugcaucauuuaguagaauuugaaccaccacaugcagcaacaauuagaguacuagcauuaggaaaucaagaagguaguuuaaagacagcgcuuaccggagcaaugagaguuacaaaagauacuaaugacaauaauuuauauaaacuucauggaggacauguuagcuguagagucaaauuaagugcauuaacacucaaaggaacaucauacaaaauauguacagauaaaauguuuuucgucaagaauccaacagauacaggacauggaacaguuguaaugcaaguaaaaguaucaaaaggagcaccuugcagaauaccaguaauaguagcagaugauuuaacagccgcaauuaauaaagggauauuaguaacaguaaacccuauagcaaguacaaaugaugaugaagucuugauagaaguaaauccaccauuuggagauucguauauaauagucggaagaggagauagucgauuaacauaucaauggcauaaagaagguucaucaauaggaaaauuauuuacacaaaccaugaaaggaguugaaagauuagcuguaaugggggacacagcuugggauuuuucuagcgcaggaggauucuuuacauccguaggaaaagguauacacacaguauuuggcucagcauuccaaggguuauuuggugguuuaaauuggauaacaaaagugauuaugggagcagugcuaaucuggguaggaauaaauacaagaaauaugacaaugaguaugagcaugauucucguaggaguaauaaugauguuccuuaguuugggaguuggcgcuuga

SEQ ID NO: 460 - RNA, 2073 nt, Artificial Sequence
  derived and/or modified CDS sequence (opt6) from YFV__NC_002031.1__X-SS-prMEdelstem_TM-JEV (polyprotein: aa92-680)
augagaggauuaucaaguagaaaaagaagaucacaugauguacuaaccgugcaauuuuugaucuuagggaugcucuuaaugacaggagguguuacauuaguaagaaagaaucgauggcugcuuuuaaaugugacaucagaggauuuagggaaaacauuuucgguaggaacaggaaauuguacuacaaauauacuugaagcaaaauauuggugcccagacucuauggaauauaauuguccaaauuuaaguccuagagaagaaccugacgauauagauuguugguguuaugguguagaaaauguaagaguagcauacggcaaaugcgauagugcaggacguucuagacguucaaggagagccauagaucugcccacucacgaaaaucacggauugaaaacacgacaagaaaaauggaugacugggcgaaugggagaaagacaacuacagaaaauugaaagaugguucguuagaaauccauucuuugccguaacagcuuuaacaauagccuauuuaguagguaguaauaugacacaaagaguaguaauagcauugcuaguguuagcaguuggaccagcuuauagugcacauugcauaggaauaacagauagagacuuuauagaaggaguacacgggggaacuuggguaagugccacuuuagaacaagauaaauguguuacagugauggcgccagauaaaccaagucuggacauaaguuuggaaacaguagcgauugauagacccgcagaaguaagaaaaguuuguuauaaugcuguucuaacccauguuaaaauaaaugauaaaugcccuagcaccggagaagcccaucuagcagaagaaaaugaaggagauaacgcauguaaacgaacauacucagauagaggauggggcaacggauguggcuuguuuggaaaagguagcauaguagcaugcgcuaaauuuacaugcgcaaagucaaugucauuauuugaaguagaucaaacaaaaauacaauauguaauaagagcucaauuacacgugggugcaaaacaagaaaauuggaauacagacauaaagacacuaaaguucgacgcauuaaguggaucacaagagguagaauuuauaggguacggaaaagcgacuuuagagugucaaguccaaacagcaguagauuucgguaacucauacauagcagaaauggaaacugaaaguuggauaguagauagacaaugggcacaagacuugacacuaccuuggcaaucaggaagcggaggaguauggagagaaaugcaucauuuaguagaauuugaaccaccucaugcagcaacaauaagaguauuagcccuaggaaaccaagaaggaaguuuaaaaacagcacuaacaggagcuaugagaguaacaaaagauacaaaugacaacaaucuauacaaauuacacggaggacauguaagcugccggguaaaguugagcgcacuaacauuaaaaggaacgaguuauaaaauaugcacagauaaaauguucuuuguuaaaaauccuacagauaccggucauggaacaguaguaaugcaaguaaaaguaaguaaaggcgcucccuguagaauaccuguaauagucgcagacgauuuaaccgcagcaauaaauaaaggaauauuagucacgguaaacccaauagcgucaacaaaugaugaugaaguauuaauagaaguuaacccaccuuuuggagacaguuauauaauagucggaaggggugauaguagacuaacauaccaauggcauaaagaaggaagcucaggaaguacacuaggaaaagcauuuaguacaacauuaaaaggagcacaaagauuagcagcauuaggagauacagcaugggauuuuggaagcauaggaggaguauuuaauaguauagguagagcaguacaucaaguauuuggaggagcauuuagaacauuauuuggaggaaugaguuggauaacacaaggauuaaugggagcauuauuauuauggaugggaguaaaugcaagagauagaaguauagcauuagcauuuuuagcaacaggaggaguauuaguauuuuuagcaacaaauguacaugcauga

SEQ ID NO: 461 - RNA, 2046 nt, Artificial Sequence
  derived and/or modified CDS sequence (opt6) from YFV__NC_002031.1__SS-prMEdelstem_TM-JEV (polyprotein: M,aa102-680)
augagccaugauguucuuacaguacaauucuugauacucggaauguuguuaaugacaggaggagugacauuaguaaggaaaaacagaugguuacuacuaaauguuacuagcgaagauuuaggaaaaacauucagcguaggaacgggaaauugcacaacuaacauauuagaagcaaaauauuggugcccugauucaauggaauacaacugucccaacuuaucuccuagagaagaacccgaugacauagauuguugguguuauggaguagaaaacgugagaguagcuuaugguaaaugcgacagcgcgggucgaaguagaagaagucguagagcuauagaucuaccuacacaugaaaaucacggacuuaaaaccagacaagaaaaauggaugacaggaagaaugggagaaagacaauuacagaaaauagaaagaugguucguaagaaauccauucuuugccgugacagcauuaacaauagcauauuuaguuggaucuaacaugacacaaagaguaguaauagcccuucuaguauuagcaguaggcccggcauacucagcacauuguauagguauaacagacagagauuuuauagagggaguacauggagguacauggguaucagcaacauuggaacaagauaaaugcguuacaguaauggcuccagauaaacccaguuuggauauaaguuuagaaacuguagcaauagaucgaccagccgaggucagaaaaguauguuauaaugcaguuuuaacacauguaaaaauaaacgauaaguguccaaguacaggagaagcacauuuagcagaagaaaacgaaggagauaaugcuugcaaaagaacauauucagacagagguuggggaaacggauguggauuauuuggaaaaggaucaauuguagcaugugcaaaauuuacaugcgcaaaaaguaugucuuuauuugaaguagaucaaacaaaaauacaauauguuauaagggcacaauugcacguaggagcaaaacaagaaaacuggaauacagauauaaaaacacuaaaauuugaugcacuaaguggaucacaagaaguggaauuuauaggauacggaaaagcaacucuagagugccaaguccaaacugcaguagacuuuggaaauaguuacauugcagaaauggaaacagaaucauggauaguagacagacaaugggcacaagauuuaacuuuaccauggcaaucagguucaggaggaguauggcgagagaugcaucaccuuguugaauuugagccgccccaugcugcaacaauaagaguacucgcauuaggaaaucaagaggguucuuuaaaaacagcauuaacaggagccaugagaguaacaaaagauacaaaugauaauaauuuauauaaauuacacggaggacauguuucuuguaggguaaaacuuucagcacuaacacuuaagggaacaaguuauaaaauauguacugacaaaauguucuuugucaaaaauccaacggauacggggcaugguacaguaguaaugcaaguaaaaguaaguaaaggagcaccaugcagaauaccaguaauagucgcagacgaccuaacagcugccauaaacaaaggcauacuggucacagucaaucccauagcaucaacuaacgacgaugaaguacuaauagaaguaaacccaccuuuuggugauaguuauauaauaguaggacgaggagauucacgacuaacuuaucaauggcauaaagaagggucaucaggaaguacacuaggaaaagcauuuaguacaacauuaaaaggagcacaaagauuagcagcauuaggagauacagcaugggauuuuggaagcauaggaggaguauuuaauaguauagguagagcaguacaucaaguauuuggaggagcauuuagaacauuauuuggaggaaugaguuggauaacacaaggauuaaugggagcauuauuauuauggaugggaguaaaugcaagagauagaaguauagcauuagcauuuuuagcaacaggaggaguauuaguauuuuuagcaacaaauguacaugcauga

SEQ ID NO: 462 - RNA, 2040 nt, Artificial Sequence
  derived and/or modified CDS sequence (opt6) from YFV__NC_002031.1__SS-prMEdelstem_TM-JEV (polyprotein: M,aa104-680)
auggauguucuaacaguacaauuuuuaauauuagggauguuauuaaugacaggaggcguaacauuaguacgaaagaaucgauggcuauuacuaaacguuacgucugaagauuuaggaaaaacauuuagcguaggaacaggaaauugcaccacgaauaucuuagaagcaaaauauugguguccagauaguauggaauacaauuguccaaauuuaaguccuagagaggaacccgacgauauagauugcugguguuacggaguggaaaauguaagaguagcauauggaaaaugugacagcgcagguagaaguagaagaucacgacgagcaauugaucuacccacucaugagaaccauggacuaaaaacaagacaagaaaaauggaugacagguagaaugggcgaaagacaauuacagaaaauagaaagaugguuuguacgaaauccuuucuuugcugucacugcauuaacuauagcuuauuuaguaggaaguaacaugacucaaagaguaguaauagcacuauuaguacuagcaguaggaccagcuuacagugcacacuguauagggauaacggauagagauuuuauagaaggaguacauggggguacaugggugucugccacuuuagaacaagacaaauguguuacaguuauggccccagauaaacccucuuuagacauaucauuagaaacuguagcaauagauagaccggcggaagugagaaagguauguuauaaugcaguacuaacccauguaaaaauuaaugacaaaugcccaucaacaggagaggcucaucuagcugaagaaaaugaaggagacaaugcuugcaaacguacauauucagacaggggguggggaaauggauguggauuauuugguaaagggucaauaguagcaugugcaaaauuuacaugcgcaaaaaguaugagcuuauuugaaguagaucaaacaaaaauccaauauguaauuagagcucaacuucacguaggagcaaaacaagagaauuggaacacagauauaaaaacauuaaaauuugacgcuuugucuggaagucaagaagucgaauuuauuggcuauggaaaggcaacauuagaaugccaaguucaaaccgcaguagauuuuggaaauucauacauagcagaaauggagacugaaaguuggauaguagauagacagugggcucaagaccuaacuuuaccauggcaaucaggaaguggugguguauggagagaaaugcaucauuuaguagaauuugaaccaccacaugcagcaacaauuagaguacuagcauuaggaaaucaagaagguaguuuaaagacagcgcuuaccggagcaaugagaguuacaaaagauacuaaugacaauaauuuauauaaacuucauggaggacauguuagcuguagagucaaauuaagugcauuaacacucaaaggaacaucauacaaaauauguacagauaaaauguuuuucgucaagaauccaacagauacaggacauggaacaguuguaaugcaaguaaaaguaucaaaaggagcaccuugcagaauaccaguaauaguagcagaugauuuaacagccgcaauuaauaaagggauauuaguaacaguaaacccuauagcaaguacaaaugaugaugaagucuugauagaaguaaauccaccauuuggagauucguauauaauagucggaagaggagauagucgauuaacauaucaauggcauaaagaagguucaucaggaaguacacuaggaaaagcauuuaguacaacauuaaaaggagcacaaagauuagcagcauuaggagauacagcaugggauuuuggaagcauaggaggaguauuuaauaguauagguagagcaguacaucaaguauuuggaggagcauuuagaacauuauuuggaggaaugaguuggauaacacaaggauuaaugggagcauuauuauuauggaugggaguaaaugcaagagauagaaguauagcauuagcauuuuuagcaacaggaggaguauuaguauuuuuagcaacaaauguacaugcauga

SEQ ID NO: 463 - RNA, 2058 nt, Artificial Sequence
  derived and/or modified CDS sequence (opt6) from YFV__NC_002031.1__SSIgE-prME-XX (polyprotein: aa122-788)
auggacuggacauggauauuauuuuuaguagcagcagcaacaagaguacauucaguuacauuaguaagaaagaaucgauggcugcuuuuaaaugugacaucagaggauuuagggaaaacauuuucgguaggaacaggaaauuguacuacaaauauacuugaagcaaaauauuggugcccagacucuauggaauauaauuguccaaauuuaaguccuagagaagaaccugacgauauagauuguugguguuaugguguagaaaauguaagaguagcauacggcaaaugcgauagugcaggacguucuagacguucaaggagagccauagaucugcccacucacgaaaaucacggauugaaaacacgacaagaaaaauggaugacugggcgaaugggagaaagacaacuacagaaaauugaaagaugguucguuagaaauccauucuuugccguaacagcuuuaacaauagccuauuuaguagguaguaauaugacacaaagaguaguaauagcauugcuaguguuagcaguuggaccagcuuauagugcacauugcauaggaauaacagauagagacuuuauagaaggaguacacgggggaacuuggguaagugccacuuuagaacaagauaaauguguuacagugauggcgccagauaaaccaagucuggacauaaguuuggaaacaguagcgauugauagacccgcagaaguaagaaaaguuuguuauaaugcuguucuaacccauguuaaaauaaaugauaaaugcccuagcaccggagaagcccaucuagcagaagaaaaugaaggagauaacgcauguaaacgaacauacucagauagaggauggggcaacggauguggcuuguuuggaaaagguagcauaguagcaugcgcuaaauuuacaugcgcaaagucaaugucauuauuugaaguagaucaaacaaaaauacaauauguaauaagagcucaauuacacgugggugcaaaacaagaaaauuggaauacagacauaaagacacuaaaguucgacgcauuaaguggaucacaagagguagaauuuauaggguacggaaaagcgacuuuagagugucaaguccaaacagcaguagauuucgguaacucauacauagcagaaauggaaacugaaaguuggauaguagauagacaaugggcacaagacuugacacuaccuuggcaaucaggaagcggaggaguauggagagaaaugcaucauuuaguagaauuugaaccaccucaugcagcaacaauaagaguauuagcccuaggaaaccaagaaggaaguuuaaaaacagcacuaacaggagcuaugagaguaacaaaagauacaaaugacaacaaucuauacaaauuacacggaggacauguaagcugccggguaaaguugagcgcacuaacauuaaaaggaacgaguuauaaaauaugcacagauaaaauguucuuuguuaaaaauccuacagauaccggucauggaacaguaguaaugcaaguaaaaguaaguaaaggcgcucccuguagaauaccuguaauagucgcagacgauuuaaccgcagcaauaaauaaaggaauauuagucacgguaaacccaauagcgucaacaaaugaugaugaaguauuaauagaaguuaacccaccuuuuggagacaguuauauaauagucggaaggggugauaguagacuaacauaccaauggcauaaagaaggaagcucaauaggaaaauuauuuacucaaaccaugaaagguguagaaaggcuagcuguuaugggugacacagcaugggauuuuucaagcgcaggaggguucuuuacaucaguagguaaaggaauacauacaguauuuggaagugcauuucaaggauuauuuggugguuuaaauuggauaacaaaaguaauaaugggcgcaguuuuaauauggguagguauaaacacaagaaauaugacaaugucuaugaguaugauauuggucggaguaauaaugauguuuuuaucacuaggagugggugcagaucaagguugcgcuauuaauuuuggaaaauga

SEQ ID NO: 464 - RNA, 2046 nt, Artificial Sequence
  derived and/or modified CDS sequence (opt6) from YFV__NC_002031.1__SSIgE-prME-XX (polyprotein: aa126-788)
auggacuggacauggauauuauuuuuaguagcagcagcaacaagaguacauucaagaaagaaucgauggcugcuuuuaaaugugacaucagaggauuuagggaaaacauuuucgguaggaacaggaaauuguacuacaaauauacuugaagcaaaauauuggugcccagacucuauggaauauaauuguccaaauuuaaguccuagagaagaaccugacgauauagauuguugguguuaugguguagaaaauguaagaguagcauacggcaaaugcgauagugcaggacguucuagacguucaaggagagccauagaucugcccacucacgaaaaucacggauugaaaacacgacaagaaaaauggaugacugggcgaaugggagaaagacaacuacagaaaauugaaagaugguucguuagaaauccauucuuugccguaacagcuuuaacaauagccuauuuaguagguaguaauaugacacaaagaguaguaauagcauugcuaguguuagcaguuggaccagcuuauagugcacauugcauaggaauaacagauagagacuuuauagaaggaguacacgggggaacuuggguaagugccacuuuagaacaagauaaauguguuacagugauggcgccagauaaaccaagucuggacauaaguuuggaaacaguagcgauugauagacccgcagaaguaagaaaaguuuguuauaaugcuguucuaacccauguuaaaauaaaugauaaaugcccuagcaccggagaagcccaucuagcagaagaaaaugaaggagauaacgcauguaaacgaacauacucagauagaggauggggcaacggauguggcuuguuuggaaaagguagcauaguagcaugcgcuaaauuuacaugcgcaaagucaaugucauuauuugaaguagaucaaacaaaaauacaauauguaauaagagcucaauuacacgugggugcaaaacaagaaaauuggaauacagacauaaagacacuaaaguucgacgcauuaaguggaucacaagagguagaauuuauaggguacggaaaagcgacuuuagagugucaaguccaaacagcaguagauuucgguaacucauacauagcagaaauggaaacugaaaguuggauaguagauagacaaugggcacaagacuugacacuaccuuggcaaucaggaagcggaggaguauggagagaaaugcaucauuuaguagaauuugaaccaccucaugcagcaacaauaagaguauuagcccuaggaaaccaagaaggaaguuuaaaaacagcacuaacaggagcuaugagaguaacaaaagauacaaaugacaacaaucuauacaaauuacacggaggacauguaagcugccggguaaaguugagcgcacuaacauuaaaaggaacgaguuauaaaauaugcacagauaaaauguucuuuguuaaaaauccuacagauaccggucauggaacaguaguaaugcaaguaaaaguaaguaaaggcgcucccuguagaauaccuguaauagucgcagacgauuuaaccgcagcaauaaauaaaggaauauuagucacgguaaacccaauagcgucaacaaaugaugaugaaguauuaauagaaguuaacccaccuuuuggagacaguuauauaauagucggaaggggugauaguagacuaacauaccaauggcauaaagaaggaagcucaauaggaaaauuauuuacucaaaccaugaaagguguagaaaggcuagcuguuaugggugacacagcaugggauuuuucaagcgcaggaggguucuuuacaucaguagguaaaggaauacauacaguauuuggaagugcauuucaaggauuauuuggugguuuaaauuggauaacaaaaguaauaaugggcgcaguuuuaauauggguagguauaaacacaagaaauaugacaaugucuaugaguaugauauuggucggaguaauaaugauguuuuuaucacuaggagugggugcagaucaagguugcgcuauuaauuuuggaaaauga

SEQ ID NO: 465 - RNA, 2028 nt, Artificial Sequence
  derived and/or modified CDS sequence (opt6) from YFV__NC_002031.1__SSIgE-prME (polyprotein: aa122-778)
auggacuggacauggauauuauuuuuaguagcagcagcaacaagaguacauucaguaacauuagucagaaagaacagaugguuauuacugaacguaacaagugaagacuuaggaaaaacauuuaguguaggcacaggaaauugcacaacaaauauacuugaagcaaaauauugguguccagauagcauggaauauaauuguccaaauuuaucaccuagagaggaacccgaugauauagauuguugguguuauggaguugaaaacgugcgaguagcauaugguaaaugugauagcgcaggaagaaguagaagaaguagaagggcaauagacuuaccaacucaugaaaaccauggauuaaaaacaagacaggaaaaauggaugacaggaagaaugggagaacgacaauuacagaaaauagaaagaugguucguaagaaauccauucuuugcaguaacagcauuaacaauagcauaucuaguuggaaguaacaugacucaaagaguaguaauagcauuguuaguacuagcaguaggaccggcuuauagcgcacauuguauagggauaacagauagagacuuuauagaaggagugcacgguggaacauggguuucagcaacgcuagagcaagauaaauguguaacgguaauggcgccggauaaaccaagccuugacauaucacuagaaacgguugcaaucgaucgaccagccgaaguaagaaaaguaugcuauaaugcggucuuaacacacguaaaaauaaaugauaaauguccuucaacgggagaagcacauuuagcagaagaaaacgaaggagacaacgcguguaaaagaacauauucagauaggggcuggggaaacggcugcgguuuauuuggaaaaggaaguauaguagcaugcgcaaaauuuacuugcgcaaaaaguaugaguuuauucgaaguugaucaaacaaagauacaauauguaauacgagcacaauuacauguaggugcaaagcaagaaaauuggaauacagacauaaaaacauugaaauuugacgcuuugaguggaucacaagaaguagaauuuauaggauacggaaaagcuacauuagaaugucaaguacaaacugcaguagauuuuggaaauucguauauagcagaaauggaaacugaaucauggauuguagauaggcaaugggcacaagauuuaaccuugccauggcaaagcggaagcggggguguauggcgggaaaugcaucauuuaguagaguucgaacccccacacgcggcuaccauaagaguacuagcauuaggaaaucaagaagggagucucaagacagcacucacaggugcaaugcgaguaacgaaagauacaaaugacaauaaucuauacaaacuacacggaggacauguaucuugcagaguaaaauuaucugcauuaacacuaaaagggacaaguuacaaaauuuguacagauaagauguucuuugucaaaaacccaacagacacgggacacggaacgguagucaugcaaguuaaaguaagcaaaggagcgccaugcagaauaccaguaaucgucgcagaugauuuaacagccgcaauaaauaaagguauauuaguaacgguaaauccaauagcgaguaccaaugaugaugaaguacuaauagaagugaacccaccauuuggugauagcuauauaauaguagggcgaggagauucaagauuaacauaucaauggcauaaagaagguaguaguauaggaaaauuauuuacacaaacuaugaaaggcguagaaagacuagcagucaugggagauacagcaugggauuucucaagugcaggcggauuuuucacaagcgucggaaaaggaauacauacaguguuugguagugcguuucaaggauuauucggaggacuaaauuggauaacgaaaguaauuaugggagcaguucucauaugggucggaauaaauacaaggaacaugacuaugaguaugagcaugauccuaguaggaguaauaaugauguuucuaagccuaggcguuggugcauga

SEQ ID NO: 466 - RNA, 2016 nt, Artificial Sequence
  derived and/or modified CDS sequence (opt6) from YFV__NC_002031.1__SSIgE-prME (polyprotein: aa126-778)
auggacuggacauggauauuauuuuuaguagcagcagcaacaagaguacauucaagaaagaacagaugguuauuacugaacguaacaagugaagacuuaggaaaaacauuuaguguaggcacaggaaauugcacaacaaauauacuugaagcaaaauauugguguccagauagcauggaauauaauuguccaaauuuaucaccuagagaggaacccgaugauauagauuguugguguuauggaguugaaaacgugcgaguagcauaugguaaaugugauagcgcaggaagaaguagaagaaguagaagggcaauagacuuaccaacucaugaaaaccauggauuaaaaacaagacaggaaaaauggaugacaggaagaaugggagaacgacaauuacagaaaauagaaagaugguucguaagaaauccauucuuugcaguaacagcauuaacaauagcauaucuaguuggaaguaacaugacucaaagaguaguaauagcauuguuaguacuagcaguaggaccggcuuauagcgcacauuguauagggauaacagauagagacuuuauagaaggagugcacgguggaacauggguuucagcaacgcuagagcaagauaaauguguaacgguaauggcgccggauaaaccaagccuugacauaucacuagaaacgguugcaaucgaucgaccagccgaaguaagaaaaguaugcuauaaugcggucuuaacacacguaaaaauaaaugauaaauguccuucaacgggagaagcacauuuagcagaagaaaacgaaggagacaacgcguguaaaagaacauauucagauaggggcuggggaaacggcugcgguuuauuuggaaaaggaaguauaguagcaugcgcaaaauuuacuugcgcaaaaaguaugaguuuauucgaaguugaucaaacaaagauacaauauguaauacgagcacaauuacauguaggugcaaagcaagaaaauuggaauacagacauaaaaacauugaaauuugacgcuuugaguggaucacaagaaguagaauuuauaggauacggaaaagcuacauuagaaugucaaguacaaacugcaguagauuuuggaaauucguauauagcagaaauggaaacugaaucauggauuguagauaggcaaugggcacaagauuuaaccuugccauggcaaagcggaagcggggguguauggcgggaaaugcaucauuuaguagaguucgaacccccacacgcggcuaccauaagaguacuagcauuaggaaaucaagaagggagucucaagacagcacucacaggugcaaugcgaguaacgaaagauacaaaugacaauaaucuauacaaacuacacggaggacauguaucuugcagaguaaaauuaucugcauuaacacuaaaagggacaaguuacaaaauuuguacagauaagauguucuuugucaaaaacccaacagacacgggacacggaacgguagucaugcaaguuaaaguaagcaaaggagcgccaugcagaauaccaguaaucgucgcagaugauuuaacagccgcaauaaauaaagguauauuaguaacgguaaauccaauagcgaguaccaaugaugaugaaguacuaauagaagugaacccaccauuuggugauagcuauauaauaguagggcgaggagauucaagauuaacauaucaauggcauaaagaagguaguaguauaggaaaauuauuuacacaaacuaugaaaggcguagaaagacuagcagucaugggagauacagcaugggauuucucaagugcaggcggauuuuucacaagcgucggaaaaggaauacauacaguguuugguagugcguuucaaggauuauucggaggacuaaauuggauaacgaaaguaauuaugggagcaguucucauaugggucggaauaaauacaaggaacaugacuaugaguaugagcaugauccuaguaggaguaauaaugauguuucuaagccuaggcguuggugcauga

SEQ ID NO: 467 - RNA, 2076 nt, Artificial Sequence
  derived and/or modified CDS sequence (opt6) from YFV__NC_002031.1__SSjev-prME-XX (polyprotein: aa122-788)
augggaaaaagaagugcaggaaguauaaugugguuggcaaguuuagcaguaguaauagcaugugcaggagcaguuacauuaguaagaaagaaucgauggcugcuuuuaaaugugacaucagaggauuuagggaaaacauuuucgguaggaacaggaaauuguacuacaaauauacuugaagcaaaauauuggugcccagacucuauggaauauaauuguccaaauuuaaguccuagagaagaaccugacgauauagauuguugguguuaugguguagaaaauguaagaguagcauacggcaaaugcgauagugcaggacguucuagacguucaaggagagccauagaucugcccacucacgaaaaucacggauugaaaacacgacaagaaaaauggaugacugggcgaaugggagaaagacaacuacagaaaauugaaagaugguucguuagaaauccauucuuugccguaacagcuuuaacaauagccuauuuaguagguaguaauaugacacaaagaguaguaauagcauugcuaguguuagcaguuggaccagcuuauagugcacauugcauaggaauaacagauagagacuuuauagaaggaguacacgggggaacuuggguaagugccacuuuagaacaagauaaauguguuacagugauggcgccagauaaaccaagucuggacauaaguuuggaaacaguagcgauugauagacccgcagaaguaagaaaaguuuguuauaaugcuguucuaacccauguuaaaauaaaugauaaaugcccuagcaccggagaagcccaucuagcagaagaaaaugaaggagauaacgcauguaaacgaacauacucagauagaggauggggcaacggauguggcuuguuuggaaaagguagcauaguagcaugcgcuaaauuuacaugcgcaaagucaaugucauuauuugaaguagaucaaacaaaaauacaauauguaauaagagcucaauuacacgugggugcaaaacaagaaaauuggaauacagacauaaagacacuaaaguucgacgcauuaaguggaucacaagagguagaauuuauaggguacggaaaagcgacuuuagagugucaaguccaaacagcaguagauuucgguaacucauacauagcagaaauggaaacugaaaguuggauaguagauagacaaugggcacaagacuugacacuaccuuggcaaucaggaagcggaggaguauggagagaaaugcaucauuuaguagaauuugaaccaccucaugcagcaacaauaagaguauuagcccuaggaaaccaagaaggaaguuuaaaaacagcacuaacaggagcuaugagaguaacaaaagauacaaaugacaacaaucuauacaaauuacacggaggacauguaagcugccggguaaaguugagcgcacuaacauuaaaaggaacgaguuauaaaauaugcacagauaaaauguucuuuguuaaaaauccuacagauaccggucauggaacaguaguaaugcaaguaaaaguaaguaaaggcgcucccuguagaauaccuguaauagucgcagacgauuuaaccgcagcaauaaauaaaggaauauuagucacgguaaacccaauagcgucaacaaaugaugaugaaguauuaauagaaguuaacccaccuuuuggagacaguuauauaauagucggaaggggugauaguagacuaacauaccaauggcauaaagaaggaagcucaauaggaaaauuauuuacucaaaccaugaaagguguagaaaggcuagcuguuaugggugacacagcaugggauuuuucaagcgcaggaggguucuuuacaucaguagguaaaggaauacauacaguauuuggaagugcauuucaaggauuauuuggugguuuaaauuggauaacaaaaguaauaaugggcgcaguuuuaauauggguagguauaaacacaagaaauaugacaaugucuaugaguaugauauuggucggaguaauaaugauguuuuuaucacuaggagugggugcagaucaagguugcgcuauuaauuuuggaaaauga

SEQ ID NO: 468 - RNA, 2064 nt, Artificial Sequence
  derived and/or modified CDS sequence (opt6) from YFV__NC_002031.1__SSjev-prME-XX (polyprotein: aa126-788)
augggaaaaagaagugcaggaaguauaaugugguuggcaaguuuagcaguaguaauagcaugugcaggagcaagaaagaaucgauggcugcuuuuaaaugugacaucagaggauuuagggaaaacauuuucgguaggaacaggaaauuguacuacaaauauacuugaagcaaaauauuggugcccagacucuauggaauauaauuguccaaauuuaaguccuagagaagaaccugacgauauagauuguugguguuaugguguagaaaauguaagaguagcauacggcaaaugcgauagugcaggacguucuagacguucaaggagagccauagaucugcccacucacgaaaaucacggauugaaaacacgacaagaaaaauggaugacugggcgaaugggagaaagacaacuacagaaaauugaaagaugguucguuagaaauccauucuuugccguaacagcuuuaacaauagccuauuuaguagguaguaauaugacacaaagaguaguaauagcauugcuaguguuagcaguuggaccagcuuauagugcacauugcauaggaauaacagauagagacuuuauagaaggaguacacgggggaacuuggguaagugccacuuuagaacaagauaaauguguuacagugauggcgccagauaaaccaagucuggacauaaguuuggaaacaguagcgauugauagacccgcagaaguaagaaaaguuuguuauaaugcuguucuaacccauguuaaaauaaaugauaaaugcccuagcaccggagaagcccaucuagcagaagaaaaugaaggagauaacgcauguaaacgaacauacucagauagaggauggggcaacggauguggcuuguuuggaaaagguagcauaguagcaugcgcuaaauuuacaugcgcaaagucaaugucauuauuugaaguagaucaaacaaaaauacaauauguaauaagagcucaauuacacgugggugcaaaacaagaaaauuggaauacagacauaaagacacuaaaguucgacgcauuaaguggaucacaagagguagaauuuauaggguacggaaaagcgacuuuagagugucaaguccaaacagcaguagauuucgguaacucauacauagcagaaauggaaacugaaaguuggauaguagauagacaaugggcacaagacuugacacuaccuuggcaaucaggaagcggaggaguauggagagaaaugcaucauuuaguagaauuugaaccaccucaugcagcaacaauaagaguauuagcccuaggaaaccaagaaggaaguuuaaaaacagcacuaacaggagcuaugagaguaacaaaagauacaaaugacaacaaucuauacaaauuacacggaggacauguaagcugccggguaaaguugagcgcacuaacauuaaaaggaacgaguuauaaaauaugcacagauaaaauguucuuuguuaaaaauccuacagauaccggucauggaacaguaguaaugcaaguaaaaguaaguaaaggcgcucccuguagaauaccuguaauagucgcagacgauuuaaccgcagcaauaaauaaaggaauauuagucacgguaaacccaauagcgucaacaaaugaugaugaaguauuaauagaaguuaacccaccuuuuggagacaguuauauaauagucggaaggggugauaguagacuaacauaccaauggcauaaagaaggaagcucaauaggaaaauuauuuacucaaaccaugaaagguguagaaaggcuagcuguuaugggugacacagcaugggauuuuucaagcgcaggaggguucuuuacaucaguagguaaaggaauacauacaguauuuggaagugcauuucaaggauuauuuggugguuuaaauuggauaacaaaaguaauaaugggcgcaguuuuaauauggguagguauaaacacaagaaauaugacaaugucuaugaguaugauauuggucggaguaauaaugauguuuuuaucacuaggagugggugcagaucaagguugcgcuauuaauuuuggaaaauga

SEQ ID NO: 469 - RNA, 2046 nt, Artificial Sequence
  derived and/or modified CDS sequence (opt6) from YFV__NC_002031.1__SSjev-prME (polyprotein: aa122-778)
augggaaaaagaagugcaggaaguauaaugugguuggcaaguuuagcaguaguaauagcaugugcaggagcaguaacauuagucagaaagaacagaugguuauuacugaacguaacaagugaagacuuaggaaaaacauuuaguguaggcacaggaaauugcacaacaaauauacuugaagcaaaauauugguguccagauagcauggaauauaauuguccaaauuuaucaccuagagaggaacccgaugauauagauuguugguguuauggaguugaaaacgugcgaguagcauaugguaaaugugauagcgcaggaagaaguagaagaaguagaagggcaauagacuuaccaacucaugaaaaccauggauuaaaaacaagacaggaaaaauggaugacaggaagaaugggagaacgacaauuacagaaaauagaaagaugguucguaagaaauccauucuuugcaguaacagcauuaacaauagcauaucuaguuggaaguaacaugacucaaagaguaguaauagcauuguuaguacuagcaguaggaccggcuuauagcgcacauuguauagggauaacagauagagacuuuauagaaggagugcacgguggaacauggguuucagcaacgcuagagcaagauaaauguguaacgguaauggcgccggauaaaccaagccuugacauaucacuagaaacgguugcaaucgaucgaccagccgaaguaagaaaaguaugcuauaaugcggucuuaacacacguaaaaauaaaugauaaauguccuucaacgggagaagcacauuuagcagaagaaaacgaaggagacaacgcguguaaaagaacauauucagauaggggcuggggaaacggcugcgguuuauuuggaaaaggaaguauaguagcaugcgcaaaauuuacuugcgcaaaaaguaugaguuuauucgaaguugaucaaacaaagauacaauauguaauacgagcacaauuacauguaggugcaaagcaagaaaauuggaauacagacauaaaaacauugaaauuugacgcuuugaguggaucacaagaaguagaauuuauaggauacggaaaagcuacauuagaaugucaaguacaaacugcaguagauuuuggaaauucguauauagcagaaauggaaacugaaucauggauuguagauaggcaaugggcacaagauuuaaccuugccauggcaaagcggaagcggggguguauggcgggaaaugcaucauuuaguagaguucgaacccccacacgcggcuaccauaagaguacuagcauuaggaaaucaagaagggagucucaagacagcacucacaggugcaaugcgaguaacgaaagauacaaaugacaauaaucuauacaaacuacacggaggacauguaucuugcagaguaaaauuaucugcauuaacacuaaaagggacaaguuacaaaauuuguacagauaagauguucuuugucaaaaacccaacagacacgggacacggaacgguagucaugcaaguuaaaguaagcaaaggagcgccaugcagaauaccaguaaucgucgcagaugauuuaacagccgcaauaaauaaagguauauuaguaacgguaaauccaauagcgaguaccaaugaugaugaaguacuaauagaagugaacccaccauuuggugauagcuauauaauaguagggcgaggagauucaagauuaacauaucaauggcauaaagaagguaguaguauaggaaaauuauuuacacaaacuaugaaaggcguagaaagacuagcagucaugggagauacagcaugggauuucucaagugcaggcggauuuuucacaagcgucggaaaaggaauacauacaguguuugguagugcguuucaaggauuauucggaggacuaaauuggauaacgaaaguaauuaugggagcaguucucauaugggucggaauaaauacaaggaacaugacuaugaguaugagcaugauccuaguaggaguaauaaugauguuucuaagccuaggcguuggugcauga

SEQ ID NO: 470 - RNA, 2034 nt, Artificial Sequence
  derived and/or modified CDS sequence (opt6) from YFV__NC_002031.1__SSjev-prME (polyprotein: aa126-778)
augggaaaaagaagugcaggaaguauaaugugguuggcaaguuuagcaguaguaauagcaugugcaggagcaagaaagaacagaugguuauuacugaacguaacaagugaagacuuaggaaaaacauuuaguguaggcacaggaaauugcacaacaaauauacuugaagcaaaauauugguguccagauagcauggaauauaauuguccaaauuuaucaccuagagaggaacccgaugauauagauuguugguguuauggaguugaaaacgugcgaguagcauaugguaaaugugauagcgcaggaagaaguagaagaaguagaagggcaauagacuuaccaacucaugaaaaccauggauuaaaaacaagacaggaaaaauggaugacaggaagaaugggagaacgacaauuacagaaaauagaaagaugguucguaagaaauccauucuuugcaguaacagcauuaacaauagcauaucuaguuggaaguaacaugacucaaagaguaguaauagcauuguuaguacuagcaguaggaccggcuuauagcgcacauuguauagggauaacagauagagacuuuauagaaggagugcacgguggaacauggguuucagcaacgcuagagcaagauaaauguguaacgguaauggcgccggauaaaccaagccuugacauaucacuagaaacgguugcaaucgaucgaccagccgaaguaagaaaaguaugcuauaaugcggucuuaacacacguaaaaauaaaugauaaauguccuucaacgggagaagcacauuuagcagaagaaaacgaaggagacaacgcguguaaaagaacauauucagauaggggcuggggaaacggcugcgguuuauuuggaaaaggaaguauaguagcaugcgcaaaauuuacuugcgcaaaaaguaugaguuuauucgaaguugaucaaacaaagauacaauauguaauacgagcacaauuacauguaggugcaaagcaagaaaauuggaauacagacauaaaaacauugaaauuugacgcuuugaguggaucacaagaaguagaauuuauaggauacggaaaagcuacauuagaaugucaaguacaaacugcaguagauuuuggaaauucguauauagcagaaauggaaacugaaucauggauuguagauaggcaaugggcacaagauuuaaccuugccauggcaaagcggaagcggggguguauggcgggaaaugcaucauuuaguagaguucgaacccccacacgcggcuaccauaagaguacuagcauuaggaaaucaagaagggagucucaagacagcacucacaggugcaaugcgaguaacgaaagauacaaaugacaauaaucuauacaaacuacacggaggacauguaucuugcagaguaaaauuaucugcauuaacacuaaaagggacaaguuacaaaauuuguacagauaagauguucuuugucaaaaacccaacagacacgggacacggaacgguagucaugcaaguuaaaguaagcaaaggagcgccaugcagaauaccaguaaucgucgcagaugauuuaacagccgcaauaaauaaagguauauuaguaacgguaaauccaauagcgaguaccaaugaugaugaaguacuaauagaagugaacccaccauuuggugauagcuauauaauaguagggcgaggagauucaagauuaacauaucaauggcauaaagaagguaguaguauaggaaaauuauuuacacaaacuaugaaaggcguagaaagacuagcagucaugggagauacagcaugggauuucucaagugcaggcggauuuuucacaagcgucggaaaaggaauacauacaguguuugguagugcguuucaaggauuauucggaggacuaaauuggauaacgaaaguaauuaugggagcaguucucauaugggucggaauaaauacaaggaacaugacuaugaguaugagcaugauccuaguaggaguaauaaugauguuucuaagccuaggcguuggugcauga

SEQ ID NO: 471 - RNA, 2094 nt, Artificial Sequence
  derived and/or modified CDS sequence (opt6) from YFV__NC_002031.1__SSjev(V2)-prME-XX (polyprotein: aa122-788)
augggaagaaaacaaaauaaaagaggaggaaaugaaggaaguauaaugugguuggcaaguuuagcaguaguaauagcaugugcaggagcaguuacauuaguaagaaagaaucgauggcugcuuuuaaaugugacaucagaggauuuagggaaaacauuuucgguaggaacaggaaauuguacuacaaauauacuugaagcaaaauauuggugcccagacucuauggaauauaauuguccaaauuuaaguccuagagaagaaccugacgauauagauuguugguguuaugguguagaaaauguaagaguagcauacggcaaaugcgauagugcaggacguucuagacguucaaggagagccauagaucugcccacucacgaaaaucacggauugaaaacacgacaagaaaaauggaugacugggcgaaugggagaaagacaacuacagaaaauugaaagaugguucguuagaaauccauucuuugccguaacagcuuuaacaauagccuauuuaguagguaguaauaugacacaaagaguaguaauagcauugcuaguguuagcaguuggaccagcuuauagugcacauugcauaggaauaacagauagagacuuuauagaaggaguacacgggggaacuuggguaagugccacuuuagaacaagauaaauguguuacagugauggcgccagauaaaccaagucuggacauaaguuuggaaacaguagcgauugauagacccgcagaaguaagaaaaguuuguuauaaugcuguucuaacccauguuaaaauaaaugauaaaugcccuagcaccggagaagcccaucuagcagaagaaaaugaaggagauaacgcauguaaacgaacauacucagauagaggauggggcaacggauguggcuuguuuggaaaagguagcauaguagcaugcgcuaaauuuacaugcgcaaagucaaugucauuauuugaaguagaucaaacaaaaauacaauauguaauaagagcucaauuacacgugggugcaaaacaagaaaauuggaauacagacauaaagacacuaaaguucgacgcauuaaguggaucacaagagguagaauuuauaggguacggaaaagcgacuuuagagugucaaguccaaacagcaguagauuucgguaacucauacauagcagaaauggaaacugaaaguuggauaguagauagacaaugggcacaagacuugacacuaccuuggcaaucaggaagcggaggaguauggagagaaaugcaucauuuaguagaauuugaaccaccucaugcagcaacaauaagaguauuagcccuaggaaaccaagaaggaaguuuaaaaacagcacuaacaggagcuaugagaguaacaaaagauacaaaugacaacaaucuauacaaauuacacggaggacauguaagcugccggguaaaguugagcgcacuaacauuaaaaggaacgaguuauaaaauaugcacagauaaaauguucuuuguuaaaaauccuacagauaccggucauggaacaguaguaaugcaaguaaaaguaaguaaaggcgcucccuguagaauaccuguaauagucgcagacgauuuaaccgcagcaauaaauaaaggaauauuagucacgguaaacccaauagcgucaacaaaugaugaugaaguauuaauagaaguuaacccaccuuuuggagacaguuauauaauagucggaaggggugauaguagacuaacauaccaauggcauaaagaaggaagcucaauaggaaaauuauuuacucaaaccaugaaagguguagaaaggcuagcuguuaugggugacacagcaugggauuuuucaagcgcaggaggguucuuuacaucaguagguaaaggaauacauacaguauuuggaagugcauuucaaggauuauuuggugguuuaaauuggauaacaaaaguaauaaugggcgcaguuuuaauauggguagguauaaacacaagaaauaugacaaugucuaugaguaugauauuggucggaguaauaaugauguuuuuaucacuaggagugggugcagaucaagguugcgcuauuaauuuuggaaaauga

SEQ ID NO: 472 - RNA, 2082 nt, Artificial Sequence
  derived and/or modified CDS sequence (opt6) from YFV__NC_002031.1__SSjev(V2)-prME-XX (polyprotein: aa126-788)
augggaagaaaacaaaauaaaagaggaggaaaugaaggaaguauaaugugguuggcaaguuuagcaguaguaauagcaugugcaggagcaagaaagaaucgauggcugcuuuuaaaugugacaucagaggauuuagggaaaacauuuucgguaggaacaggaaauuguacuacaaauauacuugaagcaaaauauuggugcccagacucuauggaauauaauuguccaaauuuaaguccuagagaagaaccugacgauauagauuguugguguuaugguguagaaaauguaagaguagcauacggcaaaugcgauagugcaggacguucuagacguucaaggagagccauagaucugcccacucacgaaaaucacggauugaaaacacgacaagaaaaauggaugacugggcgaaugggagaaagacaacuacagaaaauugaaagaugguucguuagaaauccauucuuugccguaacagcuuuaacaauagccuauuuaguagguaguaauaugacacaaagaguaguaauagcauugcuaguguuagcaguuggaccagcuuauagugcacauugcauaggaauaacagauagagacuuuauagaaggaguacacgggggaacuuggguaagugccacuuuagaacaagauaaauguguuacagugauggcgccagauaaaccaagucuggacauaaguuuggaaacaguagcgauugauagacccgcagaaguaagaaaaguuuguuauaaugcuguucuaacccauguuaaaauaaaugauaaaugcccuagcaccggagaagcccaucuagcagaagaaaaugaaggagauaacgcauguaaacgaacauacucagauagaggauggggcaacggauguggcuuguuuggaaaagguagcauaguagcaugcgcuaaauuuacaugcgcaaagucaaugucauuauuugaaguagaucaaacaaaaauacaauauguaauaagagcucaauuacacgugggugcaaaacaagaaaauuggaauacagacauaaagacacuaaaguucgacgcauuaaguggaucacaagagguagaauuuauaggguacggaaaagcgacuuuagagugucaaguccaaacagcaguagauuucgguaacucauacauagcagaaauggaaacugaaaguuggauaguagauagacaaugggcacaagacuugacacuaccuuggcaaucaggaagcggaggaguauggagagaaaugcaucauuuaguagaauuugaaccaccucaugcagcaacaauaagaguauuagcccuaggaaaccaagaaggaaguuuaaaaacagcacuaacaggagcuaugagaguaacaaaagauacaaaugacaacaaucuauacaaauuacacggaggacauguaagcugccggguaaaguugagcgcacuaacauuaaaaggaacgaguuauaaaauaugcacagauaaaauguucuuuguuaaaaauccuacagauaccggucauggaacaguaguaaugcaaguaaaaguaaguaaaggcgcucccuguagaauaccuguaauagucgcagacgauuuaaccgcagcaauaaauaaaggaauauuagucacgguaaacccaauagcgucaacaaaugaugaugaaguauuaauagaaguuaacccaccuuuuggagacaguuauauaauagucggaaggggugauaguagacuaacauaccaauggcauaaagaaggaagcucaauaggaaaauuauuuacucaaaccaugaaagguguagaaaggcuagcuguuaugggugacacagcaugggauuuuucaagcgcaggaggguucuuuacaucaguagguaaaggaauacauacaguauuuggaagugcauuucaaggauuauuuggugguuuaaauuggauaacaaaaguaauaaugggcgcaguuuuaauauggguagguauaaacacaagaaauaugacaaugucuaugaguaugauauuggucggaguaauaaugauguuuuuaucacuaggagugggugcagaucaagguugcgcuauuaauuuuggaaaauga

SEQ ID NO: 473 - RNA, 2064 nt, Artificial Sequence
  derived and/or modified CDS sequence (opt6) from YFV__NC_002031.1__SSjev(V2)-prME (polyprotein: aa122-778)
augggaagaaaacaaaauaaaagaggaggaaaugaaggaaguauaaugugguuggcaaguuuagcaguaguaauagcaugugcaggagcaguaacauuagucagaaagaacagaugguuauuacugaacguaacaagugaagacuuaggaaaaacauuuaguguaggcacaggaaauugcacaacaaauauacuugaagcaaaauauugguguccagauagcauggaauauaauuguccaaauuuaucaccuagagaggaacccgaugauauagauuguugguguuauggaguugaaaacgugcgaguagcauaugguaaaugugauagcgcaggaagaaguagaagaaguagaagggcaauagacuuaccaacucaugaaaaccauggauuaaaaacaagacaggaaaaauggaugacaggaagaaugggagaacgacaauuacagaaaauagaaagaugguucguaagaaauccauucuuugcaguaacagcauuaacaauagcauaucuaguuggaaguaacaugacucaaagaguaguaauagcauuguuaguacuagcaguaggaccggcuuauagcgcacauuguauagggauaacagauagagacuuuauagaaggagugcacgguggaacauggguuucagcaacgcuagagcaagauaaauguguaacgguaauggcgccggauaaaccaagccuugacauaucacuagaaacgguugcaaucgaucgaccagccgaaguaagaaaaguaugcuauaaugcggucuuaacacacguaaaaauaaaugauaaauguccuucaacgggagaagcacauuuagcagaagaaaacgaaggagacaacgcguguaaaagaacauauucagauaggggcuggggaaacggcugcgguuuauuuggaaaaggaaguauaguagcaugcgcaaaauuuacuugcgcaaaaaguaugaguuuauucgaaguugaucaaacaaagauacaauauguaauacgagcacaauuacauguaggugcaaagcaagaaaauuggaauacagacauaaaaacauugaaauuugacgcuuugaguggaucacaagaaguagaauuuauaggauacggaaaagcuacauuagaaugucaaguacaaacugcaguagauuuuggaaauucguauauagcagaaauggaaacugaaucauggauuguagauaggcaaugggcacaagauuuaaccuugccauggcaaagcggaagcggggguguauggcgggaaaugcaucauuuaguagaguucgaacccccacacgcggcuaccauaagaguacuagcauuaggaaaucaagaagggagucucaagacagcacucacaggugcaaugcgaguaacgaaagauacaaaugacaauaaucuauacaaacuacacggaggacauguaucuugcagaguaaaauuaucugcauuaacacuaaaagggacaaguuacaaaauuuguacagauaagauguucuuugucaaaaacccaacagacacgggacacggaacgguagucaugcaaguuaaaguaagcaaaggagcgccaugcagaauaccaguaaucgucgcagaugauuuaacagccgcaauaaauaaagguauauuaguaacgguaaauccaauagcgaguaccaaugaugaugaaguacuaauagaagugaacccaccauuuggugauagcuauauaauaguagggcgaggagauucaagauuaacauaucaauggcauaaagaagguaguaguauaggaaaauuauuuacacaaacuaugaaaggcguagaaagacuagcagucaugggagauacagcaugggauuucucaagugcaggcggauuuuucacaagcgucggaaaaggaauacauacaguguuugguagugcguuucaaggauuauucggaggacuaaauuggauaacgaaaguaauuaugggagcaguucucauaugggucggaauaaauacaaggaacaugacuaugaguaugagcaugauccuaguaggaguaauaaugauguuucuaagccuaggcguuggugcauga

SEQ ID NO: 474 - RNA, 2052 nt, Artificial Sequence
  derived and/or modified CDS sequence (opt6) from YFV__NC_002031.1__SSjev(V2)-prME (polyprotein: aa126-778)
augggaagaaaacaaaauaaaagaggaggaaaugaaggaaguauaaugugguuggcaaguuuagcaguaguaauagcaugugcaggagcaagaaagaacagaugguuauuacugaacguaacaagugaagacuuaggaaaaacauuuaguguaggcacaggaaauugcacaacaaauauacuugaagcaaaauauugguguccagauagcauggaauauaauuguccaaauuuaucaccuagagaggaacccgaugauauagauuguugguguuauggaguugaaaacgugcgaguagcauaugguaaaugugauagcgcaggaagaaguagaagaaguagaagggcaauagacuuaccaacucaugaaaaccauggauuaaaaacaagacaggaaaaauggaugacaggaagaaugggagaacgacaauuacagaaaauagaaagaugguucguaagaaauccauucuuugcaguaacagcauuaacaauagcauaucuaguuggaaguaacaugacucaaagaguaguaauagcauuguuaguacuagcaguaggaccggcuuauagcgcacauuguauagggauaacagauagagacuuuauagaaggagugcacgguggaacauggguuucagcaacgcuagagcaagauaaauguguaacgguaauggcgccggauaaaccaagccuugacauaucacuagaaacgguugcaaucgaucgaccagccgaaguaagaaaaguaugcuauaaugcggucuuaacacacguaaaaauaaaugauaaauguccuucaacgggagaagcacauuuagcagaagaaaacgaaggagacaacgcguguaaaagaacauauucagauaggggcuggggaaacggcugcgguuuauuuggaaaaggaaguauaguagcaugcgcaaaauuuacuugcgcaaaaaguaugaguuuauucgaaguugaucaaacaaagauacaauauguaauacgagcacaauuacauguaggugcaaagcaagaaaauuggaauacagacauaaaaacauugaaauuugacgcuuugaguggaucacaagaaguagaauuuauaggauacggaaaagcuacauuagaaugucaaguacaaacugcaguagauuuuggaaauucguauauagcagaaauggaaacugaaucauggauuguagauaggcaaugggcacaagauuuaaccuugccauggcaaagcggaagcggggguguauggcgggaaaugcaucauuuaguagaguucgaacccccacacgcggcuaccauaagaguacuagcauuaggaaaucaagaagggagucucaagacagcacucacaggugcaaugcgaguaacgaaagauacaaaugacaauaaucuauacaaacuacacggaggacauguaucuugcagaguaaaauuaucugcauuaacacuaaaagggacaaguuacaaaauuuguacagauaagauguucuuugucaaaaacccaacagacacgggacacggaacgguagucaugcaaguuaaaguaagcaaaggagcgccaugcagaauaccaguaaucgucgcagaugauuuaacagccgcaauaaauaaagguauauuaguaacgguaaauccaauagcgaguaccaaugaugaugaaguacuaauagaagugaacccaccauuuggugauagcuauauaauaguagggcgaggagauucaagauuaacauaucaauggcauaaagaagguaguaguauaggaaaauuauuuacacaaacuaugaaaggcguagaaagacuagcagucaugggagauacagcaugggauuucucaagugcaggcggauuuuucacaagcgucggaaaaggaauacauacaguguuugguagugcguuucaaggauuauucggaggacuaaauuggauaacgaaaguaauuaugggagcaguucucauaugggucggaauaaauacaaggaacaugacuaugaguaugagcaugauccuaguaggaguaauaaugauguuucuaagccuaggcguuggugcauga

SEQ ID NO: 475 - RNA, 2067 nt, Artificial Sequence
  derived and/or modified CDS sequence (opt6) from YFV__NC_002031.1__SSjev(V3)-prME-XX (polyprotein: aa122-788)
augaaugaagguucaauuaugugguuggcaucauuagcaguuguaauugcaugugcuggugcaguuacauuaguaagaaagaaucgauggcugcuuuuaaaugugacaucagaggauuuagggaaaacauuuucgguaggaacaggaaauuguacuacaaauauacuugaagcaaaauauuggugcccagacucuauggaauauaauuguccaaauuuaaguccuagagaagaaccugacgauauagauuguugguguuaugguguagaaaauguaagaguagcauacggcaaaugcgauagugcaggacguucuagacguucaaggagagccauagaucugcccacucacgaaaaucacggauugaaaacacgacaagaaaaauggaugacugggcgaaugggagaaagacaacuacagaaaauugaaagaugguucguuagaaauccauucuuugccguaacagcuuuaacaauagccuauuuaguagguaguaauaugacacaaagaguaguaauagcauugcuaguguuagcaguuggaccagcuuauagugcacauugcauaggaauaacagauagagacuuuauagaaggaguacacgggggaacuuggguaagugccacuuuagaacaagauaaauguguuacagugauggcgccagauaaaccaagucuggacauaaguuuggaaacaguagcgauugauagacccgcagaaguaagaaaaguuuguuauaaugcuguucuaacccauguuaaaauaaaugauaaaugcccuagcaccggagaagcccaucuagcagaagaaaaugaaggagauaacgcauguaaacgaacauacucagauagaggauggggcaacggauguggcuuguuuggaaaagguagcauaguagcaugcgcuaaauuuacaugcgcaaagucaaugucauuauuugaaguagaucaaacaaaaauacaauauguaauaagagcucaauuacacgugggugcaaaacaagaaaauuggaauacagacauaaagacacuaaaguucgacgcauuaaguggaucacaagagguagaauuuauaggguacggaaaagcgacuuuagagugucaaguccaaacagcaguagauuucgguaacucauacauagcagaaauggaaacugaaaguuggauaguagauagacaaugggcacaagacuugacacuaccuuggcaaucaggaagcggaggaguauggagagaaaugcaucauuuaguagaauuugaaccaccucaugcagcaacaauaagaguauuagcccuaggaaaccaagaaggaaguuuaaaaacagcacuaacaggagcuaugagaguaacaaaagauacaaaugacaacaaucuauacaaauuacacggaggacauguaagcugccggguaaaguugagcgcacuaacauuaaaaggaacgaguuauaaaauaugcacagauaaaauguucuuuguuaaaaauccuacagauaccggucauggaacaguaguaaugcaaguaaaaguaaguaaaggcgcucccuguagaauaccuguaauagucgcagacgauuuaaccgcagcaauaaauaaaggaauauuagucacgguaaacccaauagcgucaacaaaugaugaugaaguauuaauagaaguuaacccaccuuuuggagacaguuauauaauagucggaaggggugauaguagacuaacauaccaauggcauaaagaaggaagcucaauaggaaaauuauuuacucaaaccaugaaagguguagaaaggcuagcuguuaugggugacacagcaugggauuuuucaagcgcaggaggguucuuuacaucaguagguaaaggaauacauacaguauuuggaagugcauuucaaggauuauuuggugguuuaaauuggauaacaaaaguaauaaugggcgcaguuuuaauauggguagguauaaacacaagaaauaugacaaugucuaugaguaugauauuggucggaguaauaaugauguuuuuaucacuaggagugggugcagaucaagguugcgcuauuaauuuuggaaaauga

SEQ ID NO: 476 - RNA, 2055 nt, Artificial Sequence
  derived and/or modified CDS sequence (opt6) from YFV__NC_002031.1__SSjev(V3)-prME-XX (polyprotein: aa126-788)
augaaugaagguucaauuaugugguuggcaucauuagcaguuguaauugcaugugcuggugcaagaaagaaucgauggcugcuuuuaaaugugacaucagaggauuuagggaaaacauuuucgguaggaacaggaaauuguacuacaaauauacuugaagcaaaauauuggugcccagacucuauggaauauaauuguccaaauuuaaguccuagagaagaaccugacgauauagauuguugguguuaugguguagaaaauguaagaguagcauacggcaaaugcgauagugcaggacguucuagacguucaaggagagccauagaucugcccacucacgaaaaucacggauugaaaacacgacaagaaaaauggaugacugggcgaaugggagaaagacaacuacagaaaauugaaagaugguucguuagaaauccauucuuugccguaacagcuuuaacaauagccuauuuaguagguaguaauaugacacaaagaguaguaauagcauugcuaguguuagcaguuggaccagcuuauagugcacauugcauaggaauaacagauagagacuuuauagaaggaguacacgggggaacuuggguaagugccacuuuagaacaagauaaauguguuacagugauggcgccagauaaaccaagucuggacauaaguuuggaaacaguagcgauugauagacccgcagaaguaagaaaaguuuguuauaaugcuguucuaacccauguuaaaauaaaugauaaaugcccuagcaccggagaagcccaucuagcagaagaaaaugaaggagauaacgcauguaaacgaacauacucagauagaggauggggcaacggauguggcuuguuuggaaaagguagcauaguagcaugcgcuaaauuuacaugcgcaaagucaaugucauuauuugaaguagaucaaacaaaaauacaauauguaauaagagcucaauuacacgugggugcaaaacaagaaaauuggaauacagacauaaagacacuaaaguucgacgcauuaaguggaucacaagagguagaauuuauaggguacggaaaagcgacuuuagagugucaaguccaaacagcaguagauuucgguaacucauacauagcagaaauggaaacugaaaguuggauaguagauagacaaugggcacaagacuugacacuaccuuggcaaucaggaagcggaggaguauggagagaaaugcaucauuuaguagaauuugaaccaccucaugcagcaacaauaagaguauuagcccuaggaaaccaagaaggaaguuuaaaaacagcacuaacaggagcuaugagaguaacaaaagauacaaaugacaacaaucuauacaaauuacacggaggacauguaagcugccggguaaaguugagcgcacuaacauuaaaaggaacgaguuauaaaauaugcacagauaaaauguucuuuguuaaaaauccuacagauaccggucauggaacaguaguaaugcaaguaaaaguaaguaaaggcgcucccuguagaauaccuguaauagucgcagacgauuuaaccgcagcaauaaauaaaggaauauuagucacgguaaacccaauagcgucaacaaaugaugaugaaguauuaauagaaguuaacccaccuuuuggagacaguuauauaauagucggaaggggugauaguagacuaacauaccaauggcauaaagaaggaagcucaauaggaaaauuauuuacucaaaccaugaaagguguagaaaggcuagcuguuaugggugacacagcaugggauuuuucaagcgcaggaggguucuuuacaucaguagguaaaggaauacauacaguauuuggaagugcauuucaaggauuauuuggugguuuaaauuggauaacaaaaguaauaaugggcgcaguuuuaauauggguagguauaaacacaagaaauaugacaaugucuaugaguaugauauuggucggaguaauaaugauguuuuuaucacuaggagugggugcagaucaagguugcgcuauuaauuuuggaaaauga

SEQ ID NO: 477 - RNA, 2037 nt, Artificial Sequence
  derived and/or modified CDS sequence (opt6) from YFV__NC_002031.1__SSjev(V3)-prME (polyprotein: aa122-778)
augaaugaagguucaauuaugugguuggcaucauuagcaguuguaauugcaugugcuggugcaguaacauuagucagaaagaacagaugguuauuacugaacguaacaagugaagacuuaggaaaaacauuuaguguaggcacaggaaauugcacaacaaauauacuugaagcaaaauauugguguccagauagcauggaauauaauuguccaaauuuaucaccuagagaggaacccgaugauauagauuguugguguuauggaguugaaaacgugcgaguagcauaugguaaaugugauagcgcaggaagaaguagaagaaguagaagggcaauagacuuaccaacucaugaaaaccauggauuaaaaacaagacaggaaaaauggaugacaggaagaaugggagaacgacaauuacagaaaauagaaagaugguucguaagaaauccauucuuugcaguaacagcauuaacaauagcauaucuaguuggaaguaacaugacucaaagaguaguaauagcauuguuaguacuagcaguaggaccggcuuauagcgcacauuguauagggauaacagauagagacuuuauagaaggagugcacgguggaacauggguuucagcaacgcuagagcaagauaaauguguaacgguaauggcgccggauaaaccaagccuugacauaucacuagaaacgguugcaaucgaucgaccagccgaaguaagaaaaguaugcuauaaugcggucuuaacacacguaaaaauaaaugauaaauguccuucaacgggagaagcacauuuagcagaagaaaacgaaggagacaacgcguguaaaagaacauauucagauaggggcuggggaaacggcugcgguuuauuuggaaaaggaaguauaguagcaugcgcaaaauuuacuugcgcaaaaaguaugaguuuauucgaaguugaucaaacaaagauacaauauguaauacgagcacaauuacauguaggugcaaagcaagaaaauuggaauacagacauaaaaacauugaaauuugacgcuuugaguggaucacaagaaguagaauuuauaggauacggaaaagcuacauuagaaugucaaguacaaacugcaguagauuuuggaaauucguauauagcagaaauggaaacugaaucauggauuguagauaggcaaugggcacaagauuuaaccuugccauggcaaagcggaagcggggguguauggcgggaaaugcaucauuuaguagaguucgaacccccacacgcggcuaccauaagaguacuagcauuaggaaaucaagaagggagucucaagacagcacucacaggugcaaugcgaguaacgaaagauacaaaugacaauaaucuauacaaacuacacggaggacauguaucuugcagaguaaaauuaucugcauuaacacuaaaagggacaaguuacaaaauuuguacagauaagauguucuuugucaaaaacccaacagacacgggacacggaacgguagucaugcaaguuaaaguaagcaaaggagcgccaugcagaauaccaguaaucgucgcagaugauuuaacagccgcaauaaauaaagguauauuaguaacgguaaauccaauagcgaguaccaaugaugaugaaguacuaauagaagugaacccaccauuuggugauagcuauauaauaguagggcgaggagauucaagauuaacauaucaauggcauaaagaagguaguaguauaggaaaauuauuuacacaaacuaugaaaggcguagaaagacuagcagucaugggagauacagcaugggauuucucaagugcaggcggauuuuucacaagcgucggaaaaggaauacauacaguguuugguagugcguuucaaggauuauucggaggacuaaauuggauaacgaaaguaauuaugggagcaguucucauaugggucggaauaaauacaaggaacaugacuaugaguaugagcaugauccuaguaggaguaauaaugauguuucuaagccuaggcguuggugcauga

SEQ ID NO: 478 - RNA, 2025 nt, Artificial Sequence
  derived and/or modified CDS sequence (opt6) from YFV__NC_002031.1__SSjev(V3)-prME (polyprotein: aa126-778)
augaaugaagguucaauuaugugguuggcaucauuagcaguuguaauugcaugugcuggugcaagaaagaacagaugguuauuacugaacguaacaagugaagacuuaggaaaaacauuuaguguaggcacaggaaauugcacaacaaauauacuugaagcaaaauauugguguccagauagcauggaauauaauuguccaaauuuaucaccuagagaggaacccgaugauauagauuguugguguuauggaguugaaaacgugcgaguagcauaugguaaaugugauagcgcaggaagaaguagaagaaguagaagggcaauagacuuaccaacucaugaaaaccauggauuaaaaacaagacaggaaaaauggaugacaggaagaaugggagaacgacaauuacagaaaauagaaagaugguucguaagaaauccauucuuugcaguaacagcauuaacaauagcauaucuaguuggaaguaacaugacucaaagaguaguaauagcauuguuaguacuagcaguaggaccggcuuauagcgcacauuguauagggauaacagauagagacuuuauagaaggagugcacgguggaacauggguuucagcaacgcuagagcaagauaaauguguaacgguaauggcgccggauaaaccaagccuugacauaucacuagaaacgguugcaaucgaucgaccagccgaaguaagaaaaguaugcuauaaugcggucuuaacacacguaaaaauaaaugauaaauguccuucaacgggagaagcacauuuagcagaagaaaacgaaggagacaacgcguguaaaagaacauauucagauaggggcuggggaaacggcugcgguuuauuuggaaaaggaaguauaguagcaugcgcaaaauuuacuugcgcaaaaaguaugaguuuauucgaaguugaucaaacaaagauacaauauguaauacgagcacaauuacauguaggugcaaagcaagaaaauuggaauacagacauaaaaacauugaaauuugacgcuuugaguggaucacaagaaguagaauuuauaggauacggaaaagcuacauuagaaugucaaguacaaacugcaguagauuuuggaaauucguauauagcagaaauggaaacugaaucauggauuguagauaggcaaugggcacaagauuuaaccuugccauggcaaagcggaagcggggguguauggcgggaaaugcaucauuuaguagaguucgaacccccacacgcggcuaccauaagaguacuagcauuaggaaaucaagaagggagucucaagacagcacucacaggugcaaugcgaguaacgaaagauacaaaugacaauaaucuauacaaacuacacggaggacauguaucuugcagaguaaaauuaucugcauuaacacuaaaagggacaaguuacaaaauuuguacagauaagauguucuuugucaaaaacccaacagacacgggacacggaacgguagucaugcaaguuaaaguaagcaaaggagcgccaugcagaauaccaguaaucgucgcagaugauuuaacagccgcaauaaauaaagguauauuaguaacgguaaauccaauagcgaguaccaaugaugaugaaguacuaauagaagugaacccaccauuuggugauagcuauauaauaguagggcgaggagauucaagauuaacauaucaauggcauaaagaagguaguaguauaggaaaauuauuuacacaaacuaugaaaggcguagaaagacuagcagucaugggagauacagcaugggauuucucaagugcaggcggauuuuucacaagcgucggaaaaggaauacauacaguguuugguagugcguuucaaggauuauucggaggacuaaauuggauaacgaaaguaauuaugggagcaguucucauaugggucggaauaaauacaaggaacaugacuaugaguaugagcaugauccuaguaggaguaauaaugauguuucuaagccuaggcguuggugcauga

SEQ ID NO: 479 - RNA, 2076 nt, Artificial Sequence
  derived and/or modified CDS sequence (opt6) from YFV__NC_002031.1__SSjev(V4)-prME-XX (polyprotein: aa122-788)
augcuaggaucaaacucaggacaaagaguaguauucacaauacuacuacuacuaguagcaccagcauacucaguuacauuaguaagaaagaaucgauggcugcuuuuaaaugugacaucagaggauuuagggaaaacauuuucgguaggaacaggaaauuguacuacaaauauacuugaagcaaaauauuggugcccagacucuauggaauauaauuguccaaauuuaaguccuagagaagaaccugacgauauagauuguugguguuaugguguagaaaauguaagaguagcauacggcaaaugcgauagugcaggacguucuagacguucaaggagagccauagaucugcccacucacgaaaaucacggauugaaaacacgacaagaaaaauggaugacugggcgaaugggagaaagacaacuacagaaaauugaaagaugguucguuagaaauccauucuuugccguaacagcuuuaacaauagccuauuuaguagguaguaauaugacacaaagaguaguaauagcauugcuaguguuagcaguuggaccagcuuauagugcacauugcauaggaauaacagauagagacuuuauagaaggaguacacgggggaacuuggguaagugccacuuuagaacaagauaaauguguuacagugauggcgccagauaaaccaagucuggacauaaguuuggaaacaguagcgauugauagacccgcagaaguaagaaaaguuuguuauaaugcuguucuaacccauguuaaaauaaaugauaaaugcccuagcaccggagaagcccaucuagcagaagaaaaugaaggagauaacgcauguaaacgaacauacucagauagaggauggggcaacggauguggcuuguuuggaaaagguagcauaguagcaugcgcuaaauuuacaugcgcaaagucaaugucauuauuugaaguagaucaaacaaaaauacaauauguaauaagagcucaauuacacgugggugcaaaacaagaaaauuggaauacagacauaaagacacuaaaguucgacgcauuaaguggaucacaagagguagaauuuauaggguacggaaaagcgacuuuagagugucaaguccaaacagcaguagauuucgguaacucauacauagcagaaauggaaacugaaaguuggauaguagauagacaaugggcacaagacuugacacuaccuuggcaaucaggaagcggaggaguauggagagaaaugcaucauuuaguagaauuugaaccaccucaugcagcaacaauaagaguauuagcccuaggaaaccaagaaggaaguuuaaaaacagcacuaacaggagcuaugagaguaacaaaagauacaaaugacaacaaucuauacaaauuacacggaggacauguaagcugccggguaaaguugagcgcacuaacauuaaaaggaacgaguuauaaaauaugcacagauaaaauguucuuuguuaaaaauccuacagauaccggucauggaacaguaguaaugcaaguaaaaguaaguaaaggcgcucccuguagaauaccuguaauagucgcagacgauuuaaccgcagcaauaaauaaaggaauauuagucacgguaaacccaauagcgucaacaaaugaugaugaaguauuaauagaaguuaacccaccuuuuggagacaguuauauaauagucggaaggggugauaguagacuaacauaccaauggcauaaagaaggaagcucaauaggaaaauuauuuacucaaaccaugaaagguguagaaaggcuagcuguuaugggugacacagcaugggauuuuucaagcgcaggaggguucuuuacaucaguagguaaaggaauacauacaguauuuggaagugcauuucaaggauuauuuggugguuuaaauuggauaacaaaaguaauaaugggcgcaguuuuaauauggguagguauaaacacaagaaauaugacaaugucuaugaguaugauauuggucggaguaauaaugauguuuuuaucacuaggagugggugcagaucaagguugcgcuauuaauuuuggaaaauga

SEQ ID NO: 480 - RNA, 2064 nt, Artificial Sequence
  derived and/or modified CDS sequence (opt6) from YFV__NC_002031.1__SSjev(V4)-prME-XX (polyprotein: aa126-788)
augcuaggaucaaacucaggacaaagaguaguauucacaauacuacuacuacuaguagcaccagcauacucaagaaagaaucgauggcugcuuuuaaaugugacaucagaggauuuagggaaaacauuuucgguaggaacaggaaauuguacuacaaauauacuugaagcaaaauauuggugcccagacucuauggaauauaauuguccaaauuuaaguccuagagaagaaccugacgauauagauuguugguguuaugguguagaaaauguaagaguagcauacggcaaaugcgauagugcaggacguucuagacguucaaggagagccauagaucugcccacucacgaaaaucacggauugaaaacacgacaagaaaaauggaugacugggcgaaugggagaaagacaacuacagaaaauugaaagaugguucguuagaaauccauucuuugccguaacagcuuuaacaauagccuauuuaguagguaguaauaugacacaaagaguaguaauagcauugcuaguguuagcaguuggaccagcuuauagugcacauugcauaggaauaacagauagagacuuuauagaaggaguacacgggggaacuuggguaagugccacuuuagaacaagauaaauguguuacagugauggcgccagauaaaccaagucuggacauaaguuuggaaacaguagcgauugauagacccgcagaaguaagaaaaguuuguuauaaugcuguucuaacccauguuaaaauaaaugauaaaugcccuagcaccggagaagcccaucuagcagaagaaaaugaaggagauaacgcauguaaacgaacauacucagauagaggauggggcaacggauguggcuuguuuggaaaagguagcauaguagcaugcgcuaaauuuacaugcgcaaagucaaugucauuauuugaaguagaucaaacaaaaauacaauauguaauaagagcucaauuacacgugggugcaaaacaagaaaauuggaauacagacauaaagacacuaaaguucgacgcauuaaguggaucacaagagguagaauuuauaggguacggaaaagcgacuuuagagugucaaguccaaacagcaguagauuucgguaacucauacauagcagaaauggaaacugaaaguuggauaguagauagacaaugggcacaagacuugacacuaccuuggcaaucaggaagcggaggaguauggagagaaaugcaucauuuaguagaauuugaaccaccucaugcagcaacaauaagaguauuagcccuaggaaaccaagaaggaaguuuaaaaacagcacuaacaggagcuaugagaguaacaaaagauacaaaugacaacaaucuauacaaauuacacggaggacauguaagcugccggguaaaguugagcgcacuaacauuaaaaggaacgaguuauaaaauaugcacagauaaaauguucuuuguuaaaaauccuacagauaccggucauggaacaguaguaaugcaaguaaaaguaaguaaaggcgcucccuguagaauaccuguaauagucgcagacgauuuaaccgcagcaauaaauaaaggaauauuagucacgguaaacccaauagcgucaacaaaugaugaugaaguauuaauagaaguuaacccaccuuuuggagacaguuauauaauagucggaaggggugauaguagacuaacauaccaauggcauaaagaaggaagcucaauaggaaaauuauuuacucaaaccaugaaagguguagaaaggcuagcuguuaugggugacacagcaugggauuuuucaagcgcaggaggguucuuuacaucaguagguaaaggaauacauacaguauuuggaagugcauuucaaggauuauuuggugguuuaaauuggauaacaaaaguaauaaugggcgcaguuuuaauauggguagguauaaacacaagaaauaugacaaugucuaugaguaugauauuggucggaguaauaaugauguuuuuaucacuaggagugggugcagaucaagguugcgcuauuaauuuuggaaaauga

SEQ ID NO: 481 - RNA, 2046 nt, Artificial Sequence
  derived and/or modified CDS sequence (opt6) from YFV__NC_002031.1__SSjev(V4)-prME (polyprotein: aa122-778)
augcuaggaucaaacucaggacaaagaguaguauucacaauacuacuacuacuaguagcaccagcauacucaguaacauuagucagaaagaacagaugguuauuacugaacguaacaagugaagacuuaggaaaaacauuuaguguaggcacaggaaauugcacaacaaauauacuugaagcaaaauauugguguccagauagcauggaauauaauuguccaaauuuaucaccuagagaggaacccgaugauauagauuguugguguuauggaguugaaaacgugcgaguagcauaugguaaaugugauagcgcaggaagaaguagaagaaguagaagggcaauagacuuaccaacucaugaaaaccauggauuaaaaacaagacaggaaaaauggaugacaggaagaaugggagaacgacaauuacagaaaauagaaagaugguucguaagaaauccauucuuugcaguaacagcauuaacaauagcauaucuaguuggaaguaacaugacucaaagaguaguaauagcauuguuaguacuagcaguaggaccggcuuauagcgcacauuguauagggauaacagauagagacuuuauagaaggagugcacgguggaacauggguuucagcaacgcuagagcaagauaaauguguaacgguaauggcgccggauaaaccaagccuugacauaucacuagaaacgguugcaaucgaucgaccagccgaaguaagaaaaguaugcuauaaugcggucuuaacacacguaaaaauaaaugauaaauguccuucaacgggagaagcacauuuagcagaagaaaacgaaggagacaacgcguguaaaagaacauauucagauaggggcuggggaaacggcugcgguuuauuuggaaaaggaaguauaguagcaugcgcaaaauuuacuugcgcaaaaaguaugaguuuauucgaaguugaucaaacaaagauacaauauguaauacgagcacaauuacauguaggugcaaagcaagaaaauuggaauacagacauaaaaacauugaaauuugacgcuuugaguggaucacaagaaguagaauuuauaggauacggaaaagcuacauuagaaugucaaguacaaacugcaguagauuuuggaaauucguauauagcagaaauggaaacugaaucauggauuguagauaggcaaugggcacaagauuuaaccuugccauggcaaagcggaagcggggguguauggcgggaaaugcaucauuuaguagaguucgaacccccacacgcggcuaccauaagaguacuagcauuaggaaaucaagaagggagucucaagacagcacucacaggugcaaugcgaguaacgaaagauacaaaugacaauaaucuauacaaacuacacggaggacauguaucuugcagaguaaaauuaucugcauuaacacuaaaagggacaaguuacaaaauuuguacagauaagauguucuuugucaaaaacccaacagacacgggacacggaacgguagucaugcaaguuaaaguaagcaaaggagcgccaugcagaauaccaguaaucgucgcagaugauuuaacagccgcaauaaauaaagguauauuaguaacgguaaauccaauagcgaguaccaaugaugaugaaguacuaauagaagugaacccaccauuuggugauagcuauauaauaguagggcgaggagauucaagauuaacauaucaauggcauaaagaagguaguaguauaggaaaauuauuuacacaaacuaugaaaggcguagaaagacuagcagucaugggagauacagcaugggauuucucaagugcaggcggauuuuucacaagcgucggaaaaggaauacauacaguguuugguagugcguuucaaggauuauucggaggacuaaauuggauaacgaaaguaauuaugggagcaguucucauaugggucggaauaaauacaaggaacaugacuaugaguaugagcaugauccuaguaggaguaauaaugauguuucuaagccuaggcguuggugcauga

SEQ ID NO: 482 - RNA, 2034 nt, Artificial Sequence
  derived and/or modified CDS sequence (opt6) from YFV__NC_002031.1__SSjev(V4)-prME (polyprotein: aa126-778)
augcuaggaucaaacucaggacaaagaguaguauucacaauacuacuacuacuaguagcaccagcauacucaagaaagaacagaugguuauuacugaacguaacaagugaagacuuaggaaaaacauuuaguguaggcacaggaaauugcacaacaaauauacuugaagcaaaauauugguguccagauagcauggaauauaauuguccaaauuuaucaccuagagaggaacccgaugauauagauuguugguguuauggaguugaaaacgugcgaguagcauaugguaaaugugauagcgcaggaagaaguagaagaaguagaagggcaauagacuuaccaacucaugaaaaccauggauuaaaaacaagacaggaaaaauggaugacaggaagaaugggagaacgacaauuacagaaaauagaaagaugguucguaagaaauccauucuuugcaguaacagcauuaacaauagcauaucuaguuggaaguaacaugacucaaagaguaguaauagcauuguuaguacuagcaguaggaccggcuuauagcgcacauuguauagggauaacagauagagacuuuauagaaggagugcacgguggaacauggguuucagcaacgcuagagcaagauaaauguguaacgguaauggcgccggauaaaccaagccuugacauaucacuagaaacgguugcaaucgaucgaccagccgaaguaagaaaaguaugcuauaaugcggucuuaacacacguaaaaauaaaugauaaauguccuucaacgggagaagcacauuuagcagaagaaaacgaaggagacaacgcguguaaaagaacauauucagauaggggcuggggaaacggcugcgguuuauuuggaaaaggaaguauaguagcaugcgcaaaauuuacuugcgcaaaaaguaugaguuuauucgaaguugaucaaacaaagauacaauauguaauacgagcacaauuacauguaggugcaaagcaagaaaauuggaauacagacauaaaaacauugaaauuugacgcuuugaguggaucacaagaaguagaauuuauaggauacggaaaagcuacauuagaaugucaaguacaaacugcaguagauuuuggaaauucguauauagcagaaauggaaacugaaucauggauuguagauaggcaaugggcacaagauuuaaccuugccauggcaaagcggaagcggggguguauggcgggaaaugcaucauuuaguagaguucgaacccccacacgcggcuaccauaagaguacuagcauuaggaaaucaagaagggagucucaagacagcacucacaggugcaaugcgaguaacgaaagauacaaaugacaauaaucuauacaaacuacacggaggacauguaucuugcagaguaaaauuaucugcauuaacacuaaaagggacaaguuacaaaauuuguacagauaagauguucuuugucaaaaacccaacagacacgggacacggaacgguagucaugcaaguuaaaguaagcaaaggagcgccaugcagaauaccaguaaucgucgcagaugauuuaacagccgcaauaaauaaagguauauuaguaacgguaaauccaauagcgaguaccaaugaugaugaaguacuaauagaagugaacccaccauuuggugauagcuauauaauaguagggcgaggagauucaagauuaacauaucaauggcauaaagaagguaguaguauaggaaaauuauuuacacaaacuaugaaaggcguagaaagacuagcagucaugggagauacagcaugggauuucucaagugcaggcggauuuuucacaagcgucggaaaaggaauacauacaguguuugguagugcguuucaaggauuauucggaggacuaaauuggauaacgaaaguaauuaugggagcaguucucauaugggucggaauaaauacaaggaacaugacuaugaguaugagcaugauccuaguaggaguaauaaugauguuucuaagccuaggcguuggugcauga

SEQ ID NO: 483 - RNA, 2049 nt, Artificial Sequence
  derived and/or modified CDS sequence (opt6) from YFV__NC_002031.1__SSjev(V5)-prME-XX (polyprotein: aa122-788)
augugguuaguuucauuagcaauugugacugcaugugcaggugcaguuacauuaguaagaaagaaucgauggcugcuuuuaaaugugacaucagaggauuuagggaaaacauuuucgguaggaacaggaaauuguacuacaaauauacuugaagcaaaauauuggugcccagacucuauggaauauaauuguccaaauuuaaguccuagagaagaaccugacgauauagauuguugguguuaugguguagaaaauguaagaguagcauacggcaaaugcgauagugcaggacguucuagacguucaaggagagccauagaucugcccacucacgaaaaucacggauugaaaacacgacaagaaaaauggaugacugggcgaaugggagaaagacaacuacagaaaauugaaagaugguucguuagaaauccauucuuugccguaacagcuuuaacaauagccuauuuaguagguaguaauaugacacaaagaguaguaauagcauugcuaguguuagcaguuggaccagcuuauagugcacauugcauaggaauaacagauagagacuuuauagaaggaguacacgggggaacuuggguaagugccacuuuagaacaagauaaauguguuacagugauggcgccagauaaaccaagucuggacauaaguuuggaaacaguagcgauugauagacccgcagaaguaagaaaaguuuguuauaaugcuguucuaacccauguuaaaauaaaugauaaaugcccuagcaccggagaagcccaucuagcagaagaaaaugaaggagauaacgcauguaaacgaacauacucagauagaggauggggcaacggauguggcuuguuuggaaaagguagcauaguagcaugcgcuaaauuuacaugcgcaaagucaaugucauuauuugaaguagaucaaacaaaaauacaauauguaauaagagcucaauuacacgugggugcaaaacaagaaaauuggaauacagacauaaagacacuaaaguucgacgcauuaaguggaucacaagagguagaauuuauaggguacggaaaagcgacuuuagagugucaaguccaaacagcaguagauuucgguaacucauacauagcagaaauggaaacugaaaguuggauaguagauagacaaugggcacaagacuugacacuaccuuggcaaucaggaagcggaggaguauggagagaaaugcaucauuuaguagaauuugaaccaccucaugcagcaacaauaagaguauuagcccuaggaaaccaagaaggaaguuuaaaaacagcacuaacaggagcuaugagaguaacaaaagauacaaaugacaacaaucuauacaaauuacacggaggacauguaagcugccggguaaaguugagcgcacuaacauuaaaaggaacgaguuauaaaauaugcacagauaaaauguucuuuguuaaaaauccuacagauaccggucauggaacaguaguaaugcaaguaaaaguaaguaaaggcgcucccuguagaauaccuguaauagucgcagacgauuuaaccgcagcaauaaauaaaggaauauuagucacgguaaacccaauagcgucaacaaaugaugaugaaguauuaauagaaguuaacccaccuuuuggagacaguuauauaauagucggaaggggugauaguagacuaacauaccaauggcauaaagaaggaagcucaauaggaaaauuauuuacucaaaccaugaaagguguagaaaggcuagcuguuaugggugacacagcaugggauuuuucaagcgcaggaggguucuuuacaucaguagguaaaggaauacauacaguauuuggaagugcauuucaaggauuauuuggugguuuaaauuggauaacaaaaguaauaaugggcgcaguuuuaauauggguagguauaaacacaagaaauaugacaaugucuaugaguaugauauuggucggaguaauaaugauguuuuuaucacuaggagugggugcagaucaagguugcgcuauuaauuuuggaaaauga

SEQ ID NO: 484 - RNA, 2037 nt, Artificial Sequence
  derived and/or modified CDS sequence (opt6) from YFV__NC_002031.1__SSjev(V5)-prME-XX (polyprotein: aa126-788)
augugguuaguuucauuagcaauugugacugcaugugcaggugcaagaaagaaucgauggcugcuuuuaaaugugacaucagaggauuuagggaaaacauuuucgguaggaacaggaaauuguacuacaaauauacuugaagcaaaauauuggugcccagacucuauggaauauaauuguccaaauuuaaguccuagagaagaaccugacgauauagauuguugguguuaugguguagaaaauguaagaguagcauacggcaaaugcgauagugcaggacguucuagacguucaaggagagccauagaucugcccacucacgaaaaucacggauugaaaacacgacaagaaaaauggaugacugggcgaaugggagaaagacaacuacagaaaauugaaagaugguucguuagaaauccauucuuugccguaacagcuuuaacaauagccuauuuaguagguaguaauaugacacaaagaguaguaauagcauugcuaguguuagcaguuggaccagcuuauagugcacauugcauaggaauaacagauagagacuuuauagaaggaguacacgggggaacuuggguaagugccacuuuagaacaagauaaauguguuacagugauggcgccagauaaaccaagucuggacauaaguuuggaaacaguagcgauugauagacccgcagaaguaagaaaaguuuguuauaaugcuguucuaacccauguuaaaauaaaugauaaaugcccuagcaccggagaagcccaucuagcagaagaaaaugaaggagauaacgcauguaaacgaacauacucagauagaggauggggcaacggauguggcuuguuuggaaaagguagcauaguagcaugcgcuaaauuuacaugcgcaaagucaaugucauuauuugaaguagaucaaacaaaaauacaauauguaauaagagcucaauuacacgugggugcaaaacaagaaaauuggaauacagacauaaagacacuaaaguucgacgcauuaaguggaucacaagagguagaauuuauaggguacggaaaagcgacuuuagagugucaaguccaaacagcaguagauuucgguaacucauacauagcagaaauggaaacugaaaguuggauaguagauagacaaugggcacaagacuugacacuaccuuggcaaucaggaagcggaggaguauggagagaaaugcaucauuuaguagaauuugaaccaccucaugcagcaacaauaagaguauuagcccuaggaaaccaagaaggaaguuuaaaaacagcacuaacaggagcuaugagaguaacaaaagauacaaaugacaacaaucuauacaaauuacacggaggacauguaagcugccggguaaaguugagcgcacuaacauuaaaaggaacgaguuauaaaauaugcacagauaaaauguucuuuguuaaaaauccuacagauaccggucauggaacaguaguaaugcaaguaaaaguaaguaaaggcgcucccuguagaauaccuguaauagucgcagacgauuuaaccgcagcaauaaauaaaggaauauuagucacgguaaacccaauagcgucaacaaaugaugaugaaguauuaauagaaguuaacccaccuuuuggagacaguuauauaauagucggaaggggugauaguagacuaacauaccaauggcauaaagaaggaagcucaauaggaaaauuauuuacucaaaccaugaaagguguagaaaggcuagcuguuaugggugacacagcaugggauuuuucaagcgcaggaggguucuuuacaucaguagguaaaggaauacauacaguauuuggaagugcauuucaaggauuauuuggugguuuaaauuggauaacaaaaguaauaaugggcgcaguuuuaauauggguagguauaaacacaagaaauaugacaaugucuaugaguaugauauuggucggaguaauaaugauguuuuuaucacuaggagugggugcagaucaagguugcgcuauuaauuuuggaaaauga

SEQ ID NO: 485 - RNA, 2019 nt, Artificial Sequence
  derived and/or modified CDS sequence (opt6) from YFV__NC_002031.1__SSjev(V5)-prME (polyprotein: aa122-778)
augugguuaguuucauuagcaauugugacugcaugugcaggugcaguaacauuagucagaaagaacagaugguuauuacugaacguaacaagugaagacuuaggaaaaacauuuaguguaggcacaggaaauugcacaacaaauauacuugaagcaaaauauugguguccagauagcauggaauauaauuguccaaauuuaucaccuagagaggaacccgaugauauagauuguugguguuauggaguugaaaacgugcgaguagcauaugguaaaugugauagcgcaggaagaaguagaagaaguagaagggcaauagacuuaccaacucaugaaaaccauggauuaaaaacaagacaggaaaaauggaugacaggaagaaugggagaacgacaauuacagaaaauagaaagaugguucguaagaaauccauucuuugcaguaacagcauuaacaauagcauaucuaguuggaaguaacaugacucaaagaguaguaauagcauuguuaguacuagcaguaggaccggcuuauagcgcacauuguauagggauaacagauagagacuuuauagaaggagugcacgguggaacauggguuucagcaacgcuagagcaagauaaauguguaacgguaauggcgccggauaaaccaagccuugacauaucacuagaaacgguugcaaucgaucgaccagccgaaguaagaaaaguaugcuauaaugcggucuuaacacacguaaaaauaaaugauaaauguccuucaacgggagaagcacauuuagcagaagaaaacgaaggagacaacgcguguaaaagaacauauucagauaggggcuggggaaacggcugcgguuuauuuggaaaaggaaguauaguagcaugcgcaaaauuuacuugcgcaaaaaguaugaguuuauucgaaguugaucaaacaaagauacaauauguaauacgagcacaauuacauguaggugcaaagcaagaaaauuggaauacagacauaaaaacauugaaauuugacgcuuugaguggaucacaagaaguagaauuuauaggauacggaaaagcuacauuagaaugucaaguacaaacugcaguagauuuuggaaauucguauauagcagaaauggaaacugaaucauggauuguagauaggcaaugggcacaagauuuaaccuugccauggcaaagcggaagcggggguguauggcgggaaaugcaucauuuaguagaguucgaacccccacacgcggcuaccauaagaguacuagcauuaggaaaucaagaagggagucucaagacagcacucacaggugcaaugcgaguaacgaaagauacaaaugacaauaaucuauacaaacuacacggaggacauguaucuugcagaguaaaauuaucugcauuaacacuaaaagggacaaguuacaaaauuuguacagauaagauguucuuugucaaaaacccaacagacacgggacacggaacgguagucaugcaaguuaaaguaagcaaaggagcgccaugcagaauaccaguaaucgucgcagaugauuuaacagccgcaauaaauaaagguauauuaguaacgguaaauccaauagcgaguaccaaugaugaugaaguacuaauagaagugaacccaccauuuggugauagcuauauaauaguagggcgaggagauucaagauuaacauaucaauggcauaaagaagguaguaguauaggaaaauuauuuacacaaacuaugaaaggcguagaaagacuagcagucaugggagauacagcaugggauuucucaagugcaggcggauuuuucacaagcgucggaaaaggaauacauacaguguuugguagugcguuucaaggauuauucggaggacuaaauuggauaacgaaaguaauuaugggagcaguucucauaugggucggaauaaauacaaggaacaugacuaugaguaugagcaugauccuaguaggaguaauaaugauguuucuaagccuaggcguuggugcauga

SEQ ID NO: 486 - RNA, 2007 nt, Artificial Sequence
  derived and/or modified CDS sequence (opt6) from YFV__NC_002031.1__SSjev(V5)-prME (polyprotein: aa126-778)
augugguuaguuucauuagcaauugugacugcaugugcaggugcaagaaagaacagaugguuauuacugaacguaacaagugaagacuuaggaaaaacauuuaguguaggcacaggaaauugcacaacaaauauacuugaagcaaaauauugguguccagauagcauggaauauaauuguccaaauuuaucaccuagagaggaacccgaugauauagauuguugguguuauggaguugaaaacgugcgaguagcauaugguaaaugugauagcgcaggaagaaguagaagaaguagaagggcaauagacuuaccaacucaugaaaaccauggauuaaaaacaagacaggaaaaauggaugacaggaagaaugggagaacgacaauuacagaaaauagaaagaugguucguaagaaauccauucuuugcaguaacagcauuaacaauagcauaucuaguuggaaguaacaugacucaaagaguaguaauagcauuguuaguacuagcaguaggaccggcuuauagcgcacauuguauagggauaacagauagagacuuuauagaaggagugcacgguggaacauggguuucagcaacgcuagagcaagauaaauguguaacgguaauggcgccggauaaaccaagccuugacauaucacuagaaacgguugcaaucgaucgaccagccgaaguaagaaaaguaugcuauaaugcggucuuaacacacguaaaaauaaaugauaaauguccuucaacgggagaagcacauuuagcagaagaaaacgaaggagacaacgcguguaaaagaacauauucagauaggggcuggggaaacggcugcgguuuauuuggaaaaggaaguauaguagcaugcgcaaaauuuacuugcgcaaaaaguaugaguuuauucgaaguugaucaaacaaagauacaauauguaauacgagcacaauuacauguaggugcaaagcaagaaaauuggaauacagacauaaaaacauugaaauuugacgcuuugaguggaucacaagaaguagaauuuauaggauacggaaaagcuacauuagaaugucaaguacaaacugcaguagauuuuggaaauucguauauagcagaaauggaaacugaaucauggauuguagauaggcaaugggcacaagauuuaaccuugccauggcaaagcggaagcggggguguauggcgggaaaugcaucauuuaguagaguucgaacccccacacgcggcuaccauaagaguacuagcauuaggaaaucaagaagggagucucaagacagcacucacaggugcaaugcgaguaacgaaagauacaaaugacaauaaucuauacaaacuacacggaggacauguaucuugcagaguaaaauuaucugcauuaacacuaaaagggacaaguuacaaaauuuguacagauaagauguucuuugucaaaaacccaacagacacgggacacggaacgguagucaugcaaguuaaaguaagcaaaggagcgccaugcagaauaccaguaaucgucgcagaugauuuaacagccgcaauaaauaaagguauauuaguaacgguaaauccaauagcgaguaccaaugaugaugaaguacuaauagaagugaacccaccauuuggugauagcuauauaauaguagggcgaggagauucaagauuaacauaucaauggcauaaagaagguaguaguauaggaaaauuauuuacacaaacuaugaaaggcguagaaagacuagcagucaugggagauacagcaugggauuucucaagugcaggcggauuuuucacaagcgucggaaaaggaauacauacaguguuugguagugcguuucaaggauuauucggaggacuaaauuggauaacgaaaguaauuaugggagcaguucucauaugggucggaauaaauacaaggaacaugacuaugaguaugagcaugauccuaguaggaguaauaaugauguuucuaagccuaggcguuggugcauga

SEQ ID NO: 487 - RNA, 2037 nt, Artificial Sequence
  derived and/or modified CDS sequence (opt6) from YFV__NC_002031.1__SSIgE-prMEdelstem_TM-JEV (polyprotein: aa122-680)
auggacuggacauggauauuauuuuuaguagcagcagcaacaagaguacauucaguaacauuagucagaaagaacagaugguuauuacugaacguaacaagugaagacuuaggaaaaacauuuaguguaggcacaggaaauugcacaacaaauauacuugaagcaaaauauugguguccagauagcauggaauauaauuguccaaauuuaucaccuagagaggaacccgaugauauagauuguugguguuauggaguugaaaacgugcgaguagcauaugguaaaugugauagcgcaggaagaaguagaagaaguagaagggcaauagacuuaccaacucaugaaaaccauggauuaaaaacaagacaggaaaaauggaugacaggaagaaugggagaacgacaauuacagaaaauagaaagaugguucguaagaaauccauucuuugcaguaacagcauuaacaauagcauaucuaguuggaaguaacaugacucaaagaguaguaauagcauuguuaguacuagcaguaggaccggcuuauagcgcacauuguauagggauaacagauagagacuuuauagaaggagugcacgguggaacauggguuucagcaacgcuagagcaagauaaauguguaacgguaauggcgccggauaaaccaagccuugacauaucacuagaaacgguugcaaucgaucgaccagccgaaguaagaaaaguaugcuauaaugcggucuuaacacacguaaaaauaaaugauaaauguccuucaacgggagaagcacauuuagcagaagaaaacgaaggagacaacgcguguaaaagaacauauucagauaggggcuggggaaacggcugcgguuuauuuggaaaaggaaguauaguagcaugcgcaaaauuuacuugcgcaaaaaguaugaguuuauucgaaguugaucaaacaaagauacaauauguaauacgagcacaauuacauguaggugcaaagcaagaaaauuggaauacagacauaaaaacauugaaauuugacgcuuugaguggaucacaagaaguagaauuuauaggauacggaaaagcuacauuagaaugucaaguacaaacugcaguagauuuuggaaauucguauauagcagaaauggaaacugaaucauggauuguagauaggcaaugggcacaagauuuaaccuugccauggcaaagcggaagcggggguguauggcgggaaaugcaucauuuaguagaguucgaacccccacacgcggcuaccauaagaguacuagcauuaggaaaucaagaagggagucucaagacagcacucacaggugcaaugcgaguaacgaaagauacaaaugacaauaaucuauacaaacuacacggaggacauguaucuugcagaguaaaauuaucugcauuaacacuaaaagggacaaguuacaaaauuuguacagauaagauguucuuugucaaaaacccaacagacacgggacacggaacgguagucaugcaaguuaaaguaagcaaaggagcgccaugcagaauaccaguaaucgucgcagaugauuuaacagccgcaauaaauaaagguauauuaguaacgguaaauccaauagcgaguaccaaugaugaugaaguacuaauagaagugaacccaccauuuggugauagcuauauaauaguagggcgaggagauucaagauuaacauaucaauggcauaaagaagguaguaguggaaguacacuaggaaaagcauuuaguacaacauuaaaaggagcacaaagauuagcagcauuaggagauacagcaugggauuuuggaagcauaggaggaguauuuaauaguauagguagagcaguacaucaaguauuuggaggagcauuuagaacauuauuuggaggaaugaguuggauaacacaaggauuaaugggagcauuauuauuauggaugggaguaaaugcaagagauagaaguauagcauuagcauuuuuagcaacaggaggaguauuaguauuuuuagcaacaaauguacaugcauga

SEQ ID NO: 488 - RNA, 2025 nt, Artificial Sequence
  derived and/or modified CDS sequence (opt6) from YFV__NC_002031.1__SSIgE-prMEdelstem_TM-JEV (polyprotein: aa126-680)
auggacuggacauggauauuauuuuuaguagcagcagcaacaagaguacauucaagaaagaacagaugguuauuacugaacguaacaagugaagacuuaggaaaaacauuuaguguaggcacaggaaauugcacaacaaauauacuugaagcaaaauauugguguccagauagcauggaauauaauuguccaaauuuaucaccuagagaggaacccgaugauauagauuguugguguuauggaguugaaaacgugcgaguagcauaugguaaaugugauagcgcaggaagaaguagaagaaguagaagggcaauagacuuaccaacucaugaaaaccauggauuaaaaacaagacaggaaaaauggaugacaggaagaaugggagaacgacaauuacagaaaauagaaagaugguucguaagaaauccauucuuugcaguaacagcauuaacaauagcauaucuaguuggaaguaacaugacucaaagaguaguaauagcauuguuaguacuagcaguaggaccggcuuauagcgcacauuguauagggauaacagauagagacuuuauagaaggagugcacgguggaacauggguuucagcaacgcuagagcaagauaaauguguaacgguaauggcgccggauaaaccaagccuugacauaucacuagaaacgguugcaaucgaucgaccagccgaaguaagaaaaguaugcuauaaugcggucuuaacacacguaaaaauaaaugauaaauguccuucaacgggagaagcacauuuagcagaagaaaacgaaggagacaacgcguguaaaagaacauauucagauaggggcuggggaaacggcugcgguuuauuuggaaaaggaaguauaguagcaugcgcaaaauuuacuugcgcaaaaaguaugaguuuauucgaaguugaucaaacaaagauacaauauguaauacgagcacaauuacauguaggugcaaagcaagaaaauuggaauacagacauaaaaacauugaaauuugacgcuuugaguggaucacaagaaguagaauuuauaggauacggaaaagcuacauuagaaugucaaguacaaacugcaguagauuuuggaaauucguauauagcagaaauggaaacugaaucauggauuguagauaggcaaugggcacaagauuuaaccuugccauggcaaagcggaagcggggguguauggcgggaaaugcaucauuuaguagaguucgaacccccacacgcggcuaccauaagaguacuagcauuaggaaaucaagaagggagucucaagacagcacucacaggugcaaugcgaguaacgaaagauacaaaugacaauaaucuauacaaacuacacggaggacauguaucuugcagaguaaaauuaucugcauuaacacuaaaagggacaaguuacaaaauuuguacagauaagauguucuuugucaaaaacccaacagacacgggacacggaacgguagucaugcaaguuaaaguaagcaaaggagcgccaugcagaauaccaguaaucgucgcagaugauuuaacagccgcaauaaauaaagguauauuaguaacgguaaauccaauagcgaguaccaaugaugaugaaguacuaauagaagugaacccaccauuuggugauagcuauauaauaguagggcgaggagauucaagauuaacauaucaauggcauaaagaagguaguaguggaaguacacuaggaaaagcauuuaguacaacauuaaaaggagcacaaagauuagcagcauuaggagauacagcaugggauuuuggaagcauaggaggaguauuuaauaguauagguagagcaguacaucaaguauuuggaggagcauuuagaacauuauuuggaggaaugaguuggauaacacaaggauuaaugggagcauuauuauuauggaugggaguaaaugcaagagauagaaguauagcauuagcauuuuuagcaacaggaggaguauuaguauuuuuagcaacaaauguacaugcauga

SEQ ID NO: 489 - RNA, 2055 nt, Artificial Sequence
  derived and/or modified CDS sequence (opt6) from YFV__NC_002031.1__SSjev-prMEdelstem_TM-JEV (polyprotein: aa122-680)
augggaaaaagaagugcaggaaguauaaugugguuggcaaguuuagcaguaguaauagcaugugcaggagcaguaacauuagucagaaagaacagaugguuauuacugaacguaacaagugaagacuuaggaaaaacauuuaguguaggcacaggaaauugcacaacaaauauacuugaagcaaaauauugguguccagauagcauggaauauaauuguccaaauuuaucaccuagagaggaacccgaugauauagauuguugguguuauggaguugaaaacgugcgaguagcauaugguaaaugugauagcgcaggaagaaguagaagaaguagaagggcaauagacuuaccaacucaugaaaaccauggauuaaaaacaagacaggaaaaauggaugacaggaagaaugggagaacgacaauuacagaaaauagaaagaugguucguaagaaauccauucuuugcaguaacagcauuaacaauagcauaucuaguuggaaguaacaugacucaaagaguaguaauagcauuguuaguacuagcaguaggaccggcuuauagcgcacauuguauagggauaacagauagagacuuuauagaaggagugcacgguggaacauggguuucagcaacgcuagagcaagauaaauguguaacgguaauggcgccggauaaaccaagccuugacauaucacuagaaacgguugcaaucgaucgaccagccgaaguaagaaaaguaugcuauaaugcggucuuaacacacguaaaaauaaaugauaaauguccuucaacgggagaagcacauuuagcagaagaaaacgaaggagacaacgcguguaaaagaacauauucagauaggggcuggggaaacggcugcgguuuauuuggaaaaggaaguauaguagcaugcgcaaaauuuacuugcgcaaaaaguaugaguuuauucgaaguugaucaaacaaagauacaauauguaauacgagcacaauuacauguaggugcaaagcaagaaaauuggaauacagacauaaaaacauugaaauuugacgcuuugaguggaucacaagaaguagaauuuauaggauacggaaaagcuacauuagaaugucaaguacaaacugcaguagauuuuggaaauucguauauagcagaaauggaaacugaaucauggauuguagauaggcaaugggcacaagauuuaaccuugccauggcaaagcggaagcggggguguauggcgggaaaugcaucauuuaguagaguucgaacccccacacgcggcuaccauaagaguacuagcauuaggaaaucaagaagggagucucaagacagcacucacaggugcaaugcgaguaacgaaagauacaaaugacaauaaucuauacaaacuacacggaggacauguaucuugcagaguaaaauuaucugcauuaacacuaaaagggacaaguuacaaaauuuguacagauaagauguucuuugucaaaaacccaacagacacgggacacggaacgguagucaugcaaguuaaaguaagcaaaggagcgccaugcagaauaccaguaaucgucgcagaugauuuaacagccgcaauaaauaaagguauauuaguaacgguaaauccaauagcgaguaccaaugaugaugaaguacuaauagaagugaacccaccauuuggugauagcuauauaauaguagggcgaggagauucaagauuaacauaucaauggcauaaagaagguaguaguggaaguacacuaggaaaagcauuuaguacaacauuaaaaggagcacaaagauuagcagcauuaggagauacagcaugggauuuuggaagcauaggaggaguauuuaauaguauagguagagcaguacaucaaguauuuggaggagcauuuagaacauuauuuggaggaaugaguuggauaacacaaggauuaaugggagcauuauuauuauggaugggaguaaaugcaagagauagaaguauagcauuagcauuuuuagcaacaggaggaguauuaguauuuuuagcaacaaauguacaugcauga

SEQ ID NO: 490 - RNA, 2043 nt, Artificial Sequence
  derived and/or modified CDS sequence (opt6) from YFV__NC_002031.1__SSjev-prMEdelstem_TM-JEV (polyprotein: aa126-680)
augggaaaaagaagugcaggaaguauaaugugguuggcaaguuuagcaguaguaauagcaugugcaggagcaagaaagaacagaugguuauuacugaacguaacaagugaagacuuaggaaaaacauuuaguguaggcacaggaaauugcacaacaaauauacuugaagcaaaauauugguguccagauagcauggaauauaauuguccaaauuuaucaccuagagaggaacccgaugauauagauuguugguguuauggaguugaaaacgugcgaguagcauaugguaaaugugauagcgcaggaagaaguagaagaaguagaagggcaauagacuuaccaacucaugaaaaccauggauuaaaaacaagacaggaaaaauggaugacaggaagaaugggagaacgacaauuacagaaaauagaaagaugguucguaagaaauccauucuuugcaguaacagcauuaacaauagcauaucuaguuggaaguaacaugacucaaagaguaguaauagcauuguuaguacuagcaguaggaccggcuuauagcgcacauuguauagggauaacagauagagacuuuauagaaggagugcacgguggaacauggguuucagcaacgcuagagcaagauaaauguguaacgguaauggcgccggauaaaccaagccuugacauaucacuagaaacgguugcaaucgaucgaccagccgaaguaagaaaaguaugcuauaaugcggucuuaacacacguaaaaauaaaugauaaauguccuucaacgggagaagcacauuuagcagaagaaaacgaaggagacaacgcguguaaaagaacauauucagauaggggcuggggaaacggcugcgguuuauuuggaaaaggaaguauaguagcaugcgcaaaauuuacuugcgcaaaaaguaugaguuuauucgaaguugaucaaacaaagauacaauauguaauacgagcacaauuacauguaggugcaaagcaagaaaauuggaauacagacauaaaaacauugaaauuugacgcuuugaguggaucacaagaaguagaauuuauaggauacggaaaagcuacauuagaaugucaaguacaaacugcaguagauuuuggaaauucguauauagcagaaauggaaacugaaucauggauuguagauaggcaaugggcacaagauuuaaccuugccauggcaaagcggaagcggggguguauggcgggaaaugcaucauuuaguagaguucgaacccccacacgcggcuaccauaagaguacuagcauuaggaaaucaagaagggagucucaagacagcacucacaggugcaaugcgaguaacgaaagauacaaaugacaauaaucuauacaaacuacacggaggacauguaucuugcagaguaaaauuaucugcauuaacacuaaaagggacaaguuacaaaauuuguacagauaagauguucuuugucaaaaacccaacagacacgggacacggaacgguagucaugcaaguuaaaguaagcaaaggagcgccaugcagaauaccaguaaucgucgcagaugauuuaacagccgcaauaaauaaagguauauuaguaacgguaaauccaauagcgaguaccaaugaugaugaaguacuaauagaagugaacccaccauuuggugauagcuauauaauaguagggcgaggagauucaagauuaacauaucaauggcauaaagaagguaguaguggaaguacacuaggaaaagcauuuaguacaacauuaaaaggagcacaaagauuagcagcauuaggagauacagcaugggauuuuggaagcauaggaggaguauuuaauaguauagguagagcaguacaucaaguauuuggaggagcauuuagaacauuauuuggaggaaugaguuggauaacacaaggauuaaugggagcauuauuauuauggaugggaguaaaugcaagagauagaaguauagcauuagcauuuuuagcaacaggaggaguauuaguauuuuuagcaacaaauguacaugcauga

SEQ ID NO: 491 - RNA, 2094 nt, Artificial Sequence
  derived and/or modified CDS sequence (opt11) from YFV__NC_002031.1__X-SS-prME-XX (polyprotein: aa92-788)
augcggggacuaagcagcagaaaaagacgcagccacgaugugcucaccgugcaauuccucauacuggggaugcuccuaaugaccggaggcgugacccuaguaaggaaaaacagauggcuacuacuaaacguaaccucagaagaucuaggaaagacauuuucagucggcacaggcaacugcacaaccaacauacuagaagcaaaauauuggugcccagacagcauggaauacaacugucccaaccucagcccaagagaggaaccagacgacauagacugcugguguuacggaguagaaaacguaagaguggcauacggcaaaugcgacagcgcaggcaggagccgaagaucccgcagagccaucgacuugcccacgcacgaaaaccacggccucaaaacacgacaagaaaaauggaugacagggcgaaugggagaacgacagcuccagaaaauagaacgaugguucguccggaacccguucuucgcaguaacggcacuaacaaucgcauaccucguaggcagcaacaugacacaaagaguggucaucgcgcuacucguacuagcaguggggcccgcauacagugcacacugcauaggaaucacagaccgugacuucaucgaaggcguacacggaggaacguggguaagcgcgacacuggaacaagacaaaugcgugacaguaauggcaccagacaaaccaagccuagacauaucccuagaaacggucgccaucgaccgucccgcagaaguacgaaagguaugcuauaaugcaguccucacacacgucaaaauaaacgacaaaugccccagcacgggcgaagcacaccucgccgaagaaaacgaaggggauaacgcgugcaaacgcaccuacuccgacaggggauggggcaacggaugcggacuguucggaaaaggauccauagucgcaugcgcaaaauuuaccugcgcaaaaagcaugagcuuguucgagguagaccaaacgaagauccaauacguaauccgagcucaacuacacguuggggccaagcaagagaacuggaauacggacaucaaaacacuaaaauucgacgcacucuccggcucacaagaagucgaguucaucggcuacggcaaagcaacacuagaaugccaaguacaaacagcgguggacuucggcaacagcuacauagcagaaauggaaacagaaagcuggauaguagaccgacaaugggcacaagaccuaacucugccauggcaaagcggcucaggaggaguguggagagagaugcaccaccugguagaguucgaacccccacacgcagcaacaauaaggguacuggcacuaggcaaccaagaaggcagccuaaaaaccgcacucacaggagccaugcgcgugacgaaggacaccaacgacaacaaccucuacaaacuccacggagggcacguauccugccgcguaaaacuaucagcacuaacgcuaaaaggaacaagcuacaaaauaugcacagacaaaauguucuucgucaaaaaccccacagacacaggccacggcacagucguaaugcaagugaaggucagcaagggggcccccugccgaaucccagucauaguggcagacgaccucacggccgccaucaacaaagggauccugguaacagugaacccaauagcaucgaccaacgacgacgaaguccucauagaagugaaucccccguucggcgacagcuacaucaucguaggacgcggcgacucccgacugacguaccaauggcauaaagaaggcagcagcauuggaaaacuauucacccaaaccaugaagggcgucgaaagacucgcggugaugggagacaccgcaugggacuucucgagcgcaggcggcuucuucacaagcguaggaaaagggauucacacaguauucggauccgcauuccaaggccucuucgggggacuaaacuggauaacgaaaguaauaaugggagcaguucucauauggguaggaaucaacacacgaaacaugacaauguccaugucaaugauacucguaggcguaaucaugauguuucugucacucggagugggagcagaccaagguugcgccauaaacuucggcaaguga

SEQ ID NO: 492 - RNA, 2064 nt, Artificial Sequence
  derived and/or modified CDS sequence (opt11) from YFV__NC_002031.1__X-SS-prME (polyprotein: aa92-778)
augcggggacuaagcagcagaaaaagacgcagccacgaugugcucaccgugcaauuccucauacuggggaugcuccuaaugaccggaggcgugacccuaguaaggaaaaacagauggcuacuacuaaacguaaccucagaagaucuaggaaagacauuuucagucggcacaggcaacugcacaaccaacauacuagaagcaaaauauuggugcccagacagcauggaauacaacugucccaaccucagcccaagagaggaaccagacgacauagacugcugguguuacggaguagaaaacguaagaguggcauacggcaaaugcgacagcgcaggcaggagccgaagaucccgcagagccaucgacuugcccacgcacgaaaaccacggccucaaaacacgacaagaaaaauggaugacagggcgaaugggagaacgacagcuccagaaaauagaacgaugguucguccggaacccguucuucgcaguaacggcacuaacaaucgcauaccucguaggcagcaacaugacacaaagaguggucaucgcgcuacucguacuagcaguggggcccgcauacagugcacacugcauaggaaucacagaccgugacuucaucgaaggcguacacggaggaacguggguaagcgcgacacuggaacaagacaaaugcgugacaguaauggcaccagacaaaccaagccuagacauaucccuagaaacggucgccaucgaccgucccgcagaaguacgaaagguaugcuauaaugcaguccucacacacgucaaaauaaacgacaaaugccccagcacgggcgaagcacaccucgccgaagaaaacgaaggggauaacgcgugcaaacgcaccuacuccgacaggggauggggcaacggaugcggacuguucggaaaaggauccauagucgcaugcgcaaaauuuaccugcgcaaaaagcaugagcuuguucgagguagaccaaacgaagauccaauacguaauccgagcucaacuacacguuggggccaagcaagagaacuggaauacggacaucaaaacacuaaaauucgacgcacucuccggcucacaagaagucgaguucaucggcuacggcaaagcaacacuagaaugccaaguacaaacagcgguggacuucggcaacagcuacauagcagaaauggaaacagaaagcuggauaguagaccgacaaugggcacaagaccuaacucugccauggcaaagcggcucaggaggaguguggagagagaugcaccaccugguagaguucgaacccccacacgcagcaacaauaaggguacuggcacuaggcaaccaagaaggcagccuaaaaaccgcacucacaggagccaugcgcgugacgaaggacaccaacgacaacaaccucuacaaacuccacggagggcacguauccugccgcguaaaacuaucagcacuaacgcuaaaaggaacaagcuacaaaauaugcacagacaaaauguucuucgucaaaaaccccacagacacaggccacggcacagucguaaugcaagugaaggucagcaagggggcccccugccgaaucccagucauaguggcagacgaccucacggccgccaucaacaaagggauccugguaacagugaacccaauagcaucgaccaacgacgacgaaguccucauagaagugaaucccccguucggcgacagcuacaucaucguaggacgcggcgacucccgacugacguaccaauggcauaaagaaggcagcagcauuggaaaacuauucacccaaaccaugaagggcgucgaaagacucgcggugaugggagacaccgcaugggacuucucgagcgcaggcggcuucuucacaagcguaggaaaagggauucacacaguauucggauccgcauuccaaggccucuucgggggacuaaacuggauaacgaaaguaauaaugggagcaguucucauauggguaggaaucaacacacgaaacaugacaauguccaugucaaugauacucguaggcguaaucaugauguuucugucacucggagugggagcauga

SEQ ID NO: 493 - RNA, 2067 nt, Artificial Sequence
  derived and/or modified CDS sequence (opt11) from YFV__NC_002031.1__SS-prME-XX (polyprotein: M,aa102-788)
augagccacgaugugcucaccgugcaauuccucauacuggggaugcuccuaaugaccggaggcgugacccuaguaaggaaaaacagauggcuacuacuaaacguaaccucagaagaucuaggaaagacauuuucagucggcacaggcaacugcacaaccaacauacuagaagcaaaauauuggugcccagacagcauggaauacaacugucccaaccucagcccaagagaggaaccagacgacauagacugcugguguuacggaguagaaaacguaagaguggcauacggcaaaugcgacagcgcaggcaggagccgaagaucccgcagagccaucgacuugcccacgcacgaaaaccacggccucaaaacacgacaagaaaaauggaugacagggcgaaugggagaacgacagcuccagaaaauagaacgaugguucguccggaacccguucuucgcaguaacggcacuaacaaucgcauaccucguaggcagcaacaugacacaaagaguggucaucgcgcuacucguacuagcaguggggcccgcauacagugcacacugcauaggaaucacagaccgugacuucaucgaaggcguacacggaggaacguggguaagcgcgacacuggaacaagacaaaugcgugacaguaauggcaccagacaaaccaagccuagacauaucccuagaaacggucgccaucgaccgucccgcagaaguacgaaagguaugcuauaaugcaguccucacacacgucaaaauaaacgacaaaugccccagcacgggcgaagcacaccucgccgaagaaaacgaaggggauaacgcgugcaaacgcaccuacuccgacaggggauggggcaacggaugcggacuguucggaaaaggauccauagucgcaugcgcaaaauuuaccugcgcaaaaagcaugagcuuguucgagguagaccaaacgaagauccaauacguaauccgagcucaacuacacguuggggccaagcaagagaacuggaauacggacaucaaaacacuaaaauucgacgcacucuccggcucacaagaagucgaguucaucggcuacggcaaagcaacacuagaaugccaaguacaaacagcgguggacuucggcaacagcuacauagcagaaauggaaacagaaagcuggauaguagaccgacaaugggcacaagaccuaacucugccauggcaaagcggcucaggaggaguguggagagagaugcaccaccugguagaguucgaacccccacacgcagcaacaauaaggguacuggcacuaggcaaccaagaaggcagccuaaaaaccgcacucacaggagccaugcgcgugacgaaggacaccaacgacaacaaccucuacaaacuccacggagggcacguauccugccgcguaaaacuaucagcacuaacgcuaaaaggaacaagcuacaaaauaugcacagacaaaauguucuucgucaaaaaccccacagacacaggccacggcacagucguaaugcaagugaaggucagcaagggggcccccugccgaaucccagucauaguggcagacgaccucacggccgccaucaacaaagggauccugguaacagugaacccaauagcaucgaccaacgacgacgaaguccucauagaagugaaucccccguucggcgacagcuacaucaucguaggacgcggcgacucccgacugacguaccaauggcauaaagaaggcagcagcauuggaaaacuauucacccaaaccaugaagggcgucgaaagacucgcggugaugggagacaccgcaugggacuucucgagcgcaggcggcuucuucacaagcguaggaaaagggauucacacaguauucggauccgcauuccaaggccucuucgggggacuaaacuggauaacgaaaguaauaaugggagcaguucucauauggguaggaaucaacacacgaaacaugacaauguccaugucaaugauacucguaggcguaaucaugauguuucugucacucggagugggagcagaccaagguugcgccauaaacuucggcaaguga

SEQ ID NO: 494 - RNA, 2061 nt, Artificial Sequence
  derived and/or modified CDS sequence (opt11) from YFV__NC_002031.1__SS-prME-XX (polyprotein: M,aa104-788)
auggaugugcucaccgugcaauuccucauacuggggaugcuccuaaugaccggaggcgugacccuaguaaggaaaaacagauggcuacuacuaaacguaaccucagaagaucuaggaaagacauuuucagucggcacaggcaacugcacaaccaacauacuagaagcaaaauauuggugcccagacagcauggaauacaacugucccaaccucagcccaagagaggaaccagacgacauagacugcugguguuacggaguagaaaacguaagaguggcauacggcaaaugcgacagcgcaggcaggagccgaagaucccgcagagccaucgacuugcccacgcacgaaaaccacggccucaaaacacgacaagaaaaauggaugacagggcgaaugggagaacgacagcuccagaaaauagaacgaugguucguccggaacccguucuucgcaguaacggcacuaacaaucgcauaccucguaggcagcaacaugacacaaagaguggucaucgcgcuacucguacuagcaguggggcccgcauacagugcacacugcauaggaaucacagaccgugacuucaucgaaggcguacacggaggaacguggguaagcgcgacacuggaacaagacaaaugcgugacaguaauggcaccagacaaaccaagccuagacauaucccuagaaacggucgccaucgaccgucccgcagaaguacgaaagguaugcuauaaugcaguccucacacacgucaaaauaaacgacaaaugccccagcacgggcgaagcacaccucgccgaagaaaacgaaggggauaacgcgugcaaacgcaccuacuccgacaggggauggggcaacggaugcggacuguucggaaaaggauccauagucgcaugcgcaaaauuuaccugcgcaaaaagcaugagcuuguucgagguagaccaaacgaagauccaauacguaauccgagcucaacuacacguuggggccaagcaagagaacuggaauacggacaucaaaacacuaaaauucgacgcacucuccggcucacaagaagucgaguucaucggcuacggcaaagcaacacuagaaugccaaguacaaacagcgguggacuucggcaacagcuacauagcagaaauggaaacagaaagcuggauaguagaccgacaaugggcacaagaccuaacucugccauggcaaagcggcucaggaggaguguggagagagaugcaccaccugguagaguucgaacccccacacgcagcaacaauaaggguacuggcacuaggcaaccaagaaggcagccuaaaaaccgcacucacaggagccaugcgcgugacgaaggacaccaacgacaacaaccucuacaaacuccacggagggcacguauccugccgcguaaaacuaucagcacuaacgcuaaaaggaacaagcuacaaaauaugcacagacaaaauguucuucgucaaaaaccccacagacacaggccacggcacagucguaaugcaagugaaggucagcaagggggcccccugccgaaucccagucauaguggcagacgaccucacggccgccaucaacaaagggauccugguaacagugaacccaauagcaucgaccaacgacgacgaaguccucauagaagugaaucccccguucggcgacagcuacaucaucguaggacgcggcgacucccgacugacguaccaauggcauaaagaaggcagcagcauuggaaaacuauucacccaaaccaugaagggcgucgaaagacucgcggugaugggagacaccgcaugggacuucucgagcgcaggcggcuucuucacaagcguaggaaaagggauucacacaguauucggauccgcauuccaaggccucuucgggggacuaaacuggauaacgaaaguaauaaugggagcaguucucauauggguaggaaucaacacacgaaacaugacaauguccaugucaaugauacucguaggcguaaucaugauguuucugucacucggagugggagcagaccaagguugcgccauaaacuucggcaaguga

SEQ ID NO: 495 - RNA, 2037 nt, Artificial Sequence
  derived and/or modified CDS sequence (opt11) from YFV__NC_002031.1__SS-prME (polyprotein: M,aa102-778)
augucacacgacguccucaccgugcaauuccucauccucgggaugcuacucaugaccggagguguaacccugguaaggaaaaaccgcuggcuacugcugaacgucaccuccgaggaccucggaaagaccuucuccguagguacagggaacugcacaaccaacauacuggaggcgaaauacuggugccccgacagcauggaauacaacugcccaaaccuauccccuagagaagaacccgacgacauagacuguuggugcuacgggguagaaaacguccgcguggccuaugggaagugcgauagcgcgggccggagcaggagaucaagacgagcaaucgaccuaccaacgcacgaaaaccauggccucaaaacacgacaggaaaaguggaugacaggccgaaugggcgaacgccagcuccagaaaauagaaaggugguucgucagaaacccauucuucgcaguaaccgcacucacgauagccuaccuggucggcagcaacaugacgcaaaggguaguaauagcccucuugguccuggccguaggccccgcauauagcgcccacugcauaggcaucacggacagagacuucauagaaggcguacauggaggaacauggguauccgccacccuagagcaagacaagugcguaaccguaauggcacccgacaaaccgagucuggacauaucgcucgaaacagucgcgauugaccgaccggccgaagucagaaaagucugcuacaacgccgucuugacacacguaaaaauuaaugauaaaugcccaagcaccggcgaggcucaccuagcugaagaaaacgaaggagacaacgcaugcaaacgcaccuacagugaccggggcuggggcaacggaugcggacucuucggaaaaggaagcauugucgcaugcgccaaauucaccugugccaaaagcaugagcuuguucgagguagaccaaacgaaaauccaauacgucauacgggcacaacuccaugugggagcaaaacaggaaaauuggaacaccgacauaaaaacccugaaauucgacgcccucucuggcucacaagaagucgaguucauaggauauggaaaagccacucuugaaugccaaguacaaacggccguagacuucgggaacagcuacauagccgaaauggagaccgaaagcuggaucguagacagacaaugggcccaggaccugacacuaccauggcaauccggcuccggcggggucuggagggaaaugcaccaccuagucgaguucgaacccccgcaugccgcaacaauaagaguccuagcccucggaaaccaagagggaagucucaagaccgcacuaacgggugcaaugcgaguaacaaaagacacaaacgacaacaacuuguacaaacuucacggcggacacguaagcugccgagugaagcugagcgcgcuaacacucaaaggcacaagcuacaaaauaugcacagacaagauguucuucguaaagaacccgacagacaccggacacggcacaguagucaugcaagucaaagucuccaaaggagccccaugccgaauacccguaaucguagcagacgaccucacagccgcgaucaacaaaggaauccuggucacggucaaccccaucgccagcaccaaugacgacgagguacuaaucgaaguaaacccgcccuucggcgacagcuacauaaucgucggacgcggagacagcaggcucaccuaccaauggcacaaggaagggucauccaucggaaaacucuucacgcaaacaaugaaaggaguagaaaggcucgcagucaugggagacacagccugggacuucuccagcgcgggaggauucuuuaccucggucgggaaaggaauacacaccguguucgggagcgcauuccagggccuauucggaggacuuaacuggaucacgaaagugauaaugggagcaguccucaucuggguagggaucaacacacggaacaugaccaugagcaugucaaugauacucgucggcgucauaaugauguuccucagccucggcgugggagcauga

SEQ ID NO: 496 - RNA, 2031 nt, Artificial Sequence
  derived and/or modified CDS sequence (opt11) from YFV__NC_002031.1__SS-prME (polyprotein: M,aa104-778)
auggacguccuuacgguacaauuccuaauacuaggaaugcuucucaugaccgggggcgucacccuaguccggaaaaacagauggcuacugcuaaauguuacaagcgaagaccuuggcaagacauucagcguaggcacgggcaacuguacaaccaacauacuagaagcgaaauacuggugcccagacuccauggaguacaacugccccaaccuaagcccacgggaagaacccgacgacauagacugcugguguuacggggucgaaaacguccgcgucgcauacgggaaaugcgauagcgcaggccgcaguagacgcucccgccgcgccauagaccuaccaacgcacgagaaccacggccucaaaacucgccaagaaaaauggaugacagggcgaaugggugaacgccaacuacagaagaucgaaaggugguucgucaggaacccauucuucgcagugaccgcacuaacgauagccuaccuagugggaucaaacaugacgcaacgagucgugaucgcacuccuaguacuggccguaggaccggccuacuccgcgcacugcaucggcauaacggauagggacuucauugaaggaguacauggcggcacgugggucagcgcgacacucgaacaagacaaaugcguaaccgugauggcacccgacaaaccgagucuugacauaagccuggaaacgguagcgauagaucguccagccgaaguaagaaaaguaugcuacaacgcaguccuaacacacguaaaaauaaacgacaaaugcccaagcacaggggaagcccaccucgcagaagagaacgaaggcgacaacgcaugcaaacgcacauacuccgacaggggaugggggaauggcugcggacuauucgggaaaggaagcaucgucgcgugcgccaaauucacaugcgccaagagcaugagccuguucgaagucgaccaaacaaaaauccaauacguaauacgcgcgcaacugcacguaggagcgaaacaggaaaacuggaacacggacauuaaaacccucaaauucgacgcgcucucaggaucacaagaagucgaguucaucggcuacggcaaggcaacgcucgaaugccaaguacaaacagcaguagacuucggaaacagcuacauugccgagauggaaaccgagagcuggauagucgacagacaaugggcccaagaccuaacccugccauggcaaucaggcuccgggggcgucuggcgagagaugcaccaccuaguagaguucgaaccaccccacgccgccacgaucagaguacuggcccugggcaaccaagaaggcucacucaagacggcgcucacaggagcaaugagggucacgaaagacaccaacgacaacaaccucuacaaacuacacggagggcacgugagcugccggguaaaacugagcgcacucacucugaagggaacaagcuacaagauaugcaccgacaaaauguucuucgugaaaaacccaaccgacacuggacacggcacggucguuaugcaagucaagguaucaaaaggagccccaugcagaaucccaguaauaguagcggacgaccuaacagccgccauaaacaaaggaauccuagucacgguaaauccgauagcaucgaccaacgacgacgaaguacuaauagaagugaacccaccauucggcgacagcuacauaauagucgggagaggcgacucgcgacuaaccuaccaauggcacaaggaagggagcucuaucgggaaacuauucacccaaacgaugaagggcguagaaaggcucgcagucaugggcgacaccgcaugggacuucuccagcgcgggaggcuucuuuacuucagugggaaaagggauacacaccgucuucggcagcgcauuccagggccuauucggcggguuaaacuggaucacgaaagugauaaugggggcaguucucaucugggucggaauaaacacacguaacaugaccaugagcaugagcaugauccuagucggggucauaaugauguucuugagcuugggaguaggugcauga

SEQ ID NO: 497 - RNA, 2073 nt, Artificial Sequence
  derived and/or modified CDS sequence (opt11) from YFV__NC_002031.1__X-SS-prMEdelstem_TM-JEV (polyprotein: aa92-680)
augcggggacuaagcagcagaaaaagacgcagccacgaugugcucaccgugcaauuccucauacuggggaugcuccuaaugaccggaggcgugacccuaguaaggaaaaacagauggcuacuacuaaacguaaccucagaagaucuaggaaagacauuuucagucggcacaggcaacugcacaaccaacauacuagaagcaaaauauuggugcccagacagcauggaauacaacugucccaaccucagcccaagagaggaaccagacgacauagacugcugguguuacggaguagaaaacguaagaguggcauacggcaaaugcgacagcgcaggcaggagccgaagaucccgcagagccaucgacuugcccacgcacgaaaaccacggccucaaaacacgacaagaaaaauggaugacagggcgaaugggagaacgacagcuccagaaaauagaacgaugguucguccggaacccguucuucgcaguaacggcacuaacaaucgcauaccucguaggcagcaacaugacacaaagaguggucaucgcgcuacucguacuagcaguggggcccgcauacagugcacacugcauaggaaucacagaccgugacuucaucgaaggcguacacggaggaacguggguaagcgcgacacuggaacaagacaaaugcgugacaguaauggcaccagacaaaccaagccuagacauaucccuagaaacggucgccaucgaccgucccgcagaaguacgaaagguaugcuauaaugcaguccucacacacgucaaaauaaacgacaaaugccccagcacgggcgaagcacaccucgccgaagaaaacgaaggggauaacgcgugcaaacgcaccuacuccgacaggggauggggcaacggaugcggacuguucggaaaaggauccauagucgcaugcgcaaaauuuaccugcgcaaaaagcaugagcuuguucgagguagaccaaacgaagauccaauacguaauccgagcucaacuacacguuggggccaagcaagagaacuggaauacggacaucaaaacacuaaaauucgacgcacucuccggcucacaagaagucgaguucaucggcuacggcaaagcaacacuagaaugccaaguacaaacagcgguggacuucggcaacagcuacauagcagaaauggaaacagaaagcuggauaguagaccgacaaugggcacaagaccuaacucugccauggcaaagcggcucaggaggaguguggagagagaugcaccaccugguagaguucgaacccccacacgcagcaacaauaaggguacuggcacuaggcaaccaagaaggcagccuaaaaaccgcacucacaggagccaugcgcgugacgaaggacaccaacgacaacaaccucuacaaacuccacggagggcacguauccugccgcguaaaacuaucagcacuaacgcuaaaaggaacaagcuacaaaauaugcacagacaaaauguucuucgucaaaaaccccacagacacaggccacggcacagucguaaugcaagugaaggucagcaagggggcccccugccgaaucccagucauaguggcagacgaccucacggccgccaucaacaaagggauccugguaacagugaacccaauagcaucgaccaacgacgacgaaguccucauagaagugaaucccccguucggcgacagcuacaucaucguaggacgcggcgacucccgacugacguaccaauggcauaaagaaggcagcagcgggagcacgcucgggaaagcguucucgaccacgcucaagggcgcgcaaaggcucgcggccuugggcgauaccgcgugggauuucgggagcauaggcggggucuuuaacucgaucgggcgcgcgguccaucaaguguucgggggcgcguucaggaccuuguucgggggcaugagcuggaucacgcaagggcucaugggcgcgcucuugcucuggaugggggucaaugccagggacaggagcauagccuuggccuuucucgcgaccgggggcgugcucguguucuuggccacgaacgugcacgcguga

SEQ ID NO: 498 - RNA, 2046 nt, Artificial Sequence
  derived and/or modified CDS sequence (opt11) from YFV__NC_002031.1__SS-prMEdelstem_TM-JEV (polyprotein: M,aa102-680)
augucacacgacguccucaccgugcaauuccucauccucgggaugcuacucaugaccggagguguaacccugguaaggaaaaaccgcuggcuacugcugaacgucaccuccgaggaccucggaaagaccuucuccguagguacagggaacugcacaaccaacauacuggaggcgaaauacuggugccccgacagcauggaauacaacugcccaaaccuauccccuagagaagaacccgacgacauagacuguuggugcuacgggguagaaaacguccgcguggccuaugggaagugcgauagcgcgggccggagcaggagaucaagacgagcaaucgaccuaccaacgcacgaaaaccauggccucaaaacacgacaggaaaaguggaugacaggccgaaugggcgaacgccagcuccagaaaauagaaaggugguucgucagaaacccauucuucgcaguaaccgcacucacgauagccuaccuggucggcagcaacaugacgcaaaggguaguaauagcccucuugguccuggccguaggccccgcauauagcgcccacugcauaggcaucacggacagagacuucauagaaggcguacauggaggaacauggguauccgccacccuagagcaagacaagugcguaaccguaauggcacccgacaaaccgagucuggacauaucgcucgaaacagucgcgauugaccgaccggccgaagucagaaaagucugcuacaacgccgucuugacacacguaaaaauuaaugauaaaugcccaagcaccggcgaggcucaccuagcugaagaaaacgaaggagacaacgcaugcaaacgcaccuacagugaccggggcuggggcaacggaugcggacucuucggaaaaggaagcauugucgcaugcgccaaauucaccugugccaaaagcaugagcuuguucgagguagaccaaacgaaaauccaauacgucauacgggcacaacuccaugugggagcaaaacaggaaaauuggaacaccgacauaaaaacccugaaauucgacgcccucucuggcucacaagaagucgaguucauaggauauggaaaagccacucuugaaugccaaguacaaacggccguagacuucgggaacagcuacauagccgaaauggagaccgaaagcuggaucguagacagacaaugggcccaggaccugacacuaccauggcaauccggcuccggcggggucuggagggaaaugcaccaccuagucgaguucgaacccccgcaugccgcaacaauaagaguccuagcccucggaaaccaagagggaagucucaagaccgcacuaacgggugcaaugcgaguaacaaaagacacaaacgacaacaacuuguacaaacuucacggcggacacguaagcugccgagugaagcugagcgcgcuaacacucaaaggcacaagcuacaaaauaugcacagacaagauguucuucguaaagaacccgacagacaccggacacggcacaguagucaugcaagucaaagucuccaaaggagccccaugccgaauacccguaaucguagcagacgaccucacagccgcgaucaacaaaggaauccuggucacggucaaccccaucgccagcaccaaugacgacgagguacuaaucgaaguaaacccgcccuucggcgacagcuacauaaucgucggacgcggagacagcaggcucaccuaccaauggcacaaggaagggucauccgggagcacgcucgggaaagcguucucgaccacgcucaagggcgcgcaaaggcucgcggccuugggcgauaccgcgugggauuucgggagcauaggcggggucuuuaacucgaucgggcgcgcgguccaucaaguguucgggggcgcguucaggaccuuguucgggggcaugagcuggaucacgcaagggcucaugggcgcgcucuugcucuggaugggggucaaugccagggacaggagcauagccuuggccuuucucgcgaccgggggcgugcucguguucuuggccacgaacgugcacgcguga

SEQ ID NO: 499 - RNA, 2040 nt, Artificial Sequence
  derived and/or modified CDS sequence (opt11) from YFV__NC_002031.1__SS-prMEdelstem_TM-JEV (polyprotein: M,aa104-680)
auggacguccuuacgguacaauuccuaauacuaggaaugcuucucaugaccgggggcgucacccuaguccggaaaaacagauggcuacugcuaaauguuacaagcgaagaccuuggcaagacauucagcguaggcacgggcaacuguacaaccaacauacuagaagcgaaauacuggugcccagacuccauggaguacaacugccccaaccuaagcccacgggaagaacccgacgacauagacugcugguguuacggggucgaaaacguccgcgucgcauacgggaaaugcgauagcgcaggccgcaguagacgcucccgccgcgccauagaccuaccaacgcacgagaaccacggccucaaaacucgccaagaaaaauggaugacagggcgaaugggugaacgccaacuacagaagaucgaaaggugguucgucaggaacccauucuucgcagugaccgcacuaacgauagccuaccuagugggaucaaacaugacgcaacgagucgugaucgcacuccuaguacuggccguaggaccggccuacuccgcgcacugcaucggcauaacggauagggacuucauugaaggaguacauggcggcacgugggucagcgcgacacucgaacaagacaaaugcguaaccgugauggcacccgacaaaccgagucuugacauaagccuggaaacgguagcgauagaucguccagccgaaguaagaaaaguaugcuacaacgcaguccuaacacacguaaaaauaaacgacaaaugcccaagcacaggggaagcccaccucgcagaagagaacgaaggcgacaacgcaugcaaacgcacauacuccgacaggggaugggggaauggcugcggacuauucgggaaaggaagcaucgucgcgugcgccaaauucacaugcgccaagagcaugagccuguucgaagucgaccaaacaaaaauccaauacguaauacgcgcgcaacugcacguaggagcgaaacaggaaaacuggaacacggacauuaaaacccucaaauucgacgcgcucucaggaucacaagaagucgaguucaucggcuacggcaaggcaacgcucgaaugccaaguacaaacagcaguagacuucggaaacagcuacauugccgagauggaaaccgagagcuggauagucgacagacaaugggcccaagaccuaacccugccauggcaaucaggcuccgggggcgucuggcgagagaugcaccaccuaguagaguucgaaccaccccacgccgccacgaucagaguacuggcccugggcaaccaagaaggcucacucaagacggcgcucacaggagcaaugagggucacgaaagacaccaacgacaacaaccucuacaaacuacacggagggcacgugagcugccggguaaaacugagcgcacucacucugaagggaacaagcuacaagauaugcaccgacaaaauguucuucgugaaaaacccaaccgacacuggacacggcacggucguuaugcaagucaagguaucaaaaggagccccaugcagaaucccaguaauaguagcggacgaccuaacagccgccauaaacaaaggaauccuagucacgguaaauccgauagcaucgaccaacgacgacgaaguacuaauagaagugaacccaccauucggcgacagcuacauaauagucgggagaggcgacucgcgacuaaccuaccaauggcacaaggaagggagcucugggagcacgcucgggaaagcguucucgaccacgcucaagggcgcgcaaaggcucgcggccuugggcgauaccgcgugggauuucgggagcauaggcggggucuuuaacucgaucgggcgcgcgguccaucaaguguucgggggcgcguucaggaccuuguucgggggcaugagcuggaucacgcaagggcucaugggcgcgcucuugcucuggaugggggucaaugccagggacaggagcauagccuuggccuuucucgcgaccgggggcgugcucguguucuuggccacgaacgugcacgcguga

SEQ ID NO: 500 - RNA, 2058 nt, Artificial Sequence
  derived and/or modified CDS sequence (opt11) from YFV__NC_002031.1__SSIgE-prME-XX (polyprotein: aa122-788)
auggauuggacguggauacucuuucucguggccgcggccacgcgcgugcacucggugacccuaguaaggaaaaacagauggcuacuacuaaacguaaccucagaagaucuaggaaagacauuuucagucggcacaggcaacugcacaaccaacauacuagaagcaaaauauuggugcccagacagcauggaauacaacugucccaaccucagcccaagagaggaaccagacgacauagacugcugguguuacggaguagaaaacguaagaguggcauacggcaaaugcgacagcgcaggcaggagccgaagaucccgcagagccaucgacuugcccacgcacgaaaaccacggccucaaaacacgacaagaaaaauggaugacagggcgaaugggagaacgacagcuccagaaaauagaacgaugguucguccggaacccguucuucgcaguaacggcacuaacaaucgcauaccucguaggcagcaacaugacacaaagaguggucaucgcgcuacucguacuagcaguggggcccgcauacagugcacacugcauaggaaucacagaccgugacuucaucgaaggcguacacggaggaacguggguaagcgcgacacuggaacaagacaaaugcgugacaguaauggcaccagacaaaccaagccuagacauaucccuagaaacggucgccaucgaccgucccgcagaaguacgaaagguaugcuauaaugcaguccucacacacgucaaaauaaacgacaaaugccccagcacgggcgaagcacaccucgccgaagaaaacgaaggggauaacgcgugcaaacgcaccuacuccgacaggggauggggcaacggaugcggacuguucggaaaaggauccauagucgcaugcgcaaaauuuaccugcgcaaaaagcaugagcuuguucgagguagaccaaacgaagauccaauacguaauccgagcucaacuacacguuggggccaagcaagagaacuggaauacggacaucaaaacacuaaaauucgacgcacucuccggcucacaagaagucgaguucaucggcuacggcaaagcaacacuagaaugccaaguacaaacagcgguggacuucggcaacagcuacauagcagaaauggaaacagaaagcuggauaguagaccgacaaugggcacaagaccuaacucugccauggcaaagcggcucaggaggaguguggagagagaugcaccaccugguagaguucgaacccccacacgcagcaacaauaaggguacuggcacuaggcaaccaagaaggcagccuaaaaaccgcacucacaggagccaugcgcgugacgaaggacaccaacgacaacaaccucuacaaacuccacggagggcacguauccugccgcguaaaacuaucagcacuaacgcuaaaaggaacaagcuacaaaauaugcacagacaaaauguucuucgucaaaaaccccacagacacaggccacggcacagucguaaugcaagugaaggucagcaagggggcccccugccgaaucccagucauaguggcagacgaccucacggccgccaucaacaaagggauccugguaacagugaacccaauagcaucgaccaacgacgacgaaguccucauagaagugaaucccccguucggcgacagcuacaucaucguaggacgcggcgacucccgacugacguaccaauggcauaaagaaggcagcagcauuggaaaacuauucacccaaaccaugaagggcgucgaaagacucgcggugaugggagacaccgcaugggacuucucgagcgcaggcggcuucuucacaagcguaggaaaagggauucacacaguauucggauccgcauuccaaggccucuucgggggacuaaacuggauaacgaaaguaauaaugggagcaguucucauauggguaggaaucaacacacgaaacaugacaauguccaugucaaugauacucguaggcguaaucaugauguuucugucacucggagugggagcagaccaagguugcgccauaaacuucggcaaguga

SEQ ID NO: 501 - RNA, 2046 nt, Artificial Sequence
  derived and/or modified CDS sequence (opt11) from YFV__NC_002031.1__SSIgE-prME-XX (polyprotein: aa126-788)
auggauuggacguggauacucuuucucguggccgcggccacgcgcgugcacucgaggaaaaacagauggcuacuacuaaacguaaccucagaagaucuaggaaagacauuuucagucggcacaggcaacugcacaaccaacauacuagaagcaaaauauuggugcccagacagcauggaauacaacugucccaaccucagcccaagagaggaaccagacgacauagacugcugguguuacggaguagaaaacguaagaguggcauacggcaaaugcgacagcgcaggcaggagccgaagaucccgcagagccaucgacuugcccacgcacgaaaaccacggccucaaaacacgacaagaaaaauggaugacagggcgaaugggagaacgacagcuccagaaaauagaacgaugguucguccggaacccguucuucgcaguaacggcacuaacaaucgcauaccucguaggcagcaacaugacacaaagaguggucaucgcgcuacucguacuagcaguggggcccgcauacagugcacacugcauaggaaucacagaccgugacuucaucgaaggcguacacggaggaacguggguaagcgcgacacuggaacaagacaaaugcgugacaguaauggcaccagacaaaccaagccuagacauaucccuagaaacggucgccaucgaccgucccgcagaaguacgaaagguaugcuauaaugcaguccucacacacgucaaaauaaacgacaaaugccccagcacgggcgaagcacaccucgccgaagaaaacgaaggggauaacgcgugcaaacgcaccuacuccgacaggggauggggcaacggaugcggacuguucggaaaaggauccauagucgcaugcgcaaaauuuaccugcgcaaaaagcaugagcuuguucgagguagaccaaacgaagauccaauacguaauccgagcucaacuacacguuggggccaagcaagagaacuggaauacggacaucaaaacacuaaaauucgacgcacucuccggcucacaagaagucgaguucaucggcuacggcaaagcaacacuagaaugccaaguacaaacagcgguggacuucggcaacagcuacauagcagaaauggaaacagaaagcuggauaguagaccgacaaugggcacaagaccuaacucugccauggcaaagcggcucaggaggaguguggagagagaugcaccaccugguagaguucgaacccccacacgcagcaacaauaaggguacuggcacuaggcaaccaagaaggcagccuaaaaaccgcacucacaggagccaugcgcgugacgaaggacaccaacgacaacaaccucuacaaacuccacggagggcacguauccugccgcguaaaacuaucagcacuaacgcuaaaaggaacaagcuacaaaauaugcacagacaaaauguucuucgucaaaaaccccacagacacaggccacggcacagucguaaugcaagugaaggucagcaagggggcccccugccgaaucccagucauaguggcagacgaccucacggccgccaucaacaaagggauccugguaacagugaacccaauagcaucgaccaacgacgacgaaguccucauagaagugaaucccccguucggcgacagcuacaucaucguaggacgcggcgacucccgacugacguaccaauggcauaaagaaggcagcagcauuggaaaacuauucacccaaaccaugaagggcgucgaaagacucgcggugaugggagacaccgcaugggacuucucgagcgcaggcggcuucuucacaagcguaggaaaagggauucacacaguauucggauccgcauuccaaggccucuucgggggacuaaacuggauaacgaaaguaauaaugggagcaguucucauauggguaggaaucaacacacgaaacaugacaauguccaugucaaugauacucguaggcguaaucaugauguuucugucacucggagugggagcagaccaagguugcgccauaaacuucggcaaguga

SEQ ID NO: 502 - RNA, 2028 nt, Artificial Sequence
  derived and/or modified CDS sequence (opt11) from YFV__NC_002031.1__SSIgE-prME (polyprotein: aa122-778)
auggauuggacguggauacucuuucucguggccgcggccacgcgcgugcacucggugacccuaguccgcaaaaacagauggcuacuacuaaacguaacaagcgaagaccugggcaaaacauucagcguuggcacaggcaauugcacgacaaacauacucgaagcaaaauacuggugccccgacagcauggaauacaacugcccaaaucuaagcccacgcgaagaaccagacgacaucgacuguuggugcuacggagucgaaaacgugagggucgcauacgguaaaugcgacagcgcuggcagaagcagacgcucccgacgagccauugaccucccuacccacgaaaaccacggccuaaaaacccggcaggaaaaauggaugacaggccggaugggagaacgccaacuacagaaaauagagaggugguuuguaagaaacccauucuucgccguaaccgcgcucaccaucgcuuaccucguaggaucaaacaugacgcaaagaguagugaucgcgcuacucguacuagcgguaggccccgccuacagcgcacacugcaucggcaucacugacagggacuucauagaaggcguccacgggggcacguggguuagcgccacacucgaacaagacaaaugcgucacagugauggcaccagacaaacccucacuagacaucucacuagaaaccgucgcaaucgaccgcccagcagaagucaggaaagugugcuacaacgccgucuuaacccacguaaaaauaaaugauaaaugcccaagcacgggagaggcacaccuagcggaagaaaacgaaggcgacaacgcgugcaaacguaccuacagcgacagaggguggggcaacggaugcggcuuauucggaaaaggaaguaucguagcaugcgcaaaauuuaccugcgccaaaagcaugucccuauucgaaguagaucaaacaaaaauacaauacgucauccgagcccaacuacacgugggggcaaaacaagaaaacuggaacaccgacaucaaaacacucaaauucgaugcccuaagcggcucccaagaaguagaguucaucgguuacggcaaggccacgcucgagugccaaguccaaacagcaguagacuucgggaacucauacaucgccgagauggaaacggaaucauggauugucgacagacaaugggcacaagaccuaacacuaccauggcaaucaggcagcggaggggucuggcgagaaaugcaccaccuaguagaguucgaacccccacacgccgcaacaauccgaguacuagcccucggaaaccaagaaggaucacuaaaaaccgcacucaccggcgcaaugcgcguaacaaaagauacaaacgacaacaaccuauacaaacuacacggcggacacgucagcugccgcgucaaacuauccgcccuaacacuaaaaggaacaagcuacaaaauaugcacagacaaaauguucuucgucaaaaauccgacugacacgggccacggcacagucguaaugcaaguaaaagucucaaaaggcgcaccaugcagaaucccaguaaucgucgccgaugaccuaacagccgcaaucaacaagggcauccucguaacaguaaaccccauagccagcaccaacgacgacgaaguccuaaucgaagucaacccacccuucggagacagcuacauaauaguaggacgaggggacucacgccuaaccuaccaauggcacaaagaaggauccucaaucggcaaacuguucacacaaacgaugaaaggcguagaaagacucgcaguaaugggcgauacggccugggacuucucaagcgcgggcggcuucuucacgagcgucggaaaaggcauccauacaguauucggaagcgcauuccaaggccuauuuggaggccucaacuggauaacaaaagugaucaugggagcaguacugaucugggucggcaucaacacccgcaacaugacgaugagcaugucaaugauccucgugggaguaauaaugauguuccucagccugggcguaggcgcauga

SEQ ID NO: 503 - RNA, 2016 nt, Artificial Sequence
  derived and/or modified CDS sequence (opt11) from YFV__NC_002031.1__SSIgE-prME (polyprotein: aa126-778)
auggauuggacguggauacucuuucucguggccgcggccacgcgcgugcacucgcgcaaaaacagauggcuacuacuaaacguaacaagcgaagaccugggcaaaacauucagcguuggcacaggcaauugcacgacaaacauacucgaagcaaaauacuggugccccgacagcauggaauacaacugcccaaaucuaagcccacgcgaagaaccagacgacaucgacuguuggugcuacggagucgaaaacgugagggucgcauacgguaaaugcgacagcgcuggcagaagcagacgcucccgacgagccauugaccucccuacccacgaaaaccacggccuaaaaacccggcaggaaaaauggaugacaggccggaugggagaacgccaacuacagaaaauagagaggugguuuguaagaaacccauucuucgccguaaccgcgcucaccaucgcuuaccucguaggaucaaacaugacgcaaagaguagugaucgcgcuacucguacuagcgguaggccccgccuacagcgcacacugcaucggcaucacugacagggacuucauagaaggcguccacgggggcacguggguuagcgccacacucgaacaagacaaaugcgucacagugauggcaccagacaaacccucacuagacaucucacuagaaaccgucgcaaucgaccgcccagcagaagucaggaaagugugcuacaacgccgucuuaacccacguaaaaauaaaugauaaaugcccaagcacgggagaggcacaccuagcggaagaaaacgaaggcgacaacgcgugcaaacguaccuacagcgacagaggguggggcaacggaugcggcuuauucggaaaaggaaguaucguagcaugcgcaaaauuuaccugcgccaaaagcaugucccuauucgaaguagaucaaacaaaaauacaauacgucauccgagcccaacuacacgugggggcaaaacaagaaaacuggaacaccgacaucaaaacacucaaauucgaugcccuaagcggcucccaagaaguagaguucaucgguuacggcaaggccacgcucgagugccaaguccaaacagcaguagacuucgggaacucauacaucgccgagauggaaacggaaucauggauugucgacagacaaugggcacaagaccuaacacuaccauggcaaucaggcagcggaggggucuggcgagaaaugcaccaccuaguagaguucgaacccccacacgccgcaacaauccgaguacuagcccucggaaaccaagaaggaucacuaaaaaccgcacucaccggcgcaaugcgcguaacaaaagauacaaacgacaacaaccuauacaaacuacacggcggacacgucagcugccgcgucaaacuauccgcccuaacacuaaaaggaacaagcuacaaaauaugcacagacaaaauguucuucgucaaaaauccgacugacacgggccacggcacagucguaaugcaaguaaaagucucaaaaggcgcaccaugcagaaucccaguaaucgucgccgaugaccuaacagccgcaaucaacaagggcauccucguaacaguaaaccccauagccagcaccaacgacgacgaaguccuaaucgaagucaacccacccuucggagacagcuacauaauaguaggacgaggggacucacgccuaaccuaccaauggcacaaagaaggauccucaaucggcaaacuguucacacaaacgaugaaaggcguagaaagacucgcaguaaugggcgauacggccugggacuucucaagcgcgggcggcuucuucacgagcgucggaaaaggcauccauacaguauucggaagcgcauuccaaggccuauuuggaggccucaacuggauaacaaaagugaucaugggagcaguacugaucugggucggcaucaacacccgcaacaugacgaugagcaugucaaugauccucgugggaguaauaaugauguuccucagccugggcguaggcgcauga

SEQ ID NO: 504 - RNA, 2076 nt, Artificial Sequence
  derived and/or modified CDS sequence (opt11) from YFV__NC_002031.1__SSjev-prME-XX (polyprotein: aa122-788)
auggggaaaaggagcgcgggcucgauaaugugguuggccucgcucgcggucgugaucgcgugcgcgggcgcggugacccuaguaaggaaaaacagauggcuacuacuaaacguaaccucagaagaucuaggaaagacauuuucagucggcacaggcaacugcacaaccaacauacuagaagcaaaauauuggugcccagacagcauggaauacaacugucccaaccucagcccaagagaggaaccagacgacauagacugcugguguuacggaguagaaaacguaagaguggcauacggcaaaugcgacagcgcaggcaggagccgaagaucccgcagagccaucgacuugcccacgcacgaaaaccacggccucaaaacacgacaagaaaaauggaugacagggcgaaugggagaacgacagcuccagaaaauagaacgaugguucguccggaacccguucuucgcaguaacggcacuaacaaucgcauaccucguaggcagcaacaugacacaaagaguggucaucgcgcuacucguacuagcaguggggcccgcauacagugcacacugcauaggaaucacagaccgugacuucaucgaaggcguacacggaggaacguggguaagcgcgacacuggaacaagacaaaugcgugacaguaauggcaccagacaaaccaagccuagacauaucccuagaaacggucgccaucgaccgucccgcagaaguacgaaagguaugcuauaaugcaguccucacacacgucaaaauaaacgacaaaugccccagcacgggcgaagcacaccucgccgaagaaaacgaaggggauaacgcgugcaaacgcaccuacuccgacaggggauggggcaacggaugcggacuguucggaaaaggauccauagucgcaugcgcaaaauuuaccugcgcaaaaagcaugagcuuguucgagguagaccaaacgaagauccaauacguaauccgagcucaacuacacguuggggccaagcaagagaacuggaauacggacaucaaaacacuaaaauucgacgcacucuccggcucacaagaagucgaguucaucggcuacggcaaagcaacacuagaaugccaaguacaaacagcgguggacuucggcaacagcuacauagcagaaauggaaacagaaagcuggauaguagaccgacaaugggcacaagaccuaacucugccauggcaaagcggcucaggaggaguguggagagagaugcaccaccugguagaguucgaacccccacacgcagcaacaauaaggguacuggcacuaggcaaccaagaaggcagccuaaaaaccgcacucacaggagccaugcgcgugacgaaggacaccaacgacaacaaccucuacaaacuccacggagggcacguauccugccgcguaaaacuaucagcacuaacgcuaaaaggaacaagcuacaaaauaugcacagacaaaauguucuucgucaaaaaccccacagacacaggccacggcacagucguaaugcaagugaaggucagcaagggggcccccugccgaaucccagucauaguggcagacgaccucacggccgccaucaacaaagggauccugguaacagugaacccaauagcaucgaccaacgacgacgaaguccucauagaagugaaucccccguucggcgacagcuacaucaucguaggacgcggcgacucccgacugacguaccaauggcauaaagaaggcagcagcauuggaaaacuauucacccaaaccaugaagggcgucgaaagacucgcggugaugggagacaccgcaugggacuucucgagcgcaggcggcuucuucacaagcguaggaaaagggauucacacaguauucggauccgcauuccaaggccucuucgggggacuaaacuggauaacgaaaguaauaaugggagcaguucucauauggguaggaaucaacacacgaaacaugacaauguccaugucaaugauacucguaggcguaaucaugauguuucugucacucggagugggagcagaccaagguugcgccauaaacuucggcaaguga

SEQ ID NO: 505 - RNA, 2064 nt, Artificial Sequence
  derived and/or modified CDS sequence (opt11) from YFV__NC_002031.1__SSjev-prME-XX (polyprotein: aa126-788)
auggggaaaaggagcgcgggcucgauaaugugguuggccucgcucgcggucgugaucgcgugcgcgggcgcgaggaaaaacagauggcuacuacuaaacguaaccucagaagaucuaggaaagacauuuucagucggcacaggcaacugcacaaccaacauacuagaagcaaaauauuggugcccagacagcauggaauacaacugucccaaccucagcccaagagaggaaccagacgacauagacugcugguguuacggaguagaaaacguaagaguggcauacggcaaaugcgacagcgcaggcaggagccgaagaucccgcagagccaucgacuugcccacgcacgaaaaccacggccucaaaacacgacaagaaaaauggaugacagggcgaaugggagaacgacagcuccagaaaauagaacgaugguucguccggaacccguucuucgcaguaacggcacuaacaaucgcauaccucguaggcagcaacaugacacaaagaguggucaucgcgcuacucguacuagcaguggggcccgcauacagugcacacugcauaggaaucacagaccgugacuucaucgaaggcguacacggaggaacguggguaagcgcgacacuggaacaagacaaaugcgugacaguaauggcaccagacaaaccaagccuagacauaucccuagaaacggucgccaucgaccgucccgcagaaguacgaaagguaugcuauaaugcaguccucacacacgucaaaauaaacgacaaaugccccagcacgggcgaagcacaccucgccgaagaaaacgaaggggauaacgcgugcaaacgcaccuacuccgacaggggauggggcaacggaugcggacuguucggaaaaggauccauagucgcaugcgcaaaauuuaccugcgcaaaaagcaugagcuuguucgagguagaccaaacgaagauccaauacguaauccgagcucaacuacacguuggggccaagcaagagaacuggaauacggacaucaaaacacuaaaauucgacgcacucuccggcucacaagaagucgaguucaucggcuacggcaaagcaacacuagaaugccaaguacaaacagcgguggacuucggcaacagcuacauagcagaaauggaaacagaaagcuggauaguagaccgacaaugggcacaagaccuaacucugccauggcaaagcggcucaggaggaguguggagagagaugcaccaccugguagaguucgaacccccacacgcagcaacaauaaggguacuggcacuaggcaaccaagaaggcagccuaaaaaccgcacucacaggagccaugcgcgugacgaaggacaccaacgacaacaaccucuacaaacuccacggagggcacguauccugccgcguaaaacuaucagcacuaacgcuaaaaggaacaagcuacaaaauaugcacagacaaaauguucuucgucaaaaaccccacagacacaggccacggcacagucguaaugcaagugaaggucagcaagggggcccccugccgaaucccagucauaguggcagacgaccucacggccgccaucaacaaagggauccugguaacagugaacccaauagcaucgaccaacgacgacgaaguccucauagaagugaaucccccguucggcgacagcuacaucaucguaggacgcggcgacucccgacugacguaccaauggcauaaagaaggcagcagcauuggaaaacuauucacccaaaccaugaagggcgucgaaagacucgcggugaugggagacaccgcaugggacuucucgagcgcaggcggcuucuucacaagcguaggaaaagggauucacacaguauucggauccgcauuccaaggccucuucgggggacuaaacuggauaacgaaaguaauaaugggagcaguucucauauggguaggaaucaacacacgaaacaugacaauguccaugucaaugauacucguaggcguaaucaugauguuucugucacucggagugggagcagaccaagguugcgccauaaacuucggcaaguga

SEQ ID NO: 506 - RNA, 2046 nt, Artificial Sequence
  derived and/or modified CDS sequence (opt11) from YFV__NC_002031.1__SSjev-prME (polyprotein: aa122-778)
auggggaaaaggagcgcgggcucgauaaugugguuggccucgcucgcggucgugaucgcgugcgcgggcgcggugacccuaguccgcaaaaacagauggcuacuacuaaacguaacaagcgaagaccugggcaaaacauucagcguuggcacaggcaauugcacgacaaacauacucgaagcaaaauacuggugccccgacagcauggaauacaacugcccaaaucuaagcccacgcgaagaaccagacgacaucgacuguuggugcuacggagucgaaaacgugagggucgcauacgguaaaugcgacagcgcuggcagaagcagacgcucccgacgagccauugaccucccuacccacgaaaaccacggccuaaaaacccggcaggaaaaauggaugacaggccggaugggagaacgccaacuacagaaaauagagaggugguuuguaagaaacccauucuucgccguaaccgcgcucaccaucgcuuaccucguaggaucaaacaugacgcaaagaguagugaucgcgcuacucguacuagcgguaggccccgccuacagcgcacacugcaucggcaucacugacagggacuucauagaaggcguccacgggggcacguggguuagcgccacacucgaacaagacaaaugcgucacagugauggcaccagacaaacccucacuagacaucucacuagaaaccgucgcaaucgaccgcccagcagaagucaggaaagugugcuacaacgccgucuuaacccacguaaaaauaaaugauaaaugcccaagcacgggagaggcacaccuagcggaagaaaacgaaggcgacaacgcgugcaaacguaccuacagcgacagaggguggggcaacggaugcggcuuauucggaaaaggaaguaucguagcaugcgcaaaauuuaccugcgccaaaagcaugucccuauucgaaguagaucaaacaaaaauacaauacgucauccgagcccaacuacacgugggggcaaaacaagaaaacuggaacaccgacaucaaaacacucaaauucgaugcccuaagcggcucccaagaaguagaguucaucgguuacggcaaggccacgcucgagugccaaguccaaacagcaguagacuucgggaacucauacaucgccgagauggaaacggaaucauggauugucgacagacaaugggcacaagaccuaacacuaccauggcaaucaggcagcggaggggucuggcgagaaaugcaccaccuaguagaguucgaacccccacacgccgcaacaauccgaguacuagcccucggaaaccaagaaggaucacuaaaaaccgcacucaccggcgcaaugcgcguaacaaaagauacaaacgacaacaaccuauacaaacuacacggcggacacgucagcugccgcgucaaacuauccgcccuaacacuaaaaggaacaagcuacaaaauaugcacagacaaaauguucuucgucaaaaauccgacugacacgggccacggcacagucguaaugcaaguaaaagucucaaaaggcgcaccaugcagaaucccaguaaucgucgccgaugaccuaacagccgcaaucaacaagggcauccucguaacaguaaaccccauagccagcaccaacgacgacgaaguccuaaucgaagucaacccacccuucggagacagcuacauaauaguaggacgaggggacucacgccuaaccuaccaauggcacaaagaaggauccucaaucggcaaacuguucacacaaacgaugaaaggcguagaaagacucgcaguaaugggcgauacggccugggacuucucaagcgcgggcggcuucuucacgagcgucggaaaaggcauccauacaguauucggaagcgcauuccaaggccuauuuggaggccucaacuggauaacaaaagugaucaugggagcaguacugaucugggucggcaucaacacccgcaacaugacgaugagcaugucaaugauccucgugggaguaauaaugauguuccucagccugggcguaggcgcauga

SEQ ID NO: 507 - RNA, 2034 nt, Artificial Sequence
  derived and/or modified CDS sequence (opt11) from YFV__NC_002031.1__SSjev-prME (polyprotein: aa126-778)
auggggaaaaggagcgcgggcucgauaaugugguuggccucgcucgcggucgugaucgcgugcgcgggcgcgcgcaaaaacagauggcuacuacuaaacguaacaagcgaagaccugggcaaaacauucagcguuggcacaggcaauugcacgacaaacauacucgaagcaaaauacuggugccccgacagcauggaauacaacugcccaaaucuaagcccacgcgaagaaccagacgacaucgacuguuggugcuacggagucgaaaacgugagggucgcauacgguaaaugcgacagcgcuggcagaagcagacgcucccgacgagccauugaccucccuacccacgaaaaccacggccuaaaaacccggcaggaaaaauggaugacaggccggaugggagaacgccaacuacagaaaauagagaggugguuuguaagaaacccauucuucgccguaaccgcgcucaccaucgcuuaccucguaggaucaaacaugacgcaaagaguagugaucgcgcuacucguacuagcgguaggccccgccuacagcgcacacugcaucggcaucacugacagggacuucauagaaggcguccacgggggcacguggguuagcgccacacucgaacaagacaaaugcgucacagugauggcaccagacaaacccucacuagacaucucacuagaaaccgucgcaaucgaccgcccagcagaagucaggaaagugugcuacaacgccgucuuaacccacguaaaaauaaaugauaaaugcccaagcacgggagaggcacaccuagcggaagaaaacgaaggcgacaacgcgugcaaacguaccuacagcgacagaggguggggcaacggaugcggcuuauucggaaaaggaaguaucguagcaugcgcaaaauuuaccugcgccaaaagcaugucccuauucgaaguagaucaaacaaaaauacaauacgucauccgagcccaacuacacgugggggcaaaacaagaaaacuggaacaccgacaucaaaacacucaaauucgaugcccuaagcggcucccaagaaguagaguucaucgguuacggcaaggccacgcucgagugccaaguccaaacagcaguagacuucgggaacucauacaucgccgagauggaaacggaaucauggauugucgacagacaaugggcacaagaccuaacacuaccauggcaaucaggcagcggaggggucuggcgagaaaugcaccaccuaguagaguucgaacccccacacgccgcaacaauccgaguacuagcccucggaaaccaagaaggaucacuaaaaaccgcacucaccggcgcaaugcgcguaacaaaagauacaaacgacaacaaccuauacaaacuacacggcggacacgucagcugccgcgucaaacuauccgcccuaacacuaaaaggaacaagcuacaaaauaugcacagacaaaauguucuucgucaaaaauccgacugacacgggccacggcacagucguaaugcaaguaaaagucucaaaaggcgcaccaugcagaaucccaguaaucgucgccgaugaccuaacagccgcaaucaacaagggcauccucguaacaguaaaccccauagccagcaccaacgacgacgaaguccuaaucgaagucaacccacccuucggagacagcuacauaauaguaggacgaggggacucacgccuaaccuaccaauggcacaaagaaggauccucaaucggcaaacuguucacacaaacgaugaaaggcguagaaagacucgcaguaaugggcgauacggccugggacuucucaagcgcgggcggcuucuucacgagcgucggaaaaggcauccauacaguauucggaagcgcauuccaaggccuauuuggaggccucaacuggauaacaaaagugaucaugggagcaguacugaucugggucggcaucaacacccgcaacaugacgaugagcaugucaaugauccucgugggaguaauaaugauguuccucagccugggcguaggcgcauga

SEQ ID NO: 508 - RNA, 2094 nt, Artificial Sequence
  derived and/or modified CDS sequence (opt11) from YFV__NC_002031.1__SSjev(V2)-prME-XX (polyprotein: aa122-788)
auggggagaaagcagaauaaaaggggagggaacgaggggucgauaaugugguuggcgucgcuggcgguagugauagcgugcgcgggggcggugacccuaguaaggaaaaacagauggcuacuacuaaacguaaccucagaagaucuaggaaagacauuuucagucggcacaggcaacugcacaaccaacauacuagaagcaaaauauuggugcccagacagcauggaauacaacugucccaaccucagcccaagagaggaaccagacgacauagacugcugguguuacggaguagaaaacguaagaguggcauacggcaaaugcgacagcgcaggcaggagccgaagaucccgcagagccaucgacuugcccacgcacgaaaaccacggccucaaaacacgacaagaaaaauggaugacagggcgaaugggagaacgacagcuccagaaaauagaacgaugguucguccggaacccguucuucgcaguaacggcacuaacaaucgcauaccucguaggcagcaacaugacacaaagaguggucaucgcgcuacucguacuagcaguggggcccgcauacagugcacacugcauaggaaucacagaccgugacuucaucgaaggcguacacggaggaacguggguaagcgcgacacuggaacaagacaaaugcgugacaguaauggcaccagacaaaccaagccuagacauaucccuagaaacggucgccaucgaccgucccgcagaaguacgaaagguaugcuauaaugcaguccucacacacgucaaaauaaacgacaaaugccccagcacgggcgaagcacaccucgccgaagaaaacgaaggggauaacgcgugcaaacgcaccuacuccgacaggggauggggcaacggaugcggacuguucggaaaaggauccauagucgcaugcgcaaaauuuaccugcgcaaaaagcaugagcuuguucgagguagaccaaacgaagauccaauacguaauccgagcucaacuacacguuggggccaagcaagagaacuggaauacggacaucaaaacacuaaaauucgacgcacucuccggcucacaagaagucgaguucaucggcuacggcaaagcaacacuagaaugccaaguacaaacagcgguggacuucggcaacagcuacauagcagaaauggaaacagaaagcuggauaguagaccgacaaugggcacaagaccuaacucugccauggcaaagcggcucaggaggaguguggagagagaugcaccaccugguagaguucgaacccccacacgcagcaacaauaaggguacuggcacuaggcaaccaagaaggcagccuaaaaaccgcacucacaggagccaugcgcgugacgaaggacaccaacgacaacaaccucuacaaacuccacggagggcacguauccugccgcguaaaacuaucagcacuaacgcuaaaaggaacaagcuacaaaauaugcacagacaaaauguucuucgucaaaaaccccacagacacaggccacggcacagucguaaugcaagugaaggucagcaagggggcccccugccgaaucccagucauaguggcagacgaccucacggccgccaucaacaaagggauccugguaacagugaacccaauagcaucgaccaacgacgacgaaguccucauagaagugaaucccccguucggcgacagcuacaucaucguaggacgcggcgacucccgacugacguaccaauggcauaaagaaggcagcagcauuggaaaacuauucacccaaaccaugaagggcgucgaaagacucgcggugaugggagacaccgcaugggacuucucgagcgcaggcggcuucuucacaagcguaggaaaagggauucacacaguauucggauccgcauuccaaggccucuucgggggacuaaacuggauaacgaaaguaauaaugggagcaguucucauauggguaggaaucaacacacgaaacaugacaauguccaugucaaugauacucguaggcguaaucaugauguuucugucacucggagugggagcagaccaagguugcgccauaaacuucggcaaguga

SEQ ID NO: 509 - RNA, 2082 nt, Artificial Sequence
  derived and/or modified CDS sequence (opt11) from YFV__NC_002031.1__SSjev(V2)-prME-XX (polyprotein: aa126-788)
auggggagaaagcagaauaaaaggggagggaacgaggggucgauaaugugguuggcgucgcuggcgguagugauagcgugcgcgggggcgaggaaaaacagauggcuacuacuaaacguaaccucagaagaucuaggaaagacauuuucagucggcacaggcaacugcacaaccaacauacuagaagcaaaauauuggugcccagacagcauggaauacaacugucccaaccucagcccaagagaggaaccagacgacauagacugcugguguuacggaguagaaaacguaagaguggcauacggcaaaugcgacagcgcaggcaggagccgaagaucccgcagagccaucgacuugcccacgcacgaaaaccacggccucaaaacacgacaagaaaaauggaugacagggcgaaugggagaacgacagcuccagaaaauagaacgaugguucguccggaacccguucuucgcaguaacggcacuaacaaucgcauaccucguaggcagcaacaugacacaaagaguggucaucgcgcuacucguacuagcaguggggcccgcauacagugcacacugcauaggaaucacagaccgugacuucaucgaaggcguacacggaggaacguggguaagcgcgacacuggaacaagacaaaugcgugacaguaauggcaccagacaaaccaagccuagacauaucccuagaaacggucgccaucgaccgucccgcagaaguacgaaagguaugcuauaaugcaguccucacacacgucaaaauaaacgacaaaugccccagcacgggcgaagcacaccucgccgaagaaaacgaaggggauaacgcgugcaaacgcaccuacuccgacaggggauggggcaacggaugcggacuguucggaaaaggauccauagucgcaugcgcaaaauuuaccugcgcaaaaagcaugagcuuguucgagguagaccaaacgaagauccaauacguaauccgagcucaacuacacguuggggccaagcaagagaacuggaauacggacaucaaaacacuaaaauucgacgcacucuccggcucacaagaagucgaguucaucggcuacggcaaagcaacacuagaaugccaaguacaaacagcgguggacuucggcaacagcuacauagcagaaauggaaacagaaagcuggauaguagaccgacaaugggcacaagaccuaacucugccauggcaaagcggcucaggaggaguguggagagagaugcaccaccugguagaguucgaacccccacacgcagcaacaauaaggguacuggcacuaggcaaccaagaaggcagccuaaaaaccgcacucacaggagccaugcgcgugacgaaggacaccaacgacaacaaccucuacaaacuccacggagggcacguauccugccgcguaaaacuaucagcacuaacgcuaaaaggaacaagcuacaaaauaugcacagacaaaauguucuucgucaaaaaccccacagacacaggccacggcacagucguaaugcaagugaaggucagcaagggggcccccugccgaaucccagucauaguggcagacgaccucacggccgccaucaacaaagggauccugguaacagugaacccaauagcaucgaccaacgacgacgaaguccucauagaagugaaucccccguucggcgacagcuacaucaucguaggacgcggcgacucccgacugacguaccaauggcauaaagaaggcagcagcauuggaaaacuauucacccaaaccaugaagggcgucgaaagacucgcggugaugggagacaccgcaugggacuucucgagcgcaggcggcuucuucacaagcguaggaaaagggauucacacaguauucggauccgcauuccaaggccucuucgggggacuaaacuggauaacgaaaguaauaaugggagcaguucucauauggguaggaaucaacacacgaaacaugacaauguccaugucaaugauacucguaggcguaaucaugauguuucugucacucggagugggagcagaccaagguugcgccauaaacuucggcaaguga

SEQ ID NO: 510 - RNA, 2064 nt, Artificial Sequence
  derived and/or modified CDS sequence (opt11) from YFV__NC_002031.1__SSjev(V2)-prME (polyprotein: aa122-778)
auggggagaaagcagaauaaaaggggagggaacgaggggucgauaaugugguuggcgucgcuggcgguagugauagcgugcgcgggggcggugacccuaguccgcaaaaacagauggcuacuacuaaacguaacaagcgaagaccugggcaaaacauucagcguuggcacaggcaauugcacgacaaacauacucgaagcaaaauacuggugccccgacagcauggaauacaacugcccaaaucuaagcccacgcgaagaaccagacgacaucgacuguuggugcuacggagucgaaaacgugagggucgcauacgguaaaugcgacagcgcuggcagaagcagacgcucccgacgagccauugaccucccuacccacgaaaaccacggccuaaaaacccggcaggaaaaauggaugacaggccggaugggagaacgccaacuacagaaaauagagaggugguuuguaagaaacccauucuucgccguaaccgcgcucaccaucgcuuaccucguaggaucaaacaugacgcaaagaguagugaucgcgcuacucguacuagcgguaggccccgccuacagcgcacacugcaucggcaucacugacagggacuucauagaaggcguccacgggggcacguggguuagcgccacacucgaacaagacaaaugcgucacagugauggcaccagacaaacccucacuagacaucucacuagaaaccgucgcaaucgaccgcccagcagaagucaggaaagugugcuacaacgccgucuuaacccacguaaaaauaaaugauaaaugcccaagcacgggagaggcacaccuagcggaagaaaacgaaggcgacaacgcgugcaaacguaccuacagcgacagaggguggggcaacggaugcggcuuauucggaaaaggaaguaucguagcaugcgcaaaauuuaccugcgccaaaagcaugucccuauucgaaguagaucaaacaaaaauacaauacgucauccgagcccaacuacacgugggggcaaaacaagaaaacuggaacaccgacaucaaaacacucaaauucgaugcccuaagcggcucccaagaaguagaguucaucgguuacggcaaggccacgcucgagugccaaguccaaacagcaguagacuucgggaacucauacaucgccgagauggaaacggaaucauggauugucgacagacaaugggcacaagaccuaacacuaccauggcaaucaggcagcggaggggucuggcgagaaaugcaccaccuaguagaguucgaacccccacacgccgcaacaauccgaguacuagcccucggaaaccaagaaggaucacuaaaaaccgcacucaccggcgcaaugcgcguaacaaaagauacaaacgacaacaaccuauacaaacuacacggcggacacgucagcugccgcgucaaacuauccgcccuaacacuaaaaggaacaagcuacaaaauaugcacagacaaaauguucuucgucaaaaauccgacugacacgggccacggcacagucguaaugcaaguaaaagucucaaaaggcgcaccaugcagaaucccaguaaucgucgccgaugaccuaacagccgcaaucaacaagggcauccucguaacaguaaaccccauagccagcaccaacgacgacgaaguccuaaucgaagucaacccacccuucggagacagcuacauaauaguaggacgaggggacucacgccuaaccuaccaauggcacaaagaaggauccucaaucggcaaacuguucacacaaacgaugaaaggcguagaaagacucgcaguaaugggcgauacggccugggacuucucaagcgcgggcggcuucuucacgagcgucggaaaaggcauccauacaguauucggaagcgcauuccaaggccuauuuggaggccucaacuggauaacaaaagugaucaugggagcaguacugaucugggucggcaucaacacccgcaacaugacgaugagcaugucaaugauccucgugggaguaauaaugauguuccucagccugggcguaggcgcauga

SEQ ID NO: 511 - RNA, 2052 nt, Artificial Sequence
  derived and/or modified CDS sequence (opt11) from YFV__NC_002031.1__SSjev(V2)-prME (polyprotein: aa126-778)
auggggagaaagcagaauaaaaggggagggaacgaggggucgauaaugugguuggcgucgcuggcgguagugauagcgugcgcgggggcgcgcaaaaacagauggcuacuacuaaacguaacaagcgaagaccugggcaaaacauucagcguuggcacaggcaauugcacgacaaacauacucgaagcaaaauacuggugccccgacagcauggaauacaacugcccaaaucuaagcccacgcgaagaaccagacgacaucgacuguuggugcuacggagucgaaaacgugagggucgcauacgguaaaugcgacagcgcuggcagaagcagacgcucccgacgagccauugaccucccuacccacgaaaaccacggccuaaaaacccggcaggaaaaauggaugacaggccggaugggagaacgccaacuacagaaaauagagaggugguuuguaagaaacccauucuucgccguaaccgcgcucaccaucgcuuaccucguaggaucaaacaugacgcaaagaguagugaucgcgcuacucguacuagcgguaggccccgccuacagcgcacacugcaucggcaucacugacagggacuucauagaaggcguccacgggggcacguggguuagcgccacacucgaacaagacaaaugcgucacagugauggcaccagacaaacccucacuagacaucucacuagaaaccgucgcaaucgaccgcccagcagaagucaggaaagugugcuacaacgccgucuuaacccacguaaaaauaaaugauaaaugcccaagcacgggagaggcacaccuagcggaagaaaacgaaggcgacaacgcgugcaaacguaccuacagcgacagaggguggggcaacggaugcggcuuauucggaaaaggaaguaucguagcaugcgcaaaauuuaccugcgccaaaagcaugucccuauucgaaguagaucaaacaaaaauacaauacgucauccgagcccaacuacacgugggggcaaaacaagaaaacuggaacaccgacaucaaaacacucaaauucgaugcccuaagcggcucccaagaaguagaguucaucgguuacggcaaggccacgcucgagugccaaguccaaacagcaguagacuucgggaacucauacaucgccgagauggaaacggaaucauggauugucgacagacaaugggcacaagaccuaacacuaccauggcaaucaggcagcggaggggucuggcgagaaaugcaccaccuaguagaguucgaacccccacacgccgcaacaauccgaguacuagcccucggaaaccaagaaggaucacuaaaaaccgcacucaccggcgcaaugcgcguaacaaaagauacaaacgacaacaaccuauacaaacuacacggcggacacgucagcugccgcgucaaacuauccgcccuaacacuaaaaggaacaagcuacaaaauaugcacagacaaaauguucuucgucaaaaauccgacugacacgggccacggcacagucguaaugcaaguaaaagucucaaaaggcgcaccaugcagaaucccaguaaucgucgccgaugaccuaacagccgcaaucaacaagggcauccucguaacaguaaaccccauagccagcaccaacgacgacgaaguccuaaucgaagucaacccacccuucggagacagcuacauaauaguaggacgaggggacucacgccuaaccuaccaauggcacaaagaaggauccucaaucggcaaacuguucacacaaacgaugaaaggcguagaaagacucgcaguaaugggcgauacggccugggacuucucaagcgcgggcggcuucuucacgagcgucggaaaaggcauccauacaguauucggaagcgcauuccaaggccuauuuggaggccucaacuggauaacaaaagugaucaugggagcaguacugaucugggucggcaucaacacccgcaacaugacgaugagcaugucaaugauccucgugggaguaauaaugauguuccucagccugggcguaggcgcauga

SEQ ID NO: 512 - RNA, 2067 nt, Artificial Sequence
  derived and/or modified CDS sequence (opt11) from YFV__NC_002031.1__SSjev(V3)-prME-XX (polyprotein: aa122-788)
augaacgagggcucgaucaugugguuggccucgcucgcggucgugaucgcgugcgcgggcgcggugacccuaguaaggaaaaacagauggcuacuacuaaacguaaccucagaagaucuaggaaagacauuuucagucggcacaggcaacugcacaaccaacauacuagaagcaaaauauuggugcccagacagcauggaauacaacugucccaaccucagcccaagagaggaaccagacgacauagacugcugguguuacggaguagaaaacguaagaguggcauacggcaaaugcgacagcgcaggcaggagccgaagaucccgcagagccaucgacuugcccacgcacgaaaaccacggccucaaaacacgacaagaaaaauggaugacagggcgaaugggagaacgacagcuccagaaaauagaacgaugguucguccggaacccguucuucgcaguaacggcacuaacaaucgcauaccucguaggcagcaacaugacacaaagaguggucaucgcgcuacucguacuagcaguggggcccgcauacagugcacacugcauaggaaucacagaccgugacuucaucgaaggcguacacggaggaacguggguaagcgcgacacuggaacaagacaaaugcgugacaguaauggcaccagacaaaccaagccuagacauaucccuagaaacggucgccaucgaccgucccgcagaaguacgaaagguaugcuauaaugcaguccucacacacgucaaaauaaacgacaaaugccccagcacgggcgaagcacaccucgccgaagaaaacgaaggggauaacgcgugcaaacgcaccuacuccgacaggggauggggcaacggaugcggacuguucggaaaaggauccauagucgcaugcgcaaaauuuaccugcgcaaaaagcaugagcuuguucgagguagaccaaacgaagauccaauacguaauccgagcucaacuacacguuggggccaagcaagagaacuggaauacggacaucaaaacacuaaaauucgacgcacucuccggcucacaagaagucgaguucaucggcuacggcaaagcaacacuagaaugccaaguacaaacagcgguggacuucggcaacagcuacauagcagaaauggaaacagaaagcuggauaguagaccgacaaugggcacaagaccuaacucugccauggcaaagcggcucaggaggaguguggagagagaugcaccaccugguagaguucgaacccccacacgcagcaacaauaaggguacuggcacuaggcaaccaagaaggcagccuaaaaaccgcacucacaggagccaugcgcgugacgaaggacaccaacgacaacaaccucuacaaacuccacggagggcacguauccugccgcguaaaacuaucagcacuaacgcuaaaaggaacaagcuacaaaauaugcacagacaaaauguucuucgucaaaaaccccacagacacaggccacggcacagucguaaugcaagugaaggucagcaagggggcccccugccgaaucccagucauaguggcagacgaccucacggccgccaucaacaaagggauccugguaacagugaacccaauagcaucgaccaacgacgacgaaguccucauagaagugaaucccccguucggcgacagcuacaucaucguaggacgcggcgacucccgacugacguaccaauggcauaaagaaggcagcagcauuggaaaacuauucacccaaaccaugaagggcgucgaaagacucgcggugaugggagacaccgcaugggacuucucgagcgcaggcggcuucuucacaagcguaggaaaagggauucacacaguauucggauccgcauuccaaggccucuucgggggacuaaacuggauaacgaaaguaauaaugggagcaguucucauauggguaggaaucaacacacgaaacaugacaauguccaugucaaugauacucguaggcguaaucaugauguuucugucacucggagugggagcagaccaagguugcgccauaaacuucggcaaguga

SEQ ID NO: 513 - RNA, 2055 nt, Artificial Sequence
  derived and/or modified CDS sequence (opt11) from YFV__NC_002031.1__SSjev(V3)-prME-XX (polyprotein: aa126-788)
augaacgagggcucgaucaugugguuggccucgcucgcggucgugaucgcgugcgcgggcgcgaggaaaaacagauggcuacuacuaaacguaaccucagaagaucuaggaaagacauuuucagucggcacaggcaacugcacaaccaacauacuagaagcaaaauauuggugcccagacagcauggaauacaacugucccaaccucagcccaagagaggaaccagacgacauagacugcugguguuacggaguagaaaacguaagaguggcauacggcaaaugcgacagcgcaggcaggagccgaagaucccgcagagccaucgacuugcccacgcacgaaaaccacggccucaaaacacgacaagaaaaauggaugacagggcgaaugggagaacgacagcuccagaaaauagaacgaugguucguccggaacccguucuucgcaguaacggcacuaacaaucgcauaccucguaggcagcaacaugacacaaagaguggucaucgcgcuacucguacuagcaguggggcccgcauacagugcacacugcauaggaaucacagaccgugacuucaucgaaggcguacacggaggaacguggguaagcgcgacacuggaacaagacaaaugcgugacaguaauggcaccagacaaaccaagccuagacauaucccuagaaacggucgccaucgaccgucccgcagaaguacgaaagguaugcuauaaugcaguccucacacacgucaaaauaaacgacaaaugccccagcacgggcgaagcacaccucgccgaagaaaacgaaggggauaacgcgugcaaacgcaccuacuccgacaggggauggggcaacggaugcggacuguucggaaaaggauccauagucgcaugcgcaaaauuuaccugcgcaaaaagcaugagcuuguucgagguagaccaaacgaagauccaauacguaauccgagcucaacuacacguuggggccaagcaagagaacuggaauacggacaucaaaacacuaaaauucgacgcacucuccggcucacaagaagucgaguucaucggcuacggcaaagcaacacuagaaugccaaguacaaacagcgguggacuucggcaacagcuacauagcagaaauggaaacagaaagcuggauaguagaccgacaaugggcacaagaccuaacucugccauggcaaagcggcucaggaggaguguggagagagaugcaccaccugguagaguucgaacccccacacgcagcaacaauaaggguacuggcacuaggcaaccaagaaggcagccuaaaaaccgcacucacaggagccaugcgcgugacgaaggacaccaacgacaacaaccucuacaaacuccacggagggcacguauccugccgcguaaaacuaucagcacuaacgcuaaaaggaacaagcuacaaaauaugcacagacaaaauguucuucgucaaaaaccccacagacacaggccacggcacagucguaaugcaagugaaggucagcaagggggcccccugccgaaucccagucauaguggcagacgaccucacggccgccaucaacaaagggauccugguaacagugaacccaauagcaucgaccaacgacgacgaaguccucauagaagugaaucccccguucggcgacagcuacaucaucguaggacgcggcgacucccgacugacguaccaauggcauaaagaaggcagcagcauuggaaaacuauucacccaaaccaugaagggcgucgaaagacucgcggugaugggagacaccgcaugggacuucucgagcgcaggcggcuucuucacaagcguaggaaaagggauucacacaguauucggauccgcauuccaaggccucuucgggggacuaaacuggauaacgaaaguaauaaugggagcaguucucauauggguaggaaucaacacacgaaacaugacaauguccaugucaaugauacucguaggcguaaucaugauguuucugucacucggagugggagcagaccaagguugcgccauaaacuucggcaaguga

SEQ ID NO: 514 - RNA, 2037 nt, Artificial Sequence
  derived and/or modified CDS sequence (opt11) from YFV__NC_002031.1__SSjev(V3)-prME (polyprotein: aa122-778)
augaacgagggcucgaucaugugguuggccucgcucgcggucgugaucgcgugcgcgggcgcggugacccuaguccgcaaaaacagauggcuacuacuaaacguaacaagcgaagaccugggcaaaacauucagcguuggcacaggcaauugcacgacaaacauacucgaagcaaaauacuggugccccgacagcauggaauacaacugcccaaaucuaagcccacgcgaagaaccagacgacaucgacuguuggugcuacggagucgaaaacgugagggucgcauacgguaaaugcgacagcgcuggcagaagcagacgcucccgacgagccauugaccucccuacccacgaaaaccacggccuaaaaacccggcaggaaaaauggaugacaggccggaugggagaacgccaacuacagaaaauagagaggugguuuguaagaaacccauucuucgccguaaccgcgcucaccaucgcuuaccucguaggaucaaacaugacgcaaagaguagugaucgcgcuacucguacuagcgguaggccccgccuacagcgcacacugcaucggcaucacugacagggacuucauagaaggcguccacgggggcacguggguuagcgccacacucgaacaagacaaaugcgucacagugauggcaccagacaaacccucacuagacaucucacuagaaaccgucgcaaucgaccgcccagcagaagucaggaaagugugcuacaacgccgucuuaacccacguaaaaauaaaugauaaaugcccaagcacgggagaggcacaccuagcggaagaaaacgaaggcgacaacgcgugcaaacguaccuacagcgacagaggguggggcaacggaugcggcuuauucggaaaaggaaguaucguagcaugcgcaaaauuuaccugcgccaaaagcaugucccuauucgaaguagaucaaacaaaaauacaauacgucauccgagcccaacuacacgugggggcaaaacaagaaaacuggaacaccgacaucaaaacacucaaauucgaugcccuaagcggcucccaagaaguagaguucaucgguuacggcaaggccacgcucgagugccaaguccaaacagcaguagacuucgggaacucauacaucgccgagauggaaacggaaucauggauugucgacagacaaugggcacaagaccuaacacuaccauggcaaucaggcagcggaggggucuggcgagaaaugcaccaccuaguagaguucgaacccccacacgccgcaacaauccgaguacuagcccucggaaaccaagaaggaucacuaaaaaccgcacucaccggcgcaaugcgcguaacaaaagauacaaacgacaacaaccuauacaaacuacacggcggacacgucagcugccgcgucaaacuauccgcccuaacacuaaaaggaacaagcuacaaaauaugcacagacaaaauguucuucgucaaaaauccgacugacacgggccacggcacagucguaaugcaaguaaaagucucaaaaggcgcaccaugcagaaucccaguaaucgucgccgaugaccuaacagccgcaaucaacaagggcauccucguaacaguaaaccccauagccagcaccaacgacgacgaaguccuaaucgaagucaacccacccuucggagacagcuacauaauaguaggacgaggggacucacgccuaaccuaccaauggcacaaagaaggauccucaaucggcaaacuguucacacaaacgaugaaaggcguagaaagacucgcaguaaugggcgauacggccugggacuucucaagcgcgggcggcuucuucacgagcgucggaaaaggcauccauacaguauucggaagcgcauuccaaggccuauuuggaggccucaacuggauaacaaaagugaucaugggagcaguacugaucugggucggcaucaacacccgcaacaugacgaugagcaugucaaugauccucgugggaguaauaaugauguuccucagccugggcguaggcgcauga

SEQ ID NO: 515 - RNA, 2025 nt, Artificial Sequence
  derived and/or modified CDS sequence (opt11) from YFV__NC_002031.1__SSjev(V3)-prME (polyprotein: aa126-778)
augaacgagggcucgaucaugugguuggccucgcucgcggucgugaucgcgugcgcgggcgcgcgcaaaaacagauggcuacuacuaaacguaacaagcgaagaccugggcaaaacauucagcguuggcacaggcaauugcacgacaaacauacucgaagcaaaauacuggugccccgacagcauggaauacaacugcccaaaucuaagcccacgcgaagaaccagacgacaucgacuguuggugcuacggagucgaaaacgugagggucgcauacgguaaaugcgacagcgcuggcagaagcagacgcucccgacgagccauugaccucccuacccacgaaaaccacggccuaaaaacccggcaggaaaaauggaugacaggccggaugggagaacgccaacuacagaaaauagagaggugguuuguaagaaacccauucuucgccguaaccgcgcucaccaucgcuuaccucguaggaucaaacaugacgcaaagaguagugaucgcgcuacucguacuagcgguaggccccgccuacagcgcacacugcaucggcaucacugacagggacuucauagaaggcguccacgggggcacguggguuagcgccacacucgaacaagacaaaugcgucacagugauggcaccagacaaacccucacuagacaucucacuagaaaccgucgcaaucgaccgcccagcagaagucaggaaagugugcuacaacgccgucuuaacccacguaaaaauaaaugauaaaugcccaagcacgggagaggcacaccuagcggaagaaaacgaaggcgacaacgcgugcaaacguaccuacagcgacagaggguggggcaacggaugcggcuuauucggaaaaggaaguaucguagcaugcgcaaaauuuaccugcgccaaaagcaugucccuauucgaaguagaucaaacaaaaauacaauacgucauccgagcccaacuacacgugggggcaaaacaagaaaacuggaacaccgacaucaaaacacucaaauucgaugcccuaagcggcucccaagaaguagaguucaucgguuacggcaaggccacgcucgagugccaaguccaaacagcaguagacuucgggaacucauacaucgccgagauggaaacggaaucauggauugucgacagacaaugggcacaagaccuaacacuaccauggcaaucaggcagcggaggggucuggcgagaaaugcaccaccuaguagaguucgaacccccacacgccgcaacaauccgaguacuagcccucggaaaccaagaaggaucacuaaaaaccgcacucaccggcgcaaugcgcguaacaaaagauacaaacgacaacaaccuauacaaacuacacggcggacacgucagcugccgcgucaaacuauccgcccuaacacuaaaaggaacaagcuacaaaauaugcacagacaaaauguucuucgucaaaaauccgacugacacgggccacggcacagucguaaugcaaguaaaagucucaaaaggcgcaccaugcagaaucccaguaaucgucgccgaugaccuaacagccgcaaucaacaagggcauccucguaacaguaaaccccauagccagcaccaacgacgacgaaguccuaaucgaagucaacccacccuucggagacagcuacauaauaguaggacgaggggacucacgccuaaccuaccaauggcacaaagaaggauccucaaucggcaaacuguucacacaaacgaugaaaggcguagaaagacucgcaguaaugggcgauacggccugggacuucucaagcgcgggcggcuucuucacgagcgucggaaaaggcauccauacaguauucggaagcgcauuccaaggccuauuuggaggccucaacuggauaacaaaagugaucaugggagcaguacugaucugggucggcaucaacacccgcaacaugacgaugagcaugucaaugauccucgugggaguaauaaugauguuccucagccugggcguaggcgcauga

SEQ ID NO: 516 - RNA, 2076 nt, Artificial Sequence
  derived and/or modified CDS sequence (opt11) from YFV__NC_002031.1__SSjev(V4)-prME-XX (polyprotein: aa122-788)
augcucggcuccaacuccggccaacgcgucgucuucaccauccuccuccuccucgucgcccccgccuacuccgugacccuaguaaggaaaaacagauggcuacuacuaaacguaaccucagaagaucuaggaaagacauuuucagucggcacaggcaacugcacaaccaacauacuagaagcaaaauauuggugcccagacagcauggaauacaacugucccaaccucagcccaagagaggaaccagacgacauagacugcugguguuacggaguagaaaacguaagaguggcauacggcaaaugcgacagcgcaggcaggagccgaagaucccgcagagccaucgacuugcccacgcacgaaaaccacggccucaaaacacgacaagaaaaauggaugacagggcgaaugggagaacgacagcuccagaaaauagaacgaugguucguccggaacccguucuucgcaguaacggcacuaacaaucgcauaccucguaggcagcaacaugacacaaagaguggucaucgcgcuacucguacuagcaguggggcccgcauacagugcacacugcauaggaaucacagaccgugacuucaucgaaggcguacacggaggaacguggguaagcgcgacacuggaacaagacaaaugcgugacaguaauggcaccagacaaaccaagccuagacauaucccuagaaacggucgccaucgaccgucccgcagaaguacgaaagguaugcuauaaugcaguccucacacacgucaaaauaaacgacaaaugccccagcacgggcgaagcacaccucgccgaagaaaacgaaggggauaacgcgugcaaacgcaccuacuccgacaggggauggggcaacggaugcggacuguucggaaaaggauccauagucgcaugcgcaaaauuuaccugcgcaaaaagcaugagcuuguucgagguagaccaaacgaagauccaauacguaauccgagcucaacuacacguuggggccaagcaagagaacuggaauacggacaucaaaacacuaaaauucgacgcacucuccggcucacaagaagucgaguucaucggcuacggcaaagcaacacuagaaugccaaguacaaacagcgguggacuucggcaacagcuacauagcagaaauggaaacagaaagcuggauaguagaccgacaaugggcacaagaccuaacucugccauggcaaagcggcucaggaggaguguggagagagaugcaccaccugguagaguucgaacccccacacgcagcaacaauaaggguacuggcacuaggcaaccaagaaggcagccuaaaaaccgcacucacaggagccaugcgcgugacgaaggacaccaacgacaacaaccucuacaaacuccacggagggcacguauccugccgcguaaaacuaucagcacuaacgcuaaaaggaacaagcuacaaaauaugcacagacaaaauguucuucgucaaaaaccccacagacacaggccacggcacagucguaaugcaagugaaggucagcaagggggcccccugccgaaucccagucauaguggcagacgaccucacggccgccaucaacaaagggauccugguaacagugaacccaauagcaucgaccaacgacgacgaaguccucauagaagugaaucccccguucggcgacagcuacaucaucguaggacgcggcgacucccgacugacguaccaauggcauaaagaaggcagcagcauuggaaaacuauucacccaaaccaugaagggcgucgaaagacucgcggugaugggagacaccgcaugggacuucucgagcgcaggcggcuucuucacaagcguaggaaaagggauucacacaguauucggauccgcauuccaaggccucuucgggggacuaaacuggauaacgaaaguaauaaugggagcaguucucauauggguaggaaucaacacacgaaacaugacaauguccaugucaaugauacucguaggcguaaucaugauguuucugucacucggagugggagcagaccaagguugcgccauaaacuucggcaaguga

SEQ ID NO: 517 - RNA, 2064 nt, Artificial Sequence
  derived and/or modified CDS sequence (opt11) from YFV__NC_002031.1__SSjev(V4)-prME-XX (polyprotein: aa126-788)
augcucggcuccaacuccggccaacgcgucgucuucaccauccuccuccuccucgucgcccccgccuacuccaggaaaaacagauggcuacuacuaaacguaaccucagaagaucuaggaaagacauuuucagucggcacaggcaacugcacaaccaacauacuagaagcaaaauauuggugcccagacagcauggaauacaacugucccaaccucagcccaagagaggaaccagacgacauagacugcugguguuacggaguagaaaacguaagaguggcauacggcaaaugcgacagcgcaggcaggagccgaagaucccgcagagccaucgacuugcccacgcacgaaaaccacggccucaaaacacgacaagaaaaauggaugacagggcgaaugggagaacgacagcuccagaaaauagaacgaugguucguccggaacccguucuucgcaguaacggcacuaacaaucgcauaccucguaggcagcaacaugacacaaagaguggucaucgcgcuacucguacuagcaguggggcccgcauacagugcacacugcauaggaaucacagaccgugacuucaucgaaggcguacacggaggaacguggguaagcgcgacacuggaacaagacaaaugcgugacaguaauggcaccagacaaaccaagccuagacauaucccuagaaacggucgccaucgaccgucccgcagaaguacgaaagguaugcuauaaugcaguccucacacacgucaaaauaaacgacaaaugccccagcacgggcgaagcacaccucgccgaagaaaacgaaggggauaacgcgugcaaacgcaccuacuccgacaggggauggggcaacggaugcggacuguucggaaaaggauccauagucgcaugcgcaaaauuuaccugcgcaaaaagcaugagcuuguucgagguagaccaaacgaagauccaauacguaauccgagcucaacuacacguuggggccaagcaagagaacuggaauacggacaucaaaacacuaaaauucgacgcacucuccggcucacaagaagucgaguucaucggcuacggcaaagcaacacuagaaugccaaguacaaacagcgguggacuucggcaacagcuacauagcagaaauggaaacagaaagcuggauaguagaccgacaaugggcacaagaccuaacucugccauggcaaagcggcucaggaggaguguggagagagaugcaccaccugguagaguucgaacccccacacgcagcaacaauaaggguacuggcacuaggcaaccaagaaggcagccuaaaaaccgcacucacaggagccaugcgcgugacgaaggacaccaacgacaacaaccucuacaaacuccacggagggcacguauccugccgcguaaaacuaucagcacuaacgcuaaaaggaacaagcuacaaaauaugcacagacaaaauguucuucgucaaaaaccccacagacacaggccacggcacagucguaaugcaagugaaggucagcaagggggcccccugccgaaucccagucauaguggcagacgaccucacggccgccaucaacaaagggauccugguaacagugaacccaauagcaucgaccaacgacgacgaaguccucauagaagugaaucccccguucggcgacagcuacaucaucguaggacgcggcgacucccgacugacguaccaauggcauaaagaaggcagcagcauuggaaaacuauucacccaaaccaugaagggcgucgaaagacucgcggugaugggagacaccgcaugggacuucucgagcgcaggcggcuucuucacaagcguaggaaaagggauucacacaguauucggauccgcauuccaaggccucuucgggggacuaaacuggauaacgaaaguaauaaugggagcaguucucauauggguaggaaucaacacacgaaacaugacaauguccaugucaaugauacucguaggcguaaucaugauguuucugucacucggagugggagcagaccaagguugcgccauaaacuucggcaaguga

SEQ ID NO: 518 - RNA, 2046 nt, Artificial Sequence
  derived and/or modified CDS sequence (opt11) from YFV__NC_002031.1__SSjev(V4)-prME (polyprotein: aa122-778)
augcucggcuccaacuccggccaacgcgucgucuucaccauccuccuccuccucgucgcccccgccuacuccgugacccuaguccgcaaaaacagauggcuacuacuaaacguaacaagcgaagaccugggcaaaacauucagcguuggcacaggcaauugcacgacaaacauacucgaagcaaaauacuggugccccgacagcauggaauacaacugcccaaaucuaagcccacgcgaagaaccagacgacaucgacuguuggugcuacggagucgaaaacgugagggucgcauacgguaaaugcgacagcgcuggcagaagcagacgcucccgacgagccauugaccucccuacccacgaaaaccacggccuaaaaacccggcaggaaaaauggaugacaggccggaugggagaacgccaacuacagaaaauagagaggugguuuguaagaaacccauucuucgccguaaccgcgcucaccaucgcuuaccucguaggaucaaacaugacgcaaagaguagugaucgcgcuacucguacuagcgguaggccccgccuacagcgcacacugcaucggcaucacugacagggacuucauagaaggcguccacgggggcacguggguuagcgccacacucgaacaagacaaaugcgucacagugauggcaccagacaaacccucacuagacaucucacuagaaaccgucgcaaucgaccgcccagcagaagucaggaaagugugcuacaacgccgucuuaacccacguaaaaauaaaugauaaaugcccaagcacgggagaggcacaccuagcggaagaaaacgaaggcgacaacgcgugcaaacguaccuacagcgacagaggguggggcaacggaugcggcuuauucggaaaaggaaguaucguagcaugcgcaaaauuuaccugcgccaaaagcaugucccuauucgaaguagaucaaacaaaaauacaauacgucauccgagcccaacuacacgugggggcaaaacaagaaaacuggaacaccgacaucaaaacacucaaauucgaugcccuaagcggcucccaagaaguagaguucaucgguuacggcaaggccacgcucgagugccaaguccaaacagcaguagacuucgggaacucauacaucgccgagauggaaacggaaucauggauugucgacagacaaugggcacaagaccuaacacuaccauggcaaucaggcagcggaggggucuggcgagaaaugcaccaccuaguagaguucgaacccccacacgccgcaacaauccgaguacuagcccucggaaaccaagaaggaucacuaaaaaccgcacucaccggcgcaaugcgcguaacaaaagauacaaacgacaacaaccuauacaaacuacacggcggacacgucagcugccgcgucaaacuauccgcccuaacacuaaaaggaacaagcuacaaaauaugcacagacaaaauguucuucgucaaaaauccgacugacacgggccacggcacagucguaaugcaaguaaaagucucaaaaggcgcaccaugcagaaucccaguaaucgucgccgaugaccuaacagccgcaaucaacaagggcauccucguaacaguaaaccccauagccagcaccaacgacgacgaaguccuaaucgaagucaacccacccuucggagacagcuacauaauaguaggacgaggggacucacgccuaaccuaccaauggcacaaagaaggauccucaaucggcaaacuguucacacaaacgaugaaaggcguagaaagacucgcaguaaugggcgauacggccugggacuucucaagcgcgggcggcuucuucacgagcgucggaaaaggcauccauacaguauucggaagcgcauuccaaggccuauuuggaggccucaacuggauaacaaaagugaucaugggagcaguacugaucugggucggcaucaacacccgcaacaugacgaugagcaugucaaugauccucgugggaguaauaaugauguuccucagccugggcguaggcgcauga

SEQ ID NO: 519 - RNA, 2034 nt, Artificial Sequence
  derived and/or modified CDS sequence (opt11) from YFV__NC_002031.1__SSjev(V4)-prME (polyprotein: aa126-778)
augcucggcuccaacuccggccaacgcgucgucuucaccauccuccuccuccucgucgcccccgccuacucccgcaaaaacagauggcuacuacuaaacguaacaagcgaagaccugggcaaaacauucagcguuggcacaggcaauugcacgacaaacauacucgaagcaaaauacuggugccccgacagcauggaauacaacugcccaaaucuaagcccacgcgaagaaccagacgacaucgacuguuggugcuacggagucgaaaacgugagggucgcauacgguaaaugcgacagcgcuggcagaagcagacgcucccgacgagccauugaccucccuacccacgaaaaccacggccuaaaaacccggcaggaaaaauggaugacaggccggaugggagaacgccaacuacagaaaauagagaggugguuuguaagaaacccauucuucgccguaaccgcgcucaccaucgcuuaccucguaggaucaaacaugacgcaaagaguagugaucgcgcuacucguacuagcgguaggccccgccuacagcgcacacugcaucggcaucacugacagggacuucauagaaggcguccacgggggcacguggguuagcgccacacucgaacaagacaaaugcgucacagugauggcaccagacaaacccucacuagacaucucacuagaaaccgucgcaaucgaccgcccagcagaagucaggaaagugugcuacaacgccgucuuaacccacguaaaaauaaaugauaaaugcccaagcacgggagaggcacaccuagcggaagaaaacgaaggcgacaacgcgugcaaacguaccuacagcgacagaggguggggcaacggaugcggcuuauucggaaaaggaaguaucguagcaugcgcaaaauuuaccugcgccaaaagcaugucccuauucgaaguagaucaaacaaaaauacaauacgucauccgagcccaacuacacgugggggcaaaacaagaaaacuggaacaccgacaucaaaacacucaaauucgaugcccuaagcggcucccaagaaguagaguucaucgguuacggcaaggccacgcucgagugccaaguccaaacagcaguagacuucgggaacucauacaucgccgagauggaaacggaaucauggauugucgacagacaaugggcacaagaccuaacacuaccauggcaaucaggcagcggaggggucuggcgagaaaugcaccaccuaguagaguucgaacccccacacgccgcaacaauccgaguacuagcccucggaaaccaagaaggaucacuaaaaaccgcacucaccggcgcaaugcgcguaacaaaagauacaaacgacaacaaccuauacaaacuacacggcggacacgucagcugccgcgucaaacuauccgcccuaacacuaaaaggaacaagcuacaaaauaugcacagacaaaauguucuucgucaaaaauccgacugacacgggccacggcacagucguaaugcaaguaaaagucucaaaaggcgcaccaugcagaaucccaguaaucgucgccgaugaccuaacagccgcaaucaacaagggcauccucguaacaguaaaccccauagccagcaccaacgacgacgaaguccuaaucgaagucaacccacccuucggagacagcuacauaauaguaggacgaggggacucacgccuaaccuaccaauggcacaaagaaggauccucaaucggcaaacuguucacacaaacgaugaaaggcguagaaagacucgcaguaaugggcgauacggccugggacuucucaagcgcgggcggcuucuucacgagcgucggaaaaggcauccauacaguauucggaagcgcauuccaaggccuauuuggaggccucaacuggauaacaaaagugaucaugggagcaguacugaucugggucggcaucaacacccgcaacaugacgaugagcaugucaaugauccucgugggaguaauaaugauguuccucagccugggcguaggcgcauga

SEQ ID NO: 520 - RNA, 2049 nt, Artificial Sequence
  derived and/or modified CDS sequence (opt11) from YFV__NC_002031.1__SSjev(V5)-prME-XX (polyprotein: aa122-788)
augugguuggucucgcucgcgaucgugaccgcgugcgcgggcgcggugacccuaguaaggaaaaacagauggcuacuacuaaacguaaccucagaagaucuaggaaagacauuuucagucggcacaggcaacugcacaaccaacauacuagaagcaaaauauuggugcccagacagcauggaauacaacugucccaaccucagcccaagagaggaaccagacgacauagacugcugguguuacggaguagaaaacguaagaguggcauacggcaaaugcgacagcgcaggcaggagccgaagaucccgcagagccaucgacuugcccacgcacgaaaaccacggccucaaaacacgacaagaaaaauggaugacagggcgaaugggagaacgacagcuccagaaaauagaacgaugguucguccggaacccguucuucgcaguaacggcacuaacaaucgcauaccucguaggcagcaacaugacacaaagaguggucaucgcgcuacucguacuagcaguggggcccgcauacagugcacacugcauaggaaucacagaccgugacuucaucgaaggcguacacggaggaacguggguaagcgcgacacuggaacaagacaaaugcgugacaguaauggcaccagacaaaccaagccuagacauaucccuagaaacggucgccaucgaccgucccgcagaaguacgaaagguaugcuauaaugcaguccucacacacgucaaaauaaacgacaaaugccccagcacgggcgaagcacaccucgccgaagaaaacgaaggggauaacgcgugcaaacgcaccuacuccgacaggggauggggcaacggaugcggacuguucggaaaaggauccauagucgcaugcgcaaaauuuaccugcgcaaaaagcaugagcuuguucgagguagaccaaacgaagauccaauacguaauccgagcucaacuacacguuggggccaagcaagagaacuggaauacggacaucaaaacacuaaaauucgacgcacucuccggcucacaagaagucgaguucaucggcuacggcaaagcaacacuagaaugccaaguacaaacagcgguggacuucggcaacagcuacauagcagaaauggaaacagaaagcuggauaguagaccgacaaugggcacaagaccuaacucugccauggcaaagcggcucaggaggaguguggagagagaugcaccaccugguagaguucgaacccccacacgcagcaacaauaaggguacuggcacuaggcaaccaagaaggcagccuaaaaaccgcacucacaggagccaugcgcgugacgaaggacaccaacgacaacaaccucuacaaacuccacggagggcacguauccugccgcguaaaacuaucagcacuaacgcuaaaaggaacaagcuacaaaauaugcacagacaaaauguucuucgucaaaaaccccacagacacaggccacggcacagucguaaugcaagugaaggucagcaagggggcccccugccgaaucccagucauaguggcagacgaccucacggccgccaucaacaaagggauccugguaacagugaacccaauagcaucgaccaacgacgacgaaguccucauagaagugaaucccccguucggcgacagcuacaucaucguaggacgcggcgacucccgacugacguaccaauggcauaaagaaggcagcagcauuggaaaacuauucacccaaaccaugaagggcgucgaaagacucgcggugaugggagacaccgcaugggacuucucgagcgcaggcggcuucuucacaagcguaggaaaagggauucacacaguauucggauccgcauuccaaggccucuucgggggacuaaacuggauaacgaaaguaauaaugggagcaguucucauauggguaggaaucaacacacgaaacaugacaauguccaugucaaugauacucguaggcguaaucaugauguuucugucacucggagugggagcagaccaagguugcgccauaaacuucggcaaguga

SEQ ID NO: 521 - RNA, 2037 nt, Artificial Sequence
  derived and/or modified CDS sequence (opt11) from YFV__NC_002031.1__SSjev(V5)-prME-XX (polyprotein: aa126-788)
augugguuggucucgcucgcgaucgugaccgcgugcgcgggcgcgaggaaaaacagauggcuacuacuaaacguaaccucagaagaucuaggaaagacauuuucagucggcacaggcaacugcacaaccaacauacuagaagcaaaauauuggugcccagacagcauggaauacaacugucccaaccucagcccaagagaggaaccagacgacauagacugcugguguuacggaguagaaaacguaagaguggcauacggcaaaugcgacagcgcaggcaggagccgaagaucccgcagagccaucgacuugcccacgcacgaaaaccacggccucaaaacacgacaagaaaaauggaugacagggcgaaugggagaacgacagcuccagaaaauagaacgaugguucguccggaacccguucuucgcaguaacggcacuaacaaucgcauaccucguaggcagcaacaugacacaaagaguggucaucgcgcuacucguacuagcaguggggcccgcauacagugcacacugcauaggaaucacagaccgugacuucaucgaaggcguacacggaggaacguggguaagcgcgacacuggaacaagacaaaugcgugacaguaauggcaccagacaaaccaagccuagacauaucccuagaaacggucgccaucgaccgucccgcagaaguacgaaagguaugcuauaaugcaguccucacacacgucaaaauaaacgacaaaugccccagcacgggcgaagcacaccucgccgaagaaaacgaaggggauaacgcgugcaaacgcaccuacuccgacaggggauggggcaacggaugcggacuguucggaaaaggauccauagucgcaugcgcaaaauuuaccugcgcaaaaagcaugagcuuguucgagguagaccaaacgaagauccaauacguaauccgagcucaacuacacguuggggccaagcaagagaacuggaauacggacaucaaaacacuaaaauucgacgcacucuccggcucacaagaagucgaguucaucggcuacggcaaagcaacacuagaaugccaaguacaaacagcgguggacuucggcaacagcuacauagcagaaauggaaacagaaagcuggauaguagaccgacaaugggcacaagaccuaacucugccauggcaaagcggcucaggaggaguguggagagagaugcaccaccugguagaguucgaacccccacacgcagcaacaauaaggguacuggcacuaggcaaccaagaaggcagccuaaaaaccgcacucacaggagccaugcgcgugacgaaggacaccaacgacaacaaccucuacaaacuccacggagggcacguauccugccgcguaaaacuaucagcacuaacgcuaaaaggaacaagcuacaaaauaugcacagacaaaauguucuucgucaaaaaccccacagacacaggccacggcacagucguaaugcaagugaaggucagcaagggggcccccugccgaaucccagucauaguggcagacgaccucacggccgccaucaacaaagggauccugguaacagugaacccaauagcaucgaccaacgacgacgaaguccucauagaagugaaucccccguucggcgacagcuacaucaucguaggacgcggcgacucccgacugacguaccaauggcauaaagaaggcagcagcauuggaaaacuauucacccaaaccaugaagggcgucgaaagacucgcggugaugggagacaccgcaugggacuucucgagcgcaggcggcuucuucacaagcguaggaaaagggauucacacaguauucggauccgcauuccaaggccucuucgggggacuaaacuggauaacgaaaguaauaaugggagcaguucucauauggguaggaaucaacacacgaaacaugacaauguccaugucaaugauacucguaggcguaaucaugauguuucugucacucggagugggagcagaccaagguugcgccauaaacuucggcaaguga

SEQ ID NO: 522 - RNA, 2019 nt, Artificial Sequence
  derived and/or modified CDS sequence (opt11) from YFV__NC_002031.1__SSjev(V5)-prME (polyprotein: aa122-778)
augugguuggucucgcucgcgaucgugaccgcgugcgcgggcgcggugacccuaguccgcaaaaacagauggcuacuacuaaacguaacaagcgaagaccugggcaaaacauucagcguuggcacaggcaauugcacgacaaacauacucgaagcaaaauacuggugccccgacagcauggaauacaacugcccaaaucuaagcccacgcgaagaaccagacgacaucgacuguuggugcuacggagucgaaaacgugagggucgcauacgguaaaugcgacagcgcuggcagaagcagacgcucccgacgagccauugaccucccuacccacgaaaaccacggccuaaaaacccggcaggaaaaauggaugacaggccggaugggagaacgccaacuacagaaaauagagaggugguuuguaagaaacccauucuucgccguaaccgcgcucaccaucgcuuaccucguaggaucaaacaugacgcaaagaguagugaucgcgcuacucguacuagcgguaggccccgccuacagcgcacacugcaucggcaucacugacagggacuucauagaaggcguccacgggggcacguggguuagcgccacacucgaacaagacaaaugcgucacagugauggcaccagacaaacccucacuagacaucucacuagaaaccgucgcaaucgaccgcccagcagaagucaggaaagugugcuacaacgccgucuuaacccacguaaaaauaaaugauaaaugcccaagcacgggagaggcacaccuagcggaagaaaacgaaggcgacaacgcgugcaaacguaccuacagcgacagaggguggggcaacggaugcggcuuauucggaaaaggaaguaucguagcaugcgcaaaauuuaccugcgccaaaagcaugucccuauucgaaguagaucaaacaaaaauacaauacgucauccgagcccaacuacacgugggggcaaaacaagaaaacuggaacaccgacaucaaaacacucaaauucgaugcccuaagcggcucccaagaaguagaguucaucgguuacggcaaggccacgcucgagugccaaguccaaacagcaguagacuucgggaacucauacaucgccgagauggaaacggaaucauggauugucgacagacaaugggcacaagaccuaacacuaccauggcaaucaggcagcggaggggucuggcgagaaaugcaccaccuaguagaguucgaacccccacacgccgcaacaauccgaguacuagcccucggaaaccaagaaggaucacuaaaaaccgcacucaccggcgcaaugcgcguaacaaaagauacaaacgacaacaaccuauacaaacuacacggcggacacgucagcugccgcgucaaacuauccgcccuaacacuaaaaggaacaagcuacaaaauaugcacagacaaaauguucuucgucaaaaauccgacugacacgggccacggcacagucguaaugcaaguaaaagucucaaaaggcgcaccaugcagaaucccaguaaucgucgccgaugaccuaacagccgcaaucaacaagggcauccucguaacaguaaaccccauagccagcaccaacgacgacgaaguccuaaucgaagucaacccacccuucggagacagcuacauaauaguaggacgaggggacucacgccuaaccuaccaauggcacaaagaaggauccucaaucggcaaacuguucacacaaacgaugaaaggcguagaaagacucgcaguaaugggcgauacggccugggacuucucaagcgcgggcggcuucuucacgagcgucggaaaaggcauccauacaguauucggaagcgcauuccaaggccuauuuggaggccucaacuggauaacaaaagugaucaugggagcaguacugaucugggucggcaucaacacccgcaacaugacgaugagcaugucaaugauccucgugggaguaauaaugauguuccucagccugggcguaggcgcauga

SEQ ID NO: 523 - RNA, 2007 nt, Artificial Sequence
  derived and/or modified CDS sequence (opt11) from YFV__NC_002031.1__SSjev(V5)-prME (polyprotein: aa126-778)
augugguuggucucgcucgcgaucgugaccgcgugcgcgggcgcgcgcaaaaacagauggcuacuacuaaacguaacaagcgaagaccugggcaaaacauucagcguuggcacaggcaauugcacgacaaacauacucgaagcaaaauacuggugccccgacagcauggaauacaacugcccaaaucuaagcccacgcgaagaaccagacgacaucgacuguuggugcuacggagucgaaaacgugagggucgcauacgguaaaugcgacagcgcuggcagaagcagacgcucccgacgagccauugaccucccuacccacgaaaaccacggccuaaaaacccggcaggaaaaauggaugacaggccggaugggagaacgccaacuacagaaaauagagaggugguuuguaagaaacccauucuucgccguaaccgcgcucaccaucgcuuaccucguaggaucaaacaugacgcaaagaguagugaucgcgcuacucguacuagcgguaggccccgccuacagcgcacacugcaucggcaucacugacagggacuucauagaaggcguccacgggggcacguggguuagcgccacacucgaacaagacaaaugcgucacagugauggcaccagacaaacccucacuagacaucucacuagaaaccgucgcaaucgaccgcccagcagaagucaggaaagugugcuacaacgccgucuuaacccacguaaaaauaaaugauaaaugcccaagcacgggagaggcacaccuagcggaagaaaacgaaggcgacaacgcgugcaaacguaccuacagcgacagaggguggggcaacggaugcggcuuauucggaaaaggaaguaucguagcaugcgcaaaauuuaccugcgccaaaagcaugucccuauucgaaguagaucaaacaaaaauacaauacgucauccgagcccaacuacacgugggggcaaaacaagaaaacuggaacaccgacaucaaaacacucaaauucgaugcccuaagcggcucccaagaaguagaguucaucgguuacggcaaggccacgcucgagugccaaguccaaacagcaguagacuucgggaacucauacaucgccgagauggaaacggaaucauggauugucgacagacaaugggcacaagaccuaacacuaccauggcaaucaggcagcggaggggucuggcgagaaaugcaccaccuaguagaguucgaacccccacacgccgcaacaauccgaguacuagcccucggaaaccaagaaggaucacuaaaaaccgcacucaccggcgcaaugcgcguaacaaaagauacaaacgacaacaaccuauacaaacuacacggcggacacgucagcugccgcgucaaacuauccgcccuaacacuaaaaggaacaagcuacaaaauaugcacagacaaaauguucuucgucaaaaauccgacugacacgggccacggcacagucguaaugcaaguaaaagucucaaaaggcgcaccaugcagaaucccaguaaucgucgccgaugaccuaacagccgcaaucaacaagggcauccucguaacaguaaaccccauagccagcaccaacgacgacgaaguccuaaucgaagucaacccacccuucggagacagcuacauaauaguaggacgaggggacucacgccuaaccuaccaauggcacaaagaaggauccucaaucggcaaacuguucacacaaacgaugaaaggcguagaaagacucgcaguaaugggcgauacggccugggacuucucaagcgcgggcggcuucuucacgagcgucggaaaaggcauccauacaguauucggaagcgcauuccaaggccuauuuggaggccucaacuggauaacaaaagugaucaugggagcaguacugaucugggucggcaucaacacccgcaacaugacgaugagcaugucaaugauccucgugggaguaauaaugauguuccucagccugggcguaggcgcauga

SEQ ID NO: 524 - RNA, 2037 nt, Artificial Sequence
  derived and/or modified CDS sequence (opt11) from YFV__NC_002031.1__SSIgE-prMEdelstem_TM-JEV (polyprotein: aa122-680)
auggauuggacguggauacucuuucucguggccgcggccacgcgcgugcacucggugacccuaguccgcaaaaacagauggcuacuacuaaacguaacaagcgaagaccugggcaaaacauucagcguuggcacaggcaauugcacgacaaacauacucgaagcaaaauacuggugccccgacagcauggaauacaacugcccaaaucuaagcccacgcgaagaaccagacgacaucgacuguuggugcuacggagucgaaaacgugagggucgcauacgguaaaugcgacagcgcuggcagaagcagacgcucccgacgagccauugaccucccuacccacgaaaaccacggccuaaaaacccggcaggaaaaauggaugacaggccggaugggagaacgccaacuacagaaaauagagaggugguuuguaagaaacccauucuucgccguaaccgcgcucaccaucgcuuaccucguaggaucaaacaugacgcaaagaguagugaucgcgcuacucguacuagcgguaggccccgccuacagcgcacacugcaucggcaucacugacagggacuucauagaaggcguccacgggggcacguggguuagcgccacacucgaacaagacaaaugcgucacagugauggcaccagacaaacccucacuagacaucucacuagaaaccgucgcaaucgaccgcccagcagaagucaggaaagugugcuacaacgccgucuuaacccacguaaaaauaaaugauaaaugcccaagcacgggagaggcacaccuagcggaagaaaacgaaggcgacaacgcgugcaaacguaccuacagcgacagaggguggggcaacggaugcggcuuauucggaaaaggaaguaucguagcaugcgcaaaauuuaccugcgccaaaagcaugucccuauucgaaguagaucaaacaaaaauacaauacgucauccgagcccaacuacacgugggggcaaaacaagaaaacuggaacaccgacaucaaaacacucaaauucgaugcccuaagcggcucccaagaaguagaguucaucgguuacggcaaggccacgcucgagugccaaguccaaacagcaguagacuucgggaacucauacaucgccgagauggaaacggaaucauggauugucgacagacaaugggcacaagaccuaacacuaccauggcaaucaggcagcggaggggucuggcgagaaaugcaccaccuaguagaguucgaacccccacacgccgcaacaauccgaguacuagcccucggaaaccaagaaggaucacuaaaaaccgcacucaccggcgcaaugcgcguaacaaaagauacaaacgacaacaaccuauacaaacuacacggcggacacgucagcugccgcgucaaacuauccgcccuaacacuaaaaggaacaagcuacaaaauaugcacagacaaaauguucuucgucaaaaauccgacugacacgggccacggcacagucguaaugcaaguaaaagucucaaaaggcgcaccaugcagaaucccaguaaucgucgccgaugaccuaacagccgcaaucaacaagggcauccucguaacaguaaaccccauagccagcaccaacgacgacgaaguccuaaucgaagucaacccacccuucggagacagcuacauaauaguaggacgaggggacucacgccuaaccuaccaauggcacaaagaaggauccucagggagcacgcucgggaaagcguucucgaccacgcucaagggcgcgcaaaggcucgcggccuugggcgauaccgcgugggauuucgggagcauaggcggggucuuuaacucgaucgggcgcgcgguccaucaaguguucgggggcgcguucaggaccuuguucgggggcaugagcuggaucacgcaagggcucaugggcgcgcucuugcucuggaugggggucaaugccagggacaggagcauagccuuggccuuucucgcgaccgggggcgugcucguguucuuggccacgaacgugcacgcguga

SEQ ID NO: 525 - RNA, 2025 nt, Artificial Sequence
  derived and/or modified CDS sequence (opt11) from YFV__NC_002031.1__SSIgE-prMEdelstem_TM-JEV (polyprotein: aa126-680)
auggauuggacguggauacucuuucucguggccgcggccacgcgcgugcacucgcgcaaaaacagauggcuacuacuaaacguaacaagcgaagaccugggcaaaacauucagcguuggcacaggcaauugcacgacaaacauacucgaagcaaaauacuggugccccgacagcauggaauacaacugcccaaaucuaagcccacgcgaagaaccagacgacaucgacuguuggugcuacggagucgaaaacgugagggucgcauacgguaaaugcgacagcgcuggcagaagcagacgcucccgacgagccauugaccucccuacccacgaaaaccacggccuaaaaacccggcaggaaaaauggaugacaggccggaugggagaacgccaacuacagaaaauagagaggugguuuguaagaaacccauucuucgccguaaccgcgcucaccaucgcuuaccucguaggaucaaacaugacgcaaagaguagugaucgcgcuacucguacuagcgguaggccccgccuacagcgcacacugcaucggcaucacugacagggacuucauagaaggcguccacgggggcacguggguuagcgccacacucgaacaagacaaaugcgucacagugauggcaccagacaaacccucacuagacaucucacuagaaaccgucgcaaucgaccgcccagcagaagucaggaaagugugcuacaacgccgucuuaacccacguaaaaauaaaugauaaaugcccaagcacgggagaggcacaccuagcggaagaaaacgaaggcgacaacgcgugcaaacguaccuacagcgacagaggguggggcaacggaugcggcuuauucggaaaaggaaguaucguagcaugcgcaaaauuuaccugcgccaaaagcaugucccuauucgaaguagaucaaacaaaaauacaauacgucauccgagcccaacuacacgugggggcaaaacaagaaaacuggaacaccgacaucaaaacacucaaauucgaugcccuaagcggcucccaagaaguagaguucaucgguuacggcaaggccacgcucgagugccaaguccaaacagcaguagacuucgggaacucauacaucgccgagauggaaacggaaucauggauugucgacagacaaugggcacaagaccuaacacuaccauggcaaucaggcagcggaggggucuggcgagaaaugcaccaccuaguagaguucgaacccccacacgccgcaacaauccgaguacuagcccucggaaaccaagaaggaucacuaaaaaccgcacucaccggcgcaaugcgcguaacaaaagauacaaacgacaacaaccuauacaaacuacacggcggacacgucagcugccgcgucaaacuauccgcccuaacacuaaaaggaacaagcuacaaaauaugcacagacaaaauguucuucgucaaaaauccgacugacacgggccacggcacagucguaaugcaaguaaaagucucaaaaggcgcaccaugcagaaucccaguaaucgucgccgaugaccuaacagccgcaaucaacaagggcauccucguaacaguaaaccccauagccagcaccaacgacgacgaaguccuaaucgaagucaacccacccuucggagacagcuacauaauaguaggacgaggggacucacgccuaaccuaccaauggcacaaagaaggauccucagggagcacgcucgggaaagcguucucgaccacgcucaagggcgcgcaaaggcucgcggccuugggcgauaccgcgugggauuucgggagcauaggcggggucuuuaacucgaucgggcgcgcgguccaucaaguguucgggggcgcguucaggaccuuguucgggggcaugagcuggaucacgcaagggcucaugggcgcgcucuugcucuggaugggggucaaugccagggacaggagcauagccuuggccuuucucgcgaccgggggcgugcucguguucuuggccacgaacgugcacgcguga

SEQ ID NO: 526 - RNA, 2055 nt, Artificial Sequence
  derived and/or modified CDS sequence (opt11) from YFV__NC_002031.1__SSjev-prMEdelstem_TM-JEV (polyprotein: aa122-680)
auggggaaaaggagcgcgggcucgauaaugugguuggccucgcucgcggucgugaucgcgugcgcgggcgcggugacccuaguccgcaaaaacagauggcuacuacuaaacguaacaagcgaagaccugggcaaaacauucagcguuggcacaggcaauugcacgacaaacauacucgaagcaaaauacuggugccccgacagcauggaauacaacugcccaaaucuaagcccacgcgaagaaccagacgacaucgacuguuggugcuacggagucgaaaacgugagggucgcauacgguaaaugcgacagcgcuggcagaagcagacgcucccgacgagccauugaccucccuacccacgaaaaccacggccuaaaaacccggcaggaaaaauggaugacaggccggaugggagaacgccaacuacagaaaauagagaggugguuuguaagaaacccauucuucgccguaaccgcgcucaccaucgcuuaccucguaggaucaaacaugacgcaaagaguagugaucgcgcuacucguacuagcgguaggccccgccuacagcgcacacugcaucggcaucacugacagggacuucauagaaggcguccacgggggcacguggguuagcgccacacucgaacaagacaaaugcgucacagugauggcaccagacaaacccucacuagacaucucacuagaaaccgucgcaaucgaccgcccagcagaagucaggaaagugugcuacaacgccgucuuaacccacguaaaaauaaaugauaaaugcccaagcacgggagaggcacaccuagcggaagaaaacgaaggcgacaacgcgugcaaacguaccuacagcgacagaggguggggcaacggaugcggcuuauucggaaaaggaaguaucguagcaugcgcaaaauuuaccugcgccaaaagcaugucccuauucgaaguagaucaaacaaaaauacaauacgucauccgagcccaacuacacgugggggcaaaacaagaaaacuggaacaccgacaucaaaacacucaaauucgaugcccuaagcggcucccaagaaguagaguucaucgguuacggcaaggccacgcucgagugccaaguccaaacagcaguagacuucgggaacucauacaucgccgagauggaaacggaaucauggauugucgacagacaaugggcacaagaccuaacacuaccauggcaaucaggcagcggaggggucuggcgagaaaugcaccaccuaguagaguucgaacccccacacgccgcaacaauccgaguacuagcccucggaaaccaagaaggaucacuaaaaaccgcacucaccggcgcaaugcgcguaacaaaagauacaaacgacaacaaccuauacaaacuacacggcggacacgucagcugccgcgucaaacuauccgcccuaacacuaaaaggaacaagcuacaaaauaugcacagacaaaauguucuucgucaaaaauccgacugacacgggccacggcacagucguaaugcaaguaaaagucucaaaaggcgcaccaugcagaaucccaguaaucgucgccgaugaccuaacagccgcaaucaacaagggcauccucguaacaguaaaccccauagccagcaccaacgacgacgaaguccuaaucgaagucaacccacccuucggagacagcuacauaauaguaggacgaggggacucacgccuaaccuaccaauggcacaaagaaggauccucagggagcacgcucgggaaagcguucucgaccacgcucaagggcgcgcaaaggcucgcggccuugggcgauaccgcgugggauuucgggagcauaggcggggucuuuaacucgaucgggcgcgcgguccaucaaguguucgggggcgcguucaggaccuuguucgggggcaugagcuggaucacgcaagggcucaugggcgcgcucuugcucuggaugggggucaaugccagggacaggagcauagccuuggccuuucucgcgaccgggggcgugcucguguucuuggccacgaacgugcacgcguga

SEQ ID NO: 527 - RNA, 2043 nt, Artificial Sequence
  derived and/or modified CDS sequence (opt11) from YFV__NC_002031.1__SSjev-prMEdelstem_TM-JEV (polyprotein: aa126-680)
auggggaaaaggagcgcgggcucgauaaugugguuggccucgcucgcggucgugaucgcgugcgcgggcgcgcgcaaaaacagauggcuacuacuaaacguaacaagcgaagaccugggcaaaacauucagcguuggcacaggcaauugcacgacaaacauacucgaagcaaaauacuggugccccgacagcauggaauacaacugcccaaaucuaagcccacgcgaagaaccagacgacaucgacuguuggugcuacggagucgaaaacgugagggucgcauacgguaaaugcgacagcgcuggcagaagcagacgcucccgacgagccauugaccucccuacccacgaaaaccacggccuaaaaacccggcaggaaaaauggaugacaggccggaugggagaacgccaacuacagaaaauagagaggugguuuguaagaaacccauucuucgccguaaccgcgcucaccaucgcuuaccucguaggaucaaacaugacgcaaagaguagugaucgcgcuacucguacuagcgguaggccccgccuacagcgcacacugcaucggcaucacugacagggacuucauagaaggcguccacgggggcacguggguuagcgccacacucgaacaagacaaaugcgucacagugauggcaccagacaaacccucacuagacaucucacuagaaaccgucgcaaucgaccgcccagcagaagucaggaaagugugcuacaacgccgucuuaacccacguaaaaauaaaugauaaaugcccaagcacgggagaggcacaccuagcggaagaaaacgaaggcgacaacgcgugcaaacguaccuacagcgacagaggguggggcaacggaugcggcuuauucggaaaaggaaguaucguagcaugcgcaaaauuuaccugcgccaaaagcaugucccuauucgaaguagaucaaacaaaaauacaauacgucauccgagcccaacuacacgugggggcaaaacaagaaaacuggaacaccgacaucaaaacacucaaauucgaugcccuaagcggcucccaagaaguagaguucaucgguuacggcaaggccacgcucgagugccaaguccaaacagcaguagacuucgggaacucauacaucgccgagauggaaacggaaucauggauugucgacagacaaugggcacaagaccuaacacuaccauggcaaucaggcagcggaggggucuggcgagaaaugcaccaccuaguagaguucgaacccccacacgccgcaacaauccgaguacuagcccucggaaaccaagaaggaucacuaaaaaccgcacucaccggcgcaaugcgcguaacaaaagauacaaacgacaacaaccuauacaaacuacacggcggacacgucagcugccgcgucaaacuauccgcccuaacacuaaaaggaacaagcuacaaaauaugcacagacaaaauguucuucgucaaaaauccgacugacacgggccacggcacagucguaaugcaaguaaaagucucaaaaggcgcaccaugcagaaucccaguaaucgucgccgaugaccuaacagccgcaaucaacaagggcauccucguaacaguaaaccccauagccagcaccaacgacgacgaaguccuaaucgaagucaacccacccuucggagacagcuacauaauaguaggacgaggggacucacgccuaaccuaccaauggcacaaagaaggauccucagggagcacgcucgggaaagcguucucgaccacgcucaagggcgcgcaaaggcucgcggccuugggcgauaccgcgugggauuucgggagcauaggcggggucuuuaacucgaucgggcgcgcgguccaucaaguguucgggggcgcguucaggaccuuguucgggggcaugagcuggaucacgcaagggcucaugggcgcgcucuugcucuggaugggggucaaugccagggacaggagcauagccuuggccuuucucgcgaccgggggcgugcucguguucuuggccacgaacgugcacgcguga

SEQ ID NO: 528 - RNA, 2370 nt, Artificial Sequence
  mRNA product Design a-1 comprising derived and/or modified sequence from YFV__NC_002031.1__X-SS-prME-XX (polyprotein: aa92-788) (wt)
gggagagucccgcagucggcguccagcggcucugcuuguucgugugugugucguugcaggccuuauucaagcuuaccaugagaggauuguccucaaggaaacgccguucccaugauguucugacugugcaauuccuaauuuugggaaugcuguugaugacggguggagugaccuuggugcggaaaaacagaugguugcuccuaaaugugacaucugaggaccucgggaaaacauucucugugggcacaggcaacugcacaacaaacauuuuggaagccaaguacuggugcccagacucaauggaauacaacugucccaaucucaguccaagagaggagccagaugacauugauugcuggugcuaugggguggaaaacguuagagucgcauaugguaagugugacucagcaggcaggucuaggaggucaagaagggccauugacuugccuacgcaugaaaaccaugguuugaagacccggcaagaaaaauggaugacuggaagaaugggugaaaggcaacuccaaaagauugagagaugguucgugaggaaccccuuuuuugcagugacggcucugaccauugccuaccuugugggaagcaacaugacgcaacgagucgugauugcccuacuggucuuggcuguugguccggccuacucagcucacugcauuggaauuacugacagggauuucauugagggggugcauggaggaacuuggguuucagcuacccuggagcaagacaagugugucacuguuauggccccugacaagccuucauuggacaucucacuagagacaguagccauugauagaccugcugaggugaggaaaguguguuacaaugcaguucucacucaugugaagauuaaugacaagugccccagcacuggagaggcccaccuagcugaagagaacgaaggggacaaugcgugcaagcgcacuuauucugauagaggcuggggcaauggcuguggccuauuugggaaagggagcauuguggcaugcgccaaauucacuugugccaaauccaugaguuuguuugagguugaucagaccaaaauucaguaugucaucagagcacaauugcauguaggggccaagcaggaaaauuggaauaccgacauuaagacucucaaguuugaugcccugucaggcucccaggaagucgaguucauuggguauggaaaagcuacacuggaaugccaggugcaaacugcgguggacuuugguaacaguuacaucgcugagauggaaacagagagcuggauaguggacagacagugggcccaggacuugacccugccauggcagaguggaaguggcgggguguggagagagaugcaucaucuugucgaauuugaaccuccgcaugccgccacuaucagaguacuggcccugggaaaccaggaaggcuccuugaaaacagcucuuacuggcgcaaugaggguuacaaaggacacaaaugacaacaaccuuuacaaacuacaugguggacauguuucuugcagagugaaauugucagcuuugacacucaaggggacauccuacaaaauaugcacugacaaaauguuuuuugucaagaacccaacugacacuggccauggcacuguugugaugcaggugaaagugucaaaaggagcccccugcaggauuccagugauaguagcugaugaucuuacagcggcaaucaauaaaggcauuuugguuacaguuaaccccaucgccucaaccaaugaugaugaagugcugauugaggugaacccaccuuuuggagacagcuacauuaucguugggagaggagauucacgucucacuuaccaguggcacaaagagggaagcucaauaggaaaguuguucacucagaccaugaaaggcguggaacgccuggccgucaugggagacaccgccugggauuucagcuccgcuggaggguucuucacuucgguugggaaaggaauccauacgguguuuggcucugccuuucaggggcuauuuggcggcuugaacuggauaacaaaggucaucaugggggcgguacuuauauggguuggcaucaacacaagaaacaugacaauguccaugagcaugaucuugguaggagugaucaugauguuuuugucucuaggaguuggggcggaucaaggaugcgccaucaacuuuggcaaguaaggacuagucccuguucccagagcccacuuuuuuuucuuuuuuugaaauaaaauagccugucuuucagaucuaaaaaaaaaaaaaaaaaaaaaaaaaaaaaaaaaaaaaaaaaaaaaaaaaaaaaaaaaaaaaaaaugcaucccccccccccccccccccccccccccccccaaaggcucuuuucagagccaccagaauu

SEQ ID NO: 529 - RNA, 2337 nt, Artificial Sequence
  mRNA product Design a-1 comprising derived and/or modified sequence from YFV__NC_002031.1__SS-prME (polyprotein: M,aa104-778) (wt)
gggagagucccgcagucggcguccagcggcucugcuuguucgugugugugucguugcaggccuuauucaagcuuaccauggauguucugacugugcaauuccuaauuuugggaaugcuguugaugacggguggagugaccuuggugcggaaaaacagaugguugcuccuaaaugugacaucugaggaccucgggaaaacauucucugugggcacaggcaacugcacaacaaacauuuuggaagccaaguacuggugcccagacucaauggaauacaacugucccaaucucaguccaagagaggagccagaugacauugauugcuggugcuaugggguggaaaacguuagagucgcauaugguaagugugacucagcaggcaggucuaggaggucaagaagggccauugacuugccuacgcaugaaaaccaugguuugaagacccggcaagaaaaauggaugacuggaagaaugggugaaaggcaacuccaaaagauugagagaugguucgugaggaaccccuuuuuugcagugacggcucugaccauugccuaccuugugggaagcaacaugacgcaacgagucgugauugcccuacuggucuuggcuguugguccggccuacucagcucacugcauuggaauuacugacagggauuucauugagggggugcauggaggaacuuggguuucagcuacccuggagcaagacaagugugucacuguuauggccccugacaagccuucauuggacaucucacuagagacaguagccauugauagaccugcugaggugaggaaaguguguuacaaugcaguucucacucaugugaagauuaaugacaagugccccagcacuggagaggcccaccuagcugaagagaacgaaggggacaaugcgugcaagcgcacuuauucugauagaggcuggggcaauggcuguggccuauuugggaaagggagcauuguggcaugcgccaaauucacuugugccaaauccaugaguuuguuugagguugaucagaccaaaauucaguaugucaucagagcacaauugcauguaggggccaagcaggaaaauuggaauaccgacauuaagacucucaaguuugaugcccugucaggcucccaggaagucgaguucauuggguauggaaaagcuacacuggaaugccaggugcaaacugcgguggacuuugguaacaguuacaucgcugagauggaaacagagagcuggauaguggacagacagugggcccaggacuugacccugccauggcagaguggaaguggcgggguguggagagagaugcaucaucuugucgaauuugaaccuccgcaugccgccacuaucagaguacuggcccugggaaaccaggaaggcuccuugaaaacagcucuuacuggcgcaaugaggguuacaaaggacacaaaugacaacaaccuuuacaaacuacaugguggacauguuucuugcagagugaaauugucagcuuugacacucaaggggacauccuacaaaauaugcacugacaaaauguuuuuugucaagaacccaacugacacuggccauggcacuguugugaugcaggugaaagugucaaaaggagcccccugcaggauuccagugauaguagcugaugaucuuacagcggcaaucaauaaaggcauuuugguuacaguuaaccccaucgccucaaccaaugaugaugaagugcugauugaggugaacccaccuuuuggagacagcuacauuaucguugggagaggagauucacgucucacuuaccaguggcacaaagagggaagcucaauaggaaaguuguucacucagaccaugaaaggcguggaacgccuggccgucaugggagacaccgccugggauuucagcuccgcuggaggguucuucacuucgguugggaaaggaauccauacgguguuuggcucugccuuucaggggcuauuuggcggcuugaacuggauaacaaaggucaucaugggggcgguacuuauauggguuggcaucaacacaagaaacaugacaauguccaugagcaugaucuugguaggagugaucaugauguuuuugucucuaggaguuggggcggaucaaggaugcgccaucaacuuuggcaaguaaggacuagucccuguucccagagcccacuuuuuuuucuuuuuuugaaauaaaauagccugucuuucagaucuaaaaaaaaaaaaaaaaaaaaaaaaaaaaaaaaaaaaaaaaaaaaaaaaaaaaaaaaaaaaaaaaugcaucccccccccccccccccccccccccccccccaaaggcucuuuucagagccaccagaauu

SEQ ID NO: 530 - RNA, 2334 nt, Artificial Sequence
  mRNA product Design a-1 comprising derived and/or modified sequence from YFV__NC_002031.1__SSIgE-prME-XX (polyprotein: aa122-788) (wt)
gggagagucccgcagucggcguccagcggcucugcuuguucgugugugugucguugcaggccuuauucaagcuuaccauggacuggaccuggauccuguuccucguggccgccgcgacccgcguccacagcgugaccuuggugcggaaaaacagaugguugcuccuaaaugugacaucugaggaccucgggaaaacauucucugugggcacaggcaacugcacaacaaacauuuuggaagccaaguacuggugcccagacucaauggaauacaacugucccaaucucaguccaagagaggagccagaugacauugauugcuggugcuaugggguggaaaacguuagagucgcauaugguaagugugacucagcaggcaggucuaggaggucaagaagggccauugacuugccuacgcaugaaaaccaugguuugaagacccggcaagaaaaauggaugacuggaagaaugggugaaaggcaacuccaaaagauugagagaugguucgugaggaaccccuuuuuugcagugacggcucugaccauugccuaccuugugggaagcaacaugacgcaacgagucgugauugcccuacuggucuuggcuguugguccggccuacucagcucacugcauuggaauuacugacagggauuucauugagggggugcauggaggaacuuggguuucagcuacccuggagcaagacaagugugucacuguuauggccccugacaagccuucauuggacaucucacuagagacaguagccauugauagaccugcugaggugaggaaaguguguuacaaugcaguucucacucaugugaagauuaaugacaagugccccagcacuggagaggcccaccuagcugaagagaacgaaggggacaaugcgugcaagcgcacuuauucugauagaggcuggggcaauggcuguggccuauuugggaaagggagcauuguggcaugcgccaaauucacuugugccaaauccaugaguuuguuugagguugaucagaccaaaauucaguaugucaucagagcacaauugcauguaggggccaagcaggaaaauuggaauaccgacauuaagacucucaaguuugaugcccugucaggcucccaggaagucgaguucauuggguauggaaaagcuacacuggaaugccaggugcaaacugcgguggacuuugguaacaguuacaucgcugagauggaaacagagagcuggauaguggacagacagugggcccaggacuugacccugccauggcagaguggaaguggcgggguguggagagagaugcaucaucuugucgaauuugaaccuccgcaugccgccacuaucagaguacuggcccugggaaaccaggaaggcuccuugaaaacagcucuuacuggcgcaaugaggguuacaaaggacacaaaugacaacaaccuuuacaaacuacaugguggacauguuucuugcagagugaaauugucagcuuugacacucaaggggacauccuacaaaauaugcacugacaaaauguuuuuugucaagaacccaacugacacuggccauggcacuguugugaugcaggugaaagugucaaaaggagcccccugcaggauuccagugauaguagcugaugaucuuacagcggcaaucaauaaaggcauuuugguuacaguuaaccccaucgccucaaccaaugaugaugaagugcugauugaggugaacccaccuuuuggagacagcuacauuaucguugggagaggagauucacgucucacuuaccaguggcacaaagagggaagcucaauaggaaaguuguucacucagaccaugaaaggcguggaacgccuggccgucaugggagacaccgccugggauuucagcuccgcuggaggguucuucacuucgguugggaaaggaauccauacgguguuuggcucugccuuucaggggcuauuuggcggcuugaacuggauaacaaaggucaucaugggggcgguacuuauauggguuggcaucaacacaagaaacaugacaauguccaugagcaugaucuugguaggagugaucaugauguuuuugucucuaggaguuggggcggaucaaggaugcgccaucaacuuuggcaaguaaggacuagucccuguucccagagcccacuuuuuuuucuuuuuuugaaauaaaauagccugucuuucagaucuaaaaaaaaaaaaaaaaaaaaaaaaaaaaaaaaaaaaaaaaaaaaaaaaaaaaaaaaaaaaaaaaugcaucccccccccccccccccccccccccccccccaaaggcucuuuucagagccaccagaauu

SEQ ID NO: 531 - RNA, 2304 nt, Artificial Sequence
  mRNA product Design a-1 comprising derived and/or modified sequence from YFV__NC_002031.1__SSIgE-prME (polyprotein: aa122-778) (wt)
gggagagucccgcagucggcguccagcggcucugcuuguucgugugugugucguugcaggccuuauucaagcuuaccauggacuggaccuggauccuguuccucguggccgccgcgacccgcguccacagcgugaccuuggugcggaaaaacagaugguugcuccuaaaugugacaucugaggaccucgggaaaacauucucugugggcacaggcaacugcacaacaaacauuuuggaagccaaguacuggugcccagacucaauggaauacaacugucccaaucucaguccaagagaggagccagaugacauugauugcuggugcuaugggguggaaaacguuagagucgcauaugguaagugugacucagcaggcaggucuaggaggucaagaagggccauugacuugccuacgcaugaaaaccaugguuugaagacccggcaagaaaaauggaugacuggaagaaugggugaaaggcaacuccaaaagauugagagaugguucgugaggaaccccuuuuuugcagugacggcucugaccauugccuaccuugugggaagcaacaugacgcaacgagucgugauugcccuacuggucuuggcuguugguccggccuacucagcucacugcauuggaauuacugacagggauuucauugagggggugcauggaggaacuuggguuucagcuacccuggagcaagacaagugugucacuguuauggccccugacaagccuucauuggacaucucacuagagacaguagccauugauagaccugcugaggugaggaaaguguguuacaaugcaguucucacucaugugaagauuaaugacaagugccccagcacuggagaggcccaccuagcugaagagaacgaaggggacaaugcgugcaagcgcacuuauucugauagaggcuggggcaauggcuguggccuauuugggaaagggagcauuguggcaugcgccaaauucacuugugccaaauccaugaguuuguuugagguugaucagaccaaaauucaguaugucaucagagcacaauugcauguaggggccaagcaggaaaauuggaauaccgacauuaagacucucaaguuugaugcccugucaggcucccaggaagucgaguucauuggguauggaaaagcuacacuggaaugccaggugcaaacugcgguggacuuugguaacaguuacaucgcugagauggaaacagagagcuggauaguggacagacagugggcccaggacuugacccugccauggcagaguggaaguggcgggguguggagagagaugcaucaucuugucgaauuugaaccuccgcaugccgccacuaucagaguacuggcccugggaaaccaggaaggcuccuugaaaacagcucuuacuggcgcaaugaggguuacaaaggacacaaaugacaacaaccuuuacaaacuacaugguggacauguuucuugcagagugaaauugucagcuuugacacucaaggggacauccuacaaaauaugcacugacaaaauguuuuuugucaagaacccaacugacacuggccauggcacuguugugaugcaggugaaagugucaaaaggagcccccugcaggauuccagugauaguagcugaugaucuuacagcggcaaucaauaaaggcauuuugguuacaguuaaccccaucgccucaaccaaugaugaugaagugcugauugaggugaacccaccuuuuggagacagcuacauuaucguugggagaggagauucacgucucacuuaccaguggcacaaagagggaagcucaauaggaaaguuguucacucagaccaugaaaggcguggaacgccuggccgucaugggagacaccgccugggauuucagcuccgcuggaggguucuucacuucgguugggaaaggaauucauacgguguuuggcucugccuuucaggggcuauuuggcggcuugaacuggauaacaaaggucaucaugggggcgguacuuauauggguuggcaucaacacaagaaacaugacaauguccaugagcaugaucuugguaggagugaucaugauguuuuugucucuaggaguuggggcguaaggacuagucccuguucccagagcccacuuuuuuuucuuuuuuugaaauaaaauagccugucuuucagaucuaaaaaaaaaaaaaaaaaaaaaaaaaaaaaaaaaaaaaaaaaaaaaaaaaaaaaaaaaaaaaaaaugcaucccccccccccccccccccccccccccccccaaaggcucuuuucagagccaccagaauu

SEQ ID NO: 532 - RNA, 2352 nt, Artificial Sequence
  mRNA product Design a-1 comprising derived and/or modified sequence from YFV__NC_002031.1__SSjev-prME-XX (polyprotein: aa122-788) (wt)
gggagagucccgcagucggcguccagcggcucugcuuguucgugugugugucguugcaggccuuauucaagcuuaccauggguaaacggagcgcuggcucaaucauguggcucgcgagcuuggcaguugucauagcuugugcaggagccgugaccuuggugcggaaaaacagaugguugcuccuaaaugugacaucugaggaccucgggaaaacauucucugugggcacaggcaacugcacaacaaacauuuuggaagccaaguacuggugcccagacucaauggaauacaacugucccaaucucaguccaagagaggagccagaugacauugauugcuggugcuaugggguggaaaacguuagagucgcauaugguaagugugacucagcaggcaggucuaggaggucaagaagggccauugacuugccuacgcaugaaaaccaugguuugaagacccggcaagaaaaauggaugacuggaagaaugggugaaaggcaacuccaaaagauugagagaugguucgugaggaaccccuuuuuugcagugacggcucugaccauugccuaccuugugggaagcaacaugacgcaacgagucgugauugcccuacuggucuuggcuguugguccggccuacucagcucacugcauuggaauuacugacagggauuucauugagggggugcauggaggaacuuggguuucagcuacccuggagcaagacaagugugucacuguuauggccccugacaagccuucauuggacaucucacuagagacaguagccauugauagaccugcugaggugaggaaaguguguuacaaugcaguucucacucaugugaagauuaaugacaagugccccagcacuggagaggcccaccuagcugaagagaacgaaggggacaaugcgugcaagcgcacuuauucugauagaggcuggggcaauggcuguggccuauuugggaaagggagcauuguggcaugcgccaaauucacuugugccaaauccaugaguuuguuugagguugaucagaccaaaauucaguaugucaucagagcacaauugcauguaggggccaagcaggaaaauuggaauaccgacauuaagacucucaaguuugaugcccugucaggcucccaggaagucgaguucauuggguauggaaaagcuacacuggaaugccaggugcaaacugcgguggacuuugguaacaguuacaucgcugagauggaaacagagagcuggauaguggacagacagugggcccaggacuugacccugccauggcagaguggaaguggcgggguguggagagagaugcaucaucuugucgaauuugaaccuccgcaugccgccacuaucagaguacuggcccugggaaaccaggaaggcuccuugaaaacagcucuuacuggcgcaaugaggguuacaaaggacacaaaugacaacaaccuuuacaaacuacaugguggacauguuucuugcagagugaaauugucagcuuugacacucaaggggacauccuacaaaauaugcacugacaaaauguuuuuugucaagaacccaacugacacuggccauggcacuguugugaugcaggugaaagugucaaaaggagcccccugcaggauuccagugauaguagcugaugaucuuacagcggcaaucaauaaaggcauuuugguuacaguuaaccccaucgccucaaccaaugaugaugaagugcugauugaggugaacccaccuuuuggagacagcuacauuaucguugggagaggagauucacgucucacuuaccaguggcacaaagagggaagcucaauaggaaaguuguucacucagaccaugaaaggcguggaacgccuggccgucaugggagacaccgccugggauuucagcuccgcuggaggguucuucacuucgguugggaaaggaauccauacgguguuuggcucugccuuucaggggcuauuuggcggcuugaacuggauaacaaaggucaucaugggggcgguacuuauauggguuggcaucaacacaagaaacaugacaauguccaugagcaugaucuugguaggagugaucaugauguuuuugucucuaggaguuggggcggaucaaggaugcgccaucaacuuuggcaaguaaggacuagucccuguucccagagcccacuuuuuuuucuuuuuuugaaauaaaauagccugucuuucagaucuaaaaaaaaaaaaaaaaaaaaaaaaaaaaaaaaaaaaaaaaaaaaaaaaaaaaaaaaaaaaaaaaugcaucccccccccccccccccccccccccccccccaaaggcucuuuucagagccaccagaauu

SEQ ID NO: 533 - RNA, 2322 nt, Artificial Sequence
  mRNA product Design a-1 comprising derived and/or modified sequence from YFV__NC_002031.1__SSjev-prME (polyprotein: aa122-778) (wt)
gggagagucccgcagucggcguccagcggcucugcuuguucgugugugugucguugcaggccuuauucaagcuuaccauggguaaacggagcgcuggcucaaucauguggcucgcgagcuuggcaguugucauagcuugugcaggagccgugaccuuggugcggaaaaacagaugguugcuccuaaaugugacaucugaggaccucgggaaaacauucucugugggcacaggcaacugcacaacaaacauuuuggaagccaaguacuggugcccagacucaauggaauacaacugucccaaucucaguccaagagaggagccagaugacauugauugcuggugcuaugggguggaaaacguuagagucgcauaugguaagugugacucagcaggcaggucuaggaggucaagaagggccauugacuugccuacgcaugaaaaccaugguuugaagacccggcaagaaaaauggaugacuggaagaaugggugaaaggcaacuccaaaagauugagagaugguucgugaggaaccccuuuuuugcagugacggcucugaccauugccuaccuugugggaagcaacaugacgcaacgagucgugauugcccuacuggucuuggcuguugguccggccuacucagcucacugcauuggaauuacugacagggauuucauugagggggugcauggaggaacuuggguuucagcuacccuggagcaagacaagugugucacuguuauggccccugacaagccuucauuggacaucucacuagagacaguagccauugauagaccugcugaggugaggaaaguguguuacaaugcaguucucacucaugugaagauuaaugacaagugccccagcacuggagaggcccaccuagcugaagagaacgaaggggacaaugcgugcaagcgcacuuauucugauagaggcuggggcaauggcuguggccuauuugggaaagggagcauuguggcaugcgccaaauucacuugugccaaauccaugaguuuguuugagguugaucagaccaaaauucaguaugucaucagagcacaauugcauguaggggccaagcaggaaaauuggaauaccgacauuaagacucucaaguuugaugcccugucaggcucccaggaagucgaguucauuggguauggaaaagcuacacuggaaugccaggugcaaacugcgguggacuuugguaacaguuacaucgcugagauggaaacagagagcuggauaguggacagacagugggcccaggacuugacccugccauggcagaguggaaguggcgggguguggagagagaugcaucaucuugucgaauuugaaccuccgcaugccgccacuaucagaguacuggcccugggaaaccaggaaggcuccuugaaaacagcucuuacuggcgcaaugaggguuacaaaggacacaaaugacaacaaccuuuacaaacuacaugguggacauguuucuugcagagugaaauugucagcuuugacacucaaggggacauccuacaaaauaugcacugacaaaauguuuuuugucaagaacccaacugacacuggccauggcacuguugugaugcaggugaaagugucaaaaggagcccccugcaggauuccagugauaguagcugaugaucuuacagcggcaaucaauaaaggcauuuugguuacaguuaaccccaucgccucaaccaaugaugaugaagugcugauugaggugaacccaccuuuuggagacagcuacauuaucguugggagaggagauucacgucucacuuaccaguggcacaaagagggaagcucaauaggaaaguuguucacucagaccaugaaaggcguggaacgccuggccgucaugggagacaccgccugggauuucagcuccgcuggaggguucuucacuucgguugggaaaggaauucauacgguguuuggcucugccuuucaggggcuauuuggcggcuugaacuggauaacaaaggucaucaugggggcgguacuuauauggguuggcaucaacacaagaaacaugacaauguccaugagcaugaucuugguaggagugaucaugauguuuuugucucuaggaguuggggcguaaggacuagucccuguucccagagcccacuuuuuuuucuuuuuuugaaauaaaauagccugucuuucagaucuaaaaaaaaaaaaaaaaaaaaaaaaaaaaaaaaaaaaaaaaaaaaaaaaaaaaaaaaaaaaaaaaugcaucccccccccccccccccccccccccccccccaaaggcucuuuucagagccaccagaauu

SEQ ID NO: 534 - RNA, 2370 nt, Artificial Sequence
  mRNA product Design a-1 comprising derived and/or modified sequence from YFV__NC_002031.1__X-SS-prME-XX (polyprotein: aa92-788) (opt1) R7233
gggagagucccgcagucggcguccagcggcucugcuuguucgugugugugucguugcaggccuuauucaagcuuaccaugcggggccugagcucccgcaagcggcgcagccacgacgugcucaccguccaguuccugauccuggggaugcuccugaugaccggcggggugacgcuggugcggaagaaccgcuggcuccugcugaacgucaccuccgaggaccucggcaagaccuucagcguggggaccggcaacugcacgaccaacauccuggaggccaaguacuggugccccgacuccauggaguacaacugcccgaaccugagcccccgggaggagcccgacgacaucgacugcuggugcuacggcguggagaacguccgcguggccuacgggaagugcgacuccgcgggccggagccgccggucccgccgggccaucgaccuccccacccacgagaaccacgggcugaagacccgccaggagaaguggaugacgggccggaugggggagcgccagcugcagaagaucgagcggugguucgugcgcaacccguucuucgccgucaccgcccucaccaucgccuaccuggugggcagcaacaugacccagcggguggucaucgcgcugcucgugcuggccgugggccccgccuacuccgcccacugcaucgggaucacggaccgcgacuucaucgagggcguccacgggggcaccugggugagcgcgacccuggagcaggacaagugcgugaccgucauggcccccgacaagcccucccucgacaucagccuggagacgguggccaucgaccggccggccgaggugcgcaaggucugcuacaacgccgugcugacccacgugaagaucaacgacaagugccccuccaccggcgaggcgcaccucgccgaggagaacgagggggacaacgccugcaagcggaccuacagcgaccggggcugggggaacggcugcgggcuguucggcaagggcuccaucgucgccugcgccaaguucacgugcgcgaagagcaugucccuguucgagguggaccagaccaagauccaguacgucauccgcgcccagcuccacgugggggccaagcaggagaacuggaacaccgacaucaagacccugaaguucgacgcccugagcggcagccaggagguggaguucaucggguacggcaaggccacgcucgagugccagguccagaccgcgguggacuucgggaacuccuacaucgccgagauggagaccgagagcuggaucguggaccggcagugggcccaggaccugacccugcccuggcaguccggcagcggcggggucuggcgcgagaugcaccaccucguggaguucgagcccccgcacgccgccacgauccgggugcuggcgcugggcaaccaggaggggucccucaagaccgcccugaccggcgccaugcgcgucaccaaggacacgaacgacaacaaccuguacaagcuccacgggggccacgugagcugccgggugaagcuguccgcccugacccucaagggcaccagcuacaagaucugcaccgacaagauguucuucgucaagaaccccacggacaccgggcacggcaccguggugaugcaggucaagguguccaagggggcgcccugccgcaucccggugaucgucgccgacgaccugaccgccgccaucaacaagggcauccuggugaccgugaacccgaucgccagcacgaacgacgacgagguccucaucgaggugaacccccccuucggcgacuccuacaucaucguggggcggggcgacagccgccugaccuaccaguggcacaaggagggguccagcaucggcaagcuguucacccagaccaugaagggggucgagcggcuggcggugaugggcgacacggccugggacuucuccagcgccggcggguucuucaccuccgugggcaaggggauccacaccgucuucggcagcgccuuccaggggcucuucggcggccugaacuggaucaccaaggugaucaugggggccgugcugaucugggucggcaucaacacgcgcaacaugaccauguccaugagcaugauccucgugggggugaucaugauguuccugagccugggcgucggggcggaccagggcugcgccaucaacuucggcaagugaggacuagucccuguucccagagcccacuuuuuuuucuuuuuuugaaauaaaauagccugucuuucagaucuaaaaaaaaaaaaaaaaaaaaaaaaaaaaaaaaaaaaaaaaaaaaaaaaaaaaaaaaaaaaaaaaugcaucccccccccccccccccccccccccccccccaaaggcucuuuucagagccaccagaauu

SEQ ID NO: 535 - RNA, 2307 nt, Artificial Sequence
  mRNA product Design a-1 comprising derived and/or modified sequence from YFV__NC_002031.1__SS-prME (polyprotein: M,aa104-778) (opt1)
gggagagucccgcagucggcguccagcggcucugcuuguucgugugugugucguugcaggccuuauucaagcuuaccauggacgugcugaccguccaguuccucauccugggcaugcugcucaugaccgggggcgugacccugguccggaagaaccgcuggcuccugcugaacgugaccagcgaggaccucggcaagacguucuccguggggaccggcaacugcaccaccaacauccuggaggccaaguacuggugccccgacagcauggaguacaacugccccaaccuguccccgcgggaggagcccgacgacaucgacugcuggugcuacggggucgagaacgugcgcguggccuacggcaagugcgacagcgcggggcggucccgccggagccgccgggccaucgaccugcccacccacgagaaccacggccucaagacccggcaggagaaguggaugacggggcgcaugggcgagcggcagcugcagaagaucgagcgcugguucgugcggaacccguucuucgccgucaccgcgcugaccaucgccuaccucguggggagcaacaugacccagcgcguggucaucgcccugcuggugcucgccgugggccccgccuacuccgcgcacugcaucgggaucacggaccgggacuucaucgagggcguccacggcgggaccugggugagcgccacccuggagcaggacaagugcgugaccgucauggcccccgacaagcccucccuggacaucagccucgagacgguggccaucgaccgcccggcggaggugcggaaggucugcuacaacgccgugcugacccacgugaagaucaacgacaagugccccuccaccggcgaggcccaccuggccgaggagaacgagggggacaacgccugcaagcgcaccuacagcgaccggggcugggggaacggcugcggccucuucgggaagggcuccaucgucgcgugcgccaaguucacgugcgccaagagcaugucccuguucgagguggaccagaccaagauccaguacgugauccgcgcccagcugcacgucggggccaagcaggagaacuggaacaccgacaucaagacccucaaguucgacgcgcugagcggcucccaggagguggaguucaucggcuacgggaaggccacgcuggagugccaggugcagaccgccgucgacuucggcaacagcuacaucgccgagauggagaccgaguccuggaucguggaccggcagugggcccaggaccucacccugcccuggcagagcggguccggcgggguguggcgcgagaugcaccaccuggucgaguucgagcccccgcacgcggccacgauccgggugcucgcccugggcaaccaggagggcagccugaagaccgcccucaccggggccaugcgcgucaccaaggacacgaacgacaacaaccuguacaagcugcacggcgggcacguguccugccgggugaagcucagcgcgcugacccugaagggcaccuccuacaagaucugcaccgacaagauguucuucgucaagaaccccacggacaccgggcacggcaccguggugaugcaggucaaggugagcaagggcgcccccugccgcaucccggugaucgucgccgacgaccucaccgccgcgaucaacaaggggauccuggugacggugaaccccaucgccagcaccaacgacgacgagguccugaucgaggugaacccgcccuucggcgacuccuacaucaucguggggcggggcgacagccgccucaccuaccaguggcacaaggagggguccagcaucggcaagcuguucacccagacgaugaagggcgucgagcggcuggccgugaugggggacaccgccugggacuucuccagcgccggcggguucuucaccuccgugggcaagggcauccacaccgucuucgggagcgcguuccagggccucuucgggggccugaacuggaucaccaaggugaucaugggggccgugcugaucugggucggcaucaacacgcgcaacaugaccauguccaugagcaugauccucgugggcgugaucaugauguuccugucccugggggucggcgccugaggacuagucccuguucccagagcccacuuuuuuuucuuuuuuugaaauaaaauagccugucuuucagaucuaaaaaaaaaaaaaaaaaaaaaaaaaaaaaaaaaaaaaaaaaaaaaaaaaaaaaaaaaaaaaaaaugcaucccccccccccccccccccccccccccccccaaaggcucuuuucagagccaccagaauu

SEQ ID NO: 536 - RNA, 2334 nt, Artificial Sequence
  mRNA product Design a-1 comprising derived and/or modified sequence from YFV__NC_002031.1__SSIgE-prME-XX (polyprotein: aa122-788) (opt1)
gggagagucccgcagucggcguccagcggcucugcuuguucgugugugugucguugcaggccuuauucaagcuuaccauggacuggaccuggauccuguuccucguggccgccgcgacccgcguccacagcgugacgcuggugcggaagaaccgcuggcuccugcugaacgucaccuccgaggaccucggcaagaccuucagcguggggaccggcaacugcacgaccaacauccuggaggccaaguacuggugccccgacuccauggaguacaacugcccgaaccugagcccccgggaggagcccgacgacaucgacugcuggugcuacggcguggagaacguccgcguggccuacgggaagugcgacuccgcgggccggagccgccggucccgccgggccaucgaccuccccacccacgagaaccacgggcugaagacccgccaggagaaguggaugacgggccggaugggggagcgccagcugcagaagaucgagcggugguucgugcgcaacccguucuucgccgucaccgcccucaccaucgccuaccuggugggcagcaacaugacccagcggguggucaucgcgcugcucgugcuggccgugggccccgccuacuccgcccacugcaucgggaucacggaccgcgacuucaucgagggcguccacgggggcaccugggugagcgcgacccuggagcaggacaagugcgugaccgucauggcccccgacaagcccucccucgacaucagccuggagacgguggccaucgaccggccggccgaggugcgcaaggucugcuacaacgccgugcugacccacgugaagaucaacgacaagugccccuccaccggcgaggcgcaccucgccgaggagaacgagggggacaacgccugcaagcggaccuacagcgaccggggcugggggaacggcugcgggcuguucggcaagggcuccaucgucgccugcgccaaguucacgugcgcgaagagcaugucccuguucgagguggaccagaccaagauccaguacgucauccgcgcccagcuccacgugggggccaagcaggagaacuggaacaccgacaucaagacccugaaguucgacgcccugagcggcagccaggagguggaguucaucggguacggcaaggccacgcucgagugccagguccagaccgcgguggacuucgggaacuccuacaucgccgagauggagaccgagagcuggaucguggaccggcagugggcccaggaccugacccugcccuggcaguccggcagcggcggggucuggcgcgagaugcaccaccucguggaguucgagcccccgcacgccgccacgauccgggugcuggcgcugggcaaccaggaggggucccucaagaccgcccugaccggcgccaugcgcgucaccaaggacacgaacgacaacaaccuguacaagcuccacgggggccacgugagcugccgggugaagcuguccgcccugacccucaagggcaccagcuacaagaucugcaccgacaagauguucuucgucaagaaccccacggacaccgggcacggcaccguggugaugcaggucaagguguccaagggggcgcccugccgcaucccggugaucgucgccgacgaccugaccgccgccaucaacaagggcauccuggugaccgugaacccgaucgccagcacgaacgacgacgagguccucaucgaggugaacccccccuucggcgacuccuacaucaucguggggcggggcgacagccgccugaccuaccaguggcacaaggagggguccagcaucggcaagcuguucacccagaccaugaagggggucgagcggcuggcggugaugggcgacacggccugggacuucuccagcgccggcggguucuucaccuccgugggcaaggggauccacaccgucuucggcagcgccuuccaggggcucuucggcggccugaacuggaucaccaaggugaucaugggggccgugcugaucugggucggcaucaacacgcgcaacaugaccauguccaugagcaugauccucgugggggugaucaugauguuccugagccugggcgucggggcggaccagggcugcgccaucaacuucggcaagugaggacuagucccuguucccagagcccacuuuuuuuucuuuuuuugaaauaaaauagccugucuuucagaucuaaaaaaaaaaaaaaaaaaaaaaaaaaaaaaaaaaaaaaaaaaaaaaaaaaaaaaaaaaaaaaaaugcaucccccccccccccccccccccccccccccccaaaggcucuuuucagagccaccagaauu

SEQ ID NO: 537 - RNA, 2304 nt, Artificial Sequence
  mRNA product Design a-1 comprising derived and/or modified sequence from YFV__NC_002031.1__SSIgE-prME (polyprotein: aa122-778) (opt1)
gggagagucccgcagucggcguccagcggcucugcuuguucgugugugugucguugcaggccuuauucaagcuuaccauggacuggaccuggauccuguuccucguggccgccgcgacccgcguccacagcgugacccugguccgcaagaaccgguggcuccugcugaacgugaccagcgaggaccucggcaagacguucuccguggggaccggcaacugcaccaccaacauccuggaggccaaguacuggugccccgacagcauggaguacaacugcccgaaccuguccccgcgcgaggagcccgacgacaucgacugcuggugcuacggggucgagaacgugcggguggccuacggcaagugcgacagcgcggggcgcucccggcgcagccggcgcgccaucgaccuccccacgcacgagaaccacggccugaagacccggcaggagaaguggaugaccggccgcaugggggagcggcagcugcagaagaucgagcgcugguucguccggaaccccuucuucgccgugaccgcccucacgaucgccuaccuggugggcuccaacaugacccagcgcgucgugaucgcgcugcucgugcuggccgucgggcccgccuacagcgcccacugcaucggcaucaccgaccgggacuucaucgagggggugcacggcggcaccuggguguccgcgacgcuggagcaggacaagugcgucaccgugauggcccccgacaagcccagccucgacaucucccuggagaccguggccaucgaccgcccggccgagguccggaaggugugcuacaacgccgugcugacccacgucaagaucaacgacaagugccccagcacgggggaggcgcaccucgccgaggagaacgagggcgacaacgccugcaagcgcaccuacuccgaccggggguggggcaacggcugcgggcuguucggcaaggggagcaucguggccugcgccaaguucaccugcgcgaaguccaugagccuguucgagguggaccagaccaagauccaguacgucauccgcgcccagcuccacgugggcgccaagcaggagaacuggaacacggacaucaagacccugaaguucgacgcccuguccgggagccaggaggucgaguucaucggcuacggcaaggccacccucgagugccaggugcagaccgcgguggacuucgggaacuccuacaucgccgagauggagacggagagcuggaucgucgaccggcagugggcccaggaccugacccugcccuggcagagcggcuccgggggcguguggcgcgagaugcaccaccucguggaguucgagcccccgcacgccgccaccauccgcguccuggcgcuggggaaccaggagggcagccucaagaccgcccugacgggcgccaugcgggugaccaaggacaccaacgacaacaaccuguacaagcuccacgggggccacguguccugccgcgucaagcugagcgcccugacccucaaggggacguccuacaagaucugcaccgacaagauguucuucgugaagaaccccaccgacaccggccacgggacgguggucaugcaggugaaggugagcaagggcgcgcccugccggauccccgucaucguggccgacgaccugaccgccgccaucaacaagggcauccuggugaccgucaacccgaucgccuccaccaacgacgacgaggugcucaucgaggugaacccgcccuucggggacagcuacaucaucgucggccgcggggacucccggcugaccuaccaguggcacaaggagggcagcuccaucggcaagcuguucacgcagaccaugaaggggguggagcgccucgcggugaugggcgacaccgccugggacuucagcuccgccgggggcuucuucaccagcgucgggaagggcauccacacgguguucggcuccgccuuccaggggcuguucggcgggcugaacuggaucaccaaggugaucaugggcgccguccucaucuggguggggaucaacacccggaacaugaccaugagcauguccaugauccuggugggcgucaucaugauguuccugagccugggcgugggggcgugaggacuagucccuguucccagagcccacuuuuuuuucuuuuuuugaaauaaaauagccugucuuucagaucuaaaaaaaaaaaaaaaaaaaaaaaaaaaaaaaaaaaaaaaaaaaaaaaaaaaaaaaaaaaaaaaaugcaucccccccccccccccccccccccccccccccaaaggcucuuuucagagccaccagaauu

SEQ ID NO: 538 - RNA, 2352 nt, Artificial Sequence
  mRNA product Design a-1 comprising derived and/or modified sequence from YFV__NC_002031.1__SSjev-prME-XX (polyprotein: aa122-788) (opt1)
gggagagucccgcagucggcguccagcggcucugcuuguucgugugugugucguugcaggccuuauucaagcuuaccaugggcaagcgcagcgccggguccaucauguggcuggccagccucgcgguggucaucgccugcgccggcgccgugacgcuggugcggaagaaccgcuggcuccugcugaacgucaccuccgaggaccucggcaagaccuucagcguggggaccggcaacugcacgaccaacauccuggaggccaaguacuggugccccgacuccauggaguacaacugcccgaaccugagcccccgggaggagcccgacgacaucgacugcuggugcuacggcguggagaacguccgcguggccuacgggaagugcgacuccgcgggccggagccgccggucccgccgggccaucgaccuccccacccacgagaaccacgggcugaagacccgccaggagaaguggaugacgggccggaugggggagcgccagcugcagaagaucgagcggugguucgugcgcaacccguucuucgccgucaccgcccucaccaucgccuaccuggugggcagcaacaugacccagcggguggucaucgcgcugcucgugcuggccgugggccccgccuacuccgcccacugcaucgggaucacggaccgcgacuucaucgagggcguccacgggggcaccugggugagcgcgacccuggagcaggacaagugcgugaccgucauggcccccgacaagcccucccucgacaucagccuggagacgguggccaucgaccggccggccgaggugcgcaaggucugcuacaacgccgugcugacccacgugaagaucaacgacaagugccccuccaccggcgaggcgcaccucgccgaggagaacgagggggacaacgccugcaagcggaccuacagcgaccggggcugggggaacggcugcgggcuguucggcaagggcuccaucgucgccugcgccaaguucacgugcgcgaagagcaugucccuguucgagguggaccagaccaagauccaguacgucauccgcgcccagcuccacgugggggccaagcaggagaacuggaacaccgacaucaagacccugaaguucgacgcccugagcggcagccaggagguggaguucaucggguacggcaaggccacgcucgagugccagguccagaccgcgguggacuucgggaacuccuacaucgccgagauggagaccgagagcuggaucguggaccggcagugggcccaggaccugacccugcccuggcaguccggcagcggcggggucuggcgcgagaugcaccaccucguggaguucgagcccccgcacgccgccacgauccgggugcuggcgcugggcaaccaggaggggucccucaagaccgcccugaccggcgccaugcgcgucaccaaggacacgaacgacaacaaccuguacaagcuccacgggggccacgugagcugccgggugaagcuguccgcccugacccucaagggcaccagcuacaagaucugcaccgacaagauguucuucgucaagaaccccacggacaccgggcacggcaccguggugaugcaggucaagguguccaagggggcgcccugccgcaucccggugaucgucgccgacgaccugaccgccgccaucaacaagggcauccuggugaccgugaacccgaucgccagcacgaacgacgacgagguccucaucgaggugaacccccccuucggcgacuccuacaucaucguggggcggggcgacagccgccugaccuaccaguggcacaaggagggguccagcaucggcaagcuguucacccagaccaugaagggggucgagcggcuggcggugaugggcgacacggccugggacuucuccagcgccggcggguucuucaccuccgugggcaaggggauccacaccgucuucggcagcgccuuccaggggcucuucggcggccugaacuggaucaccaaggugaucaugggggccgugcugaucugggucggcaucaacacgcgcaacaugaccauguccaugagcaugauccucgugggggugaucaugauguuccugagccugggcgucggggcggaccagggcugcgccaucaacuucggcaagugaggacuagucccuguucccagagcccacuuuuuuuucuuuuuuugaaauaaaauagccugucuuucagaucuaaaaaaaaaaaaaaaaaaaaaaaaaaaaaaaaaaaaaaaaaaaaaaaaaaaaaaaaaaaaaaaaugcaucccccccccccccccccccccccccccccccaaaggcucuuuucagagccaccagaauu

SEQ ID NO: 539 - RNA, 2322 nt, Artificial Sequence
  mRNA product Design a-1 comprising derived and/or modified sequence from YFV__NC_002031.1__SSjev-prME (polyprotein: aa122-778) (opt1)
gggagagucccgcagucggcguccagcggcucugcuuguucgugugugugucguugcaggccuuauucaagcuuaccaugggcaagcgcagcgccggguccaucauguggcuggccagccucgcgguggucaucgccugcgccggcgccgugacccugguccgcaagaaccgguggcuccugcugaacgugaccagcgaggaccucggcaagacguucuccguggggaccggcaacugcaccaccaacauccuggaggccaaguacuggugccccgacagcauggaguacaacugcccgaaccuguccccgcgcgaggagcccgacgacaucgacugcuggugcuacggggucgagaacgugcggguggccuacggcaagugcgacagcgcggggcgcucccggcgcagccggcgcgccaucgaccuccccacgcacgagaaccacggccugaagacccggcaggagaaguggaugaccggccgcaugggggagcggcagcugcagaagaucgagcgcugguucguccggaaccccuucuucgccgugaccgcccucacgaucgccuaccuggugggcuccaacaugacccagcgcgucgugaucgcgcugcucgugcuggccgucgggcccgccuacagcgcccacugcaucggcaucaccgaccgggacuucaucgagggggugcacggcggcaccuggguguccgcgacgcuggagcaggacaagugcgucaccgugauggcccccgacaagcccagccucgacaucucccuggagaccguggccaucgaccgcccggccgagguccggaaggugugcuacaacgccgugcugacccacgucaagaucaacgacaagugccccagcacgggggaggcgcaccucgccgaggagaacgagggcgacaacgccugcaagcgcaccuacuccgaccggggguggggcaacggcugcgggcuguucggcaaggggagcaucguggccugcgccaaguucaccugcgcgaaguccaugagccuguucgagguggaccagaccaagauccaguacgucauccgcgcccagcuccacgugggcgccaagcaggagaacuggaacacggacaucaagacccugaaguucgacgcccuguccgggagccaggaggucgaguucaucggcuacggcaaggccacccucgagugccaggugcagaccgcgguggacuucgggaacuccuacaucgccgagauggagacggagagcuggaucgucgaccggcagugggcccaggaccugacccugcccuggcagagcggcuccgggggcguguggcgcgagaugcaccaccucguggaguucgagcccccgcacgccgccaccauccgcguccuggcgcuggggaaccaggagggcagccucaagaccgcccugacgggcgccaugcgggugaccaaggacaccaacgacaacaaccuguacaagcuccacgggggccacguguccugccgcgucaagcugagcgcccugacccucaaggggacguccuacaagaucugcaccgacaagauguucuucgugaagaaccccaccgacaccggccacgggacgguggucaugcaggugaaggugagcaagggcgcgcccugccggauccccgucaucguggccgacgaccugaccgccgccaucaacaagggcauccuggugaccgucaacccgaucgccuccaccaacgacgacgaggugcucaucgaggugaacccgcccuucggggacagcuacaucaucgucggccgcggggacucccggcugaccuaccaguggcacaaggagggcagcuccaucggcaagcuguucacgcagaccaugaaggggguggagcgccucgcggugaugggcgacaccgccugggacuucagcuccgccgggggcuucuucaccagcgucgggaagggcauccacacgguguucggcuccgccuuccaggggcuguucggcgggcugaacuggaucaccaaggugaucaugggcgccguccucaucuggguggggaucaacacccggaacaugaccaugagcauguccaugauccuggugggcgucaucaugauguuccugagccugggcgugggggcgugaggacuagucccuguucccagagcccacuuuuuuuucuuuuuuugaaauaaaauagccugucuuucagaucuaaaaaaaaaaaaaaaaaaaaaaaaaaaaaaaaaaaaaaaaaaaaaaaaaaaaaaaaaaaaaaaaugcaucccccccccccccccccccccccccccccccaaaggcucuuuucagagccaccagaauu

SEQ ID NO: 540 - RNA, 2370 nt, Artificial Sequence
  mRNA product Design a-1 comprising derived and/or modified sequence from YFV__NC_002031.1__X-SS-prME-XX (polyprotein: aa92-788) (opt1)
gggagagucccgcagucggcguccagcggcucugcuuguucgugugugugucguugcaggccuuauucaagcuuaccaugcggggccugagcucccgcaagcggcgcagccacgacgugcucaccguccaguuccugauccuggggaugcuccugaugaccggcggggugacgcuggugcggaagaaccgcuggcuccugcugaacgucaccuccgaggaccucggcaagaccuucagcguggggaccggcaacugcacgaccaacauccuggaggccaaguacuggugccccgacuccauggaguacaacugcccgaaccugagcccccgggaggagcccgacgacaucgacugcuggugcuacggcguggagaacguccgcguggccuacgggaagugcgacuccgcgggccggagccgccggucccgccgggccaucgaccuccccacccacgagaaccacgggcugaagacccgccaggagaaguggaugacgggccggaugggggagcgccagcugcagaagaucgagcggugguucgugcgcaacccguucuucgccgucaccgcccucaccaucgccuaccuggugggcagcaacaugacccagcggguggucaucgcgcugcucgugcuggccgugggccccgccuacuccgcccacugcaucgggaucacggaccgcgacuucaucgagggcguccacgggggcaccugggugagcgcgacccuggagcaggacaagugcgugaccgucauggcccccgacaagcccucccucgacaucagccuggagacgguggccaucgaccggccggccgaggugcgcaaggucugcuacaacgccgugcugacccacgugaagaucaacgacaagugccccuccaccggcgaggcgcaccucgccgaggagaacgagggggacaacgccugcaagcggaccuacagcgaccggggcugggggaacggcugcgggcuguucggcaagggcuccaucgucgccugcgccaaguucacgugcgcgaaguccaugagccuguucgagguggaccagaccaagauccaguacgucauccgcgcccagcuccacgugggggccaagcaggagaacuggaacaccgacaucaagacccugaaguucgacgcccugagcggcagccaggagguggaguucaucggguacggcaaggccacgcucgagugccagguccagaccgcgguggacuucgggaacuccuacaucgccgagauggagaccgagagcuggaucguggaccggcagugggcccaggaccugacccugcccuggcaguccggcagcggcggggucuggcgcgagaugcaccaccucguggaguucgagcccccgcacgccgccacgauccgggugcuggcgcugggcaaccaggaggggucccucaagaccgcccugaccggcgccaugcgcgucaccaaggacacgaacgacaacaaccuguacaagcuccacgggggccacgugagcugccgggugaagcuguccgcccugacccucaagggcaccagcuacaagaucugcaccgacaagauguucuucgucaagaaccccacggacaccgggcacggcaccguggugaugcaggucaagguguccaagggggcgcccugccgcaucccggugaucgucgccgacgaccugaccgccgccaucaacaagggcauccuggugaccgugaacccgaucgccagcacgaacgacgacgagguccucaucgaggugaacccccccuucggcgacuccuacaucaucguggggcggggcgacagccgccugaccuaccaguggcacaaggagggguccagcaucggcaagcuguucacccagaccaugaagggggucgagcggcuggcggugaugggcgacacggccugggacuucuccagcgccggcggguucuucaccuccgugggcaaggggauccacaccgucuucggcagcgccuuccaggggcuguucggcggccucaacuggaucaccaaggugaucaugggggccgugcugaucugggucggcaucaacacgcgcaacaugaccauguccaugagcaugauccucgugggggugaucaugauguuccugagccugggcgucggggcggaccagggcugcgccaucaacuucggcaagugaggacuagucccuguucccagagcccacuuuuuuuucuuuuuuugaaauaaaauagccugucuuucagaucuaaaaaaaaaaaaaaaaaaaaaaaaaaaaaaaaaaaaaaaaaaaaaaaaaaaaaaaaaaaaaaaaugcaucccccccccccccccccccccccccccccccaaaggcucuuuucagagccaccagaauu

SEQ ID NO: 541 - RNA, 2307 nt, Artificial Sequence
  mRNA product Design a-1 comprising derived and/or modified sequence from YFV__NC_002031.1__SS-prME (polyprotein: M,aa104-778) (opt1)
gggagagucccgcagucggcguccagcggcucugcuuguucgugugugugucguugcaggccuuauucaagcuuaccauggacgugcucaccguccaguuccugauccuggggaugcuccugaugaccggcggggugacgcuggugcggaagaaccgcuggcuccugcugaacgucaccuccgaggaccucggcaagaccuucagcguggggaccggcaacugcacgaccaacauccuggaggccaaguacuggugccccgacuccauggaguacaacugcccgaaccugagcccccgggaggagcccgacgacaucgacugcuggugcuacggcguggagaacguccgcguggccuacgggaagugcgacuccgcgggccggagccgccggucccgccgggccaucgaccuccccacccacgagaaccacgggcugaagacccgccaggagaaguggaugacgggccggaugggggagcgccagcugcagaagaucgagcggugguucgugcgcaacccguucuucgccgucaccgcccucaccaucgccuaccuggugggcagcaacaugacccagcggguggucaucgcgcugcucgugcuggccgugggccccgccuacuccgcccacugcaucgggaucacggaccgcgacuucaucgagggcguccacgggggcaccugggugagcgcgacccuggagcaggacaagugcgugaccgucauggcccccgacaagcccucccucgacaucagccuggagacgguggccaucgaccggccggccgaggugcgcaaggucugcuacaacgccgugcugacccacgugaagaucaacgacaagugccccuccaccggcgaggcgcaccucgccgaggagaacgagggggacaacgccugcaagcggaccuacagcgaccggggcugggggaacggcugcgggcuguucggcaagggcuccaucgucgccugcgccaaguucacgugcgcgaaguccaugagccuguucgagguggaccagaccaagauccaguacgucauccgcgcccagcuccacgugggggccaagcaggagaacuggaacaccgacaucaagacccugaaguucgacgcccugagcggcagccaggagguggaguucaucggguacggcaaggccacgcucgagugccagguccagaccgcgguggacuucgggaacuccuacaucgccgagauggagaccgagagcuggaucguggaccggcagugggcccaggaccugacccugcccuggcaguccggcagcggcggggucuggcgcgagaugcaccaccucguggaguucgagcccccgcacgccgccacgauccgggugcuggcgcugggcaaccaggaggggucccucaagaccgcccugaccggcgccaugcgcgucaccaaggacacgaacgacaacaaccuguacaagcuccacgggggccacgugagcugccgggugaagcuguccgcccugacccucaagggcaccagcuacaagaucugcaccgacaagauguucuucgucaagaaccccacggacaccgggcacggcaccguggugaugcaggucaagguguccaagggggcgcccugccgcaucccggugaucgucgccgacgaccugaccgccgccaucaacaagggcauccuggugaccgugaacccgaucgccagcacgaacgacgacgagguccucaucgaggugaacccccccuucggcgacuccuacaucaucguggggcggggcgacagccgccugaccuaccaguggcacaaggagggguccagcaucggcaagcuguucacccagaccaugaagggggucgagcggcuggcggugaugggcgacacggccugggacuucuccagcgccggcggguucuucaccuccgugggcaaggggauccacaccgucuucggcagcgccuuccaggggcuguucggcggccucaacuggaucaccaaggugaucaugggggccgugcugaucugggucggcaucaacacgcgcaacaugaccauguccaugagcaugauccucgugggggugaucaugauguuccugagccugggcgucggggcgugaggacuagucccuguucccagagcccacuuuuuuuucuuuuuuugaaauaaaauagccugucuuucagaucuaaaaaaaaaaaaaaaaaaaaaaaaaaaaaaaaaaaaaaaaaaaaaaaaaaaaaaaaaaaaaaaaugcaucccccccccccccccccccccccccccccccaaaggcucuuuucagagccaccagaauu

SEQ ID NO: 542 - RNA, 2334 nt, Artificial Sequence
  mRNA product Design a-1 comprising derived and/or modified sequence from YFV__NC_002031.1__SSIgE-prME-XX (polyprotein: aa122-788) (opt1)
gggagagucccgcagucggcguccagcggcucugcuuguucgugugugugucguugcaggccuuauucaagcuuaccauggacuggaccuggauccuguuccucguggccgccgcgacccgcguccacagcgugacgcuggugcggaagaaccgcuggcuccugcugaacgucaccuccgaggaccucggcaagaccuucagcguggggaccggcaacugcacgaccaacauccuggaggccaaguacuggugccccgacuccauggaguacaacugcccgaaccugagcccccgggaggagcccgacgacaucgacugcuggugcuacggcguggagaacguccgcguggccuacgggaagugcgacuccgcgggccggagccgccggucccgccgggccaucgaccuccccacccacgagaaccacgggcugaagacccgccaggagaaguggaugacgggccggaugggggagcgccagcugcagaagaucgagcggugguucgugcgcaacccguucuucgccgucaccgcccucaccaucgccuaccuggugggcagcaacaugacccagcggguggucaucgcgcugcucgugcuggccgugggccccgccuacuccgcccacugcaucgggaucacggaccgcgacuucaucgagggcguccacgggggcaccugggugagcgcgacccuggagcaggacaagugcgugaccgucauggcccccgacaagcccucccucgacaucagccuggagacgguggccaucgaccggccggccgaggugcgcaaggucugcuacaacgccgugcugacccacgugaagaucaacgacaagugccccuccaccggcgaggcgcaccucgccgaggagaacgagggggacaacgccugcaagcggaccuacagcgaccggggcugggggaacggcugcgggcuguucggcaagggcuccaucgucgccugcgccaaguucacgugcgcgaaguccaugagccuguucgagguggaccagaccaagauccaguacgucauccgcgcccagcuccacgugggggccaagcaggagaacuggaacaccgacaucaagacccugaaguucgacgcccugagcggcagccaggagguggaguucaucggguacggcaaggccacgcucgagugccagguccagaccgcgguggacuucgggaacuccuacaucgccgagauggagaccgagagcuggaucguggaccggcagugggcccaggaccugacccugcccuggcaguccggcagcggcggggucuggcgcgagaugcaccaccucguggaguucgagcccccgcacgccgccacgauccgggugcuggcgcugggcaaccaggaggggucccucaagaccgcccugaccggcgccaugcgcgucaccaaggacacgaacgacaacaaccuguacaagcuccacgggggccacgugagcugccgggugaagcuguccgcccugacccucaagggcaccagcuacaagaucugcaccgacaagauguucuucgucaagaaccccacggacaccgggcacggcaccguggugaugcaggucaagguguccaagggggcgcccugccgcaucccggugaucgucgccgacgaccugaccgccgccaucaacaagggcauccuggugaccgugaacccgaucgccagcacgaacgacgacgagguccucaucgaggugaacccccccuucggcgacuccuacaucaucguggggcggggcgacagccgccugaccuaccaguggcacaaggagggguccagcaucggcaagcuguucacccagaccaugaagggggucgagcggcuggcggugaugggcgacacggccugggacuucuccagcgccggcggguucuucaccuccgugggcaaggggauccacaccgucuucggcagcgccuuccaggggcuguucggcggccucaacuggaucaccaaggugaucaugggggccgugcugaucugggucggcaucaacacgcgcaacaugaccauguccaugagcaugauccucgugggggugaucaugauguuccugagccugggcgucggggcggaccagggcugcgccaucaacuucggcaagugaggacuagucccuguucccagagcccacuuuuuuuucuuuuuuugaaauaaaauagccugucuuucagaucuaaaaaaaaaaaaaaaaaaaaaaaaaaaaaaaaaaaaaaaaaaaaaaaaaaaaaaaaaaaaaaaaugcaucccccccccccccccccccccccccccccccaaaggcucuuuucagagccaccagaauu

SEQ ID NO: 543 - RNA, 2304 nt, Artificial Sequence
  mRNA product Design a-1 comprising derived and/or modified sequence from YFV__NC_002031.1__SSIgE-prME (polyprotein: aa122-778) (opt1)
gggagagucccgcagucggcguccagcggcucugcuuguucgugugugugucguugcaggccuuauucaagcuuaccauggacuggaccuggauccuguuccucguggccgccgcgacccgcguccacagcgugacgcuggugcggaagaaccgcuggcuccugcugaacgucaccuccgaggaccucggcaagaccuucagcguggggaccggcaacugcacgaccaacauccuggaggccaaguacuggugccccgacuccauggaguacaacugcccgaaccugagcccccgggaggagcccgacgacaucgacugcuggugcuacggcguggagaacguccgcguggccuacgggaagugcgacuccgcgggccggagccgccggucccgccgggccaucgaccuccccacccacgagaaccacgggcugaagacccgccaggagaaguggaugacgggccggaugggggagcgccagcugcagaagaucgagcggugguucgugcgcaacccguucuucgccgucaccgcccucaccaucgccuaccuggugggcagcaacaugacccagcggguggucaucgcgcugcucgugcuggccgugggccccgccuacuccgcccacugcaucgggaucacggaccgcgacuucaucgagggcguccacgggggcaccugggugagcgcgacccuggagcaggacaagugcgugaccgucauggcccccgacaagcccucccucgacaucagccuggagacgguggccaucgaccggccggccgaggugcgcaaggucugcuacaacgccgugcugacccacgugaagaucaacgacaagugccccuccaccggcgaggcgcaccucgccgaggagaacgagggggacaacgccugcaagcggaccuacagcgaccggggcugggggaacggcugcgggcuguucggcaagggcuccaucgucgccugcgccaaguucacgugcgcgaaguccaugagccuguucgagguggaccagaccaagauccaguacgucauccgcgcccagcuccacgugggggccaagcaggagaacuggaacaccgacaucaagacccugaaguucgacgcccugagcggcagccaggagguggaguucaucggguacggcaaggccacgcucgagugccagguccagaccgcgguggacuucgggaacuccuacaucgccgagauggagaccgagagcuggaucguggaccggcagugggcccaggaccugacccugcccuggcaguccggcagcggcggggucuggcgcgagaugcaccaccucguggaguucgagcccccgcacgccgccacgauccgggugcuggcgcugggcaaccaggaggggucccucaagaccgcccugaccggcgccaugcgcgucaccaaggacacgaacgacaacaaccuguacaagcuccacgggggccacgugagcugccgggugaagcuguccgcccugacccucaagggcaccagcuacaagaucugcaccgacaagauguucuucgucaagaaccccacggacaccgggcacggcaccguggugaugcaggucaagguguccaagggggcgcccugccgcaucccggugaucgucgccgacgaccugaccgccgccaucaacaagggcauccuggugaccgugaacccgaucgccagcacgaacgacgacgagguccucaucgaggugaacccccccuucggcgacuccuacaucaucguggggcggggcgacagccgccugaccuaccaguggcacaaggagggguccagcaucggcaagcuguucacccagaccaugaagggggucgagcggcuggcggugaugggcgacacggccugggacuucuccagcgccggcggguucuucaccuccgugggcaaggggauccacaccgucuucggcagcgccuuccaggggcuguucggcggccucaacuggaucaccaaggugaucaugggggccgugcugaucugggucggcaucaacacgcgcaacaugaccauguccaugagcaugauccucgugggggugaucaugauguuccugagccugggcgucggggcgugaggacuagucccuguucccagagcccacuuuuuuuucuuuuuuugaaauaaaauagccugucuuucagaucuaaaaaaaaaaaaaaaaaaaaaaaaaaaaaaaaaaaaaaaaaaaaaaaaaaaaaaaaaaaaaaaaugcaucccccccccccccccccccccccccccccccaaaggcucuuuucagagccaccagaauu

SEQ ID NO: 544 - RNA, 2352 nt, Artificial Sequence
  mRNA product Design a-1 comprising derived and/or modified sequence from YFV__NC_002031.1__SSjev-prME-XX (polyprotein: aa122-788) (opt1)
gggagagucccgcagucggcguccagcggcucugcuuguucgugugugugucguugcaggccuuauucaagcuuaccaugggcaagcgcagcgccggguccaucauguggcuggccagccucgcgguggucaucgccugcgccggcgccgugacgcuggugcggaagaaccgcuggcuccugcugaacgucaccuccgaggaccucggcaagaccuucagcguggggaccggcaacugcacgaccaacauccuggaggccaaguacuggugccccgacuccauggaguacaacugcccgaaccugagcccccgggaggagcccgacgacaucgacugcuggugcuacggcguggagaacguccgcguggccuacgggaagugcgacuccgcgggccggagccgccggucccgccgggccaucgaccuccccacccacgagaaccacgggcugaagacccgccaggagaaguggaugacgggccggaugggggagcgccagcugcagaagaucgagcggugguucgugcgcaacccguucuucgccgucaccgcccucaccaucgccuaccuggugggcagcaacaugacccagcggguggucaucgcgcugcucgugcuggccgugggccccgccuacuccgcccacugcaucgggaucacggaccgcgacuucaucgagggcguccacgggggcaccugggugagcgcgacccuggagcaggacaagugcgugaccgucauggcccccgacaagcccucccucgacaucagccuggagacgguggccaucgaccggccggccgaggugcgcaaggucugcuacaacgccgugcugacccacgugaagaucaacgacaagugccccuccaccggcgaggcgcaccucgccgaggagaacgagggggacaacgccugcaagcggaccuacagcgaccggggcugggggaacggcugcgggcuguucggcaagggcuccaucgucgccugcgccaaguucacgugcgcgaaguccaugagccuguucgagguggaccagaccaagauccaguacgucauccgcgcccagcuccacgugggggccaagcaggagaacuggaacaccgacaucaagacccugaaguucgacgcccugagcggcagccaggagguggaguucaucggguacggcaaggccacgcucgagugccagguccagaccgcgguggacuucgggaacuccuacaucgccgagauggagaccgagagcuggaucguggaccggcagugggcccaggaccugacccugcccuggcaguccggcagcggcggggucuggcgcgagaugcaccaccucguggaguucgagcccccgcacgccgccacgauccgggugcuggcgcugggcaaccaggaggggucccucaagaccgcccugaccggcgccaugcgcgucaccaaggacacgaacgacaacaaccuguacaagcuccacgggggccacgugagcugccgggugaagcuguccgcccugacccucaagggcaccagcuacaagaucugcaccgacaagauguucuucgucaagaaccccacggacaccgggcacggcaccguggugaugcaggucaagguguccaagggggcgcccugccgcaucccggugaucgucgccgacgaccugaccgccgccaucaacaagggcauccuggugaccgugaacccgaucgccagcacgaacgacgacgagguccucaucgaggugaacccccccuucggcgacuccuacaucaucguggggcggggcgacagccgccugaccuaccaguggcacaaggagggguccagcaucggcaagcuguucacccagaccaugaagggggucgagcggcuggcggugaugggcgacacggccugggacuucuccagcgccggcggguucuucaccuccgugggcaaggggauccacaccgucuucggcagcgccuuccaggggcuguucggcggccucaacuggaucaccaaggugaucaugggggccgugcugaucugggucggcaucaacacgcgcaacaugaccauguccaugagcaugauccucgugggggugaucaugauguuccugagccugggcgucggggcggaccagggcugcgccaucaacuucggcaagugaggacuagucccuguucccagagcccacuuuuuuuucuuuuuuugaaauaaaauagccugucuuucagaucuaaaaaaaaaaaaaaaaaaaaaaaaaaaaaaaaaaaaaaaaaaaaaaaaaaaaaaaaaaaaaaaaugcaucccccccccccccccccccccccccccccccaaaggcucuuuucagagccaccagaauu

SEQ ID NO: 545 - RNA, 2322 nt, Artificial Sequence
  mRNA product Design a-1 comprising derived and/or modified sequence from YFV__NC_002031.1__SSjev-prME (polyprotein: aa122-778) (opt1)
gggagagucccgcagucggcguccagcggcucugcuuguucgugugugugucguugcaggccuuauucaagcuuaccaugggcaagcgcagcgccggguccaucauguggcuggccagccucgcgguggucaucgccugcgccggcgccgugacgcuggugcggaagaaccgcuggcuccugcugaacgucaccuccgaggaccucggcaagaccuucagcguggggaccggcaacugcacgaccaacauccuggaggccaaguacuggugccccgacuccauggaguacaacugcccgaaccugagcccccgggaggagcccgacgacaucgacugcuggugcuacggcguggagaacguccgcguggccuacgggaagugcgacuccgcgggccggagccgccggucccgccgggccaucgaccuccccacccacgagaaccacgggcugaagacccgccaggagaaguggaugacgggccggaugggggagcgccagcugcagaagaucgagcggugguucgugcgcaacccguucuucgccgucaccgcccucaccaucgccuaccuggugggcagcaacaugacccagcggguggucaucgcgcugcucgugcuggccgugggccccgccuacuccgcccacugcaucgggaucacggaccgcgacuucaucgagggcguccacgggggcaccugggugagcgcgacccuggagcaggacaagugcgugaccgucauggcccccgacaagcccucccucgacaucagccuggagacgguggccaucgaccggccggccgaggugcgcaaggucugcuacaacgccgugcugacccacgugaagaucaacgacaagugccccuccaccggcgaggcgcaccucgccgaggagaacgagggggacaacgccugcaagcggaccuacagcgaccggggcugggggaacggcugcgggcuguucggcaagggcuccaucgucgccugcgccaaguucacgugcgcgaaguccaugagccuguucgagguggaccagaccaagauccaguacgucauccgcgcccagcuccacgugggggccaagcaggagaacuggaacaccgacaucaagacccugaaguucgacgcccugagcggcagccaggagguggaguucaucggguacggcaaggccacgcucgagugccagguccagaccgcgguggacuucgggaacuccuacaucgccgagauggagaccgagagcuggaucguggaccggcagugggcccaggaccugacccugcccuggcaguccggcagcggcggggucuggcgcgagaugcaccaccucguggaguucgagcccccgcacgccgccacgauccgggugcuggcgcugggcaaccaggaggggucccucaagaccgcccugaccggcgccaugcgcgucaccaaggacacgaacgacaacaaccuguacaagcuccacgggggccacgugagcugccgggugaagcuguccgcccugacccucaagggcaccagcuacaagaucugcaccgacaagauguucuucgucaagaaccccacggacaccgggcacggcaccguggugaugcaggucaagguguccaagggggcgcccugccgcaucccggugaucgucgccgacgaccugaccgccgccaucaacaagggcauccuggugaccgugaacccgaucgccagcacgaacgacgacgagguccucaucgaggugaacccccccuucggcgacuccuacaucaucguggggcggggcgacagccgccugaccuaccaguggcacaaggagggguccagcaucggcaagcuguucacccagaccaugaagggggucgagcggcuggcggugaugggcgacacggccugggacuucuccagcgccggcggguucuucaccuccgugggcaaggggauccacaccgucuucggcagcgccuuccaggggcuguucggcggccucaacuggaucaccaaggugaucaugggggccgugcugaucugggucggcaucaacacgcgcaacaugaccauguccaugagcaugauccucgugggggugaucaugauguuccugagccugggcgucggggcgugaggacuagucccuguucccagagcccacuuuuuuuucuuuuuuugaaauaaaauagccugucuuucagaucuaaaaaaaaaaaaaaaaaaaaaaaaaaaaaaaaaaaaaaaaaaaaaaaaaaaaaaaaaaaaaaaaugcaucccccccccccccccccccccccccccccccaaaggcucuuuucagagccaccagaauu

SEQ ID NO: 546 - RNA, 2370 nt, Artificial Sequence
  mRNA product Design a-1 comprising derived and/or modified sequence from YFV__NC_002031.1__X-SS-prME-XX (polyprotein: aa92-788) (opt1)
gggagagucccgcagucggcguccagcggcucugcuuguucgugugugugucguugcaggccuuauucaagcuuaccaugcgcggccugagcucccggaagcgccggagccacgacgugcucaccguccaguuccugauccuggggaugcuccugaugaccggcggggugacgcuggugcgcaagaaccgguggcuccugcugaacgucaccuccgaggaccucggcaagaccuucagcguggggaccggcaacugcacgaccaacauccuggaggccaaguacuggugccccgacuccauggaguacaacugccccaaccugagcccccgcgaggagcccgacgacaucgacugcuggugcuacggcguggagaacguccggguggccuacgggaagugcgacuccgcgggccgcagccggcgcucccggcgcgccaucgaccuccccacccacgagaaccacgggcugaagacccggcaggagaaguggaugacgggccgcaugggggagcggcagcugcagaagaucgagcgcugguucgugcggaacccguucuucgccgucaccgcccucaccaucgccuaccuggugggcagcaacaugacccagcgcguggucaucgcgcugcucgugcuggccgugggccccgccuacuccgcccacugcaucgggaucacggaccgggacuucaucgagggcguccacgggggcaccugggugagcgcgacccuggagcaggacaagugcgugaccgucauggcccccgacaagcccucccucgacaucagccuggagacgguggccaucgaccgcccggccgaggugcggaaggucugcuacaacgccgugcugacccacgugaagaucaacgacaagugccccuccaccggcgaggcgcaccucgccgaggagaacgagggggacaacgccugcaagcgcaccuacagcgaccgcggcugggggaacggcugcgggcuguucggcaagggcuccaucgucgccugcgccaaguucacgugcgccaagagcaugucccuguucgagguggaccagaccaagauccaguacgucauccgggcgcagcuccacgugggggccaagcaggagaacuggaacaccgacaucaagacccugaaguucgacgcccugagcggcagccaggagguggaguucaucggguacggcaaggccacgcucgagugccagguccagaccgcgguggacuucgggaacuccuacaucgccgagauggagaccgagagcuggaucguggaccgccagugggcccaggaccugacccugcccuggcaguccggcagcggcggggucuggcgggagaugcaccaccucguggaguucgagcccccgcacgccgccacgauccgcgugcuggcgcugggcaaccaggaggggucccucaagaccgcccugaccggcgccaugcgggucaccaaggacacgaacgacaacaaccuguacaagcuccacgggggccacgugagcugccgcgugaagcuguccgcccugacccucaagggcaccagcuacaagaucugcaccgacaagauguucuucgucaagaaccccacggacaccgggcacggcaccguggugaugcaggucaagguguccaagggggcgcccugccggauccccgugaucgucgccgacgaccugaccgccgccaucaacaagggcauccuggugaccgugaacccgaucgccagcacgaacgacgacgagguccucaucgaggugaacccgcccuucggcgacuccuacaucaucguggggcgcggcgacagccggcugaccuaccaguggcacaaggagggguccagcaucggcaagcuguucacccagaccaugaagggggucgagcgccucgcggugaugggcgacacggccugggacuucuccagcgccggcggguucuucaccuccgugggcaaggggauccacaccgucuucggcagcgccuuccaggggcuguucggcggccugaacuggaucaccaaggugaucaugggggccgugcugaucugggucggcaucaacacgcggaacaugaccauguccaugagcaugauccucgugggggugaucaugauguuccugagccugggcgucggggcggaccagggcugcgccaucaacuucggcaagugaggacuagucccuguucccagagcccacuuuuuuuucuuuuuuugaaauaaaauagccugucuuucagaucuaaaaaaaaaaaaaaaaaaaaaaaaaaaaaaaaaaaaaaaaaaaaaaaaaaaaaaaaaaaaaaaaugcaucccccccccccccccccccccccccccccccaaaggcucuuuucagagccaccagaauu

SEQ ID NO: 547 - RNA, 2307 nt, Artificial Sequence
  mRNA product Design a-1 comprising derived and/or modified sequence from YFV__NC_002031.1__SS-prME (polyprotein: M,aa104-778) (opt1)
gggagagucccgcagucggcguccagcggcucugcuuguucgugugugugucguugcaggccuuauucaagcuuaccauggacgugcugaccguccaguuccucauccugggcaugcugcucaugaccgggggcgugacgcuggugcgcaagaaccgguggcugcuccugaacgucaccagcgaggaccuggggaagaccuucuccgugggcaccgggaacugcacgaccaacauccucgaggccaaguacuggugccccgacagcauggaguacaacugccccaaccugagcccccgcgaggagcccgacgacaucgacugcuggugcuacggcguggagaacguccggguggccuacggcaagugcgacuccgcggggcgcucccggcgcagccggcgcgccaucgaccugcccacccacgagaaccacggccucaagacccggcaggagaaguggaugacggggcgcaugggcgagcggcagcugcagaagaucgagcgcugguucgugcggaacccguucuucgccgucaccgcccugaccaucgccuaccucgugggguccaacaugacccagcgcguggucaucgcgcugcuggugcucgccgugggccccgccuacagcgcccacugcaucggcaucacggaccgggacuucaucgaggggguccacggcgggaccuggguguccgcgacccuggagcaggacaagugcgugaccgucauggcccccgacaagcccagccuggacaucucccucgagacgguggccaucgaccgcccggccgaggugcggaaggucugcuacaacgccgugcugacccacgugaagaucaacgacaagugccccagcaccggcgaggcgcaccuggccgaggagaacgagggcgacaacgccugcaagcgcaccuacuccgaccggggguggggcaacgggugcggccucuucgggaagggcagcaucgucgccugcgccaaguucacgugcgcgaaguccaugagccuguucgagguggaccagaccaagauccaguacgucauccgcgcccagcugcacgugggcgccaagcaggagaacuggaacaccgacaucaagacccucaaguucgacgcccuguccgggagccaggagguggaguucaucggcuacgggaaggccacgcuggagugccagguccagaccgcgguggacuucggcaacuccuacaucgccgagauggagaccgagagcuggaucguggaccggcagugggcccaggaccucacccugcccuggcagagcggguccggcggcgucuggcgcgagaugcaccaccugguggaguucgagcccccgcacgccgccacgauccgcgugcucgcgcuggggaaccaggagggcagccugaagaccgcccucaccggggccaugcgggucaccaaggacacgaacgacaacaaccuguacaagcugcacggcgggcacguguccugccgcgugaagcucagcgcccugacccugaagggcaccuccuacaagaucugcaccgacaagauguucuucgucaagaaccccacggacaccggccacgggaccguggugaugcaggucaaggugagcaagggcgcgcccugccggauccccgugaucgucgccgacgaccucaccgccgccaucaacaaggggauccuggugaccgugaacccgaucgccuccacgaacgacgacgagguccugaucgaggugaacccgcccuucggcgacagcuacaucaucgugggccgcggggacucccggcucaccuaccaguggcacaaggagggcagcuccaucgggaagcuguucacccagaccaugaagggcgucgagcgccuggcggugaugggggacacggccugggacuucagcuccgccggcggcuucuucaccagcguggggaagggcauccacaccgucuucggguccgccuuccagggccucuucgggggccugaacuggaucaccaaggugaucaugggcgccgugcugaucugggucgggaucaacacgcggaacaugaccaugagcauguccaugauccuggugggcgugaucaugauguuccucagccugggggucggcgcgugaggacuagucccuguucccagagcccacuuuuuuuucuuuuuuugaaauaaaauagccugucuuucagaucuaaaaaaaaaaaaaaaaaaaaaaaaaaaaaaaaaaaaaaaaaaaaaaaaaaaaaaaaaaaaaaaaugcaucccccccccccccccccccccccccccccccaaaggcucuuuucagagccaccagaauu

SEQ ID NO: 548 - RNA, 2334 nt, Artificial Sequence
  mRNA product Design a-1 comprising derived and/or modified sequence from YFV__NC_002031.1__SSIgE-prME-XX (polyprotein: aa122-788) (opt1)
gggagagucccgcagucggcguccagcggcucugcuuguucgugugugugucguugcaggccuuauucaagcuuaccauggacuggaccuggauccuguuccucguggccgccgcgacccgcguccacagcgugacgcuggugcggaagaaccgcuggcugcuccugaacgucaccuccgaggaccugggcaagaccuucagcguggggaccggcaacugcacgaccaacauccucgaggccaaguacuggugccccgacuccauggaguacaacugccccaaccugagcccccgggaggagcccgacgacaucgacugcuggugcuacgggguggagaacguccgcguggccuacggcaagugcgacuccgccgggcggagccgccggucccgccgggccaucgaccugcccacccacgagaaccacggccucaagacccgccaggagaaguggaugacgggccggaugggggagcgccagcugcagaagaucgagcggugguucgugcgcaacccguucuucgcggucaccgcccugaccaucgccuaccucgugggcagcaacaugacccagcggguggucaucgcccugcuggugcucgcgguggggcccgccuacuccgcccacugcaucggcaucacggaccgcgacuucaucgaggggguccacggcggcaccugggugagcgccacccuggagcaggacaagugcgugaccgucauggcccccgacaagcccucccuggacaucagccucgagacgguggcgaucgaccggccggccgaggugcgcaaggucugcuacaacgccgugcugacccacgugaagaucaacgacaagugccccuccaccggggaggcccaccuggccgaggagaacgagggcgacaacgcgugcaagcggaccuacagcgaccgcggguggggcaacggcugcggccucuucgggaagggguccaucgucgccugcgccaaguucacgugcgccaagagcaugucccuguucgagguggaccagaccaagauccaguacgucauccgggcccagcugcacgugggcgcgaagcaggagaacuggaacaccgacaucaagacccucaaguucgacgcccugagcgggucccaggagguggaguucaucggcuacggcaaggccacgcuggagugccagguccagaccgccguggacuucgggaacagcuacaucgccgagauggagaccgagagcuggaucguggaccgccagugggcgcaggaccucacccugcccuggcaguccggcagcgggggcgucuggcgcgagaugcaccaccugguggaguucgagcccccgcacgccgccacgauccgggugcucgcccuggggaaccaggagggcucccugaagaccgcgcucaccggcgccaugcgcgucaccaaggacacgaacgacaacaaccuguacaagcugcacgggggccacgugagcugccgggugaagcucuccgcccugacccugaaggggaccagcuacaagaucugcaccgacaagauguucuucgucaagaaccccacggacaccggccacgggaccguggugaugcaggucaagguguccaagggcgcccccugccgcauccccgugaucgucgccgacgaccucaccgcggccaucaacaagggcauccuggugaccgugaacccgaucgccagcacgaacgacgacgagguccugaucgaggugaacccgcccuucggggacuccuacaucaucgugggccgcggggacagccggcucaccuaccaguggcacaaggagggcuccagcaucggcaagcuguucacccagaccaugaagggggucgagcggcuggccgugaugggcgacacggccugggacuucuccagcgccgggggcuucuucaccuccguggggaagggcauccacaccgucuucggcagcgcguuccaggggcuguucggcgggcucaacuggaucaccaaggugaucaugggcgccgugcugaucugggucgggaucaacacgcgcaacaugaccauguccaugagcaugauccucgugggcgugaucaugauguuccugucccugggcgucggggccgaccagggcugcgccaucaacuucgggaagugaggacuagucccuguucccagagcccacuuuuuuuucuuuuuuugaaauaaaauagccugucuuucagaucuaaaaaaaaaaaaaaaaaaaaaaaaaaaaaaaaaaaaaaaaaaaaaaaaaaaaaaaaaaaaaaaaugcaucccccccccccccccccccccccccccccccaaaggcucuuuucagagccaccagaauu

SEQ ID NO: 549 - RNA, 2304 nt, Artificial Sequence
  mRNA product Design a-1 comprising derived and/or modified sequence from YFV__NC_002031.1__SSIgE-prME (polyprotein: aa122-778) (opt1)
gggagagucccgcagucggcguccagcggcucugcuuguucgugugugugucguugcaggccuuauucaagcuuaccauggacuggaccuggauccuguuccucguggccgccgcgacccgcguccacagcgugacgcuggugcggaagaaccgcuggcugcuccugaacgucaccuccgaggaccugggcaagaccuucagcguggggaccggcaacugcacgaccaacauccucgaggccaaguacuggugccccgacuccauggaguacaacugccccaaccugagcccccgggaggagcccgacgacaucgacugcuggugcuacgggguggagaacguccgcguggccuacggcaagugcgacuccgccgggcggagccgccggucccgccgggccaucgaccugcccacccacgagaaccacggccucaagacccgccaggagaaguggaugacgggccggaugggggagcgccagcugcagaagaucgagcggugguucgugcgcaacccguucuucgcggucaccgcccugaccaucgccuaccucgugggcagcaacaugacccagcggguggucaucgcccugcuggugcucgcgguggggcccgccuacuccgcccacugcaucggcaucacggaccgcgacuucaucgaggggguccacggcggcaccugggugagcgccacccuggagcaggacaagugcgugaccgucauggcccccgacaagcccucccuggacaucagccucgagacgguggcgaucgaccggccggccgaggugcgcaaggucugcuacaacgccgugcugacccacgugaagaucaacgacaagugccccuccaccggggaggcccaccuggccgaggagaacgagggcgacaacgcgugcaagcggaccuacagcgaccgcggguggggcaacggcugcggccucuucgggaagggguccaucgucgccugcgccaaguucacgugcgccaagagcaugucccuguucgagguggaccagaccaagauccaguacgucauccgggcccagcugcacgugggcgcgaagcaggagaacuggaacaccgacaucaagacccucaaguucgacgcccugagcgggucccaggagguggaguucaucggcuacggcaaggccacgcuggagugccagguccagaccgccguggacuucgggaacagcuacaucgccgagauggagaccgagagcuggaucguggaccgccagugggcgcaggaccucacccugcccuggcaguccggcagcgggggcgucuggcgcgagaugcaccaccugguggaguucgagcccccgcacgccgccacgauccgggugcucgcccuggggaaccaggagggcucccugaagaccgcgcucaccggcgccaugcgcgucaccaaggacacgaacgacaacaaccuguacaagcugcacgggggccacgugagcugccgggugaagcucuccgcccugacccugaaggggaccagcuacaagaucugcaccgacaagauguucuucgucaagaaccccacggacaccggccacgggaccguggugaugcaggucaagguguccaagggcgcccccugccgcauccccgugaucgucgccgacgaccucaccgcggccaucaacaagggcauccuggugaccgugaacccgaucgccagcacgaacgacgacgagguccugaucgaggugaacccgcccuucggggacuccuacaucaucgugggccgcggggacagccggcucaccuaccaguggcacaaggagggcuccagcaucggcaagcuguucacccagaccaugaagggggucgagcggcuggccgugaugggcgacacggccugggacuucuccagcgccgggggcuucuucaccuccguggggaagggcauccacaccgucuucggcagcgcguuccaggggcuguucggcgggcucaacuggaucaccaaggugaucaugggcgccgugcugaucugggucgggaucaacacgcgcaacaugaccauguccaugagcaugauccucgugggcgugaucaugauguuccugucccugggcgucggggccugaggacuagucccuguucccagagcccacuuuuuuuucuuuuuuugaaauaaaauagccugucuuucagaucuaaaaaaaaaaaaaaaaaaaaaaaaaaaaaaaaaaaaaaaaaaaaaaaaaaaaaaaaaaaaaaaaugcaucccccccccccccccccccccccccccccccaaaggcucuuuucagagccaccagaauu

SEQ ID NO: 550 - RNA, 2352 nt, Artificial Sequence
  mRNA product Design a-1 comprising derived and/or modified sequence from YFV__NC_002031.1__SSjev-prME-XX (polyprotein: aa122-788) (opt1)
gggagagucccgcagucggcguccagcggcucugcuuguucgugugugugucguugcaggccuuauucaagcuuaccaugggcaagcgcagcgccggguccaucauguggcuggccagccucgcgguggucaucgccugcgccggcgccgugacccuggugcggaagaaccgcuggcugcuccugaacgucaccuccgaggaccuggggaagacguucagcgugggcaccgggaacugcaccaccaacauccucgaggccaaguacuggugccccgacuccauggaguacaacugccccaaccugagcccccgggaggagcccgacgacaucgacugcuggugcuacggcguggagaacguccgcguggcguacggcaagugcgacuccgccgggcggagccgccggucccgccgggccaucgaccugcccacgcacgagaaccacggccucaagacccgccaggagaaguggaugaccgggcggaugggcgagcgccagcugcagaagaucgagcggugguucgugcgcaacccguucuucgccgucaccgcgcugacgaucgccuaccucguggggagcaacaugacccagcggguggucaucgcccugcuggugcucgccgugggccccgccuacuccgcgcacugcaucggcaucaccgaccgcgacuucaucgaggggguccacggcgggaccugggugagcgccacgcuggagcaggacaagugcgugaccgucauggcccccgacaagcccucccuggacaucagccucgagaccguggccaucgaccggccggccgaggugcgcaaggucugcuacaacgcggugcugacccacgugaagaucaacgacaagugccccuccacgggcgaggcccaccuggccgaggagaacgagggcgacaacgccugcaagcggaccuacagcgaccgcggguggggcaacgggugcggccucuucgggaagggcuccaucgucgccugcgcgaaguucacgugcgccaagagcaugucccuguucgagguggaccagaccaagauccaguacgucauccgggcccagcugcacgugggcgccaagcaggagaacuggaacaccgacaucaagacccucaaguucgacgcccugagcgggagccaggagguggaguucaucggcuacgggaaggcgacccuggagugccagguccagaccgccguggacuucggcaacuccuacaucgccgagauggagacggagagcuggaucguggaccgccagugggcccaggaccucacccugcccuggcaguccgggagcggcggcgucuggcgcgagaugcaccaccugguggaguucgagcccccgcacgcggccaccauccgggugcucgcccuggggaaccaggagggcucccugaagaccgcccucacgggggccaugcgcgucaccaaggacaccaacgacaacaaccuguacaagcugcacggcgggcacgugagcugccgggugaagcucuccgcgcugacccugaagggcacgagcuacaagaucugcaccgacaagauguucuucgucaagaaccccaccgacaccggccacgggacgguggugaugcaggucaagguguccaagggcgcccccugccgcauccccgugaucgucgccgacgaccucaccgccgccaucaacaaggggauccuggugaccgugaacccgaucgcgagcaccaacgacgacgagguccugaucgaggugaacccgcccuucggcgacuccuacaucaucgugggccgcggggacagccggcucaccuaccaguggcacaaggagggcuccagcaucgggaagcuguucacgcagaccaugaagggcgucgagcggcuggccgugaugggggacaccgccugggacuucuccagcgccggcggcuucuucaccuccguggggaagggcauccacacggucuucgggagcgccuuccagggccucuucgggggccugaacuggaucaccaaggugaucaugggcgcggugcugaucugggucgggaucaacacccgcaacaugaccauguccaugagcaugauccucgugggcgugaucaugauguuccugagccugggggucggcgccgaccaggggugcgccaucaacuucggcaagugaggacuagucccuguucccagagcccacuuuuuuuucuuuuuuugaaauaaaauagccugucuuucagaucuaaaaaaaaaaaaaaaaaaaaaaaaaaaaaaaaaaaaaaaaaaaaaaaaaaaaaaaaaaaaaaaaugcaucccccccccccccccccccccccccccccccaaaggcucuuuucagagccaccagaauu

SEQ ID NO: 551 - RNA, 2322 nt, Artificial Sequence
  mRNA product Design a-1 comprising derived and/or modified sequence from YFV__NC_002031.1__SSjev-prME (polyprotein: aa122-778) (opt1)
gggagagucccgcagucggcguccagcggcucugcuuguucgugugugugucguugcaggccuuauucaagcuuaccaugggcaagcgcagcgccggguccaucauguggcuggccagccucgcgguggucaucgccugcgccggcgccgugacccuggugcggaagaaccgcuggcugcuccugaacgucaccuccgaggaccuggggaagacguucagcgugggcaccgggaacugcaccaccaacauccucgaggccaaguacuggugccccgacuccauggaguacaacugccccaaccugagcccccgggaggagcccgacgacaucgacugcuggugcuacggcguggagaacguccgcguggcguacggcaagugcgacuccgccgggcggagccgccggucccgccgggccaucgaccugcccacgcacgagaaccacggccucaagacccgccaggagaaguggaugaccgggcggaugggcgagcgccagcugcagaagaucgagcggugguucgugcgcaacccguucuucgccgucaccgcgcugacgaucgccuaccucguggggagcaacaugacccagcggguggucaucgcccugcuggugcucgccgugggccccgccuacuccgcgcacugcaucggcaucaccgaccgcgacuucaucgaggggguccacggcgggaccugggugagcgccacgcuggagcaggacaagugcgugaccgucauggcccccgacaagcccucccuggacaucagccucgagaccguggccaucgaccggccggccgaggugcgcaaggucugcuacaacgcggugcugacccacgugaagaucaacgacaagugccccuccacgggcgaggcccaccuggccgaggagaacgagggcgacaacgccugcaagcggaccuacagcgaccgcggguggggcaacgggugcggccucuucgggaagggcuccaucgucgccugcgcgaaguucacgugcgccaagagcaugucccuguucgagguggaccagaccaagauccaguacgucauccgggcccagcugcacgugggcgccaagcaggagaacuggaacaccgacaucaagacccucaaguucgacgcccugagcgggagccaggagguggaguucaucggcuacgggaaggcgacccuggagugccagguccagaccgccguggacuucggcaacuccuacaucgccgagauggagacggagagcuggaucguggaccgccagugggcccaggaccucacccugcccuggcaguccgggagcggcggcgucuggcgcgagaugcaccaccugguggaguucgagcccccgcacgcggccaccauccgggugcucgcccuggggaaccaggagggcucccugaagaccgcccucacgggggccaugcgcgucaccaaggacaccaacgacaacaaccuguacaagcugcacggcgggcacgugagcugccgggugaagcucuccgcgcugacccugaagggcacgagcuacaagaucugcaccgacaagauguucuucgucaagaaccccaccgacaccggccacgggacgguggugaugcaggucaagguguccaagggcgcccccugccgcauccccgugaucgucgccgacgaccucaccgccgccaucaacaaggggauccuggugaccgugaacccgaucgcgagcaccaacgacgacgagguccugaucgaggugaacccgcccuucggcgacuccuacaucaucgugggccgcggggacagccggcucaccuaccaguggcacaaggagggcuccagcaucgggaagcuguucacgcagaccaugaagggcgucgagcggcuggccgugaugggggacaccgccugggacuucuccagcgccggcggcuucuucaccuccguggggaagggcauccacacggucuucgggagcgccuuccagggccucuucgggggccugaacuggaucaccaaggugaucaugggcgcggugcugaucugggucgggaucaacacccgcaacaugaccauguccaugagcaugauccucgugggcgugaucaugauguuccugagccugggggucggcgccugaggacuagucccuguucccagagcccacuuuuuuuucuuuuuuugaaauaaaauagccugucuuucagaucuaaaaaaaaaaaaaaaaaaaaaaaaaaaaaaaaaaaaaaaaaaaaaaaaaaaaaaaaaaaaaaaaugcaucccccccccccccccccccccccccccccccaaaggcucuuuucagagccaccagaauu

SEQ ID NO: 552 - RNA, 2370 nt, Artificial Sequence
  mRNA product Design a-1 comprising derived and/or modified sequence from YFV__NC_002031.1__X-SS-prME-XX (polyprotein: aa92-788) (opt2)
gggagagucccgcagucggcguccagcggcucugcuuguucgugugugugucguugcaggccuuauucaagcuuaccaugcgcggccucuccucccgcaagcgccgcucccacgacguccucaccguccaguuccucauccucggcaugcuccucaugaccggcggcgucacccucguccgcaagaaccgcuggcuccuccucaacgucaccuccgaggaccucggcaagaccuucuccgucggcaccggcaacugcaccaccaacauccucgaggccaaguacuggugccccgacuccauggaguacaacugccccaaccucuccccccgcgaggagcccgacgacaucgacugcuggugcuacggcgucgagaacguccgcgucgccuacggcaagugcgacuccgccggccgcucccgccgcucccgccgcgccaucgaccuccccacccacgagaaccacggccucaagacccgccaggagaaguggaugaccggccgcaugggcgagcgccagcuccagaagaucgagcgcugguucguccgcaaccccuucuucgccgucaccgcccucaccaucgccuaccucgucggcuccaacaugacccagcgcgucgucaucgcccuccucguccucgccgucggccccgccuacuccgcccacugcaucggcaucaccgaccgcgacuucaucgagggcguccacggcggcaccugggucuccgccacccucgagcaggacaagugcgucaccgucauggcccccgacaagcccucccucgacaucucccucgagaccgucgccaucgaccgccccgccgagguccgcaaggucugcuacaacgccguccucacccacgucaagaucaacgacaagugccccuccaccggcgaggcccaccucgccgaggagaacgagggcgacaacgccugcaagcgcaccuacuccgaccgcggcuggggcaacggcugcggccucuucggcaagggcuccaucgucgccugcgccaaguucaccugcgccaaguccaugucccucuucgaggucgaccagaccaagauccaguacgucauccgcgcccagcuccacgucggcgccaagcaggagaacuggaacaccgacaucaagacccucaaguucgacgcccucuccggcucccaggaggucgaguucaucggcuacggcaaggccacccucgagugccagguccagaccgccgucgacuucggcaacuccuacaucgccgagauggagaccgaguccuggaucgucgaccgccagugggcccaggaccucacccuccccuggcaguccggcuccggcggcgucuggcgcgagaugcaccaccucgucgaguucgagcccccccacgccgccaccauccgcguccucgcccucggcaaccaggagggcucccucaagaccgcccucaccggcgccaugcgcgucaccaaggacaccaacgacaacaaccucuacaagcuccacggcggccacgucuccugccgcgucaagcucuccgcccucacccucaagggcaccuccuacaagaucugcaccgacaagauguucuucgucaagaaccccaccgacaccggccacggcaccgucgucaugcaggucaaggucuccaagggcgcccccugccgcauccccgucaucgucgccgacgaccucaccgccgccaucaacaagggcauccucgucaccgucaaccccaucgccuccaccaacgacgacgagguccucaucgaggucaacccccccuucggcgacuccuacaucaucgucggccgcggcgacucccgccucaccuaccaguggcacaaggagggcuccuccaucggcaagcucuucacccagaccaugaagggcgucgagcgccucgccgucaugggcgacaccgccugggacuucuccuccgccggcggcuucuucaccuccgucggcaagggcauccacaccgucuucggcuccgccuuccagggccucuucggcggccucaacuggaucaccaaggucaucaugggcgccguccucaucugggucggcaucaacacccgcaacaugaccauguccauguccaugauccucgucggcgucaucaugauguuccucucccucggcgucggcgccgaccagggcugcgccaucaacuucggcaagugaggacuagucccuguucccagagcccacuuuuuuuucuuuuuuugaaauaaaauagccugucuuucagaucuaaaaaaaaaaaaaaaaaaaaaaaaaaaaaaaaaaaaaaaaaaaaaaaaaaaaaaaaaaaaaaaaugcaucccccccccccccccccccccccccccccccaaaggcucuuuucagagccaccagaauu

SEQ ID NO: 553 - RNA, 2307 nt, Artificial Sequence
  mRNA product Design a-1 comprising derived and/or modified sequence from YFV__NC_002031.1__SS-prME (polyprotein: M,aa104-778) (opt2)
gggagagucccgcagucggcguccagcggcucugcuuguucgugugugugucguugcaggccuuauucaagcuuaccauggacguccucaccguccaguuccucauccucggcaugcuccucaugaccggcggcgucacccucguccgcaagaaccgcuggcuccuccucaacgucaccuccgaggaccucggcaagaccuucuccgucggcaccggcaacugcaccaccaacauccucgaggccaaguacuggugccccgacuccauggaguacaacugccccaaccucuccccccgcgaggagcccgacgacaucgacugcuggugcuacggcgucgagaacguccgcgucgccuacggcaagugcgacuccgccggccgcucccgccgcucccgccgcgccaucgaccuccccacccacgagaaccacggccucaagacccgccaggagaaguggaugaccggccgcaugggcgagcgccagcuccagaagaucgagcgcugguucguccgcaaccccuucuucgccgucaccgcccucaccaucgccuaccucgucggcuccaacaugacccagcgcgucgucaucgcccuccucguccucgccgucggccccgccuacuccgcccacugcaucggcaucaccgaccgcgacuucaucgagggcguccacggcggcaccugggucuccgccacccucgagcaggacaagugcgucaccgucauggcccccgacaagcccucccucgacaucucccucgagaccgucgccaucgaccgccccgccgagguccgcaaggucugcuacaacgccguccucacccacgucaagaucaacgacaagugccccuccaccggcgaggcccaccucgccgaggagaacgagggcgacaacgccugcaagcgcaccuacuccgaccgcggcuggggcaacggcugcggccucuucggcaagggcuccaucgucgccugcgccaaguucaccugcgccaaguccaugucccucuucgaggucgaccagaccaagauccaguacgucauccgcgcccagcuccacgucggcgccaagcaggagaacuggaacaccgacaucaagacccucaaguucgacgcccucuccggcucccaggaggucgaguucaucggcuacggcaaggccacccucgagugccagguccagaccgccgucgacuucggcaacuccuacaucgccgagauggagaccgaguccuggaucgucgaccgccagugggcccaggaccucacccuccccuggcaguccggcuccggcggcgucuggcgcgagaugcaccaccucgucgaguucgagcccccccacgccgccaccauccgcguccucgcccucggcaaccaggagggcucccucaagaccgcccucaccggcgccaugcgcgucaccaaggacaccaacgacaacaaccucuacaagcuccacggcggccacgucuccugccgcgucaagcucuccgcccucacccucaagggcaccuccuacaagaucugcaccgacaagauguucuucgucaagaaccccaccgacaccggccacggcaccgucgucaugcaggucaaggucuccaagggcgcccccugccgcauccccgucaucgucgccgacgaccucaccgccgccaucaacaagggcauccucgucaccgucaaccccaucgccuccaccaacgacgacgagguccucaucgaggucaacccccccuucggcgacuccuacaucaucgucggccgcggcgacucccgccucaccuaccaguggcacaaggagggcuccuccaucggcaagcucuucacccagaccaugaagggcgucgagcgccucgccgucaugggcgacaccgccugggacuucuccuccgccggcggcuucuucaccuccgucggcaagggcauccacaccgucuucggcuccgccuuccagggccucuucggcggccucaacuggaucaccaaggucaucaugggcgccguccucaucugggucggcaucaacacccgcaacaugaccauguccauguccaugauccucgucggcgucaucaugauguuccucucccucggcgucggcgccugaggacuagucccuguucccagagcccacuuuuuuuucuuuuuuugaaauaaaauagccugucuuucagaucuaaaaaaaaaaaaaaaaaaaaaaaaaaaaaaaaaaaaaaaaaaaaaaaaaaaaaaaaaaaaaaaaugcaucccccccccccccccccccccccccccccccaaaggcucuuuucagagccaccagaauu

SEQ ID NO: 554 - RNA, 2334 nt, Artificial Sequence
  mRNA product Design a-1 comprising derived and/or modified sequence from YFV__NC_002031.1__SSIgE-prME-XX (polyprotein: aa122-788) (opt2)
gggagagucccgcagucggcguccagcggcucugcuuguucgugugugugucguugcaggccuuauucaagcuuaccauggacuggaccuggauccucuuccucgucgccgccgccacccgcguccacuccgucacccucguccgcaagaaccgcuggcuccuccucaacgucaccuccgaggaccucggcaagaccuucuccgucggcaccggcaacugcaccaccaacauccucgaggccaaguacuggugccccgacuccauggaguacaacugccccaaccucuccccccgcgaggagcccgacgacaucgacugcuggugcuacggcgucgagaacguccgcgucgccuacggcaagugcgacuccgccggccgcucccgccgcucccgccgcgccaucgaccuccccacccacgagaaccacggccucaagacccgccaggagaaguggaugaccggccgcaugggcgagcgccagcuccagaagaucgagcgcugguucguccgcaaccccuucuucgccgucaccgcccucaccaucgccuaccucgucggcuccaacaugacccagcgcgucgucaucgcccuccucguccucgccgucggccccgccuacuccgcccacugcaucggcaucaccgaccgcgacuucaucgagggcguccacggcggcaccugggucuccgccacccucgagcaggacaagugcgucaccgucauggcccccgacaagcccucccucgacaucucccucgagaccgucgccaucgaccgccccgccgagguccgcaaggucugcuacaacgccguccucacccacgucaagaucaacgacaagugccccuccaccggcgaggcccaccucgccgaggagaacgagggcgacaacgccugcaagcgcaccuacuccgaccgcggcuggggcaacggcugcggccucuucggcaagggcuccaucgucgccugcgccaaguucaccugcgccaaguccaugucccucuucgaggucgaccagaccaagauccaguacgucauccgcgcccagcuccacgucggcgccaagcaggagaacuggaacaccgacaucaagacccucaaguucgacgcccucuccggcucccaggaggucgaguucaucggcuacggcaaggccacccucgagugccagguccagaccgccgucgacuucggcaacuccuacaucgccgagauggagaccgaguccuggaucgucgaccgccagugggcccaggaccucacccuccccuggcaguccggcuccggcggcgucuggcgcgagaugcaccaccucgucgaguucgagcccccccacgccgccaccauccgcguccucgcccucggcaaccaggagggcucccucaagaccgcccucaccggcgccaugcgcgucaccaaggacaccaacgacaacaaccucuacaagcuccacggcggccacgucuccugccgcgucaagcucuccgcccucacccucaagggcaccuccuacaagaucugcaccgacaagauguucuucgucaagaaccccaccgacaccggccacggcaccgucgucaugcaggucaaggucuccaagggcgcccccugccgcauccccgucaucgucgccgacgaccucaccgccgccaucaacaagggcauccucgucaccgucaaccccaucgccuccaccaacgacgacgagguccucaucgaggucaacccccccuucggcgacuccuacaucaucgucggccgcggcgacucccgccucaccuaccaguggcacaaggagggcuccuccaucggcaagcucuucacccagaccaugaagggcgucgagcgccucgccgucaugggcgacaccgccugggacuucuccuccgccggcggcuucuucaccuccgucggcaagggcauccacaccgucuucggcuccgccuuccagggccucuucggcggccucaacuggaucaccaaggucaucaugggcgccguccucaucugggucggcaucaacacccgcaacaugaccauguccauguccaugauccucgucggcgucaucaugauguuccucucccucggcgucggcgccgaccagggcugcgccaucaacuucggcaagugaggacuagucccuguucccagagcccacuuuuuuuucuuuuuuugaaauaaaauagccugucuuucagaucuaaaaaaaaaaaaaaaaaaaaaaaaaaaaaaaaaaaaaaaaaaaaaaaaaaaaaaaaaaaaaaaaugcaucccccccccccccccccccccccccccccccaaaggcucuuuucagagccaccagaauu

SEQ ID NO: 555 - RNA, 2304 nt, Artificial Sequence
  mRNA product Design a-1 comprising derived and/or modified sequence from YFV__NC_002031.1__SSIgE-prME (polyprotein: aa122-778) (opt2)
gggagagucccgcagucggcguccagcggcucugcuuguucgugugugugucguugcaggccuuauucaagcuuaccauggacuggaccuggauccucuuccucgucgccgccgccacccgcguccacuccgucacccucguccgcaagaaccgcuggcuccuccucaacgucaccuccgaggaccucggcaagaccuucuccgucggcaccggcaacugcaccaccaacauccucgaggccaaguacuggugccccgacuccauggaguacaacugccccaaccucuccccccgcgaggagcccgacgacaucgacugcuggugcuacggcgucgagaacguccgcgucgccuacggcaagugcgacuccgccggccgcucccgccgcucccgccgcgccaucgaccuccccacccacgagaaccacggccucaagacccgccaggagaaguggaugaccggccgcaugggcgagcgccagcuccagaagaucgagcgcugguucguccgcaaccccuucuucgccgucaccgcccucaccaucgccuaccucgucggcuccaacaugacccagcgcgucgucaucgcccuccucguccucgccgucggccccgccuacuccgcccacugcaucggcaucaccgaccgcgacuucaucgagggcguccacggcggcaccugggucuccgccacccucgagcaggacaagugcgucaccgucauggcccccgacaagcccucccucgacaucucccucgagaccgucgccaucgaccgccccgccgagguccgcaaggucugcuacaacgccguccucacccacgucaagaucaacgacaagugccccuccaccggcgaggcccaccucgccgaggagaacgagggcgacaacgccugcaagcgcaccuacuccgaccgcggcuggggcaacggcugcggccucuucggcaagggcuccaucgucgccugcgccaaguucaccugcgccaaguccaugucccucuucgaggucgaccagaccaagauccaguacgucauccgcgcccagcuccacgucggcgccaagcaggagaacuggaacaccgacaucaagacccucaaguucgacgcccucuccggcucccaggaggucgaguucaucggcuacggcaaggccacccucgagugccagguccagaccgccgucgacuucggcaacuccuacaucgccgagauggagaccgaguccuggaucgucgaccgccagugggcccaggaccucacccuccccuggcaguccggcuccggcggcgucuggcgcgagaugcaccaccucgucgaguucgagcccccccacgccgccaccauccgcguccucgcccucggcaaccaggagggcucccucaagaccgcccucaccggcgccaugcgcgucaccaaggacaccaacgacaacaaccucuacaagcuccacggcggccacgucuccugccgcgucaagcucuccgcccucacccucaagggcaccuccuacaagaucugcaccgacaagauguucuucgucaagaaccccaccgacaccggccacggcaccgucgucaugcaggucaaggucuccaagggcgcccccugccgcauccccgucaucgucgccgacgaccucaccgccgccaucaacaagggcauccucgucaccgucaaccccaucgccuccaccaacgacgacgagguccucaucgaggucaacccccccuucggcgacuccuacaucaucgucggccgcggcgacucccgccucaccuaccaguggcacaaggagggcuccuccaucggcaagcucuucacccagaccaugaagggcgucgagcgccucgccgucaugggcgacaccgccugggacuucuccuccgccggcggcuucuucaccuccgucggcaagggcauccacaccgucuucggcuccgccuuccagggccucuucggcggccucaacuggaucaccaaggucaucaugggcgccguccucaucugggucggcaucaacacccgcaacaugaccauguccauguccaugauccucgucggcgucaucaugauguuccucucccucggcgucggcgccugaggacuagucccuguucccagagcccacuuuuuuuucuuuuuuugaaauaaaauagccugucuuucagaucuaaaaaaaaaaaaaaaaaaaaaaaaaaaaaaaaaaaaaaaaaaaaaaaaaaaaaaaaaaaaaaaaugcaucccccccccccccccccccccccccccccccaaaggcucuuuucagagccaccagaauu

SEQ ID NO: 556 - RNA, 2352 nt, Artificial Sequence
  mRNA product Design a-1 comprising derived and/or modified sequence from YFV__NC_002031.1__SSjev-prME-XX (polyprotein: aa122-788) (opt2)
gggagagucccgcagucggcguccagcggcucugcuuguucgugugugugucguugcaggccuuauucaagcuuaccaugggcaagcgcuccgccggcuccaucauguggcucgccucccucgccgucgucaucgccugcgccggcgccgucacccucguccgcaagaaccgcuggcuccuccucaacgucaccuccgaggaccucggcaagaccuucuccgucggcaccggcaacugcaccaccaacauccucgaggccaaguacuggugccccgacuccauggaguacaacugccccaaccucuccccccgcgaggagcccgacgacaucgacugcuggugcuacggcgucgagaacguccgcgucgccuacggcaagugcgacuccgccggccgcucccgccgcucccgccgcgccaucgaccuccccacccacgagaaccacggccucaagacccgccaggagaaguggaugaccggccgcaugggcgagcgccagcuccagaagaucgagcgcugguucguccgcaaccccuucuucgccgucaccgcccucaccaucgccuaccucgucggcuccaacaugacccagcgcgucgucaucgcccuccucguccucgccgucggccccgccuacuccgcccacugcaucggcaucaccgaccgcgacuucaucgagggcguccacggcggcaccugggucuccgccacccucgagcaggacaagugcgucaccgucauggcccccgacaagcccucccucgacaucucccucgagaccgucgccaucgaccgccccgccgagguccgcaaggucugcuacaacgccguccucacccacgucaagaucaacgacaagugccccuccaccggcgaggcccaccucgccgaggagaacgagggcgacaacgccugcaagcgcaccuacuccgaccgcggcuggggcaacggcugcggccucuucggcaagggcuccaucgucgccugcgccaaguucaccugcgccaaguccaugucccucuucgaggucgaccagaccaagauccaguacgucauccgcgcccagcuccacgucggcgccaagcaggagaacuggaacaccgacaucaagacccucaaguucgacgcccucuccggcucccaggaggucgaguucaucggcuacggcaaggccacccucgagugccagguccagaccgccgucgacuucggcaacuccuacaucgccgagauggagaccgaguccuggaucgucgaccgccagugggcccaggaccucacccuccccuggcaguccggcuccggcggcgucuggcgcgagaugcaccaccucgucgaguucgagcccccccacgccgccaccauccgcguccucgcccucggcaaccaggagggcucccucaagaccgcccucaccggcgccaugcgcgucaccaaggacaccaacgacaacaaccucuacaagcuccacggcggccacgucuccugccgcgucaagcucuccgcccucacccucaagggcaccuccuacaagaucugcaccgacaagauguucuucgucaagaaccccaccgacaccggccacggcaccgucgucaugcaggucaaggucuccaagggcgcccccugccgcauccccgucaucgucgccgacgaccucaccgccgccaucaacaagggcauccucgucaccgucaaccccaucgccuccaccaacgacgacgagguccucaucgaggucaacccccccuucggcgacuccuacaucaucgucggccgcggcgacucccgccucaccuaccaguggcacaaggagggcuccuccaucggcaagcucuucacccagaccaugaagggcgucgagcgccucgccgucaugggcgacaccgccugggacuucuccuccgccggcggcuucuucaccuccgucggcaagggcauccacaccgucuucggcuccgccuuccagggccucuucggcggccucaacuggaucaccaaggucaucaugggcgccguccucaucugggucggcaucaacacccgcaacaugaccauguccauguccaugauccucgucggcgucaucaugauguuccucucccucggcgucggcgccgaccagggcugcgccaucaacuucggcaagugaggacuagucccuguucccagagcccacuuuuuuuucuuuuuuugaaauaaaauagccugucuuucagaucuaaaaaaaaaaaaaaaaaaaaaaaaaaaaaaaaaaaaaaaaaaaaaaaaaaaaaaaaaaaaaaaaugcaucccccccccccccccccccccccccccccccaaaggcucuuuucagagccaccagaauu

SEQ ID NO: 557 - RNA, 2322 nt, Artificial Sequence
  mRNA product Design a-1 comprising derived and/or modified sequence from YFV__NC_002031.1__SSjev-prME (polyprotein: aa122-778) (opt2)
gggagagucccgcagucggcguccagcggcucugcuuguucgugugugugucguugcaggccuuauucaagcuuaccaugggcaagcgcuccgccggcuccaucauguggcucgccucccucgccgucgucaucgccugcgccggcgccgucacccucguccgcaagaaccgcuggcuccuccucaacgucaccuccgaggaccucggcaagaccuucuccgucggcaccggcaacugcaccaccaacauccucgaggccaaguacuggugccccgacuccauggaguacaacugccccaaccucuccccccgcgaggagcccgacgacaucgacugcuggugcuacggcgucgagaacguccgcgucgccuacggcaagugcgacuccgccggccgcucccgccgcucccgccgcgccaucgaccuccccacccacgagaaccacggccucaagacccgccaggagaaguggaugaccggccgcaugggcgagcgccagcuccagaagaucgagcgcugguucguccgcaaccccuucuucgccgucaccgcccucaccaucgccuaccucgucggcuccaacaugacccagcgcgucgucaucgcccuccucguccucgccgucggccccgccuacuccgcccacugcaucggcaucaccgaccgcgacuucaucgagggcguccacggcggcaccugggucuccgccacccucgagcaggacaagugcgucaccgucauggcccccgacaagcccucccucgacaucucccucgagaccgucgccaucgaccgccccgccgagguccgcaaggucugcuacaacgccguccucacccacgucaagaucaacgacaagugccccuccaccggcgaggcccaccucgccgaggagaacgagggcgacaacgccugcaagcgcaccuacuccgaccgcggcuggggcaacggcugcggccucuucggcaagggcuccaucgucgccugcgccaaguucaccugcgccaaguccaugucccucuucgaggucgaccagaccaagauccaguacgucauccgcgcccagcuccacgucggcgccaagcaggagaacuggaacaccgacaucaagacccucaaguucgacgcccucuccggcucccaggaggucgaguucaucggcuacggcaaggccacccucgagugccagguccagaccgccgucgacuucggcaacuccuacaucgccgagauggagaccgaguccuggaucgucgaccgccagugggcccaggaccucacccuccccuggcaguccggcuccggcggcgucuggcgcgagaugcaccaccucgucgaguucgagcccccccacgccgccaccauccgcguccucgcccucggcaaccaggagggcucccucaagaccgcccucaccggcgccaugcgcgucaccaaggacaccaacgacaacaaccucuacaagcuccacggcggccacgucuccugccgcgucaagcucuccgcccucacccucaagggcaccuccuacaagaucugcaccgacaagauguucuucgucaagaaccccaccgacaccggccacggcaccgucgucaugcaggucaaggucuccaagggcgcccccugccgcauccccgucaucgucgccgacgaccucaccgccgccaucaacaagggcauccucgucaccgucaaccccaucgccuccaccaacgacgacgagguccucaucgaggucaacccccccuucggcgacuccuacaucaucgucggccgcggcgacucccgccucaccuaccaguggcacaaggagggcuccuccaucggcaagcucuucacccagaccaugaagggcgucgagcgccucgccgucaugggcgacaccgccugggacuucuccuccgccggcggcuucuucaccuccgucggcaagggcauccacaccgucuucggcuccgccuuccagggccucuucggcggccucaacuggaucaccaaggucaucaugggcgccguccucaucugggucggcaucaacacccgcaacaugaccauguccauguccaugauccucgucggcgucaucaugauguuccucucccucggcgucggcgccugaggacuagucccuguucccagagcccacuuuuuuuucuuuuuuugaaauaaaauagccugucuuucagaucuaaaaaaaaaaaaaaaaaaaaaaaaaaaaaaaaaaaaaaaaaaaaaaaaaaaaaaaaaaaaaaaaugcaucccccccccccccccccccccccccccccccaaaggcucuuuucagagccaccagaauu

SEQ ID NO: 558 - RNA, 2370 nt, Artificial Sequence
  mRNA product Design a-1 comprising derived and/or modified sequence from YFV__NC_002031.1__X-SS-prME-XX (polyprotein: aa92-788) (opt3)
gggagagucccgcagucggcguccagcggcucugcuuguucgugugugugucguugcaggccuuauucaagcuuaccaugagaggccugagcuccaggaagcggcgcucucacgacgugcucaccguccaguuccuuauccuggggauguuguuaaugacaggagguguuacucuggugcguaaaaaccgauggcuacuccugaauguaacgucagaggaucuuggcaagaccuuuaguguggggacaggaaacugcacuaccaauauucuggaagccaaauacuggugucccgacagcauggaguauaacugcccuaauuuguccccaagagaggaaccggaugacauagauuguuggugcuacggcgucgaaaacgugaggguugcuuaugguaagugugacucugcagggcggucgcgcagaucaaggcgggccaucgaucuccccacacaugagaaucacggacugaaaacccgccaagagaaguggaugacuggccgaaugggcgaaagacagcugcagaagauugagaggugguucgugcggaacccuuucuucgcggucacagcucucaccaucgccuacuuaguggggagcaauaugacgcagcguguaguuauugcacugcuuguguuggccgucggaccagcuuauagugcacauugcaucgguauaacugaccgcgauuuuaucgaaggcgugcacgggggaaccuggguguccgccacacuggagcaagacaaaugugucacuguuauggcucccgauaagccuucucuagacauuagccucgagaccguggccaucgauagaccagcggaaguaaggaaagugugcuacaacgcaguccugacacaugugaagauuaaugacaaaugucccuccaccggcgaggcccaccuugcugaagagaacgaaggugacaaugccugcaagcggacguauucagaucgaggguggggaaacggcuguggccuguucgggaagggaaguaucguugcaugcgcuaaauuuacuugcgccaagagcaugucuuuguucgagguggaccagacaaaaauacaguacgucauucgcgcgcagcuccacgugggugccaagcaagagaauuggaacaccgauaucaaaacucugaaguuugacgcauuauccggcucacaggaaguagaguucauuggguacggaaaagcuacacuggaaugucagguucagaccgccguggauuuuggcaacagcuauaucgcugagauggaaacggagaguuggaucgucgacagacaaugggcccaggaucucacccuuccuuggcagucugguuccgggggcguguggagggagaugcaucaccuggucgaauuugagccaccgcaugcagccacaauucggguguuggcucuaggaaaucaagaaggcagccugaagacugcgcucaccggggcaaugcgcguuacaaaggacacuaacgauaauaaccuguacaaacuucacggaggucacgugucgugcagaguaaagcugucugccuugacccucaaaggcacauccuauaagauauguaccgacaaaauguuuuucgucaagaaucccacugauacggggcauggaacagugguuaugcaagugaaggucucaaaaggcgcuccuugcaggaucccagugauuguagccgacgaccugaccgcagccaucaacaaggguauauuagugacuguuaaucccauugcuaguaccaacgaugacgagguccugaucgaagugaauccuccauucggggauagcuacaucauugugggccguggagacucccggcuaacauaucaguggcacaaagagggcucuagcaucgggaagcucuuuacccagacuaugaaaggagucgagcgacuggccguuaugggugauacagcaugggacuucucaagugcgggcggguuuuucacguccgugggaaagggcauucauaccguguuugguagcgcuuuccaggggcuuuuuggcggauugaacuggauaacuaagguaaucaugggcgccguccugauuuggguggggaucaauacaagaaacaugaccaugucuaugucaaugauccucguuggagugauuaugauguuccugagucuuggcgucggugcagaucaggggugugccauaaauuuuggaaaaugaggacuagucccuguucccagagcccacuuuuuuuucuuuuuuugaaauaaaauagccugucuuucagaucuaaaaaaaaaaaaaaaaaaaaaaaaaaaaaaaaaaaaaaaaaaaaaaaaaaaaaaaaaaaaaaaaugcaucccccccccccccccccccccccccccccccaaaggcucuuuucagagccaccagaauu

SEQ ID NO: 559 - RNA, 2307 nt, Artificial Sequence
  mRNA product Design a-1 comprising derived and/or modified sequence from YFV__NC_002031.1__SS-prME (polyprotein: M,aa104-778) (opt3)
gggagagucccgcagucggcguccagcggcucugcuuguucgugugugugucguugcaggccuuauucaagcuuaccauggacgugcugaccguccaguuccucauccuuggcaugcuguugaugacagggggaguuacuuuagugagaaagaacagguggcugcuacucaauguaacgagcgaggaucuggguaaaaccuuuuccgugggcacagggaacugcacuaccaauauucuugaagccaaguacuggugucccgacucuauggaguauaacugcccuaaucugucaccacgggaggaaccggaugacauagauuguuggugcuacggagucgaaaacgugcgcguugcuuauggcaaaugugacagugcaggucgaagccguagauccaggcgggccaucgauuugcccacacacgagaaucaugggcucaagacccgccaagagaaauggaugacuggaagaaugggcgaaaggcagcugcagaagauugagcggugguucgugcgcaacccuuucuucgcggucacagcucugaccaucgccuaccucgugggcucuaauaugacgcagcgaguaguuauugcauuacuggugcuugccgucgggccagcuuauucggcacacugcaucggaauaacugacagagauuuuaucgaaggugugcauggcgggaccugggugucagccacauuggagcaagacaagugugucacuguuauggcucccgauaaaccuagccuggacauuagucuagagaccguggccaucgauaggccagcggaaguacggaaggugugcuacaacgcaguccucacacacgugaaaauuaaugacaagugucccuccaccggagaggcccaucuggcugaagagaacgaaggcgacaaugccugcaaacguacguauucugaucgcgguugggggaacggauguggccuuuucggcaaggggagcaucguugcaugcgcuaaguuuacuugcgccaaauccaugucacuguucgagguggaccagacaaagauacaguacgucauuagagcgcaguugcacgugggagccaaacaagagaauuggaacaccgauaucaagacucucaaauuugacgcacugagugguagccaggaaguagaguucauuggcuacgggaaggcuacauuagaaugucagguucagaccgccguggauuuuggaaacucuuauaucgcugagauggaaacggaguccuggaucgucgacaggcaaugggcccaggaucugacccucccuuggcagucaggcagcggugggguguggcgggagaugcaccaucuugucgaauuugagccaccgcacgcagccacaauucgagugcuggcuuugggcaaucaagaaggaagucuaaaaacugcgcugaccggcgcaaugcgcguuacaaaggacacuaacgauaauaaccucuacaagcugcaugggggacacgugucuugcagaguaaaacuuuccgcccugaccuugaaggguacaagcuauaaaauauguaccgacaagauguuuuucgucaaaaaucccacugauacgggccacgggacagugguuaugcaagugaaggucucgaagggagcuccuugcaggaucccagugauuguagccgacgaccucaccgcagccaucaacaaaggcauacuggugacuguuaaucccauugcuucuaccaacgaugacgaggucuuaaucgaagugaauccuccauucggugauuccuacaucauuguggggcggggcgacucacgccugacauaucaguggcauaaggagggaaguagcaucggcaaacuauuuacccagacuaugaagggggucgagagacucgccguuaugggagauacagcaugggacuucuccucugcggguggcuuuuucacgagcguggggaaaggcauucacaccguguuuggaucagcuuuccagggucuguuugggggccuuaacuggauaacuaagguaaucaugggagccgucuugauuugggugggcaucaauacaaggaacaugaccaugaguauguccaugauccugguuggggugauuaugauguuccucagccugggagucggcgcaugaggacuagucccuguucccagagcccacuuuuuuuucuuuuuuugaaauaaaauagccugucuuucagaucuaaaaaaaaaaaaaaaaaaaaaaaaaaaaaaaaaaaaaaaaaaaaaaaaaaaaaaaaaaaaaaaaugcaucccccccccccccccccccccccccccccccaaaggcucuuuucagagccaccagaauu

SEQ ID NO: 560 - RNA, 2334 nt, Artificial Sequence
  mRNA product Design a-1 comprising derived and/or modified sequence from YFV__NC_002031.1__SSIgE-prME-XX (polyprotein: aa122-788) (opt3)
gggagagucccgcagucggcguccagcggcucugcuuguucgugugugugucguugcaggccuuauucaagcuuaccauggacuggaccuggauccuguuccucguggccgcugcaacaagaguccacagcguuacucuggugcguaaaaaccgauggcuacuccugaauguaacgucagaggaucuuggcaagaccuuuaguguggggacaggaaacugcacuaccaauauucuggaagccaaauacuggugucccgacagcauggaguauaacugcccuaauuuguccccaagagaggaaccggaugacauagauuguuggugcuacggcgucgaaaacgugaggguugcuuaugguaagugugacucugcagggcggucgcgcagaucaaggcgggccaucgaucuccccacacaugagaaucacggacugaaaacccgccaagagaaguggaugacuggccgaaugggcgaaagacagcugcagaagauugagaggugguucgugcggaacccuuucuucgcggucacagcucucaccaucgccuacuuaguggggagcaauaugacgcagcguguaguuauugcacugcuuguguuggccgucggaccagcuuauagugcacauugcaucgguauaacugaccgcgauuuuaucgaaggcgugcacgggggaaccuggguguccgccacacuggagcaagacaaaugugucacuguuauggcucccgauaagccuucucuagacauuagccucgagaccguggccaucgauagaccagcggaaguaaggaaagugugcuacaacgcaguccugacacaugugaagauuaaugacaaaugucccuccaccggcgaggcccaccuugcugaagagaacgaaggugacaaugccugcaagcggacguauucagaucgaggguggggaaacggcuguggccuguucgggaagggaaguaucguugcaugcgcuaaauuuacuugcgccaagagcaugucuuuguucgagguggaccagacaaaaauacaguacgucauucgcgcgcagcuccacgugggugccaagcaagagaauuggaacaccgauaucaaaacucugaaguuugacgcauuauccggcucacaggaaguagaguucauuggguacggaaaagcuacacuggaaugucagguucagaccgccguggauuuuggcaacagcuauaucgcugagauggaaacggagaguuggaucgucgacagacaaugggcccaggaucucacccuuccuuggcagucugguuccgggggcguguggagggagaugcaucaccuggucgaauuugagccaccgcaugcagccacaauucggguguuggcucuaggaaaucaagaaggcagccugaagacugcgcucaccggggcaaugcgcguuacaaaggacacuaacgauaauaaccuguacaaacuucacggaggucacgugucgugcagaguaaagcugucugccuugacccucaaaggcacauccuauaagauauguaccgacaaaauguuuuucgucaagaaucccacugauacggggcauggaacagugguuaugcaagugaaggucucaaaaggcgcuccuugcaggaucccagugauuguagccgacgaccugaccgcagccaucaacaaggguauauuagugacuguuaaucccauugcuaguaccaacgaugacgagguccugaucgaagugaauccuccauucggggauagcuacaucauugugggccguggagacucccggcuaacauaucaguggcacaaagagggcucuagcaucgggaagcucuuuacccagacuaugaaaggagucgagcgacuggccguuaugggugauacagcaugggacuucucaagugcgggcggguuuuucacguccgugggaaagggcauucauaccguguuugguagcgcuuuccaggggcuuuuuggcggauugaacuggauaacuaagguaaucaugggcgccguccugauuuggguggggaucaauacaagaaacaugaccaugucuaugucaaugauccucguuggagugauuaugauguuccugagucuuggcgucggugcagaucaggggugugccauaaauuuuggaaaaugaggacuagucccuguucccagagcccacuuuuuuuucuuuuuuugaaauaaaauagccugucuuucagaucuaaaaaaaaaaaaaaaaaaaaaaaaaaaaaaaaaaaaaaaaaaaaaaaaaaaaaaaaaaaaaaaaugcaucccccccccccccccccccccccccccccccaaaggcucuuuucagagccaccagaauu

SEQ ID NO: 561 - RNA, 2304 nt, Artificial Sequence
  mRNA product Design a-1 comprising derived and/or modified sequence from YFV__NC_002031.1__SSIgE-prME (polyprotein: aa122-778) (opt3)
gggagagucccgcagucggcguccagcggcucugcuuguucgugugugugucguugcaggccuuauucaagcuuaccauggacuggaccuggauccuguuccucguggccgcugcaacaagaguccacagcgugacccuggucagaaagaacagguggcuccuucugaauguuacaagcgaggacuugggcaaaacuuucuccguggggacgggaaacugcaccacaaauaucuuagaagccaaguacuggugucccgauucuauggaguauaacugcccuaaucugucaccacgggaggaaccggacgauauugacuguuggugcuacgguguagaaaacgugcgcgucgcuuauggcaaaugugauagugcagggcgaagccguagauccaggcgggccauagaccuacccacucacgagaaucauggacucaagacccgccaggagaaauggaugacaggcagaaugggugaaaggcaacugcagaagaucgagcggugguuugugcgcaacccuuucuuugcgguuaccgcucuuacuauugccuaccugguggggucuaauaugacacagcgagucgugaucgcauugcucguacuggccguuggaccagcuuauucggcacacugcauuggcaucaccgauagagacuucauagaaggcgugcaugggggaacgugggucucagccacucuggagcaggauaagugugugaccgugauggcucccgacaaaccuagccucgauaucaguuuagagacagucgccauugacaggccagcggaaguucggaaggugugcuacaacgcaguacugacucacgugaaaaucaaugauaagugucccuccaccggugaggcccaucuugcugaagagaacgaaggcgacaaugccugcaaacguacauauucugaccgcggguggggaaacggcugugguuuguuugggaagggaagcauugucgcaugcgcuaaguuuaccugcgccaaauccaugucacuguucgagguggaucaaacgaagauccaguacguuauaagagcgcagcuacacgugggcgccaaacaggagaauuggaacacugacauuaagacacucaaauucgaugcacugaguggcagccaagaagucgaguuuaucggguacggaaaggcuacccuugaaugucaggugcagacugccguagacuucgguaacucuuauauugcugagauggaaacagaguccuggaucguugauaggcagugggcccaagaccugaccuugccuuggcagucaggcagcgggggaguguggcgggagaugcaccaucucgucgaauuugagccaccgcacgcagccacgauccgagugcuggcuuuaggcaaucaggaagguagucugaaaaccgcgcucacaggggcaaugcgcgucacuaaggauaccaacgacaauaaccuuuacaagcugcauggcggacacgugucuugcagaguuaaauuguccgcccuaacacugaagggcacuagcuauaaaauuuguaccgauaagauguucuuugugaaaaaucccacagacaccgggcacggaacuguagucaugcaagugaagguuucgaagggugcuccuugcaggauaccagugaucgucgccgaugaccucacggcagccauuaacaaaggcauccuggugacaguaaaucccauagcuucuaccaacgacgaugaggugcuuauugaaguuaauccuccauucggggacuccuacaucaucgucggacggggcgauucacgccugacuuaucaguggcauaaggaggguaguagcauugggaaauuguucacccagacaaugaagggcguggagagacucgccgugaugggagacaccgcaugggauuuuuccucugcgggcggguucuuuacuagcgucggaaaagguauccacacaguuuucggcucagcuuuucaggggcuguucggaggcuuaaacuggauuacgaaggugauaaugggugccgugcugaucuggguagggauuaauaccaggaacaugacuaugaguauguccaugauccuagucggcgugaucaugauguuucucagccugggaguuggcgcaugaggacuagucccuguucccagagcccacuuuuuuuucuuuuuuugaaauaaaauagccugucuuucagaucuaaaaaaaaaaaaaaaaaaaaaaaaaaaaaaaaaaaaaaaaaaaaaaaaaaaaaaaaaaaaaaaaugcaucccccccccccccccccccccccccccccccaaaggcucuuuucagagccaccagaauu

SEQ ID NO: 562 - RNA, 2352 nt, Artificial Sequence
  mRNA product Design a-1 comprising derived and/or modified sequence from YFV__NC_002031.1__SSjev-prME-XX (polyprotein: aa122-788) (opt3)
gggagagucccgcagucggcguccagcggcucugcuuguucgugugugugucguugcaggccuuauucaagcuuaccaugggcaagagaagcgccggguccaucauguggcuggcuucucucgcaguggucauugccugcgcgggagcuguuacucuggugcguaaaaaccgauggcuacuccugaauguaacgucagaggaucuuggcaagaccuuuaguguggggacaggaaacugcacuaccaauauucuggaagccaaauacuggugucccgacagcauggaguauaacugcccuaauuuguccccaagagaggaaccggaugacauagauuguuggugcuacggcgucgaaaacgugaggguugcuuaugguaagugugacucugcagggcggucgcgcagaucaaggcgggccaucgaucuccccacacaugagaaucacggacugaaaacccgccaagagaaguggaugacuggccgaaugggcgaaagacagcugcagaagauugagaggugguucgugcggaacccuuucuucgcggucacagcucucaccaucgccuacuuaguggggagcaauaugacgcagcguguaguuauugcacugcuuguguuggccgucggaccagcuuauagugcacauugcaucgguauaacugaccgcgauuuuaucgaaggcgugcacgggggaaccuggguguccgccacacuggagcaagacaaaugugucacuguuauggcucccgauaagccuucucuagacauuagccucgagaccguggccaucgauagaccagcggaaguaaggaaagugugcuacaacgcaguccugacacaugugaagauuaaugacaaaugucccuccaccggcgaggcccaccuugcugaagagaacgaaggugacaaugccugcaagcggacguauucagaucgaggguggggaaacggcuguggccuguucgggaagggaaguaucguugcaugcgcuaaauuuacuugcgccaagagcaugucuuuguucgagguggaccagacaaaaauacaguacgucauucgcgcgcagcuccacgugggugccaagcaagagaauuggaacaccgauaucaaaacucugaaguuugacgcauuauccggcucacaggaaguagaguucauuggguacggaaaagcuacacuggaaugucagguucagaccgccguggauuuuggcaacagcuauaucgcugagauggaaacggagaguuggaucgucgacagacaaugggcccaggaucucacccuuccuuggcagucugguuccgggggcguguggagggagaugcaucaccuggucgaauuugagccaccgcaugcagccacaauucggguguuggcucuaggaaaucaagaaggcagccugaagacugcgcucaccggggcaaugcgcguuacaaaggacacuaacgauaauaaccuguacaaacuucacggaggucacgugucgugcagaguaaagcugucugccuugacccucaaaggcacauccuauaagauauguaccgacaaaauguuuuucgucaagaaucccacugauacggggcauggaacagugguuaugcaagugaaggucucaaaaggcgcuccuugcaggaucccagugauuguagccgacgaccugaccgcagccaucaacaaggguauauuagugacuguuaaucccauugcuaguaccaacgaugacgagguccugaucgaagugaauccuccauucggggauagcuacaucauugugggccguggagacucccggcuaacauaucaguggcacaaagagggcucuagcaucgggaagcucuuuacccagacuaugaaaggagucgagcgacuggccguuaugggugauacagcaugggacuucucaagugcgggcggguuuuucacguccgugggaaagggcauucauaccguguuugguagcgcuuuccaggggcuuuuuggcggauugaacuggauaacuaagguaaucaugggcgccguccugauuuggguggggaucaauacaagaaacaugaccaugucuaugucaaugauccucguuggagugauuaugauguuccugagucuuggcgucggugcagaucaggggugugccauaaauuuuggaaaaugaggacuagucccuguucccagagcccacuuuuuuuucuuuuuuugaaauaaaauagccugucuuucagaucuaaaaaaaaaaaaaaaaaaaaaaaaaaaaaaaaaaaaaaaaaaaaaaaaaaaaaaaaaaaaaaaaugcaucccccccccccccccccccccccccccccccaaaggcucuuuucagagccaccagaauu

SEQ ID NO: 563 - RNA, 2322 nt, Artificial Sequence
  mRNA product Design a-1 comprising derived and/or modified sequence from YFV__NC_002031.1__SSjev-prME (polyprotein: aa122-778) (opt3)
gggagagucccgcagucggcguccagcggcucugcuuguucgugugugugucguugcaggccuuauucaagcuuaccaugggcaagagaagcgccggguccaucauguggcuggcuucucucgcaguggucauugccugcgcgggagcugugacccuggucagaaagaacagguggcuccuucugaauguuacaagcgaggacuugggcaaaacuuucuccguggggacgggaaacugcaccacaaauaucuuagaagccaaguacuggugucccgauucuauggaguauaacugcccuaaucugucaccacgggaggaaccggacgauauugacuguuggugcuacgguguagaaaacgugcgcgucgcuuauggcaaaugugauagugcagggcgaagccguagauccaggcgggccauagaccuacccacucacgagaaucauggacucaagacccgccaggagaaauggaugacaggcagaaugggugaaaggcaacugcagaagaucgagcggugguuugugcgcaacccuuucuuugcgguuaccgcucuuacuauugccuaccugguggggucuaauaugacacagcgagucgugaucgcauugcucguacuggccguuggaccagcuuauucggcacacugcauuggcaucaccgauagagacuucauagaaggcgugcaugggggaacgugggucucagccacucuggagcaggauaagugugugaccgugauggcucccgacaaaccuagccucgauaucaguuuagagacagucgccauugacaggccagcggaaguucggaaggugugcuacaacgcaguacugacucacgugaaaaucaaugauaagugucccuccaccggugaggcccaucuugcugaagagaacgaaggcgacaaugccugcaaacguacauauucugaccgcggguggggaaacggcugugguuuguuugggaagggaagcauugucgcaugcgcuaaguuuaccugcgccaaauccaugucacuguucgagguggaucaaacgaagauccaguacguuauaagagcgcagcuacacgugggcgccaaacaggagaauuggaacacugacauuaagacacucaaauucgaugcacugaguggcagccaagaagucgaguuuaucggguacggaaaggcuacccuugaaugucaggugcagacugccguagacuucgguaacucuuauauugcugagauggaaacagaguccuggaucguugauaggcagugggcccaagaccugaccuugccuuggcagucaggcagcgggggaguguggcgggagaugcaccaucucgucgaauuugagccaccgcacgcagccacgauccgagugcuggcuuuaggcaaucaggaagguagucugaaaaccgcgcucacaggggcaaugcgcgucacuaaggauaccaacgacaauaaccuuuacaagcugcauggcggacacgugucuugcagaguuaaauuguccgcccuaacacugaagggcacuagcuauaaaauuuguaccgauaagauguucuuugugaaaaaucccacagacaccgggcacggaacuguagucaugcaagugaagguuucgaagggugcuccuugcaggauaccagugaucgucgccgaugaccucacggcagccauuaacaaaggcauccuggugacaguaaaucccauagcuucuaccaacgacgaugaggugcuuauugaaguuaauccuccauucggggacuccuacaucaucgucggacggggcgauucacgccugacuuaucaguggcauaaggaggguaguagcauugggaaauuguucacccagacaaugaagggcguggagagacucgccgugaugggagacaccgcaugggauuuuuccucugcgggcggguucuuuacuagcgucggaaaagguauccacacaguuuucggcucagcuuuucaggggcuguucggaggcuuaaacuggauuacgaaggugauaaugggugccgugcugaucuggguagggauuaauaccaggaacaugacuaugaguauguccaugauccuagucggcgugaucaugauguuucucagccugggaguuggcgcaugaggacuagucccuguucccagagcccacuuuuuuuucuuuuuuugaaauaaaauagccugucuuucagaucuaaaaaaaaaaaaaaaaaaaaaaaaaaaaaaaaaaaaaaaaaaaaaaaaaaaaaaaaaaaaaaaaugcaucccccccccccccccccccccccccccccccaaaggcucuuuucagagccaccagaauu

SEQ ID NO: 564 - RNA, 2370 nt, Artificial Sequence
  mRNA product Design a-1 comprising derived and/or modified sequence from YFV__NC_002031.1__X-SS-prME-XX (polyprotein: aa92-788) (opt4)
gggagagucccgcagucggcguccagcggcucugcuuguucgugugugugucguugcaggccuuauucaagcuuaccaugagaggccugagcagcagaaagagaagaagccacgacgugcugaccgugcaguuccugauccugggcaugcugcugaugaccggcggcgugacccuggugagaaagaacagauggcugcugcugaacgugaccagcgaggaccugggcaagaccuucagcgugggcaccggcaacugcaccaccaacauccuggaggccaaguacuggugccccgacagcauggaguacaacugccccaaccugagccccagagaggagcccgacgacaucgacugcuggugcuacggcguggagaacgugagaguggccuacggcaagugcgacagcgccggcagaagcagaagaagcagaagagccaucgaccugcccacccacgagaaccacggccugaagaccagacaggagaaguggaugaccggcagaaugggcgagagacagcugcagaagaucgagagaugguucgugagaaaccccuucuucgccgugaccgcccugaccaucgccuaccuggugggcagcaacaugacccagagaguggugaucgcccugcuggugcuggccgugggccccgccuacagcgcccacugcaucggcaucaccgacagagacuucaucgagggcgugcacggcggcaccugggugagcgccacccuggagcaggacaagugcgugaccgugauggcccccgacaagcccagccuggacaucagccuggagaccguggccaucgacagacccgccgaggugagaaaggugugcuacaacgccgugcugacccacgugaagaucaacgacaagugccccagcaccggcgaggcccaccuggccgaggagaacgagggcgacaacgccugcaagagaaccuacagcgacagaggcuggggcaacggcugcggccuguucggcaagggcagcaucguggccugcgccaaguucaccugcgccaagagcaugagccuguucgagguggaccagaccaagauccaguacgugaucagagcccagcugcacgugggcgccaagcaggagaacuggaacaccgacaucaagacccugaaguucgacgcccugagcggcagccaggagguggaguucaucggcuacggcaaggccacccuggagugccaggugcagaccgccguggacuucggcaacagcuacaucgccgagauggagaccgagagcuggaucguggacagacagugggcccaggaccugacccugcccuggcagagcggcagcggcggcguguggagagagaugcaccaccugguggaguucgagcccccccacgccgccaccaucagagugcuggcccugggcaaccaggagggcagccugaagaccgcccugaccggcgccaugagagugaccaaggacaccaacgacaacaaccuguacaagcugcacggcggccacgugagcugcagagugaagcugagcgcccugacccugaagggcaccagcuacaagaucugcaccgacaagauguucuucgugaagaaccccaccgacaccggccacggcaccguggugaugcaggugaaggugagcaagggcgcccccugcagaauccccgugaucguggccgacgaccugaccgccgccaucaacaagggcauccuggugaccgugaaccccaucgccagcaccaacgacgacgaggugcugaucgaggugaacccccccuucggcgacagcuacaucaucgugggcagaggcgacagcagacugaccuaccaguggcacaaggagggcagcagcaucggcaagcuguucacccagaccaugaagggcguggagagacuggccgugaugggcgacaccgccugggacuucagcagcgccggcggcuucuucaccagcgugggcaagggcauccacaccguguucggcagcgccuuccagggccuguucggcggccugaacuggaucaccaaggugaucaugggcgccgugcugaucugggugggcaucaacaccagaaacaugaccaugagcaugagcaugauccuggugggcgugaucaugauguuccugagccugggcgugggcgccgaccagggcugcgccaucaacuucggcaagugaggacuagucccuguucccagagcccacuuuuuuuucuuuuuuugaaauaaaauagccugucuuucagaucuaaaaaaaaaaaaaaaaaaaaaaaaaaaaaaaaaaaaaaaaaaaaaaaaaaaaaaaaaaaaaaaaugcaucccccccccccccccccccccccccccccccaaaggcucuuuucagagccaccagaauu

SEQ ID NO: 565 - RNA, 2307 nt, Artificial Sequence
  mRNA product Design a-1 comprising derived and/or modified sequence from YFV__NC_002031.1__SS-prME (polyprotein: M,aa104-778) (opt4)
gggagagucccgcagucggcguccagcggcucugcuuguucgugugugugucguugcaggccuuauucaagcuuaccauggacgugcugaccgugcaguuccugauccugggcaugcugcugaugaccggcggcgugacccuggugagaaagaacagauggcugcugcugaacgugaccagcgaggaccugggcaagaccuucagcgugggcaccggcaacugcaccaccaacauccuggaggccaaguacuggugccccgacagcauggaguacaacugccccaaccugagccccagagaggagcccgacgacaucgacugcuggugcuacggcguggagaacgugagaguggccuacggcaagugcgacagcgccggcagaagcagaagaagcagaagagccaucgaccugcccacccacgagaaccacggccugaagaccagacaggagaaguggaugaccggcagaaugggcgagagacagcugcagaagaucgagagaugguucgugagaaaccccuucuucgccgugaccgcccugaccaucgccuaccuggugggcagcaacaugacccagagaguggugaucgcccugcuggugcuggccgugggccccgccuacagcgcccacugcaucggcaucaccgacagagacuucaucgagggcgugcacggcggcaccugggugagcgccacccuggagcaggacaagugcgugaccgugauggcccccgacaagcccagccuggacaucagccuggagaccguggccaucgacagacccgccgaggugagaaaggugugcuacaacgccgugcugacccacgugaagaucaacgacaagugccccagcaccggcgaggcccaccuggccgaggagaacgagggcgacaacgccugcaagagaaccuacagcgacagaggcuggggcaacggcugcggccuguucggcaagggcagcaucguggccugcgccaaguucaccugcgccaagagcaugagccuguucgagguggaccagaccaagauccaguacgugaucagagcccagcugcacgugggcgccaagcaggagaacuggaacaccgacaucaagacccugaaguucgacgcccugagcggcagccaggagguggaguucaucggcuacggcaaggccacccuggagugccaggugcagaccgccguggacuucggcaacagcuacaucgccgagauggagaccgagagcuggaucguggacagacagugggcccaggaccugacccugcccuggcagagcggcagcggcggcguguggagagagaugcaccaccugguggaguucgagcccccccacgccgccaccaucagagugcuggcccugggcaaccaggagggcagccugaagaccgcccugaccggcgccaugagagugaccaaggacaccaacgacaacaaccuguacaagcugcacggcggccacgugagcugcagagugaagcugagcgcccugacccugaagggcaccagcuacaagaucugcaccgacaagauguucuucgugaagaaccccaccgacaccggccacggcaccguggugaugcaggugaaggugagcaagggcgcccccugcagaauccccgugaucguggccgacgaccugaccgccgccaucaacaagggcauccuggugaccgugaaccccaucgccagcaccaacgacgacgaggugcugaucgaggugaacccccccuucggcgacagcuacaucaucgugggcagaggcgacagcagacugaccuaccaguggcacaaggagggcagcagcaucggcaagcuguucacccagaccaugaagggcguggagagacuggccgugaugggcgacaccgccugggacuucagcagcgccggcggcuucuucaccagcgugggcaagggcauccacaccguguucggcagcgccuuccagggccuguucggcggccugaacuggaucaccaaggugaucaugggcgccgugcugaucugggugggcaucaacaccagaaacaugaccaugagcaugagcaugauccuggugggcgugaucaugauguuccugagccugggcgugggcgccugaggacuagucccuguucccagagcccacuuuuuuuucuuuuuuugaaauaaaauagccugucuuucagaucuaaaaaaaaaaaaaaaaaaaaaaaaaaaaaaaaaaaaaaaaaaaaaaaaaaaaaaaaaaaaaaaaugcaucccccccccccccccccccccccccccccccaaaggcucuuuucagagccaccagaauu

SEQ ID NO: 566 - RNA, 2334 nt, Artificial Sequence
  mRNA product Design a-1 comprising derived and/or modified sequence from YFV__NC_002031.1__SSIgE-prME-XX (polyprotein: aa122-788) (opt4)
gggagagucccgcagucggcguccagcggcucugcuuguucgugugugugucguugcaggccuuauucaagcuuaccauggacuggaccuggauccuguuccugguggccgccgccaccagagugcacagcgugacccuggugagaaagaacagauggcugcugcugaacgugaccagcgaggaccugggcaagaccuucagcgugggcaccggcaacugcaccaccaacauccuggaggccaaguacuggugccccgacagcauggaguacaacugccccaaccugagccccagagaggagcccgacgacaucgacugcuggugcuacggcguggagaacgugagaguggccuacggcaagugcgacagcgccggcagaagcagaagaagcagaagagccaucgaccugcccacccacgagaaccacggccugaagaccagacaggagaaguggaugaccggcagaaugggcgagagacagcugcagaagaucgagagaugguucgugagaaaccccuucuucgccgugaccgcccugaccaucgccuaccuggugggcagcaacaugacccagagaguggugaucgcccugcuggugcuggccgugggccccgccuacagcgcccacugcaucggcaucaccgacagagacuucaucgagggcgugcacggcggcaccugggugagcgccacccuggagcaggacaagugcgugaccgugauggcccccgacaagcccagccuggacaucagccuggagaccguggccaucgacagacccgccgaggugagaaaggugugcuacaacgccgugcugacccacgugaagaucaacgacaagugccccagcaccggcgaggcccaccuggccgaggagaacgagggcgacaacgccugcaagagaaccuacagcgacagaggcuggggcaacggcugcggccuguucggcaagggcagcaucguggccugcgccaaguucaccugcgccaagagcaugagccuguucgagguggaccagaccaagauccaguacgugaucagagcccagcugcacgugggcgccaagcaggagaacuggaacaccgacaucaagacccugaaguucgacgcccugagcggcagccaggagguggaguucaucggcuacggcaaggccacccuggagugccaggugcagaccgccguggacuucggcaacagcuacaucgccgagauggagaccgagagcuggaucguggacagacagugggcccaggaccugacccugcccuggcagagcggcagcggcggcguguggagagagaugcaccaccugguggaguucgagcccccccacgccgccaccaucagagugcuggcccugggcaaccaggagggcagccugaagaccgcccugaccggcgccaugagagugaccaaggacaccaacgacaacaaccuguacaagcugcacggcggccacgugagcugcagagugaagcugagcgcccugacccugaagggcaccagcuacaagaucugcaccgacaagauguucuucgugaagaaccccaccgacaccggccacggcaccguggugaugcaggugaaggugagcaagggcgcccccugcagaauccccgugaucguggccgacgaccugaccgccgccaucaacaagggcauccuggugaccgugaaccccaucgccagcaccaacgacgacgaggugcugaucgaggugaacccccccuucggcgacagcuacaucaucgugggcagaggcgacagcagacugaccuaccaguggcacaaggagggcagcagcaucggcaagcuguucacccagaccaugaagggcguggagagacuggccgugaugggcgacaccgccugggacuucagcagcgccggcggcuucuucaccagcgugggcaagggcauccacaccguguucggcagcgccuuccagggccuguucggcggccugaacuggaucaccaaggugaucaugggcgccgugcugaucugggugggcaucaacaccagaaacaugaccaugagcaugagcaugauccuggugggcgugaucaugauguuccugagccugggcgugggcgccgaccagggcugcgccaucaacuucggcaagugaggacuagucccuguucccagagcccacuuuuuuuucuuuuuuugaaauaaaauagccugucuuucagaucuaaaaaaaaaaaaaaaaaaaaaaaaaaaaaaaaaaaaaaaaaaaaaaaaaaaaaaaaaaaaaaaaugcaucccccccccccccccccccccccccccccccaaaggcucuuuucagagccaccagaauu

SEQ ID NO: 567 - RNA, 2304 nt, Artificial Sequence
  mRNA product Design a-1 comprising derived and/or modified sequence from YFV__NC_002031.1__SSIgE-prME (polyprotein: aa122-778) (opt4)
gggagagucccgcagucggcguccagcggcucugcuuguucgugugugugucguugcaggccuuauucaagcuuaccauggacuggaccuggauccuguuccugguggccgccgccaccagagugcacagcgugacccuggugagaaagaacagauggcugcugcugaacgugaccagcgaggaccugggcaagaccuucagcgugggcaccggcaacugcaccaccaacauccuggaggccaaguacuggugccccgacagcauggaguacaacugccccaaccugagccccagagaggagcccgacgacaucgacugcuggugcuacggcguggagaacgugagaguggccuacggcaagugcgacagcgccggcagaagcagaagaagcagaagagccaucgaccugcccacccacgagaaccacggccugaagaccagacaggagaaguggaugaccggcagaaugggcgagagacagcugcagaagaucgagagaugguucgugagaaaccccuucuucgccgugaccgcccugaccaucgccuaccuggugggcagcaacaugacccagagaguggugaucgcccugcuggugcuggccgugggccccgccuacagcgcccacugcaucggcaucaccgacagagacuucaucgagggcgugcacggcggcaccugggugagcgccacccuggagcaggacaagugcgugaccgugauggcccccgacaagcccagccuggacaucagccuggagaccguggccaucgacagacccgccgaggugagaaaggugugcuacaacgccgugcugacccacgugaagaucaacgacaagugccccagcaccggcgaggcccaccuggccgaggagaacgagggcgacaacgccugcaagagaaccuacagcgacagaggcuggggcaacggcugcggccuguucggcaagggcagcaucguggccugcgccaaguucaccugcgccaagagcaugagccuguucgagguggaccagaccaagauccaguacgugaucagagcccagcugcacgugggcgccaagcaggagaacuggaacaccgacaucaagacccugaaguucgacgcccugagcggcagccaggagguggaguucaucggcuacggcaaggccacccuggagugccaggugcagaccgccguggacuucggcaacagcuacaucgccgagauggagaccgagagcuggaucguggacagacagugggcccaggaccugacccugcccuggcagagcggcagcggcggcguguggagagagaugcaccaccugguggaguucgagcccccccacgccgccaccaucagagugcuggcccugggcaaccaggagggcagccugaagaccgcccugaccggcgccaugagagugaccaaggacaccaacgacaacaaccuguacaagcugcacggcggccacgugagcugcagagugaagcugagcgcccugacccugaagggcaccagcuacaagaucugcaccgacaagauguucuucgugaagaaccccaccgacaccggccacggcaccguggugaugcaggugaaggugagcaagggcgcccccugcagaauccccgugaucguggccgacgaccugaccgccgccaucaacaagggcauccuggugaccgugaaccccaucgccagcaccaacgacgacgaggugcugaucgaggugaacccccccuucggcgacagcuacaucaucgugggcagaggcgacagcagacugaccuaccaguggcacaaggagggcagcagcaucggcaagcuguucacccagaccaugaagggcguggagagacuggccgugaugggcgacaccgccugggacuucagcagcgccggcggcuucuucaccagcgugggcaagggcauccacaccguguucggcagcgccuuccagggccuguucggcggccugaacuggaucaccaaggugaucaugggcgccgugcugaucugggugggcaucaacaccagaaacaugaccaugagcaugagcaugauccuggugggcgugaucaugauguuccugagccugggcgugggcgccugaggacuagucccuguucccagagcccacuuuuuuuucuuuuuuugaaauaaaauagccugucuuucagaucuaaaaaaaaaaaaaaaaaaaaaaaaaaaaaaaaaaaaaaaaaaaaaaaaaaaaaaaaaaaaaaaaugcaucccccccccccccccccccccccccccccccaaaggcucuuuucagagccaccagaauu

SEQ ID NO: 568 - RNA, 2352 nt, Artificial Sequence
  mRNA product Design a-1 comprising derived and/or modified sequence from YFV__NC_002031.1__SSjev-prME-XX (polyprotein: aa122-788) (opt4)
gggagagucccgcagucggcguccagcggcucugcuuguucgugugugugucguugcaggccuuauucaagcuuaccaugggcaagagaagcgccggcagcaucauguggcuggccagccuggccguggugaucgccugcgccggcgccgugacccuggugagaaagaacagauggcugcugcugaacgugaccagcgaggaccugggcaagaccuucagcgugggcaccggcaacugcaccaccaacauccuggaggccaaguacuggugccccgacagcauggaguacaacugccccaaccugagccccagagaggagcccgacgacaucgacugcuggugcuacggcguggagaacgugagaguggccuacggcaagugcgacagcgccggcagaagcagaagaagcagaagagccaucgaccugcccacccacgagaaccacggccugaagaccagacaggagaaguggaugaccggcagaaugggcgagagacagcugcagaagaucgagagaugguucgugagaaaccccuucuucgccgugaccgcccugaccaucgccuaccuggugggcagcaacaugacccagagaguggugaucgcccugcuggugcuggccgugggccccgccuacagcgcccacugcaucggcaucaccgacagagacuucaucgagggcgugcacggcggcaccugggugagcgccacccuggagcaggacaagugcgugaccgugauggcccccgacaagcccagccuggacaucagccuggagaccguggccaucgacagacccgccgaggugagaaaggugugcuacaacgccgugcugacccacgugaagaucaacgacaagugccccagcaccggcgaggcccaccuggccgaggagaacgagggcgacaacgccugcaagagaaccuacagcgacagaggcuggggcaacggcugcggccuguucggcaagggcagcaucguggccugcgccaaguucaccugcgccaagagcaugagccuguucgagguggaccagaccaagauccaguacgugaucagagcccagcugcacgugggcgccaagcaggagaacuggaacaccgacaucaagacccugaaguucgacgcccugagcggcagccaggagguggaguucaucggcuacggcaaggccacccuggagugccaggugcagaccgccguggacuucggcaacagcuacaucgccgagauggagaccgagagcuggaucguggacagacagugggcccaggaccugacccugcccuggcagagcggcagcggcggcguguggagagagaugcaccaccugguggaguucgagcccccccacgccgccaccaucagagugcuggcccugggcaaccaggagggcagccugaagaccgcccugaccggcgccaugagagugaccaaggacaccaacgacaacaaccuguacaagcugcacggcggccacgugagcugcagagugaagcugagcgcccugacccugaagggcaccagcuacaagaucugcaccgacaagauguucuucgugaagaaccccaccgacaccggccacggcaccguggugaugcaggugaaggugagcaagggcgcccccugcagaauccccgugaucguggccgacgaccugaccgccgccaucaacaagggcauccuggugaccgugaaccccaucgccagcaccaacgacgacgaggugcugaucgaggugaacccccccuucggcgacagcuacaucaucgugggcagaggcgacagcagacugaccuaccaguggcacaaggagggcagcagcaucggcaagcuguucacccagaccaugaagggcguggagagacuggccgugaugggcgacaccgccugggacuucagcagcgccggcggcuucuucaccagcgugggcaagggcauccacaccguguucggcagcgccuuccagggccuguucggcggccugaacuggaucaccaaggugaucaugggcgccgugcugaucugggugggcaucaacaccagaaacaugaccaugagcaugagcaugauccuggugggcgugaucaugauguuccugagccugggcgugggcgccgaccagggcugcgccaucaacuucggcaagugaggacuagucccuguucccagagcccacuuuuuuuucuuuuuuugaaauaaaauagccugucuuucagaucuaaaaaaaaaaaaaaaaaaaaaaaaaaaaaaaaaaaaaaaaaaaaaaaaaaaaaaaaaaaaaaaaugcaucccccccccccccccccccccccccccccccaaaggcucuuuucagagccaccagaauu

SEQ ID NO: 569 - RNA, 2322 nt, Artificial Sequence
  mRNA product Design a-1 comprising derived and/or modified sequence from YFV__NC_002031.1__SSjev-prME (polyprotein: aa122-778) (opt4)
gggagagucccgcagucggcguccagcggcucugcuuguucgugugugugucguugcaggccuuauucaagcuuaccaugggcaagagaagcgccggcagcaucauguggcuggccagccuggccguggugaucgccugcgccggcgccgugacccuggugagaaagaacagauggcugcugcugaacgugaccagcgaggaccugggcaagaccuucagcgugggcaccggcaacugcaccaccaacauccuggaggccaaguacuggugccccgacagcauggaguacaacugccccaaccugagccccagagaggagcccgacgacaucgacugcuggugcuacggcguggagaacgugagaguggccuacggcaagugcgacagcgccggcagaagcagaagaagcagaagagccaucgaccugcccacccacgagaaccacggccugaagaccagacaggagaaguggaugaccggcagaaugggcgagagacagcugcagaagaucgagagaugguucgugagaaaccccuucuucgccgugaccgcccugaccaucgccuaccuggugggcagcaacaugacccagagaguggugaucgcccugcuggugcuggccgugggccccgccuacagcgcccacugcaucggcaucaccgacagagacuucaucgagggcgugcacggcggcaccugggugagcgccacccuggagcaggacaagugcgugaccgugauggcccccgacaagcccagccuggacaucagccuggagaccguggccaucgacagacccgccgaggugagaaaggugugcuacaacgccgugcugacccacgugaagaucaacgacaagugccccagcaccggcgaggcccaccuggccgaggagaacgagggcgacaacgccugcaagagaaccuacagcgacagaggcuggggcaacggcugcggccuguucggcaagggcagcaucguggccugcgccaaguucaccugcgccaagagcaugagccuguucgagguggaccagaccaagauccaguacgugaucagagcccagcugcacgugggcgccaagcaggagaacuggaacaccgacaucaagacccugaaguucgacgcccugagcggcagccaggagguggaguucaucggcuacggcaaggccacccuggagugccaggugcagaccgccguggacuucggcaacagcuacaucgccgagauggagaccgagagcuggaucguggacagacagugggcccaggaccugacccugcccuggcagagcggcagcggcggcguguggagagagaugcaccaccugguggaguucgagcccccccacgccgccaccaucagagugcuggcccugggcaaccaggagggcagccugaagaccgcccugaccggcgccaugagagugaccaaggacaccaacgacaacaaccuguacaagcugcacggcggccacgugagcugcagagugaagcugagcgcccugacccugaagggcaccagcuacaagaucugcaccgacaagauguucuucgugaagaaccccaccgacaccggccacggcaccguggugaugcaggugaaggugagcaagggcgcccccugcagaauccccgugaucguggccgacgaccugaccgccgccaucaacaagggcauccuggugaccgugaaccccaucgccagcaccaacgacgacgaggugcugaucgaggugaacccccccuucggcgacagcuacaucaucgugggcagaggcgacagcagacugaccuaccaguggcacaaggagggcagcagcaucggcaagcuguucacccagaccaugaagggcguggagagacuggccgugaugggcgacaccgccugggacuucagcagcgccggcggcuucuucaccagcgugggcaagggcauccacaccguguucggcagcgccuuccagggccuguucggcggccugaacuggaucaccaaggugaucaugggcgccgugcugaucugggugggcaucaacaccagaaacaugaccaugagcaugagcaugauccuggugggcgugaucaugauguuccugagccugggcgugggcgccugaggacuagucccuguucccagagcccacuuuuuuuucuuuuuuugaaauaaaauagccugucuuucagaucuaaaaaaaaaaaaaaaaaaaaaaaaaaaaaaaaaaaaaaaaaaaaaaaaaaaaaaaaaaaaaaaaugcaucccccccccccccccccccccccccccccccaaaggcucuuuucagagccaccagaauu

SEQ ID NO: 570 - RNA, 2370 nt, Artificial Sequence
  mRNA product Design a-1 comprising derived and/or modified sequence from YFV__NC_002031.1__X-SS-prME-XX (polyprotein: aa92-788) (opt5)
gggagagucccgcagucggcguccagcggcucugcuuguucgugugugugucguugcaggccuuauucaagcuuaccaugagaggccugagcucccggaagcgcagaucucacgacgugcucaccguccaguuccugauccuugggaugcugcucaugacaggaggcguuacgcuggugcggaaaaaccgcuggcuucugcucaaugugaccagcgaggaucuggggaagacauuuuccgucggaaccggcaacugcacaaccaauauucuggaagccaaauacuggugucccgacucuauggaguauaacugcccuaaucucagcccgagagaagaacccgaugacaucgauuguuggugcuacgggguggaaaacguucggguggcuuauggaaagugugacuccgccggccgcucuagacggagccgcagagcgauugaucugccuacacaugagaaucacggccuuaaaacccggcaagagaaguggaugacggggcgcaugggagaaagacagcugcagaagaucgagcggugguucguccgcaaccccuuuuucgcugugaccgcccucacaauugccuaccugguuggcuccaauaugacccagagaguggucaucgcccuucuggugcucgcuguggggccugcuuauagcgcccauugcaucggaauuacagaccgggauuuuaucgaaggcguccacgggggaaccuggguuucugcgacgcuggagcaagacaaaugugugacagugauggcccccgauaagccuucccuggacauuagccucgagaccgucgcuaucgauagaccggccgaagugcgcaaaguuugcuacaacgcugugcugacacaugucaagauuaaugacaaaugucccucuaccggcgaggcccaccuugcggaagagaacgaaggcgacaaugccugcaagcggaccuauuccgauagaggguggggaaacggcugugggcuguucggaaagggcagcaucguggcuugcgccaaauuuacaugcgcuaagucuaugucccucuucgagguugaccagacgaaaauucaguacgugauccgcgcccagcugcacgucggggccaagcaagagaauuggaacaccgauaucaaaacacuuaaguuugacgcucugagcggaucccaggaaguggaguucauuggcuacggcaaagcgacccucgaaugucagguccagacagccguggauuuugggaacucuuauaucgcugagauggaaaccgagagcuggauuguugaccggcaaugggcccaggaucugacgcugccuuggcaguccggaagcggcgggguguggagagagaugcaucaccucgucgaguucgagcccccucaugccgcuacaauccgcgugcuggcccuuggaaaucaagaaggcucucugaagaccgcgcucaccggggcuaugcggguuacaaaggacaccaacgauaauaaccuguacaaacuucacggcggacacguguccugcagagucaagcugagcgcccucacacugaaaggcacgucuuauaagauuuguaccgacaaaauguuuuucgugaagaaucccacagauaccgggcauggaacagugguuaugcaggucaaggugagcaaaggcgccccgugccgcaucccugugaucgucgcugacgaccugaccgccgcuauuaacaaggggauccucgugacgguuaaucccauugccuccaccaacgaugacgaggugcugaucgaagucaauccucccuucggagauucuuacauuaucgugggccggggagacagcagacuuacauaucaguggcacaaagagggcuccagcaucggaaagcuguuuacccagacaaugaaaggcguugagcgccucgcggugaugggggauaccgccugggacuucucuuccgcuggaggcuuuuucacgagcgucgggaaggggauucauacaguguuuggcucugccuuccaagggcuguuuggcggacugaacuggaucaccaagguuauuaugggcgcugugcuuaucugggucgggauuaauacacggaacaugaccauguccaugagcaugauccucgugggagugauuaugauguuccugucccugggcgucggggccgaucagggaugugcgaucaauuuuggcaaaugaggacuagucccuguucccagagcccacuuuuuuuucuuuuuuugaaauaaaauagccugucuuucagaucuaaaaaaaaaaaaaaaaaaaaaaaaaaaaaaaaaaaaaaaaaaaaaaaaaaaaaaaaaaaaaaaaugcaucccccccccccccccccccccccccccccccaaaggcucuuuucagagccaccagaauu

SEQ ID NO: 571 - RNA, 2307 nt, Artificial Sequence
  mRNA product Design a-1 comprising derived and/or modified sequence from YFV__NC_002031.1__SS-prME (polyprotein: M,aa104-778) (opt5)
gggagagucccgcagucggcguccagcggcucugcuuguucgugugugugucguugcaggccuuauucaagcuuaccauggacgugcugaccguccaguuccucauccugggcaugcuucugaugacagggggaguuacgcucgugagaaagaaccgguggcugcuucugaaugugaccagcgaggaucucggcaaaacauuuuccgucgggaccggaaacugcacaaccaauauucuggaagccaaguacuggugucccgacucuauggaguauaacugcccuaaucugagcccgcgcgaagaacccgaugacaucgauuguuggugcuacggcguggaaaacguuagaguggcuuaugggaaaugugacuccgccggacggucucgcagaagccggcgcgcgauugaucucccuacacacgagaaucauggccugaagaccagacaagagaaauggaugacgggccggaugggggaacgccagcuucagaagaucgagagaugguucguccggaaccccuuuuucgcugugaccgcccugacaauugccuaccucguuggauccaauaugacccagcgcguggucaucgcucugcuugugcuggccgugggcccugcuuauucugcccacugcaucgggauuacagacagagauuuuaucgaaggaguccauggcgggaccuggguuagcgcgacgcucgagcaagacaagugugugacagugauggcccccgauaaaccuucccuggacauuagccuggagaccgucgcuaucgaucggccggccgaagugcgcaagguuugcuacaacgcugugcucacacacgucaaaauuaaugacaagugucccucuaccggagaggcccaucuggcggaagagaacgaaggcgacaaugccugcaaaagaaccuauuccgaucggggcugggggaacggauguggccuuuucgggaagggaagcaucguggcuugcgccaaguuuacaugcgcuaaaucuaugucccuguucgagguugaccagacgaagauucaguacgugaucagagcccagcuccacgucggcgccaaacaagagaauuggaacaccgauaucaagacacugaaauuugacgcucuuagcgggucucaggaaguggaguucauuggauacggcaaggcgacccuggaaugucagguccagacagccguggauuuuggcaacuccuauaucgcugagauggaaaccgagagcuggauuguugaccgccaaugggcccaggaucucacgcugccuuggcaguccgggucuggaggcguguggcgggagaugcaccaucuggucgaguucgagcccccucacgccgcuacaaucagagugcucgcccuggggaaucaagaaggaagccuuaaaaccgcgcugaccggcgcuaugcgcguuacaaaggacaccaacgauaauaaccucuacaagcugcaugggggccacguguccugccgggucaaacuuagcgcccugacacucaagggaacgucuuauaaaauuuguaccgacaagauguuuuucgugaaaaaucccacagauaccggccacgggacagugguuaugcaggucaagguguccaagggagccccgugcagaaucccugugaucgucgcugacgaccugaccgccgcuauuaacaaaggcauccuggugacgguuaaucccauugccagcaccaacgaugacgaggugcucaucgaagucaauccucccuucggggauucuuacauuaucgugggacgcggcgacagccggcugacauaucaguggcauaaggagggguccucuaucggcaaacuuuuuacccagacaaugaagggaguugagagacuggcggugaugggcgauaccgccugggacuucagcuccgcugggggauuuuucacgagcgucggcaaagggauucacacaguguuuggaucugccuuccaaggccucuuugggggccugaacuggaucaccaagguuauuaugggagcugugcugaucugggucggcauuaauacacgcaacaugaccauguccaugagcaugauccuugugggggugauuaugauguuccucucucugggagucggcgccugaggacuagucccuguucccagagcccacuuuuuuuucuuuuuuugaaauaaaauagccugucuuucagaucuaaaaaaaaaaaaaaaaaaaaaaaaaaaaaaaaaaaaaaaaaaaaaaaaaaaaaaaaaaaaaaaaugcaucccccccccccccccccccccccccccccccaaaggcucuuuucagagccaccagaauu

SEQ ID NO: 572 - RNA, 2334 nt, Artificial Sequence
  mRNA product Design a-1 comprising derived and/or modified sequence from YFV__NC_002031.1__SSIgE-prME-XX (polyprotein: aa122-788) (opt5)
gggagagucccgcagucggcguccagcggcucugcuuguucgugugugugucguugcaggccuuauucaagcuuaccauggacuggaccuggauccuguuccucguggccgcugccacaagaguccacagcguuacgcuggugcggaaaaaccgcuggcuucugcucaaugugaccagcgaggaucuggggaagacauuuuccgucggaaccggcaacugcacaaccaauauucuggaagccaaauacuggugucccgacucuauggaguauaacugcccuaaucucagcccgagagaagaacccgaugacaucgauuguuggugcuacgggguggaaaacguucggguggcuuauggaaagugugacuccgccggccgcucuagacggagccgcagagcgauugaucugccuacacaugagaaucacggccuuaaaacccggcaagagaaguggaugacggggcgcaugggagaaagacagcugcagaagaucgagcggugguucguccgcaaccccuuuuucgcugugaccgcccucacaauugccuaccugguuggcuccaauaugacccagagaguggucaucgcccuucuggugcucgcuguggggccugcuuauagcgcccauugcaucggaauuacagaccgggauuuuaucgaaggcguccacgggggaaccuggguuucugcgacgcuggagcaagacaaaugugugacagugauggcccccgauaagccuucccuggacauuagccucgagaccgucgcuaucgauagaccggccgaagugcgcaaaguuugcuacaacgcugugcugacacaugucaagauuaaugacaaaugucccucuaccggcgaggcccaccuugcggaagagaacgaaggcgacaaugccugcaagcggaccuauuccgauagaggguggggaaacggcugugggcuguucggaaagggcagcaucguggcuugcgccaaauuuacaugcgcuaagucuaugucccucuucgagguugaccagacgaaaauucaguacgugauccgcgcccagcugcacgucggggccaagcaagagaauuggaacaccgauaucaaaacacuuaaguuugacgcucugagcggaucccaggaaguggaguucauuggcuacggcaaagcgacccucgaaugucagguccagacagccguggauuuugggaacucuuauaucgcugagauggaaaccgagagcuggauuguugaccggcaaugggcccaggaucugacgcugccuuggcaguccggaagcggcgggguguggagagagaugcaucaccucgucgaguucgagcccccucaugccgcuacaauccgcgugcuggcccuuggaaaucaagaaggcucucugaagaccgcgcucaccggggcuaugcggguuacaaaggacaccaacgauaauaaccuguacaaacuucacggcggacacguguccugcagagucaagcugagcgcccucacacugaaaggcacgucuuauaagauuuguaccgacaaaauguuuuucgugaagaaucccacagauaccgggcauggaacagugguuaugcaggucaaggugagcaaaggcgccccgugccgcaucccugugaucgucgcugacgaccugaccgccgcuauuaacaaggggauccucgugacgguuaaucccauugccuccaccaacgaugacgaggugcugaucgaagucaauccucccuucggagauucuuacauuaucgugggccggggagacagcagacuuacauaucaguggcacaaagagggcuccagcaucggaaagcuguuuacccagacaaugaaaggcguugagcgccucgcggugaugggggauaccgccugggacuucucuuccgcuggaggcuuuuucacgagcgucgggaaggggauucauacaguguuuggcucugccuuccaagggcuguuuggcggacugaacuggaucaccaagguuauuaugggcgcugugcuuaucugggucgggauuaauacacggaacaugaccauguccaugagcaugauccucgugggagugauuaugauguuccugucccugggcgucggggccgaucagggaugugcgaucaauuuuggcaaaugaggacuagucccuguucccagagcccacuuuuuuuucuuuuuuugaaauaaaauagccugucuuucagaucuaaaaaaaaaaaaaaaaaaaaaaaaaaaaaaaaaaaaaaaaaaaaaaaaaaaaaaaaaaaaaaaaugcaucccccccccccccccccccccccccccccccaaaggcucuuuucagagccaccagaauu

SEQ ID NO: 573 - RNA, 2304 nt, Artificial Sequence
  mRNA product Design a-1 comprising derived and/or modified sequence from YFV__NC_002031.1__SSIgE-prME (polyprotein: aa122-778) (opt5)
gggagagucccgcagucggcguccagcggcucugcuuguucgugugugugucguugcaggccuuauucaagcuuaccauggacuggaccuggauccuguuccucguggccgcugccacaagaguccacagcgugacccuggucagaaagaaccgguggcuccugcuuaauguuacaagcgaggaccugggcaaaacguucuccguggggaccggaaacugcacaaccaauauccucgaagccaaguacuggugucccgauucuauggaguauaacugcccuaaucugagcccgcgcgaggaacccgacgauauugacuguuggugcuacggcguggaaaacgucagaguggcuuaugggaaaugugauuccgccggacggucucgcagaagccggcgcgcgaucgaccuuccuacacacgagaaucauggccugaagaccagacaggagaaauggaugacagggcggaugggagaacgccaacuccagaagauugagagaugguuuguucggaaccccuucuuugcugugaccgcccugacgaucgccuaccuggucggcuccaauaugacccagcgcgugguuauugcucuccuggugcuugccgucggcccugcuuauucugcccacugcaucgggaucacagauagagacuucauugaaggagugcauggcgggaccugggugagcgcgacacuggagcaggauaagugugucaccguuauggcccccgacaaaccuucccucgauaucagccuggagacgguggcuauugaccggccggccgaagugcgcaaggucugcuacaacgcugugcuuacacacguuaaaaucaaugauaagugucccucuaccggagaggcccaucuggcggaagagaacgaaggcgacaaugccugcaaaagaacauauuccgaccggggguggggaaacggcuguggccucuuugggaagggaagcauuguggcuugcgccaaguuuaccugcgcuaaaucuaugucccuguucgaggucgaucaaaccaagauccaguacgugauuagagcccagcugcacguuggcgccaaacaggagaauuggaacacagacaucaagacgcucaaauucgaugcucugagcgggucucaagaaguggaguuuaucggauacggcaaggcgacccuugaaugucagguccagacagccguggacuucgggaacuccuauauugcugagauggaaaccgagagcuggaucgucgaucgccagugggcccaagaccugacacucccuuggcaguccggaucuggcggcguguggcgggagaugcaccaucugguugaauuugagcccccucacgccgcuaccauuagagugcuugcccuggggaaucaggaaggaagccucaaaacggcgcugacaggcgcuaugcgcgucaccaaggauaccaacgacaauaaccuguacaagcuccaugggggacacguguccugccggguuaaacugagcgcccuuacacugaagggcaccucuuauaaaaucuguacagauaagauguucuuugugaaaaaucccacggacaccgggcacggcacagucgugaugcaagugaagguuuccaagggagccccgugccgcauuccugucaucguggcugaugaccucaccgccgcuaucaacaaaggcauucuggugacagucaaucccaucgccagcaccaacgacgaugaggugcuuauugaaguuaauccucccuucggggacucuuacaucauugugggaagaggcgauagccggcugacguaucaguggcauaaggagggguccucuaucggaaaacucuucacccagacaaugaagggcgucgagagacuggcggugaugggggacaccgccugggauuuuagcuccgcuggcggauucuuuacaagcguuggcaaagggauccacaccguguucggaucugccuuucagggccuguucgggggacucaacuggauuacgaaggucaucaugggcgcugugcugauuuggguugggaucaauacacgcaacaugaccauguccaugagcaugauucuugugggcgucaucaugauguuucugucucucggagugggcgccugaggacuagucccuguucccagagcccacuuuuuuuucuuuuuuugaaauaaaauagccugucuuucagaucuaaaaaaaaaaaaaaaaaaaaaaaaaaaaaaaaaaaaaaaaaaaaaaaaaaaaaaaaaaaaaaaaugcaucccccccccccccccccccccccccccccccaaaggcucuuuucagagccaccagaauu

SEQ ID NO: 574 - RNA, 2352 nt, Artificial Sequence
  mRNA product Design a-1 comprising derived and/or modified sequence from YFV__NC_002031.1__SSjev-prME-XX (polyprotein: aa122-788) (opt5)
gggagagucccgcagucggcguccagcggcucugcuuguucgugugugugucguugcaggccuuauucaagcuuaccaugggcaagagaagcgccggguccaucauguggcuggcuucucucgccguggucauugcgugcgcuggagccguuacgcuggugcggaaaaaccgcuggcuucugcucaaugugaccagcgaggaucuggggaagacauuuuccgucggaaccggcaacugcacaaccaauauucuggaagccaaauacuggugucccgacucuauggaguauaacugcccuaaucucagcccgagagaagaacccgaugacaucgauuguuggugcuacgggguggaaaacguucggguggcuuauggaaagugugacuccgccggccgcucuagacggagccgcagagcgauugaucugccuacacaugagaaucacggccuuaaaacccggcaagagaaguggaugacggggcgcaugggagaaagacagcugcagaagaucgagcggugguucguccgcaaccccuuuuucgcugugaccgcccucacaauugccuaccugguuggcuccaauaugacccagagaguggucaucgcccuucuggugcucgcuguggggccugcuuauagcgcccauugcaucggaauuacagaccgggauuuuaucgaaggcguccacgggggaaccuggguuucugcgacgcuggagcaagacaaaugugugacagugauggcccccgauaagccuucccuggacauuagccucgagaccgucgcuaucgauagaccggccgaagugcgcaaaguuugcuacaacgcugugcugacacaugucaagauuaaugacaaaugucccucuaccggcgaggcccaccuugcggaagagaacgaaggcgacaaugccugcaagcggaccuauuccgauagaggguggggaaacggcugugggcuguucggaaagggcagcaucguggcuugcgccaaauuuacaugcgcuaagucuaugucccucuucgagguugaccagacgaaaauucaguacgugauccgcgcccagcugcacgucggggccaagcaagagaauuggaacaccgauaucaaaacacuuaaguuugacgcucugagcggaucccaggaaguggaguucauuggcuacggcaaagcgacccucgaaugucagguccagacagccguggauuuugggaacucuuauaucgcugagauggaaaccgagagcuggauuguugaccggcaaugggcccaggaucugacgcugccuuggcaguccggaagcggcgggguguggagagagaugcaucaccucgucgaguucgagcccccucaugccgcuacaauccgcgugcuggcccuuggaaaucaagaaggcucucugaagaccgcgcucaccggggcuaugcggguuacaaaggacaccaacgauaauaaccuguacaaacuucacggcggacacguguccugcagagucaagcugagcgcccucacacugaaaggcacgucuuauaagauuuguaccgacaaaauguuuuucgugaagaaucccacagauaccgggcauggaacagugguuaugcaggucaaggugagcaaaggcgccccgugccgcaucccugugaucgucgcugacgaccugaccgccgcuauuaacaaggggauccucgugacgguuaaucccauugccuccaccaacgaugacgaggugcugaucgaagucaauccucccuucggagauucuuacauuaucgugggccggggagacagcagacuuacauaucaguggcacaaagagggcuccagcaucggaaagcuguuuacccagacaaugaaaggcguugagcgccucgcggugaugggggauaccgccugggacuucucuuccgcuggaggcuuuuucacgagcgucgggaaggggauucauacaguguuuggcucugccuuccaagggcuguuuggcggacugaacuggaucaccaagguuauuaugggcgcugugcuuaucugggucgggauuaauacacggaacaugaccauguccaugagcaugauccucgugggagugauuaugauguuccugucccugggcgucggggccgaucagggaugugcgaucaauuuuggcaaaugaggacuagucccuguucccagagcccacuuuuuuuucuuuuuuugaaauaaaauagccugucuuucagaucuaaaaaaaaaaaaaaaaaaaaaaaaaaaaaaaaaaaaaaaaaaaaaaaaaaaaaaaaaaaaaaaaugcaucccccccccccccccccccccccccccccccaaaggcucuuuucagagccaccagaauu

SEQ ID NO: 575 - RNA, 2322 nt, Artificial Sequence
  mRNA product Design a-1 comprising derived and/or modified sequence from YFV__NC_002031.1__SSjev-prME (polyprotein: aa122-778) (opt5)
gggagagucccgcagucggcguccagcggcucugcuuguucgugugugugucguugcaggccuuauucaagcuuaccaugggcaagagaagcgccggguccaucauguggcuggcuucucucgccguggucauugcgugcgcuggagccgugacccuggucagaaagaaccgguggcuccugcuuaauguuacaagcgaggaccugggcaaaacguucuccguggggaccggaaacugcacaaccaauauccucgaagccaaguacuggugucccgauucuauggaguauaacugcccuaaucugagcccgcgcgaggaacccgacgauauugacuguuggugcuacggcguggaaaacgucagaguggcuuaugggaaaugugauuccgccggacggucucgcagaagccggcgcgcgaucgaccuuccuacacacgagaaucauggccugaagaccagacaggagaaauggaugacagggcggaugggagaacgccaacuccagaagauugagagaugguuuguucggaaccccuucuuugcugugaccgcccugacgaucgccuaccuggucggcuccaauaugacccagcgcgugguuauugcucuccuggugcuugccgucggcccugcuuauucugcccacugcaucgggaucacagauagagacuucauugaaggagugcauggcgggaccugggugagcgcgacacuggagcaggauaagugugucaccguuauggcccccgacaaaccuucccucgauaucagccuggagacgguggcuauugaccggccggccgaagugcgcaaggucugcuacaacgcugugcuuacacacguuaaaaucaaugauaagugucccucuaccggagaggcccaucuggcggaagagaacgaaggcgacaaugccugcaaaagaacauauuccgaccggggguggggaaacggcuguggccucuuugggaagggaagcauuguggcuugcgccaaguuuaccugcgcuaaaucuaugucccuguucgaggucgaucaaaccaagauccaguacgugauuagagcccagcugcacguuggcgccaaacaggagaauuggaacacagacaucaagacgcucaaauucgaugcucugagcgggucucaagaaguggaguuuaucggauacggcaaggcgacccuugaaugucagguccagacagccguggacuucgggaacuccuauauugcugagauggaaaccgagagcuggaucgucgaucgccagugggcccaagaccugacacucccuuggcaguccggaucuggcggcguguggcgggagaugcaccaucugguugaauuugagcccccucacgccgcuaccauuagagugcuugcccuggggaaucaggaaggaagccucaaaacggcgcugacaggcgcuaugcgcgucaccaaggauaccaacgacaauaaccuguacaagcuccaugggggacacguguccugccggguuaaacugagcgcccuuacacugaagggcaccucuuauaaaaucuguacagauaagauguucuuugugaaaaaucccacggacaccgggcacggcacagucgugaugcaagugaagguuuccaagggagccccgugccgcauuccugucaucguggcugaugaccucaccgccgcuaucaacaaaggcauucuggugacagucaaucccaucgccagcaccaacgacgaugaggugcuuauugaaguuaauccucccuucggggacucuuacaucauugugggaagaggcgauagccggcugacguaucaguggcauaaggagggguccucuaucggaaaacucuucacccagacaaugaagggcgucgagagacuggcggugaugggggacaccgccugggauuuuagcuccgcuggcggauucuuuacaagcguuggcaaagggauccacaccguguucggaucugccuuucagggccuguucgggggacucaacuggauuacgaaggucaucaugggcgcugugcugauuuggguugggaucaauacacgcaacaugaccauguccaugagcaugauucuugugggcgucaucaugauguuucugucucucggagugggcgccugaggacuagucccuguucccagagcccacuuuuuuuucuuuuuuugaaauaaaauagccugucuuucagaucuaaaaaaaaaaaaaaaaaaaaaaaaaaaaaaaaaaaaaaaaaaaaaaaaaaaaaaaaaaaaaaaaugcaucccccccccccccccccccccccccccccccaaaggcucuuuucagagccaccagaauu

SEQ ID NO: 576 - RNA, 2370 nt, Artificial Sequence
  mRNA product Design a-1 comprising derived and/or modified sequence from YFV__NC_002031.1__X-SS-prME-XX (polyprotein: aa92-788) (opt6)
gggagagucccgcagucggcguccagcggcucugcuuguucgugugugugucguugcaggccuuauucaagcuuaccaugagaggauuaucaaguagaaaaagaagaucacaugauguacuaaccgugcaauuuuugaucuuagggaugcucuuaaugacaggagguguuacauuaguaagaaagaaucgauggcugcuuuuaaaugugacaucagaggauuuagggaaaacauuuucgguaggaacaggaaauuguacuacaaauauacuugaagcaaaauauuggugcccagacucuauggaauauaauuguccaaauuuaaguccuagagaagaaccugacgauauagauuguugguguuaugguguagaaaauguaagaguagcauacggcaaaugcgauagugcaggacguucuagacguucaaggagagccauagaucugcccacucacgaaaaucacggauugaaaacacgacaagaaaaauggaugacugggcgaaugggagaaagacaacuacagaaaauugaaagaugguucguuagaaauccauucuuugccguaacagcuuuaacaauagccuauuuaguagguaguaauaugacacaaagaguaguaauagcauugcuaguguuagcaguuggaccagcuuauagugcacauugcauaggaauaacagauagagacuuuauagaaggaguacacgggggaacuuggguaagugccacuuuagaacaagauaaauguguuacagugauggcgccagauaaaccaagucuggacauaaguuuggaaacaguagcgauugauagacccgcagaaguaagaaaaguuuguuauaaugcuguucuaacccauguuaaaauaaaugauaaaugcccuagcaccggagaagcccaucuagcagaagaaaaugaaggagauaacgcauguaaacgaacauacucagauagaggauggggcaacggauguggcuuguuuggaaaagguagcauaguagcaugcgcuaaauuuacaugcgcaaagucaaugucauuauuugaaguagaucaaacaaaaauacaauauguaauaagagcucaauuacacgugggugcaaaacaagaaaauuggaauacagacauaaagacacuaaaguucgacgcauuaaguggaucacaagagguagaauuuauaggguacggaaaagcgacuuuagagugucaaguccaaacagcaguagauuucgguaacucauacauagcagaaauggaaacugaaaguuggauaguagauagacaaugggcacaagacuugacacuaccuuggcaaucaggaagcggaggaguauggagagaaaugcaucauuuaguagaauuugaaccaccucaugcagcaacaauaagaguauuagcccuaggaaaccaagaaggaaguuuaaaaacagcacuaacaggagcuaugagaguaacaaaagauacaaaugacaacaaucuauacaaauuacacggaggacauguaagcugccggguaaaguugagcgcacuaacauuaaaaggaacgaguuauaaaauaugcacagauaaaauguucuuuguuaaaaauccuacagauaccggucauggaacaguaguaaugcaaguaaaaguaaguaaaggcgcucccuguagaauaccuguaauagucgcagacgauuuaaccgcagcaauaaauaaaggaauauuagucacgguaaacccaauagcgucaacaaaugaugaugaaguauuaauagaaguuaacccaccuuuuggagacaguuauauaauagucggaaggggugauaguagacuaacauaccaauggcauaaagaaggaagcucaauaggaaaauuauuuacucaaaccaugaaagguguagaaaggcuagcuguuaugggugacacagcaugggauuuuucaagcgcaggaggguucuuuacaucaguagguaaaggaauacauacaguauuuggaagugcauuucaaggauuauuuggugguuuaaauuggauaacaaaaguaauaaugggcgcaguuuuaauauggguagguauaaacacaagaaauaugacaaugucuaugaguaugauauuggucggaguaauaaugauguuuuuaucacuaggagugggugcagaucaagguugcgcuauuaauuuuggaaaaugaggacuagucccuguucccagagcccacuuuuuuuucuuuuuuugaaauaaaauagccugucuuucagaucuaaaaaaaaaaaaaaaaaaaaaaaaaaaaaaaaaaaaaaaaaaaaaaaaaaaaaaaaaaaaaaaaugcaucccccccccccccccccccccccccccccccaaaggcucuuuucagagccaccagaauu

SEQ ID NO: 577 - RNA, 2307 nt, Artificial Sequence
  mRNA product Design a-1 comprising derived and/or modified sequence from YFV__NC_002031.1__SS-prME (polyprotein: M,aa104-778) (opt6)
gggagagucccgcagucggcguccagcggcucugcuuguucgugugugugucguugcaggccuuauucaagcuuaccauggauguucuaacaguacaauuuuuaauauuagggauguuauuaaugacaggaggcguaacauuaguacgaaagaaucgauggcuauuacuaaacguuacgucugaagauuuaggaaaaacauuuagcguaggaacaggaaauugcaccacgaauaucuuagaagcaaaauauugguguccagauaguauggaauacaauuguccaaauuuaaguccuagagaggaacccgacgauauagauugcugguguuacggaguggaaaauguaagaguagcauauggaaaaugugacagcgcagguagaaguagaagaucacgacgagcaauugaucuacccacucaugagaaccauggacuaaaaacaagacaagaaaaauggaugacagguagaaugggcgaaagacaauuacagaaaauagaaagaugguuuguacgaaauccuuucuuugcugucacugcauuaacuauagcuuauuuaguaggaaguaacaugacucaaagaguaguaauagcacuauuaguacuagcaguaggaccagcuuacagugcacacuguauagggauaacggauagagauuuuauagaaggaguacauggggguacaugggugucugccacuuuagaacaagacaaauguguuacaguuauggccccagauaaacccucuuuagacauaucauuagaaacuguagcaauagauagaccggcggaagugagaaagguauguuauaaugcaguacuaacccauguaaaaauuaaugacaaaugcccaucaacaggagaggcucaucuagcugaagaaaaugaaggagacaaugcuugcaaacguacauauucagacaggggguggggaaauggauguggauuauuugguaaagggucaauaguagcaugugcaaaauuuacaugcgcaaaaaguaugagcuuauuugaaguagaucaaacaaaaauccaauauguaauuagagcucaacuucacguaggagcaaaacaagagaauuggaacacagauauaaaaacauuaaaauuugacgcuuugucuggaagucaagaagucgaauuuauuggcuauggaaaggcaacauuagaaugccaaguucaaaccgcaguagauuuuggaaauucauacauagcagaaauggagacugaaaguuggauaguagauagacagugggcucaagaccuaacuuuaccauggcaaucaggaaguggugguguauggagagaaaugcaucauuuaguagaauuugaaccaccacaugcagcaacaauuagaguacuagcauuaggaaaucaagaagguaguuuaaagacagcgcuuaccggagcaaugagaguuacaaaagauacuaaugacaauaauuuauauaaacuucauggaggacauguuagcuguagagucaaauuaagugcauuaacacucaaaggaacaucauacaaaauauguacagauaaaauguuuuucgucaagaauccaacagauacaggacauggaacaguuguaaugcaaguaaaaguaucaaaaggagcaccuugcagaauaccaguaauaguagcagaugauuuaacagccgcaauuaauaaagggauauuaguaacaguaaacccuauagcaaguacaaaugaugaugaagucuugauagaaguaaauccaccauuuggagauucguauauaauagucggaagaggagauagucgauuaacauaucaauggcauaaagaagguucaucaauaggaaaauuauuuacacaaaccaugaaaggaguugaaagauuagcuguaaugggggacacagcuugggauuuuucuagcgcaggaggauucuuuacauccguaggaaaagguauacacacaguauuuggcucagcauuccaaggguuauuuggugguuuaaauuggauaacaaaagugauuaugggagcagugcuaaucuggguaggaauaaauacaagaaauaugacaaugaguaugagcaugauucucguaggaguaauaaugauguuccuuaguuugggaguuggcgcuugaggacuagucccuguucccagagcccacuuuuuuuucuuuuuuugaaauaaaauagccugucuuucagaucuaaaaaaaaaaaaaaaaaaaaaaaaaaaaaaaaaaaaaaaaaaaaaaaaaaaaaaaaaaaaaaaaugcaucccccccccccccccccccccccccccccccaaaggcucuuuucagagccaccagaauu

SEQ ID NO: 578 - RNA, 2334 nt, Artificial Sequence
  mRNA product Design a-1 comprising derived and/or modified sequence from YFV__NC_002031.1__SSIgE-prME-XX (polyprotein: aa122-788) (opt6)
gggagagucccgcagucggcguccagcggcucugcuuguucgugugugugucguugcaggccuuauucaagcuuaccauggacuggacauggauauuauuuuuaguagcagcagcaacaagaguacauucaguuacauuaguaagaaagaaucgauggcugcuuuuaaaugugacaucagaggauuuagggaaaacauuuucgguaggaacaggaaauuguacuacaaauauacuugaagcaaaauauuggugcccagacucuauggaauauaauuguccaaauuuaaguccuagagaagaaccugacgauauagauuguugguguuaugguguagaaaauguaagaguagcauacggcaaaugcgauagugcaggacguucuagacguucaaggagagccauagaucugcccacucacgaaaaucacggauugaaaacacgacaagaaaaauggaugacugggcgaaugggagaaagacaacuacagaaaauugaaagaugguucguuagaaauccauucuuugccguaacagcuuuaacaauagccuauuuaguagguaguaauaugacacaaagaguaguaauagcauugcuaguguuagcaguuggaccagcuuauagugcacauugcauaggaauaacagauagagacuuuauagaaggaguacacgggggaacuuggguaagugccacuuuagaacaagauaaauguguuacagugauggcgccagauaaaccaagucuggacauaaguuuggaaacaguagcgauugauagacccgcagaaguaagaaaaguuuguuauaaugcuguucuaacccauguuaaaauaaaugauaaaugcccuagcaccggagaagcccaucuagcagaagaaaaugaaggagauaacgcauguaaacgaacauacucagauagaggauggggcaacggauguggcuuguuuggaaaagguagcauaguagcaugcgcuaaauuuacaugcgcaaagucaaugucauuauuugaaguagaucaaacaaaaauacaauauguaauaagagcucaauuacacgugggugcaaaacaagaaaauuggaauacagacauaaagacacuaaaguucgacgcauuaaguggaucacaagagguagaauuuauaggguacggaaaagcgacuuuagagugucaaguccaaacagcaguagauuucgguaacucauacauagcagaaauggaaacugaaaguuggauaguagauagacaaugggcacaagacuugacacuaccuuggcaaucaggaagcggaggaguauggagagaaaugcaucauuuaguagaauuugaaccaccucaugcagcaacaauaagaguauuagcccuaggaaaccaagaaggaaguuuaaaaacagcacuaacaggagcuaugagaguaacaaaagauacaaaugacaacaaucuauacaaauuacacggaggacauguaagcugccggguaaaguugagcgcacuaacauuaaaaggaacgaguuauaaaauaugcacagauaaaauguucuuuguuaaaaauccuacagauaccggucauggaacaguaguaaugcaaguaaaaguaaguaaaggcgcucccuguagaauaccuguaauagucgcagacgauuuaaccgcagcaauaaauaaaggaauauuagucacgguaaacccaauagcgucaacaaaugaugaugaaguauuaauagaaguuaacccaccuuuuggagacaguuauauaauagucggaaggggugauaguagacuaacauaccaauggcauaaagaaggaagcucaauaggaaaauuauuuacucaaaccaugaaagguguagaaaggcuagcuguuaugggugacacagcaugggauuuuucaagcgcaggaggguucuuuacaucaguagguaaaggaauacauacaguauuuggaagugcauuucaaggauuauuuggugguuuaaauuggauaacaaaaguaauaaugggcgcaguuuuaauauggguagguauaaacacaagaaauaugacaaugucuaugaguaugauauuggucggaguaauaaugauguuuuuaucacuaggagugggugcagaucaagguugcgcuauuaauuuuggaaaaugaggacuagucccuguucccagagcccacuuuuuuuucuuuuuuugaaauaaaauagccugucuuucagaucuaaaaaaaaaaaaaaaaaaaaaaaaaaaaaaaaaaaaaaaaaaaaaaaaaaaaaaaaaaaaaaaaugcaucccccccccccccccccccccccccccccccaaaggcucuuuucagagccaccagaauu

SEQ ID NO: 579 - RNA, 2304 nt, Artificial Sequence
  mRNA product Design a-1 comprising derived and/or modified sequence from YFV__NC_002031.1__SSIgE-prME (polyprotein: aa122-778) (opt6)
gggagagucccgcagucggcguccagcggcucugcuuguucgugugugugucguugcaggccuuauucaagcuuaccauggacuggacauggauauuauuuuuaguagcagcagcaacaagaguacauucaguaacauuagucagaaagaacagaugguuauuacugaacguaacaagugaagacuuaggaaaaacauuuaguguaggcacaggaaauugcacaacaaauauacuugaagcaaaauauugguguccagauagcauggaauauaauuguccaaauuuaucaccuagagaggaacccgaugauauagauuguugguguuauggaguugaaaacgugcgaguagcauaugguaaaugugauagcgcaggaagaaguagaagaaguagaagggcaauagacuuaccaacucaugaaaaccauggauuaaaaacaagacaggaaaaauggaugacaggaagaaugggagaacgacaauuacagaaaauagaaagaugguucguaagaaauccauucuuugcaguaacagcauuaacaauagcauaucuaguuggaaguaacaugacucaaagaguaguaauagcauuguuaguacuagcaguaggaccggcuuauagcgcacauuguauagggauaacagauagagacuuuauagaaggagugcacgguggaacauggguuucagcaacgcuagagcaagauaaauguguaacgguaauggcgccggauaaaccaagccuugacauaucacuagaaacgguugcaaucgaucgaccagccgaaguaagaaaaguaugcuauaaugcggucuuaacacacguaaaaauaaaugauaaauguccuucaacgggagaagcacauuuagcagaagaaaacgaaggagacaacgcguguaaaagaacauauucagauaggggcuggggaaacggcugcgguuuauuuggaaaaggaaguauaguagcaugcgcaaaauuuacuugcgcaaaaaguaugaguuuauucgaaguugaucaaacaaagauacaauauguaauacgagcacaauuacauguaggugcaaagcaagaaaauuggaauacagacauaaaaacauugaaauuugacgcuuugaguggaucacaagaaguagaauuuauaggauacggaaaagcuacauuagaaugucaaguacaaacugcaguagauuuuggaaauucguauauagcagaaauggaaacugaaucauggauuguagauaggcaaugggcacaagauuuaaccuugccauggcaaagcggaagcggggguguauggcgggaaaugcaucauuuaguagaguucgaacccccacacgcggcuaccauaagaguacuagcauuaggaaaucaagaagggagucucaagacagcacucacaggugcaaugcgaguaacgaaagauacaaaugacaauaaucuauacaaacuacacggaggacauguaucuugcagaguaaaauuaucugcauuaacacuaaaagggacaaguuacaaaauuuguacagauaagauguucuuugucaaaaacccaacagacacgggacacggaacgguagucaugcaaguuaaaguaagcaaaggagcgccaugcagaauaccaguaaucgucgcagaugauuuaacagccgcaauaaauaaagguauauuaguaacgguaaauccaauagcgaguaccaaugaugaugaaguacuaauagaagugaacccaccauuuggugauagcuauauaauaguagggcgaggagauucaagauuaacauaucaauggcauaaagaagguaguaguauaggaaaauuauuuacacaaacuaugaaaggcguagaaagacuagcagucaugggagauacagcaugggauuucucaagugcaggcggauuuuucacaagcgucggaaaaggaauacauacaguguuugguagugcguuucaaggauuauucggaggacuaaauuggauaacgaaaguaauuaugggagcaguucucauaugggucggaauaaauacaaggaacaugacuaugaguaugagcaugauccuaguaggaguaauaaugauguuucuaagccuaggcguuggugcaugaggacuagucccuguucccagagcccacuuuuuuuucuuuuuuugaaauaaaauagccugucuuucagaucuaaaaaaaaaaaaaaaaaaaaaaaaaaaaaaaaaaaaaaaaaaaaaaaaaaaaaaaaaaaaaaaaugcaucccccccccccccccccccccccccccccccaaaggcucuuuucagagccaccagaauu

SEQ ID NO: 580 - RNA, 2352 nt, Artificial Sequence
  mRNA product Design a-1 comprising derived and/or modified sequence from YFV__NC_002031.1__SSjev-prME-XX (polyprotein: aa122-788) (opt6)
gggagagucccgcagucggcguccagcggcucugcuuguucgugugugugucguugcaggccuuauucaagcuuaccaugggaaaaagaagugcaggaaguauaaugugguuggcaaguuuagcaguaguaauagcaugugcaggagcaguuacauuaguaagaaagaaucgauggcugcuuuuaaaugugacaucagaggauuuagggaaaacauuuucgguaggaacaggaaauuguacuacaaauauacuugaagcaaaauauuggugcccagacucuauggaauauaauuguccaaauuuaaguccuagagaagaaccugacgauauagauuguugguguuaugguguagaaaauguaagaguagcauacggcaaaugcgauagugcaggacguucuagacguucaaggagagccauagaucugcccacucacgaaaaucacggauugaaaacacgacaagaaaaauggaugacugggcgaaugggagaaagacaacuacagaaaauugaaagaugguucguuagaaauccauucuuugccguaacagcuuuaacaauagccuauuuaguagguaguaauaugacacaaagaguaguaauagcauugcuaguguuagcaguuggaccagcuuauagugcacauugcauaggaauaacagauagagacuuuauagaaggaguacacgggggaacuuggguaagugccacuuuagaacaagauaaauguguuacagugauggcgccagauaaaccaagucuggacauaaguuuggaaacaguagcgauugauagacccgcagaaguaagaaaaguuuguuauaaugcuguucuaacccauguuaaaauaaaugauaaaugcccuagcaccggagaagcccaucuagcagaagaaaaugaaggagauaacgcauguaaacgaacauacucagauagaggauggggcaacggauguggcuuguuuggaaaagguagcauaguagcaugcgcuaaauuuacaugcgcaaagucaaugucauuauuugaaguagaucaaacaaaaauacaauauguaauaagagcucaauuacacgugggugcaaaacaagaaaauuggaauacagacauaaagacacuaaaguucgacgcauuaaguggaucacaagagguagaauuuauaggguacggaaaagcgacuuuagagugucaaguccaaacagcaguagauuucgguaacucauacauagcagaaauggaaacugaaaguuggauaguagauagacaaugggcacaagacuugacacuaccuuggcaaucaggaagcggaggaguauggagagaaaugcaucauuuaguagaauuugaaccaccucaugcagcaacaauaagaguauuagcccuaggaaaccaagaaggaaguuuaaaaacagcacuaacaggagcuaugagaguaacaaaagauacaaaugacaacaaucuauacaaauuacacggaggacauguaagcugccggguaaaguugagcgcacuaacauuaaaaggaacgaguuauaaaauaugcacagauaaaauguucuuuguuaaaaauccuacagauaccggucauggaacaguaguaaugcaaguaaaaguaaguaaaggcgcucccuguagaauaccuguaauagucgcagacgauuuaaccgcagcaauaaauaaaggaauauuagucacgguaaacccaauagcgucaacaaaugaugaugaaguauuaauagaaguuaacccaccuuuuggagacaguuauauaauagucggaaggggugauaguagacuaacauaccaauggcauaaagaaggaagcucaauaggaaaauuauuuacucaaaccaugaaagguguagaaaggcuagcuguuaugggugacacagcaugggauuuuucaagcgcaggaggguucuuuacaucaguagguaaaggaauacauacaguauuuggaagugcauuucaaggauuauuuggugguuuaaauuggauaacaaaaguaauaaugggcgcaguuuuaauauggguagguauaaacacaagaaauaugacaaugucuaugaguaugauauuggucggaguaauaaugauguuuuuaucacuaggagugggugcagaucaagguugcgcuauuaauuuuggaaaaugaggacuagucccuguucccagagcccacuuuuuuuucuuuuuuugaaauaaaauagccugucuuucagaucuaaaaaaaaaaaaaaaaaaaaaaaaaaaaaaaaaaaaaaaaaaaaaaaaaaaaaaaaaaaaaaaaugcaucccccccccccccccccccccccccccccccaaaggcucuuuucagagccaccagaauu

SEQ ID NO: 581 - RNA, 2322 nt, Artificial Sequence
  mRNA product Design a-1 comprising derived and/or modified sequence from YFV__NC_002031.1__SSjev-prME (polyprotein: aa122-778) (opt6)
gggagagucccgcagucggcguccagcggcucugcuuguucgugugugugucguugcaggccuuauucaagcuuaccaugggaaaaagaagugcaggaaguauaaugugguuggcaaguuuagcaguaguaauagcaugugcaggagcaguaacauuagucagaaagaacagaugguuauuacugaacguaacaagugaagacuuaggaaaaacauuuaguguaggcacaggaaauugcacaacaaauauacuugaagcaaaauauugguguccagauagcauggaauauaauuguccaaauuuaucaccuagagaggaacccgaugauauagauuguugguguuauggaguugaaaacgugcgaguagcauaugguaaaugugauagcgcaggaagaaguagaagaaguagaagggcaauagacuuaccaacucaugaaaaccauggauuaaaaacaagacaggaaaaauggaugacaggaagaaugggagaacgacaauuacagaaaauagaaagaugguucguaagaaauccauucuuugcaguaacagcauuaacaauagcauaucuaguuggaaguaacaugacucaaagaguaguaauagcauuguuaguacuagcaguaggaccggcuuauagcgcacauuguauagggauaacagauagagacuuuauagaaggagugcacgguggaacauggguuucagcaacgcuagagcaagauaaauguguaacgguaauggcgccggauaaaccaagccuugacauaucacuagaaacgguugcaaucgaucgaccagccgaaguaagaaaaguaugcuauaaugcggucuuaacacacguaaaaauaaaugauaaauguccuucaacgggagaagcacauuuagcagaagaaaacgaaggagacaacgcguguaaaagaacauauucagauaggggcuggggaaacggcugcgguuuauuuggaaaaggaaguauaguagcaugcgcaaaauuuacuugcgcaaaaaguaugaguuuauucgaaguugaucaaacaaagauacaauauguaauacgagcacaauuacauguaggugcaaagcaagaaaauuggaauacagacauaaaaacauugaaauuugacgcuuugaguggaucacaagaaguagaauuuauaggauacggaaaagcuacauuagaaugucaaguacaaacugcaguagauuuuggaaauucguauauagcagaaauggaaacugaaucauggauuguagauaggcaaugggcacaagauuuaaccuugccauggcaaagcggaagcggggguguauggcgggaaaugcaucauuuaguagaguucgaacccccacacgcggcuaccauaagaguacuagcauuaggaaaucaagaagggagucucaagacagcacucacaggugcaaugcgaguaacgaaagauacaaaugacaauaaucuauacaaacuacacggaggacauguaucuugcagaguaaaauuaucugcauuaacacuaaaagggacaaguuacaaaauuuguacagauaagauguucuuugucaaaaacccaacagacacgggacacggaacgguagucaugcaaguuaaaguaagcaaaggagcgccaugcagaauaccaguaaucgucgcagaugauuuaacagccgcaauaaauaaagguauauuaguaacgguaaauccaauagcgaguaccaaugaugaugaaguacuaauagaagugaacccaccauuuggugauagcuauauaauaguagggcgaggagauucaagauuaacauaucaauggcauaaagaagguaguaguauaggaaaauuauuuacacaaacuaugaaaggcguagaaagacuagcagucaugggagauacagcaugggauuucucaagugcaggcggauuuuucacaagcgucggaaaaggaauacauacaguguuugguagugcguuucaaggauuauucggaggacuaaauuggauaacgaaaguaauuaugggagcaguucucauaugggucggaauaaauacaaggaacaugacuaugaguaugagcaugauccuaguaggaguaauaaugauguuucuaagccuaggcguuggugcaugaggacuagucccuguucccagagcccacuuuuuuuucuuuuuuugaaauaaaauagccugucuuucagaucuaaaaaaaaaaaaaaaaaaaaaaaaaaaaaaaaaaaaaaaaaaaaaaaaaaaaaaaaaaaaaaaaugcaucccccccccccccccccccccccccccccccaaaggcucuuuucagagccaccagaauu

SEQ ID NO: 582 - RNA, 2370 nt, Artificial Sequence
  mRNA product Design a-1 comprising derived and/or modified sequence from YFV__NC_002031.1__X-SS-prME-XX (polyprotein: aa92-788) (opt11)
gggagagucccgcagucggcguccagcggcucugcuuguucgugugugugucguugcaggccuuauucaagcuuaccaugcggggacuaagcagcagaaaaagacgcagccacgaugugcucaccgugcaauuccucauacuggggaugcuccuaaugaccggaggcgugacccuaguaaggaaaaacagauggcuacuacuaaacguaaccucagaagaucuaggaaagacauuuucagucggcacaggcaacugcacaaccaacauacuagaagcaaaauauuggugcccagacagcauggaauacaacugucccaaccucagcccaagagaggaaccagacgacauagacugcugguguuacggaguagaaaacguaagaguggcauacggcaaaugcgacagcgcaggcaggagccgaagaucccgcagagccaucgacuugcccacgcacgaaaaccacggccucaaaacacgacaagaaaaauggaugacagggcgaaugggagaacgacagcuccagaaaauagaacgaugguucguccggaacccguucuucgcaguaacggcacuaacaaucgcauaccucguaggcagcaacaugacacaaagaguggucaucgcgcuacucguacuagcaguggggcccgcauacagugcacacugcauaggaaucacagaccgugacuucaucgaaggcguacacggaggaacguggguaagcgcgacacuggaacaagacaaaugcgugacaguaauggcaccagacaaaccaagccuagacauaucccuagaaacggucgccaucgaccgucccgcagaaguacgaaagguaugcuauaaugcaguccucacacacgucaaaauaaacgacaaaugccccagcacgggcgaagcacaccucgccgaagaaaacgaaggggauaacgcgugcaaacgcaccuacuccgacaggggauggggcaacggaugcggacuguucggaaaaggauccauagucgcaugcgcaaaauuuaccugcgcaaaaagcaugagcuuguucgagguagaccaaacgaagauccaauacguaauccgagcucaacuacacguuggggccaagcaagagaacuggaauacggacaucaaaacacuaaaauucgacgcacucuccggcucacaagaagucgaguucaucggcuacggcaaagcaacacuagaaugccaaguacaaacagcgguggacuucggcaacagcuacauagcagaaauggaaacagaaagcuggauaguagaccgacaaugggcacaagaccuaacucugccauggcaaagcggcucaggaggaguguggagagagaugcaccaccugguagaguucgaacccccacacgcagcaacaauaaggguacuggcacuaggcaaccaagaaggcagccuaaaaaccgcacucacaggagccaugcgcgugacgaaggacaccaacgacaacaaccucuacaaacuccacggagggcacguauccugccgcguaaaacuaucagcacuaacgcuaaaaggaacaagcuacaaaauaugcacagacaaaauguucuucgucaaaaaccccacagacacaggccacggcacagucguaaugcaagugaaggucagcaagggggcccccugccgaaucccagucauaguggcagacgaccucacggccgccaucaacaaagggauccugguaacagugaacccaauagcaucgaccaacgacgacgaaguccucauagaagugaaucccccguucggcgacagcuacaucaucguaggacgcggcgacucccgacugacguaccaauggcauaaagaaggcagcagcauuggaaaacuauucacccaaaccaugaagggcgucgaaagacucgcggugaugggagacaccgcaugggacuucucgagcgcaggcggcuucuucacaagcguaggaaaagggauucacacaguauucggauccgcauuccaaggccucuucgggggacuaaacuggauaacgaaaguaauaaugggagcaguucucauauggguaggaaucaacacacgaaacaugacaauguccaugucaaugauacucguaggcguaaucaugauguuucugucacucggagugggagcagaccaagguugcgccauaaacuucggcaagugaggacuagucccuguucccagagcccacuuuuuuuucuuuuuuugaaauaaaauagccugucuuucagaucuaaaaaaaaaaaaaaaaaaaaaaaaaaaaaaaaaaaaaaaaaaaaaaaaaaaaaaaaaaaaaaaaugcaucccccccccccccccccccccccccccccccaaaggcucuuuucagagccaccagaauu

SEQ ID NO: 583 - RNA, 2307 nt, Artificial Sequence
  mRNA product Design a-1 comprising derived and/or modified sequence from YFV__NC_002031.1__SS-prME (polyprotein: M,aa104-778) (opt11)
gggagagucccgcagucggcguccagcggcucugcuuguucgugugugugucguugcaggccuuauucaagcuuaccauggacguccuuacgguacaauuccuaauacuaggaaugcuucucaugaccgggggcgucacccuaguccggaaaaacagauggcuacugcuaaauguuacaagcgaagaccuuggcaagacauucagcguaggcacgggcaacuguacaaccaacauacuagaagcgaaauacuggugcccagacuccauggaguacaacugccccaaccuaagcccacgggaagaacccgacgacauagacugcugguguuacggggucgaaaacguccgcgucgcauacgggaaaugcgauagcgcaggccgcaguagacgcucccgccgcgccauagaccuaccaacgcacgagaaccacggccucaaaacucgccaagaaaaauggaugacagggcgaaugggugaacgccaacuacagaagaucgaaaggugguucgucaggaacccauucuucgcagugaccgcacuaacgauagccuaccuagugggaucaaacaugacgcaacgagucgugaucgcacuccuaguacuggccguaggaccggccuacuccgcgcacugcaucggcauaacggauagggacuucauugaaggaguacauggcggcacgugggucagcgcgacacucgaacaagacaaaugcguaaccgugauggcacccgacaaaccgagucuugacauaagccuggaaacgguagcgauagaucguccagccgaaguaagaaaaguaugcuacaacgcaguccuaacacacguaaaaauaaacgacaaaugcccaagcacaggggaagcccaccucgcagaagagaacgaaggcgacaacgcaugcaaacgcacauacuccgacaggggaugggggaauggcugcggacuauucgggaaaggaagcaucgucgcgugcgccaaauucacaugcgccaagagcaugagccuguucgaagucgaccaaacaaaaauccaauacguaauacgcgcgcaacugcacguaggagcgaaacaggaaaacuggaacacggacauuaaaacccucaaauucgacgcgcucucaggaucacaagaagucgaguucaucggcuacggcaaggcaacgcucgaaugccaaguacaaacagcaguagacuucggaaacagcuacauugccgagauggaaaccgagagcuggauagucgacagacaaugggcccaagaccuaacccugccauggcaaucaggcuccgggggcgucuggcgagagaugcaccaccuaguagaguucgaaccaccccacgccgccacgaucagaguacuggcccugggcaaccaagaaggcucacucaagacggcgcucacaggagcaaugagggucacgaaagacaccaacgacaacaaccucuacaaacuacacggagggcacgugagcugccggguaaaacugagcgcacucacucugaagggaacaagcuacaagauaugcaccgacaaaauguucuucgugaaaaacccaaccgacacuggacacggcacggucguuaugcaagucaagguaucaaaaggagccccaugcagaaucccaguaauaguagcggacgaccuaacagccgccauaaacaaaggaauccuagucacgguaaauccgauagcaucgaccaacgacgacgaaguacuaauagaagugaacccaccauucggcgacagcuacauaauagucgggagaggcgacucgcgacuaaccuaccaauggcacaaggaagggagcucuaucgggaaacuauucacccaaacgaugaagggcguagaaaggcucgcagucaugggcgacaccgcaugggacuucuccagcgcgggaggcuucuuuacuucagugggaaaagggauacacaccgucuucggcagcgcauuccagggccuauucggcggguuaaacuggaucacgaaagugauaaugggggcaguucucaucugggucggaauaaacacacguaacaugaccaugagcaugagcaugauccuagucggggucauaaugauguucuugagcuugggaguaggugcaugaggacuagucccuguucccagagcccacuuuuuuuucuuuuuuugaaauaaaauagccugucuuucagaucuaaaaaaaaaaaaaaaaaaaaaaaaaaaaaaaaaaaaaaaaaaaaaaaaaaaaaaaaaaaaaaaaugcaucccccccccccccccccccccccccccccccaaaggcucuuuucagagccaccagaauu

SEQ ID NO: 584 - RNA, 2334 nt, Artificial Sequence
  mRNA product Design a-1 comprising derived and/or modified sequence from YFV__NC_002031.1__SSIgE-prME-XX (polyprotein: aa122-788) (opt11)
gggagagucccgcagucggcguccagcggcucugcuuguucgugugugugucguugcaggccuuauucaagcuuaccauggauuggacguggauacucuuucucguggccgcggccacgcgcgugcacucggugacccuaguaaggaaaaacagauggcuacuacuaaacguaaccucagaagaucuaggaaagacauuuucagucggcacaggcaacugcacaaccaacauacuagaagcaaaauauuggugcccagacagcauggaauacaacugucccaaccucagcccaagagaggaaccagacgacauagacugcugguguuacggaguagaaaacguaagaguggcauacggcaaaugcgacagcgcaggcaggagccgaagaucccgcagagccaucgacuugcccacgcacgaaaaccacggccucaaaacacgacaagaaaaauggaugacagggcgaaugggagaacgacagcuccagaaaauagaacgaugguucguccggaacccguucuucgcaguaacggcacuaacaaucgcauaccucguaggcagcaacaugacacaaagaguggucaucgcgcuacucguacuagcaguggggcccgcauacagugcacacugcauaggaaucacagaccgugacuucaucgaaggcguacacggaggaacguggguaagcgcgacacuggaacaagacaaaugcgugacaguaauggcaccagacaaaccaagccuagacauaucccuagaaacggucgccaucgaccgucccgcagaaguacgaaagguaugcuauaaugcaguccucacacacgucaaaauaaacgacaaaugccccagcacgggcgaagcacaccucgccgaagaaaacgaaggggauaacgcgugcaaacgcaccuacuccgacaggggauggggcaacggaugcggacuguucggaaaaggauccauagucgcaugcgcaaaauuuaccugcgcaaaaagcaugagcuuguucgagguagaccaaacgaagauccaauacguaauccgagcucaacuacacguuggggccaagcaagagaacuggaauacggacaucaaaacacuaaaauucgacgcacucuccggcucacaagaagucgaguucaucggcuacggcaaagcaacacuagaaugccaaguacaaacagcgguggacuucggcaacagcuacauagcagaaauggaaacagaaagcuggauaguagaccgacaaugggcacaagaccuaacucugccauggcaaagcggcucaggaggaguguggagagagaugcaccaccugguagaguucgaacccccacacgcagcaacaauaaggguacuggcacuaggcaaccaagaaggcagccuaaaaaccgcacucacaggagccaugcgcgugacgaaggacaccaacgacaacaaccucuacaaacuccacggagggcacguauccugccgcguaaaacuaucagcacuaacgcuaaaaggaacaagcuacaaaauaugcacagacaaaauguucuucgucaaaaaccccacagacacaggccacggcacagucguaaugcaagugaaggucagcaagggggcccccugccgaaucccagucauaguggcagacgaccucacggccgccaucaacaaagggauccugguaacagugaacccaauagcaucgaccaacgacgacgaaguccucauagaagugaaucccccguucggcgacagcuacaucaucguaggacgcggcgacucccgacugacguaccaauggcauaaagaaggcagcagcauuggaaaacuauucacccaaaccaugaagggcgucgaaagacucgcggugaugggagacaccgcaugggacuucucgagcgcaggcggcuucuucacaagcguaggaaaagggauucacacaguauucggauccgcauuccaaggccucuucgggggacuaaacuggauaacgaaaguaauaaugggagcaguucucauauggguaggaaucaacacacgaaacaugacaauguccaugucaaugauacucguaggcguaaucaugauguuucugucacucggagugggagcagaccaagguugcgccauaaacuucggcaagugaggacuagucccuguucccagagcccacuuuuuuuucuuuuuuugaaauaaaauagccugucuuucagaucuaaaaaaaaaaaaaaaaaaaaaaaaaaaaaaaaaaaaaaaaaaaaaaaaaaaaaaaaaaaaaaaaugcaucccccccccccccccccccccccccccccccaaaggcucuuuucagagccaccagaauu

SEQ ID NO: 585 - RNA, 2304 nt, Artificial Sequence
  mRNA product Design a-1 comprising derived and/or modified sequence from YFV__NC_002031.1__SSIgE-prME (polyprotein: aa122-778) (opt11)
gggagagucccgcagucggcguccagcggcucugcuuguucgugugugugucguugcaggccuuauucaagcuuaccauggauuggacguggauacucuuucucguggccgcggccacgcgcgugcacucggugacccuaguccgcaaaaacagauggcuacuacuaaacguaacaagcgaagaccugggcaaaacauucagcguuggcacaggcaauugcacgacaaacauacucgaagcaaaauacuggugccccgacagcauggaauacaacugcccaaaucuaagcccacgcgaagaaccagacgacaucgacuguuggugcuacggagucgaaaacgugagggucgcauacgguaaaugcgacagcgcuggcagaagcagacgcucccgacgagccauugaccucccuacccacgaaaaccacggccuaaaaacccggcaggaaaaauggaugacaggccggaugggagaacgccaacuacagaaaauagagaggugguuuguaagaaacccauucuucgccguaaccgcgcucaccaucgcuuaccucguaggaucaaacaugacgcaaagaguagugaucgcgcuacucguacuagcgguaggccccgccuacagcgcacacugcaucggcaucacugacagggacuucauagaaggcguccacgggggcacguggguuagcgccacacucgaacaagacaaaugcgucacagugauggcaccagacaaacccucacuagacaucucacuagaaaccgucgcaaucgaccgcccagcagaagucaggaaagugugcuacaacgccgucuuaacccacguaaaaauaaaugauaaaugcccaagcacgggagaggcacaccuagcggaagaaaacgaaggcgacaacgcgugcaaacguaccuacagcgacagaggguggggcaacggaugcggcuuauucggaaaaggaaguaucguagcaugcgcaaaauuuaccugcgccaaaagcaugucccuauucgaaguagaucaaacaaaaauacaauacgucauccgagcccaacuacacgugggggcaaaacaagaaaacuggaacaccgacaucaaaacacucaaauucgaugcccuaagcggcucccaagaaguagaguucaucgguuacggcaaggccacgcucgagugccaaguccaaacagcaguagacuucgggaacucauacaucgccgagauggaaacggaaucauggauugucgacagacaaugggcacaagaccuaacacuaccauggcaaucaggcagcggaggggucuggcgagaaaugcaccaccuaguagaguucgaacccccacacgccgcaacaauccgaguacuagcccucggaaaccaagaaggaucacuaaaaaccgcacucaccggcgcaaugcgcguaacaaaagauacaaacgacaacaaccuauacaaacuacacggcggacacgucagcugccgcgucaaacuauccgcccuaacacuaaaaggaacaagcuacaaaauaugcacagacaaaauguucuucgucaaaaauccgacugacacgggccacggcacagucguaaugcaaguaaaagucucaaaaggcgcaccaugcagaaucccaguaaucgucgccgaugaccuaacagccgcaaucaacaagggcauccucguaacaguaaaccccauagccagcaccaacgacgacgaaguccuaaucgaagucaacccacccuucggagacagcuacauaauaguaggacgaggggacucacgccuaaccuaccaauggcacaaagaaggauccucaaucggcaaacuguucacacaaacgaugaaaggcguagaaagacucgcaguaaugggcgauacggccugggacuucucaagcgcgggcggcuucuucacgagcgucggaaaaggcauccauacaguauucggaagcgcauuccaaggccuauuuggaggccucaacuggauaacaaaagugaucaugggagcaguacugaucugggucggcaucaacacccgcaacaugacgaugagcaugucaaugauccucgugggaguaauaaugauguuccucagccugggcguaggcgcaugaggacuagucccuguucccagagcccacuuuuuuuucuuuuuuugaaauaaaauagccugucuuucagaucuaaaaaaaaaaaaaaaaaaaaaaaaaaaaaaaaaaaaaaaaaaaaaaaaaaaaaaaaaaaaaaaaugcaucccccccccccccccccccccccccccccccaaaggcucuuuucagagccaccagaauu

SEQ ID NO: 586 - RNA, 2352 nt, Artificial Sequence
  mRNA product Design a-1 comprising derived and/or modified sequence from YFV__NC_002031.1__SSjev-prME-XX (polyprotein: aa122-788) (opt11)
gggagagucccgcagucggcguccagcggcucugcuuguucgugugugugucguugcaggccuuauucaagcuuaccauggggaaaaggagcgcgggcucgauaaugugguuggccucgcucgcggucgugaucgcgugcgcgggcgcggugacccuaguaaggaaaaacagauggcuacuacuaaacguaaccucagaagaucuaggaaagacauuuucagucggcacaggcaacugcacaaccaacauacuagaagcaaaauauuggugcccagacagcauggaauacaacugucccaaccucagcccaagagaggaaccagacgacauagacugcugguguuacggaguagaaaacguaagaguggcauacggcaaaugcgacagcgcaggcaggagccgaagaucccgcagagccaucgacuugcccacgcacgaaaaccacggccucaaaacacgacaagaaaaauggaugacagggcgaaugggagaacgacagcuccagaaaauagaacgaugguucguccggaacccguucuucgcaguaacggcacuaacaaucgcauaccucguaggcagcaacaugacacaaagaguggucaucgcgcuacucguacuagcaguggggcccgcauacagugcacacugcauaggaaucacagaccgugacuucaucgaaggcguacacggaggaacguggguaagcgcgacacuggaacaagacaaaugcgugacaguaauggcaccagacaaaccaagccuagacauaucccuagaaacggucgccaucgaccgucccgcagaaguacgaaagguaugcuauaaugcaguccucacacacgucaaaauaaacgacaaaugccccagcacgggcgaagcacaccucgccgaagaaaacgaaggggauaacgcgugcaaacgcaccuacuccgacaggggauggggcaacggaugcggacuguucggaaaaggauccauagucgcaugcgcaaaauuuaccugcgcaaaaagcaugagcuuguucgagguagaccaaacgaagauccaauacguaauccgagcucaacuacacguuggggccaagcaagagaacuggaauacggacaucaaaacacuaaaauucgacgcacucuccggcucacaagaagucgaguucaucggcuacggcaaagcaacacuagaaugccaaguacaaacagcgguggacuucggcaacagcuacauagcagaaauggaaacagaaagcuggauaguagaccgacaaugggcacaagaccuaacucugccauggcaaagcggcucaggaggaguguggagagagaugcaccaccugguagaguucgaacccccacacgcagcaacaauaaggguacuggcacuaggcaaccaagaaggcagccuaaaaaccgcacucacaggagccaugcgcgugacgaaggacaccaacgacaacaaccucuacaaacuccacggagggcacguauccugccgcguaaaacuaucagcacuaacgcuaaaaggaacaagcuacaaaauaugcacagacaaaauguucuucgucaaaaaccccacagacacaggccacggcacagucguaaugcaagugaaggucagcaagggggcccccugccgaaucccagucauaguggcagacgaccucacggccgccaucaacaaagggauccugguaacagugaacccaauagcaucgaccaacgacgacgaaguccucauagaagugaaucccccguucggcgacagcuacaucaucguaggacgcggcgacucccgacugacguaccaauggcauaaagaaggcagcagcauuggaaaacuauucacccaaaccaugaagggcgucgaaagacucgcggugaugggagacaccgcaugggacuucucgagcgcaggcggcuucuucacaagcguaggaaaagggauucacacaguauucggauccgcauuccaaggccucuucgggggacuaaacuggauaacgaaaguaauaaugggagcaguucucauauggguaggaaucaacacacgaaacaugacaauguccaugucaaugauacucguaggcguaaucaugauguuucugucacucggagugggagcagaccaagguugcgccauaaacuucggcaagugaggacuagucccuguucccagagcccacuuuuuuuucuuuuuuugaaauaaaauagccugucuuucagaucuaaaaaaaaaaaaaaaaaaaaaaaaaaaaaaaaaaaaaaaaaaaaaaaaaaaaaaaaaaaaaaaaugcaucccccccccccccccccccccccccccccccaaaggcucuuuucagagccaccagaauu

SEQ ID NO: 587 - RNA, 2322 nt, Artificial Sequence
  mRNA product Design a-1 comprising derived and/or modified sequence from YFV__NC_002031.1__SSjev-prME (polyprotein: aa122-778) (opt11)
gggagagucccgcagucggcguccagcggcucugcuuguucgugugugugucguugcaggccuuauucaagcuuaccauggggaaaaggagcgcgggcucgauaaugugguuggccucgcucgcggucgugaucgcgugcgcgggcgcggugacccuaguccgcaaaaacagauggcuacuacuaaacguaacaagcgaagaccugggcaaaacauucagcguuggcacaggcaauugcacgacaaacauacucgaagcaaaauacuggugccccgacagcauggaauacaacugcccaaaucuaagcccacgcgaagaaccagacgacaucgacuguuggugcuacggagucgaaaacgugagggucgcauacgguaaaugcgacagcgcuggcagaagcagacgcucccgacgagccauugaccucccuacccacgaaaaccacggccuaaaaacccggcaggaaaaauggaugacaggccggaugggagaacgccaacuacagaaaauagagaggugguuuguaagaaacccauucuucgccguaaccgcgcucaccaucgcuuaccucguaggaucaaacaugacgcaaagaguagugaucgcgcuacucguacuagcgguaggccccgccuacagcgcacacugcaucggcaucacugacagggacuucauagaaggcguccacgggggcacguggguuagcgccacacucgaacaagacaaaugcgucacagugauggcaccagacaaacccucacuagacaucucacuagaaaccgucgcaaucgaccgcccagcagaagucaggaaagugugcuacaacgccgucuuaacccacguaaaaauaaaugauaaaugcccaagcacgggagaggcacaccuagcggaagaaaacgaaggcgacaacgcgugcaaacguaccuacagcgacagaggguggggcaacggaugcggcuuauucggaaaaggaaguaucguagcaugcgcaaaauuuaccugcgccaaaagcaugucccuauucgaaguagaucaaacaaaaauacaauacgucauccgagcccaacuacacgugggggcaaaacaagaaaacuggaacaccgacaucaaaacacucaaauucgaugcccuaagcggcucccaagaaguagaguucaucgguuacggcaaggccacgcucgagugccaaguccaaacagcaguagacuucgggaacucauacaucgccgagauggaaacggaaucauggauugucgacagacaaugggcacaagaccuaacacuaccauggcaaucaggcagcggaggggucuggcgagaaaugcaccaccuaguagaguucgaacccccacacgccgcaacaauccgaguacuagcccucggaaaccaagaaggaucacuaaaaaccgcacucaccggcgcaaugcgcguaacaaaagauacaaacgacaacaaccuauacaaacuacacggcggacacgucagcugccgcgucaaacuauccgcccuaacacuaaaaggaacaagcuacaaaauaugcacagacaaaauguucuucgucaaaaauccgacugacacgggccacggcacagucguaaugcaaguaaaagucucaaaaggcgcaccaugcagaaucccaguaaucgucgccgaugaccuaacagccgcaaucaacaagggcauccucguaacaguaaaccccauagccagcaccaacgacgacgaaguccuaaucgaagucaacccacccuucggagacagcuacauaauaguaggacgaggggacucacgccuaaccuaccaauggcacaaagaaggauccucaaucggcaaacuguucacacaaacgaugaaaggcguagaaagacucgcaguaaugggcgauacggccugggacuucucaagcgcgggcggcuucuucacgagcgucggaaaaggcauccauacaguauucggaagcgcauuccaaggccuauuuggaggccucaacuggauaacaaaagugaucaugggagcaguacugaucugggucggcaucaacacccgcaacaugacgaugagcaugucaaugauccucgugggaguaauaaugauguuccucagccugggcguaggcgcaugaggacuagucccuguucccagagcccacuuuuuuuucuuuuuuugaaauaaaauagccugucuuucagaucuaaaaaaaaaaaaaaaaaaaaaaaaaaaaaaaaaaaaaaaaaaaaaaaaaaaaaaaaaaaaaaaaugcaucccccccccccccccccccccccccccccccaaaggcucuuuucagagccaccagaauu

SEQ ID NO: 588 - RNA, 2389 nt, Artificial Sequence
  mRNA product Design a-2 comprising derived and/or modified sequence from YFV__NC_002031.1__X-SS-prME-XX (polyprotein: aa92-788) (wt)
gggagaguccgcucagccagguugcagaagcggcuuagcguguguccuaaucuucucucugcguguagguaggccugugccgcaaacaagcuuaccaugagaggauuguccucaaggaaacgccguucccaugauguucugacugugcaauuccuaauuuugggaaugcuguugaugacggguggagugaccuuggugcggaaaaacagaugguugcuccuaaaugugacaucugaggaccucgggaaaacauucucugugggcacaggcaacugcacaacaaacauuuuggaagccaaguacuggugcccagacucaauggaauacaacugucccaaucucaguccaagagaggagccagaugacauugauugcuggugcuaugggguggaaaacguuagagucgcauaugguaagugugacucagcaggcaggucuaggaggucaagaagggccauugacuugccuacgcaugaaaaccaugguuugaagacccggcaagaaaaauggaugacuggaagaaugggugaaaggcaacuccaaaagauugagagaugguucgugaggaaccccuuuuuugcagugacggcucugaccauugccuaccuugugggaagcaacaugacgcaacgagucgugauugcccuacuggucuuggcuguugguccggccuacucagcucacugcauuggaauuacugacagggauuucauugagggggugcauggaggaacuuggguuucagcuacccuggagcaagacaagugugucacuguuauggccccugacaagccuucauuggacaucucacuagagacaguagccauugauagaccugcugaggugaggaaaguguguuacaaugcaguucucacucaugugaagauuaaugacaagugccccagcacuggagaggcccaccuagcugaagagaacgaaggggacaaugcgugcaagcgcacuuauucugauagaggcuggggcaauggcuguggccuauuugggaaagggagcauuguggcaugcgccaaauucacuugugccaaauccaugaguuuguuugagguugaucagaccaaaauucaguaugucaucagagcacaauugcauguaggggccaagcaggaaaauuggaauaccgacauuaagacucucaaguuugaugcccugucaggcucccaggaagucgaguucauuggguauggaaaagcuacacuggaaugccaggugcaaacugcgguggacuuugguaacaguuacaucgcugagauggaaacagagagcuggauaguggacagacagugggcccaggacuugacccugccauggcagaguggaaguggcgggguguggagagagaugcaucaucuugucgaauuugaaccuccgcaugccgccacuaucagaguacuggcccugggaaaccaggaaggcuccuugaaaacagcucuuacuggcgcaaugaggguuacaaaggacacaaaugacaacaaccuuuacaaacuacaugguggacauguuucuugcagagugaaauugucagcuuugacacucaaggggacauccuacaaaauaugcacugacaaaauguuuuuugucaagaacccaacugacacuggccauggcacuguugugaugcaggugaaagugucaaaaggagcccccugcaggauuccagugauaguagcugaugaucuuacagcggcaaucaauaaaggcauuuugguuacaguuaaccccaucgccucaaccaaugaugaugaagugcugauugaggugaacccaccuuuuggagacagcuacauuaucguugggagaggagauucacgucucacuuaccaguggcacaaagagggaagcucaauaggaaaguuguucacucagaccaugaaaggcguggaacgccuggccgucaugggagacaccgccugggauuucagcuccgcuggaggguucuucacuucgguugggaaaggaauccauacgguguuuggcucugccuuucaggggcuauuuggcggcuugaacuggauaacaaaggucaucaugggggcgguacuuauauggguuggcaucaacacaagaaacaugacaauguccaugagcaugaucuugguaggagugaucaugauguuuuugucucuaggaguuggggcggaucaaggaugcgccaucaacuuuggcaaguaaggacuagucccuguucccagagcccacuuuuuuuucuuuuuuugaaauaaaauagccugucuuucagaucuaaaaaaaaaaaaaaaaaaaaaaaaaaaaaaaaaaaaaaaaaaaaaaaaaaaaaaaaaaaaaaaaugcaucccccccccccccccccccccccccccccccaaaggcucuuuucagagccaccagaauu

SEQ ID NO: 589 - RNA, 2356 nt, Artificial Sequence
  mRNA product Design a-2 comprising derived and/or modified sequence from YFV__NC_002031.1__SS-prME (polyprotein: M,aa104-778) (wt)
gggagaguccgcucagccagguugcagaagcggcuuagcguguguccuaaucuucucucugcguguagguaggccugugccgcaaacaagcuuaccauggauguucugacugugcaauuccuaauuuugggaaugcuguugaugacggguggagugaccuuggugcggaaaaacagaugguugcuccuaaaugugacaucugaggaccucgggaaaacauucucugugggcacaggcaacugcacaacaaacauuuuggaagccaaguacuggugcccagacucaauggaauacaacugucccaaucucaguccaagagaggagccagaugacauugauugcuggugcuaugggguggaaaacguuagagucgcauaugguaagugugacucagcaggcaggucuaggaggucaagaagggccauugacuugccuacgcaugaaaaccaugguuugaagacccggcaagaaaaauggaugacuggaagaaugggugaaaggcaacuccaaaagauugagagaugguucgugaggaaccccuuuuuugcagugacggcucugaccauugccuaccuugugggaagcaacaugacgcaacgagucgugauugcccuacuggucuuggcuguugguccggccuacucagcucacugcauuggaauuacugacagggauuucauugagggggugcauggaggaacuuggguuucagcuacccuggagcaagacaagugugucacuguuauggccccugacaagccuucauuggacaucucacuagagacaguagccauugauagaccugcugaggugaggaaaguguguuacaaugcaguucucacucaugugaagauuaaugacaagugccccagcacuggagaggcccaccuagcugaagagaacgaaggggacaaugcgugcaagcgcacuuauucugauagaggcuggggcaauggcuguggccuauuugggaaagggagcauuguggcaugcgccaaauucacuugugccaaauccaugaguuuguuugagguugaucagaccaaaauucaguaugucaucagagcacaauugcauguaggggccaagcaggaaaauuggaauaccgacauuaagacucucaaguuugaugcccugucaggcucccaggaagucgaguucauuggguauggaaaagcuacacuggaaugccaggugcaaacugcgguggacuuugguaacaguuacaucgcugagauggaaacagagagcuggauaguggacagacagugggcccaggacuugacccugccauggcagaguggaaguggcgggguguggagagagaugcaucaucuugucgaauuugaaccuccgcaugccgccacuaucagaguacuggcccugggaaaccaggaaggcuccuugaaaacagcucuuacuggcgcaaugaggguuacaaaggacacaaaugacaacaaccuuuacaaacuacaugguggacauguuucuugcagagugaaauugucagcuuugacacucaaggggacauccuacaaaauaugcacugacaaaauguuuuuugucaagaacccaacugacacuggccauggcacuguugugaugcaggugaaagugucaaaaggagcccccugcaggauuccagugauaguagcugaugaucuuacagcggcaaucaauaaaggcauuuugguuacaguuaaccccaucgccucaaccaaugaugaugaagugcugauugaggugaacccaccuuuuggagacagcuacauuaucguugggagaggagauucacgucucacuuaccaguggcacaaagagggaagcucaauaggaaaguuguucacucagaccaugaaaggcguggaacgccuggccgucaugggagacaccgccugggauuucagcuccgcuggaggguucuucacuucgguugggaaaggaauccauacgguguuuggcucugccuuucaggggcuauuuggcggcuugaacuggauaacaaaggucaucaugggggcgguacuuauauggguuggcaucaacacaagaaacaugacaauguccaugagcaugaucuugguaggagugaucaugauguuuuugucucuaggaguuggggcggaucaaggaugcgccaucaacuuuggcaaguaaggacuagucccuguucccagagcccacuuuuuuuucuuuuuuugaaauaaaauagccugucuuucagaucuaaaaaaaaaaaaaaaaaaaaaaaaaaaaaaaaaaaaaaaaaaaaaaaaaaaaaaaaaaaaaaaaugcaucccccccccccccccccccccccccccccccaaaggcucuuuucagagccaccagaauu

SEQ ID NO: 590 - RNA, 2353 nt, Artificial Sequence
  mRNA product Design a-2 comprising derived and/or modified sequence from YFV__NC_002031.1__SSIgE-prME-XX (polyprotein: aa122-788) (wt)
gggagaguccgcucagccagguugcagaagcggcuuagcguguguccuaaucuucucucugcguguagguaggccugugccgcaaacaagcuuaccauggacuggaccuggauccuguuccucguggccgccgcgacccgcguccacagcgugaccuuggugcggaaaaacagaugguugcuccuaaaugugacaucugaggaccucgggaaaacauucucugugggcacaggcaacugcacaacaaacauuuuggaagccaaguacuggugcccagacucaauggaauacaacugucccaaucucaguccaagagaggagccagaugacauugauugcuggugcuaugggguggaaaacguuagagucgcauaugguaagugugacucagcaggcaggucuaggaggucaagaagggccauugacuugccuacgcaugaaaaccaugguuugaagacccggcaagaaaaauggaugacuggaagaaugggugaaaggcaacuccaaaagauugagagaugguucgugaggaaccccuuuuuugcagugacggcucugaccauugccuaccuugugggaagcaacaugacgcaacgagucgugauugcccuacuggucuuggcuguugguccggccuacucagcucacugcauuggaauuacugacagggauuucauugagggggugcauggaggaacuuggguuucagcuacccuggagcaagacaagugugucacuguuauggccccugacaagccuucauuggacaucucacuagagacaguagccauugauagaccugcugaggugaggaaaguguguuacaaugcaguucucacucaugugaagauuaaugacaagugccccagcacuggagaggcccaccuagcugaagagaacgaaggggacaaugcgugcaagcgcacuuauucugauagaggcuggggcaauggcuguggccuauuugggaaagggagcauuguggcaugcgccaaauucacuugugccaaauccaugaguuuguuugagguugaucagaccaaaauucaguaugucaucagagcacaauugcauguaggggccaagcaggaaaauuggaauaccgacauuaagacucucaaguuugaugcccugucaggcucccaggaagucgaguucauuggguauggaaaagcuacacuggaaugccaggugcaaacugcgguggacuuugguaacaguuacaucgcugagauggaaacagagagcuggauaguggacagacagugggcccaggacuugacccugccauggcagaguggaaguggcgggguguggagagagaugcaucaucuugucgaauuugaaccuccgcaugccgccacuaucagaguacuggcccugggaaaccaggaaggcuccuugaaaacagcucuuacuggcgcaaugaggguuacaaaggacacaaaugacaacaaccuuuacaaacuacaugguggacauguuucuugcagagugaaauugucagcuuugacacucaaggggacauccuacaaaauaugcacugacaaaauguuuuuugucaagaacccaacugacacuggccauggcacuguugugaugcaggugaaagugucaaaaggagcccccugcaggauuccagugauaguagcugaugaucuuacagcggcaaucaauaaaggcauuuugguuacaguuaaccccaucgccucaaccaaugaugaugaagugcugauugaggugaacccaccuuuuggagacagcuacauuaucguugggagaggagauucacgucucacuuaccaguggcacaaagagggaagcucaauaggaaaguuguucacucagaccaugaaaggcguggaacgccuggccgucaugggagacaccgccugggauuucagcuccgcuggaggguucuucacuucgguugggaaaggaauccauacgguguuuggcucugccuuucaggggcuauuuggcggcuugaacuggauaacaaaggucaucaugggggcgguacuuauauggguuggcaucaacacaagaaacaugacaauguccaugagcaugaucuugguaggagugaucaugauguuuuugucucuaggaguuggggcggaucaaggaugcgccaucaacuuuggcaaguaaggacuagucccuguucccagagcccacuuuuuuuucuuuuuuugaaauaaaauagccugucuuucagaucuaaaaaaaaaaaaaaaaaaaaaaaaaaaaaaaaaaaaaaaaaaaaaaaaaaaaaaaaaaaaaaaaugcaucccccccccccccccccccccccccccccccaaaggcucuuuucagagccaccagaauu

SEQ ID NO: 591 - RNA, 2323 nt, Artificial Sequence
  mRNA product Design a-2 comprising derived and/or modified sequence from YFV__NC_002031.1__SSIgE-prME (polyprotein: aa122-778) (wt)
gggagaguccgcucagccagguugcagaagcggcuuagcguguguccuaaucuucucucugcguguagguaggccugugccgcaaacaagcuuaccauggacuggaccuggauccuguuccucguggccgccgcgacccgcguccacagcgugaccuuggugcggaaaaacagaugguugcuccuaaaugugacaucugaggaccucgggaaaacauucucugugggcacaggcaacugcacaacaaacauuuuggaagccaaguacuggugcccagacucaauggaauacaacugucccaaucucaguccaagagaggagccagaugacauugauugcuggugcuaugggguggaaaacguuagagucgcauaugguaagugugacucagcaggcaggucuaggaggucaagaagggccauugacuugccuacgcaugaaaaccaugguuugaagacccggcaagaaaaauggaugacuggaagaaugggugaaaggcaacuccaaaagauugagagaugguucgugaggaaccccuuuuuugcagugacggcucugaccauugccuaccuugugggaagcaacaugacgcaacgagucgugauugcccuacuggucuuggcuguugguccggccuacucagcucacugcauuggaauuacugacagggauuucauugagggggugcauggaggaacuuggguuucagcuacccuggagcaagacaagugugucacuguuauggccccugacaagccuucauuggacaucucacuagagacaguagccauugauagaccugcugaggugaggaaaguguguuacaaugcaguucucacucaugugaagauuaaugacaagugccccagcacuggagaggcccaccuagcugaagagaacgaaggggacaaugcgugcaagcgcacuuauucugauagaggcuggggcaauggcuguggccuauuugggaaagggagcauuguggcaugcgccaaauucacuugugccaaauccaugaguuuguuugagguugaucagaccaaaauucaguaugucaucagagcacaauugcauguaggggccaagcaggaaaauuggaauaccgacauuaagacucucaaguuugaugcccugucaggcucccaggaagucgaguucauuggguauggaaaagcuacacuggaaugccaggugcaaacugcgguggacuuugguaacaguuacaucgcugagauggaaacagagagcuggauaguggacagacagugggcccaggacuugacccugccauggcagaguggaaguggcgggguguggagagagaugcaucaucuugucgaauuugaaccuccgcaugccgccacuaucagaguacuggcccugggaaaccaggaaggcuccuugaaaacagcucuuacuggcgcaaugaggguuacaaaggacacaaaugacaacaaccuuuacaaacuacaugguggacauguuucuugcagagugaaauugucagcuuugacacucaaggggacauccuacaaaauaugcacugacaaaauguuuuuugucaagaacccaacugacacuggccauggcacuguugugaugcaggugaaagugucaaaaggagcccccugcaggauuccagugauaguagcugaugaucuuacagcggcaaucaauaaaggcauuuugguuacaguuaaccccaucgccucaaccaaugaugaugaagugcugauugaggugaacccaccuuuuggagacagcuacauuaucguugggagaggagauucacgucucacuuaccaguggcacaaagagggaagcucaauaggaaaguuguucacucagaccaugaaaggcguggaacgccuggccgucaugggagacaccgccugggauuucagcuccgcuggaggguucuucacuucgguugggaaaggaauucauacgguguuuggcucugccuuucaggggcuauuuggcggcuugaacuggauaacaaaggucaucaugggggcgguacuuauauggguuggcaucaacacaagaaacaugacaauguccaugagcaugaucuugguaggagugaucaugauguuuuugucucuaggaguuggggcguaaggacuagucccuguucccagagcccacuuuuuuuucuuuuuuugaaauaaaauagccugucuuucagaucuaaaaaaaaaaaaaaaaaaaaaaaaaaaaaaaaaaaaaaaaaaaaaaaaaaaaaaaaaaaaaaaaugcaucccccccccccccccccccccccccccccccaaaggcucuuuucagagccaccagaauu

SEQ ID NO: 592 - RNA, 2371 nt, Artificial Sequence
  mRNA product Design a-2 comprising derived and/or modified sequence from YFV__NC_002031.1__SSjev-prME-XX (polyprotein: aa122-788) (wt)
gggagaguccgcucagccagguugcagaagcggcuuagcguguguccuaaucuucucucugcguguagguaggccugugccgcaaacaagcuuaccauggguaaacggagcgcuggcucaaucauguggcucgcgagcuuggcaguugucauagcuugugcaggagccgugaccuuggugcggaaaaacagaugguugcuccuaaaugugacaucugaggaccucgggaaaacauucucugugggcacaggcaacugcacaacaaacauuuuggaagccaaguacuggugcccagacucaauggaauacaacugucccaaucucaguccaagagaggagccagaugacauugauugcuggugcuaugggguggaaaacguuagagucgcauaugguaagugugacucagcaggcaggucuaggaggucaagaagggccauugacuugccuacgcaugaaaaccaugguuugaagacccggcaagaaaaauggaugacuggaagaaugggugaaaggcaacuccaaaagauugagagaugguucgugaggaaccccuuuuuugcagugacggcucugaccauugccuaccuugugggaagcaacaugacgcaacgagucgugauugcccuacuggucuuggcuguugguccggccuacucagcucacugcauuggaauuacugacagggauuucauugagggggugcauggaggaacuuggguuucagcuacccuggagcaagacaagugugucacuguuauggccccugacaagccuucauuggacaucucacuagagacaguagccauugauagaccugcugaggugaggaaaguguguuacaaugcaguucucacucaugugaagauuaaugacaagugccccagcacuggagaggcccaccuagcugaagagaacgaaggggacaaugcgugcaagcgcacuuauucugauagaggcuggggcaauggcuguggccuauuugggaaagggagcauuguggcaugcgccaaauucacuugugccaaauccaugaguuuguuugagguugaucagaccaaaauucaguaugucaucagagcacaauugcauguaggggccaagcaggaaaauuggaauaccgacauuaagacucucaaguuugaugcccugucaggcucccaggaagucgaguucauuggguauggaaaagcuacacuggaaugccaggugcaaacugcgguggacuuugguaacaguuacaucgcugagauggaaacagagagcuggauaguggacagacagugggcccaggacuugacccugccauggcagaguggaaguggcgggguguggagagagaugcaucaucuugucgaauuugaaccuccgcaugccgccacuaucagaguacuggcccugggaaaccaggaaggcuccuugaaaacagcucuuacuggcgcaaugaggguuacaaaggacacaaaugacaacaaccuuuacaaacuacaugguggacauguuucuugcagagugaaauugucagcuuugacacucaaggggacauccuacaaaauaugcacugacaaaauguuuuuugucaagaacccaacugacacuggccauggcacuguugugaugcaggugaaagugucaaaaggagcccccugcaggauuccagugauaguagcugaugaucuuacagcggcaaucaauaaaggcauuuugguuacaguuaaccccaucgccucaaccaaugaugaugaagugcugauugaggugaacccaccuuuuggagacagcuacauuaucguugggagaggagauucacgucucacuuaccaguggcacaaagagggaagcucaauaggaaaguuguucacucagaccaugaaaggcguggaacgccuggccgucaugggagacaccgccugggauuucagcuccgcuggaggguucuucacuucgguugggaaaggaauccauacgguguuuggcucugccuuucaggggcuauuuggcggcuugaacuggauaacaaaggucaucaugggggcgguacuuauauggguuggcaucaacacaagaaacaugacaauguccaugagcaugaucuugguaggagugaucaugauguuuuugucucuaggaguuggggcggaucaaggaugcgccaucaacuuuggcaaguaaggacuagucccuguucccagagcccacuuuuuuuucuuuuuuugaaauaaaauagccugucuuucagaucuaaaaaaaaaaaaaaaaaaaaaaaaaaaaaaaaaaaaaaaaaaaaaaaaaaaaaaaaaaaaaaaaugcaucccccccccccccccccccccccccccccccaaaggcucuuuucagagccaccagaauu

SEQ ID NO: 593 - RNA, 2341 nt, Artificial Sequence
  mRNA product Design a-2 comprising derived and/or modified sequence from YFV__NC_002031.1__SSjev-prME (polyprotein: aa122-778) (wt)
gggagaguccgcucagccagguugcagaagcggcuuagcguguguccuaaucuucucucugcguguagguaggccugugccgcaaacaagcuuaccauggguaaacggagcgcuggcucaaucauguggcucgcgagcuuggcaguugucauagcuugugcaggagccgugaccuuggugcggaaaaacagaugguugcuccuaaaugugacaucugaggaccucgggaaaacauucucugugggcacaggcaacugcacaacaaacauuuuggaagccaaguacuggugcccagacucaauggaauacaacugucccaaucucaguccaagagaggagccagaugacauugauugcuggugcuaugggguggaaaacguuagagucgcauaugguaagugugacucagcaggcaggucuaggaggucaagaagggccauugacuugccuacgcaugaaaaccaugguuugaagacccggcaagaaaaauggaugacuggaagaaugggugaaaggcaacuccaaaagauugagagaugguucgugaggaaccccuuuuuugcagugacggcucugaccauugccuaccuugugggaagcaacaugacgcaacgagucgugauugcccuacuggucuuggcuguugguccggccuacucagcucacugcauuggaauuacugacagggauuucauugagggggugcauggaggaacuuggguuucagcuacccuggagcaagacaagugugucacuguuauggccccugacaagccuucauuggacaucucacuagagacaguagccauugauagaccugcugaggugaggaaaguguguuacaaugcaguucucacucaugugaagauuaaugacaagugccccagcacuggagaggcccaccuagcugaagagaacgaaggggacaaugcgugcaagcgcacuuauucugauagaggcuggggcaauggcuguggccuauuugggaaagggagcauuguggcaugcgccaaauucacuugugccaaauccaugaguuuguuugagguugaucagaccaaaauucaguaugucaucagagcacaauugcauguaggggccaagcaggaaaauuggaauaccgacauuaagacucucaaguuugaugcccugucaggcucccaggaagucgaguucauuggguauggaaaagcuacacuggaaugccaggugcaaacugcgguggacuuugguaacaguuacaucgcugagauggaaacagagagcuggauaguggacagacagugggcccaggacuugacccugccauggcagaguggaaguggcgggguguggagagagaugcaucaucuugucgaauuugaaccuccgcaugccgccacuaucagaguacuggcccugggaaaccaggaaggcuccuugaaaacagcucuuacuggcgcaaugaggguuacaaaggacacaaaugacaacaaccuuuacaaacuacaugguggacauguuucuugcagagugaaauugucagcuuugacacucaaggggacauccuacaaaauaugcacugacaaaauguuuuuugucaagaacccaacugacacuggccauggcacuguugugaugcaggugaaagugucaaaaggagcccccugcaggauuccagugauaguagcugaugaucuuacagcggcaaucaauaaaggcauuuugguuacaguuaaccccaucgccucaaccaaugaugaugaagugcugauugaggugaacccaccuuuuggagacagcuacauuaucguugggagaggagauucacgucucacuuaccaguggcacaaagagggaagcucaauaggaaaguuguucacucagaccaugaaaggcguggaacgccuggccgucaugggagacaccgccugggauuucagcuccgcuggaggguucuucacuucgguugggaaaggaauucauacgguguuuggcucugccuuucaggggcuauuuggcggcuugaacuggauaacaaaggucaucaugggggcgguacuuauauggguuggcaucaacacaagaaacaugacaauguccaugagcaugaucuugguaggagugaucaugauguuuuugucucuaggaguuggggcguaaggacuagucccuguucccagagcccacuuuuuuuucuuuuuuugaaauaaaauagccugucuuucagaucuaaaaaaaaaaaaaaaaaaaaaaaaaaaaaaaaaaaaaaaaaaaaaaaaaaaaaaaaaaaaaaaaugcaucccccccccccccccccccccccccccccccaaaggcucuuuucagagccaccagaauu

SEQ ID NO: 594 - RNA, 2389 nt, Artificial Sequence
  mRNA product Design a-2 comprising derived and/or modified sequence from YFV__NC_002031.1__X-SS-prME-XX (polyprotein: aa92-788) (opt1) R7229
gggagaguccgcucagccagguugcagaagcggcuuagcguguguccuaaucuucucucugcguguagguaggccugugccgcaaacaagcuuaccaugcggggccugagcucccgcaagcggcgcagccacgacgugcucaccguccaguuccugauccuggggaugcuccugaugaccggcggggugacgcuggugcggaagaaccgcuggcuccugcugaacgucaccuccgaggaccucggcaagaccuucagcguggggaccggcaacugcacgaccaacauccuggaggccaaguacuggugccccgacuccauggaguacaacugcccgaaccugagcccccgggaggagcccgacgacaucgacugcuggugcuacggcguggagaacguccgcguggccuacgggaagugcgacuccgcgggccggagccgccggucccgccgggccaucgaccuccccacccacgagaaccacgggcugaagacccgccaggagaaguggaugacgggccggaugggggagcgccagcugcagaagaucgagcggugguucgugcgcaacccguucuucgccgucaccgcccucaccaucgccuaccuggugggcagcaacaugacccagcggguggucaucgcgcugcucgugcuggccgugggccccgccuacuccgcccacugcaucgggaucacggaccgcgacuucaucgagggcguccacgggggcaccugggugagcgcgacccuggagcaggacaagugcgugaccgucauggcccccgacaagcccucccucgacaucagccuggagacgguggccaucgaccggccggccgaggugcgcaaggucugcuacaacgccgugcugacccacgugaagaucaacgacaagugccccuccaccggcgaggcgcaccucgccgaggagaacgagggggacaacgccugcaagcggaccuacagcgaccggggcugggggaacggcugcgggcuguucggcaagggcuccaucgucgccugcgccaaguucacgugcgcgaagagcaugucccuguucgagguggaccagaccaagauccaguacgucauccgcgcccagcuccacgugggggccaagcaggagaacuggaacaccgacaucaagacccugaaguucgacgcccugagcggcagccaggagguggaguucaucggguacggcaaggccacgcucgagugccagguccagaccgcgguggacuucgggaacuccuacaucgccgagauggagaccgagagcuggaucguggaccggcagugggcccaggaccugacccugcccuggcaguccggcagcggcggggucuggcgcgagaugcaccaccucguggaguucgagcccccgcacgccgccacgauccgggugcuggcgcugggcaaccaggaggggucccucaagaccgcccugaccggcgccaugcgcgucaccaaggacacgaacgacaacaaccuguacaagcuccacgggggccacgugagcugccgggugaagcuguccgcccugacccucaagggcaccagcuacaagaucugcaccgacaagauguucuucgucaagaaccccacggacaccgggcacggcaccguggugaugcaggucaagguguccaagggggcgcccugccgcaucccggugaucgucgccgacgaccugaccgccgccaucaacaagggcauccuggugaccgugaacccgaucgccagcacgaacgacgacgagguccucaucgaggugaacccccccuucggcgacuccuacaucaucguggggcggggcgacagccgccugaccuaccaguggcacaaggagggguccagcaucggcaagcuguucacccagaccaugaagggggucgagcggcuggcggugaugggcgacacggccugggacuucuccagcgccggcggguucuucaccuccgugggcaaggggauccacaccgucuucggcagcgccuuccaggggcucuucggcggccugaacuggaucaccaaggugaucaugggggccgugcugaucugggucggcaucaacacgcgcaacaugaccauguccaugagcaugauccucgugggggugaucaugauguuccugagccugggcgucggggcggaccagggcugcgccaucaacuucggcaagugaggacuagucccuguucccagagcccacuuuuuuuucuuuuuuugaaauaaaauagccugucuuucagaucuaaaaaaaaaaaaaaaaaaaaaaaaaaaaaaaaaaaaaaaaaaaaaaaaaaaaaaaaaaaaaaaaugcaucccccccccccccccccccccccccccccccaaaggcucuuuucagagccaccagaauu

SEQ ID NO: 595 - RNA, 2326 nt, Artificial Sequence
  mRNA product Design a-2 comprising derived and/or modified sequence from YFV__NC_002031.1__SS-prME (polyprotein: M,aa104-778) (opt1)
gggagaguccgcucagccagguugcagaagcggcuuagcguguguccuaaucuucucucugcguguagguaggccugugccgcaaacaagcuuaccauggacgugcugaccguccaguuccucauccugggcaugcugcucaugaccgggggcgugacccugguccggaagaaccgcuggcuccugcugaacgugaccagcgaggaccucggcaagacguucuccguggggaccggcaacugcaccaccaacauccuggaggccaaguacuggugccccgacagcauggaguacaacugccccaaccuguccccgcgggaggagcccgacgacaucgacugcuggugcuacggggucgagaacgugcgcguggccuacggcaagugcgacagcgcggggcggucccgccggagccgccgggccaucgaccugcccacccacgagaaccacggccucaagacccggcaggagaaguggaugacggggcgcaugggcgagcggcagcugcagaagaucgagcgcugguucgugcggaacccguucuucgccgucaccgcgcugaccaucgccuaccucguggggagcaacaugacccagcgcguggucaucgcccugcuggugcucgccgugggccccgccuacuccgcgcacugcaucgggaucacggaccgggacuucaucgagggcguccacggcgggaccugggugagcgccacccuggagcaggacaagugcgugaccgucauggcccccgacaagcccucccuggacaucagccucgagacgguggccaucgaccgcccggcggaggugcggaaggucugcuacaacgccgugcugacccacgugaagaucaacgacaagugccccuccaccggcgaggcccaccuggccgaggagaacgagggggacaacgccugcaagcgcaccuacagcgaccggggcugggggaacggcugcggccucuucgggaagggcuccaucgucgcgugcgccaaguucacgugcgccaagagcaugucccuguucgagguggaccagaccaagauccaguacgugauccgcgcccagcugcacgucggggccaagcaggagaacuggaacaccgacaucaagacccucaaguucgacgcgcugagcggcucccaggagguggaguucaucggcuacgggaaggccacgcuggagugccaggugcagaccgccgucgacuucggcaacagcuacaucgccgagauggagaccgaguccuggaucguggaccggcagugggcccaggaccucacccugcccuggcagagcggguccggcgggguguggcgcgagaugcaccaccuggucgaguucgagcccccgcacgcggccacgauccgggugcucgcccugggcaaccaggagggcagccugaagaccgcccucaccggggccaugcgcgucaccaaggacacgaacgacaacaaccuguacaagcugcacggcgggcacguguccugccgggugaagcucagcgcgcugacccugaagggcaccuccuacaagaucugcaccgacaagauguucuucgucaagaaccccacggacaccgggcacggcaccguggugaugcaggucaaggugagcaagggcgcccccugccgcaucccggugaucgucgccgacgaccucaccgccgcgaucaacaaggggauccuggugacggugaaccccaucgccagcaccaacgacgacgagguccugaucgaggugaacccgcccuucggcgacuccuacaucaucguggggcggggcgacagccgccucaccuaccaguggcacaaggagggguccagcaucggcaagcuguucacccagacgaugaagggcgucgagcggcuggccgugaugggggacaccgccugggacuucuccagcgccggcggguucuucaccuccgugggcaagggcauccacaccgucuucgggagcgcguuccagggccucuucgggggccugaacuggaucaccaaggugaucaugggggccgugcugaucugggucggcaucaacacgcgcaacaugaccauguccaugagcaugauccucgugggcgugaucaugauguuccugucccugggggucggcgccugaggacuagucccuguucccagagcccacuuuuuuuucuuuuuuugaaauaaaauagccugucuuucagaucuaaaaaaaaaaaaaaaaaaaaaaaaaaaaaaaaaaaaaaaaaaaaaaaaaaaaaaaaaaaaaaaaugcaucccccccccccccccccccccccccccccccaaaggcucuuuucagagccaccagaauu

SEQ ID NO: 596 - RNA, 2353 nt, Artificial Sequence
  mRNA product Design a-2 comprising derived and/or modified sequence from YFV__NC_002031.1__SSIgE-prME-XX (polyprotein: aa122-788) (opt1)
gggagaguccgcucagccagguugcagaagcggcuuagcguguguccuaaucuucucucugcguguagguaggccugugccgcaaacaagcuuaccauggacuggaccuggauccuguuccucguggccgccgcgacccgcguccacagcgugacgcuggugcggaagaaccgcuggcuccugcugaacgucaccuccgaggaccucggcaagaccuucagcguggggaccggcaacugcacgaccaacauccuggaggccaaguacuggugccccgacuccauggaguacaacugcccgaaccugagcccccgggaggagcccgacgacaucgacugcuggugcuacggcguggagaacguccgcguggccuacgggaagugcgacuccgcgggccggagccgccggucccgccgggccaucgaccuccccacccacgagaaccacgggcugaagacccgccaggagaaguggaugacgggccggaugggggagcgccagcugcagaagaucgagcggugguucgugcgcaacccguucuucgccgucaccgcccucaccaucgccuaccuggugggcagcaacaugacccagcggguggucaucgcgcugcucgugcuggccgugggccccgccuacuccgcccacugcaucgggaucacggaccgcgacuucaucgagggcguccacgggggcaccugggugagcgcgacccuggagcaggacaagugcgugaccgucauggcccccgacaagcccucccucgacaucagccuggagacgguggccaucgaccggccggccgaggugcgcaaggucugcuacaacgccgugcugacccacgugaagaucaacgacaagugccccuccaccggcgaggcgcaccucgccgaggagaacgagggggacaacgccugcaagcggaccuacagcgaccggggcugggggaacggcugcgggcuguucggcaagggcuccaucgucgccugcgccaaguucacgugcgcgaagagcaugucccuguucgagguggaccagaccaagauccaguacgucauccgcgcccagcuccacgugggggccaagcaggagaacuggaacaccgacaucaagacccugaaguucgacgcccugagcggcagccaggagguggaguucaucggguacggcaaggccacgcucgagugccagguccagaccgcgguggacuucgggaacuccuacaucgccgagauggagaccgagagcuggaucguggaccggcagugggcccaggaccugacccugcccuggcaguccggcagcggcggggucuggcgcgagaugcaccaccucguggaguucgagcccccgcacgccgccacgauccgggugcuggcgcugggcaaccaggaggggucccucaagaccgcccugaccggcgccaugcgcgucaccaaggacacgaacgacaacaaccuguacaagcuccacgggggccacgugagcugccgggugaagcuguccgcccugacccucaagggcaccagcuacaagaucugcaccgacaagauguucuucgucaagaaccccacggacaccgggcacggcaccguggugaugcaggucaagguguccaagggggcgcccugccgcaucccggugaucgucgccgacgaccugaccgccgccaucaacaagggcauccuggugaccgugaacccgaucgccagcacgaacgacgacgagguccucaucgaggugaacccccccuucggcgacuccuacaucaucguggggcggggcgacagccgccugaccuaccaguggcacaaggagggguccagcaucggcaagcuguucacccagaccaugaagggggucgagcggcuggcggugaugggcgacacggccugggacuucuccagcgccggcggguucuucaccuccgugggcaaggggauccacaccgucuucggcagcgccuuccaggggcucuucggcggccugaacuggaucaccaaggugaucaugggggccgugcugaucugggucggcaucaacacgcgcaacaugaccauguccaugagcaugauccucgugggggugaucaugauguuccugagccugggcgucggggcggaccagggcugcgccaucaacuucggcaagugaggacuagucccuguucccagagcccacuuuuuuuucuuuuuuugaaauaaaauagccugucuuucagaucuaaaaaaaaaaaaaaaaaaaaaaaaaaaaaaaaaaaaaaaaaaaaaaaaaaaaaaaaaaaaaaaaugcaucccccccccccccccccccccccccccccccaaaggcucuuuucagagccaccagaauu

SEQ ID NO: 597 - RNA, 2323 nt, Artificial Sequence
  mRNA product Design a-2 comprising derived and/or modified sequence from YFV__NC_002031.1__SSIgE-prME (polyprotein: aa122-778) (opt1)
gggagaguccgcucagccagguugcagaagcggcuuagcguguguccuaaucuucucucugcguguagguaggccugugccgcaaacaagcuuaccauggacuggaccuggauccuguuccucguggccgccgcgacccgcguccacagcgugacccugguccgcaagaaccgguggcuccugcugaacgugaccagcgaggaccucggcaagacguucuccguggggaccggcaacugcaccaccaacauccuggaggccaaguacuggugccccgacagcauggaguacaacugcccgaaccuguccccgcgcgaggagcccgacgacaucgacugcuggugcuacggggucgagaacgugcggguggccuacggcaagugcgacagcgcggggcgcucccggcgcagccggcgcgccaucgaccuccccacgcacgagaaccacggccugaagacccggcaggagaaguggaugaccggccgcaugggggagcggcagcugcagaagaucgagcgcugguucguccggaaccccuucuucgccgugaccgcccucacgaucgccuaccuggugggcuccaacaugacccagcgcgucgugaucgcgcugcucgugcuggccgucgggcccgccuacagcgcccacugcaucggcaucaccgaccgggacuucaucgagggggugcacggcggcaccuggguguccgcgacgcuggagcaggacaagugcgucaccgugauggcccccgacaagcccagccucgacaucucccuggagaccguggccaucgaccgcccggccgagguccggaaggugugcuacaacgccgugcugacccacgucaagaucaacgacaagugccccagcacgggggaggcgcaccucgccgaggagaacgagggcgacaacgccugcaagcgcaccuacuccgaccggggguggggcaacggcugcgggcuguucggcaaggggagcaucguggccugcgccaaguucaccugcgcgaaguccaugagccuguucgagguggaccagaccaagauccaguacgucauccgcgcccagcuccacgugggcgccaagcaggagaacuggaacacggacaucaagacccugaaguucgacgcccuguccgggagccaggaggucgaguucaucggcuacggcaaggccacccucgagugccaggugcagaccgcgguggacuucgggaacuccuacaucgccgagauggagacggagagcuggaucgucgaccggcagugggcccaggaccugacccugcccuggcagagcggcuccgggggcguguggcgcgagaugcaccaccucguggaguucgagcccccgcacgccgccaccauccgcguccuggcgcuggggaaccaggagggcagccucaagaccgcccugacgggcgccaugcgggugaccaaggacaccaacgacaacaaccuguacaagcuccacgggggccacguguccugccgcgucaagcugagcgcccugacccucaaggggacguccuacaagaucugcaccgacaagauguucuucgugaagaaccccaccgacaccggccacgggacgguggucaugcaggugaaggugagcaagggcgcgcccugccggauccccgucaucguggccgacgaccugaccgccgccaucaacaagggcauccuggugaccgucaacccgaucgccuccaccaacgacgacgaggugcucaucgaggugaacccgcccuucggggacagcuacaucaucgucggccgcggggacucccggcugaccuaccaguggcacaaggagggcagcuccaucggcaagcuguucacgcagaccaugaaggggguggagcgccucgcggugaugggcgacaccgccugggacuucagcuccgccgggggcuucuucaccagcgucgggaagggcauccacacgguguucggcuccgccuuccaggggcuguucggcgggcugaacuggaucaccaaggugaucaugggcgccguccucaucuggguggggaucaacacccggaacaugaccaugagcauguccaugauccuggugggcgucaucaugauguuccugagccugggcgugggggcgugaggacuagucccuguucccagagcccacuuuuuuuucuuuuuuugaaauaaaauagccugucuuucagaucuaaaaaaaaaaaaaaaaaaaaaaaaaaaaaaaaaaaaaaaaaaaaaaaaaaaaaaaaaaaaaaaaugcaucccccccccccccccccccccccccccccccaaaggcucuuuucagagccaccagaauu

SEQ ID NO: 598 - RNA, 2371 nt, Artificial Sequence
  mRNA product Design a-2 comprising derived and/or modified sequence from YFV__NC_002031.1__SSjev-prME-XX (polyprotein: aa122-788) (opt1)
gggagaguccgcucagccagguugcagaagcggcuuagcguguguccuaaucuucucucugcguguagguaggccugugccgcaaacaagcuuaccaugggcaagcgcagcgccggguccaucauguggcuggccagccucgcgguggucaucgccugcgccggcgccgugacgcuggugcggaagaaccgcuggcuccugcugaacgucaccuccgaggaccucggcaagaccuucagcguggggaccggcaacugcacgaccaacauccuggaggccaaguacuggugccccgacuccauggaguacaacugcccgaaccugagcccccgggaggagcccgacgacaucgacugcuggugcuacggcguggagaacguccgcguggccuacgggaagugcgacuccgcgggccggagccgccggucccgccgggccaucgaccuccccacccacgagaaccacgggcugaagacccgccaggagaaguggaugacgggccggaugggggagcgccagcugcagaagaucgagcggugguucgugcgcaacccguucuucgccgucaccgcccucaccaucgccuaccuggugggcagcaacaugacccagcggguggucaucgcgcugcucgugcuggccgugggccccgccuacuccgcccacugcaucgggaucacggaccgcgacuucaucgagggcguccacgggggcaccugggugagcgcgacccuggagcaggacaagugcgugaccgucauggcccccgacaagcccucccucgacaucagccuggagacgguggccaucgaccggccggccgaggugcgcaaggucugcuacaacgccgugcugacccacgugaagaucaacgacaagugccccuccaccggcgaggcgcaccucgccgaggagaacgagggggacaacgccugcaagcggaccuacagcgaccggggcugggggaacggcugcgggcuguucggcaagggcuccaucgucgccugcgccaaguucacgugcgcgaagagcaugucccuguucgagguggaccagaccaagauccaguacgucauccgcgcccagcuccacgugggggccaagcaggagaacuggaacaccgacaucaagacccugaaguucgacgcccugagcggcagccaggagguggaguucaucggguacggcaaggccacgcucgagugccagguccagaccgcgguggacuucgggaacuccuacaucgccgagauggagaccgagagcuggaucguggaccggcagugggcccaggaccugacccugcccuggcaguccggcagcggcggggucuggcgcgagaugcaccaccucguggaguucgagcccccgcacgccgccacgauccgggugcuggcgcugggcaaccaggaggggucccucaagaccgcccugaccggcgccaugcgcgucaccaaggacacgaacgacaacaaccuguacaagcuccacgggggccacgugagcugccgggugaagcuguccgcccugacccucaagggcaccagcuacaagaucugcaccgacaagauguucuucgucaagaaccccacggacaccgggcacggcaccguggugaugcaggucaagguguccaagggggcgcccugccgcaucccggugaucgucgccgacgaccugaccgccgccaucaacaagggcauccuggugaccgugaacccgaucgccagcacgaacgacgacgagguccucaucgaggugaacccccccuucggcgacuccuacaucaucguggggcggggcgacagccgccugaccuaccaguggcacaaggagggguccagcaucggcaagcuguucacccagaccaugaagggggucgagcggcuggcggugaugggcgacacggccugggacuucuccagcgccggcggguucuucaccuccgugggcaaggggauccacaccgucuucggcagcgccuuccaggggcucuucggcggccugaacuggaucaccaaggugaucaugggggccgugcugaucugggucggcaucaacacgcgcaacaugaccauguccaugagcaugauccucgugggggugaucaugauguuccugagccugggcgucggggcggaccagggcugcgccaucaacuucggcaagugaggacuagucccuguucccagagcccacuuuuuuuucuuuuuuugaaauaaaauagccugucuuucagaucuaaaaaaaaaaaaaaaaaaaaaaaaaaaaaaaaaaaaaaaaaaaaaaaaaaaaaaaaaaaaaaaaugcaucccccccccccccccccccccccccccccccaaaggcucuuuucagagccaccagaauu

SEQ ID NO: 599 - RNA, 2341 nt, Artificial Sequence
  mRNA product Design a-2 comprising derived and/or modified sequence from YFV__NC_002031.1__SSjev-prME (polyprotein: aa122-778) (opt1)
gggagaguccgcucagccagguugcagaagcggcuuagcguguguccuaaucuucucucugcguguagguaggccugugccgcaaacaagcuuaccaugggcaagcgcagcgccggguccaucauguggcuggccagccucgcgguggucaucgccugcgccggcgccgugacccugguccgcaagaaccgguggcuccugcugaacgugaccagcgaggaccucggcaagacguucuccguggggaccggcaacugcaccaccaacauccuggaggccaaguacuggugccccgacagcauggaguacaacugcccgaaccuguccccgcgcgaggagcccgacgacaucgacugcuggugcuacggggucgagaacgugcggguggccuacggcaagugcgacagcgcggggcgcucccggcgcagccggcgcgccaucgaccuccccacgcacgagaaccacggccugaagacccggcaggagaaguggaugaccggccgcaugggggagcggcagcugcagaagaucgagcgcugguucguccggaaccccuucuucgccgugaccgcccucacgaucgccuaccuggugggcuccaacaugacccagcgcgucgugaucgcgcugcucgugcuggccgucgggcccgccuacagcgcccacugcaucggcaucaccgaccgggacuucaucgagggggugcacggcggcaccuggguguccgcgacgcuggagcaggacaagugcgucaccgugauggcccccgacaagcccagccucgacaucucccuggagaccguggccaucgaccgcccggccgagguccggaaggugugcuacaacgccgugcugacccacgucaagaucaacgacaagugccccagcacgggggaggcgcaccucgccgaggagaacgagggcgacaacgccugcaagcgcaccuacuccgaccggggguggggcaacggcugcgggcuguucggcaaggggagcaucguggccugcgccaaguucaccugcgcgaaguccaugagccuguucgagguggaccagaccaagauccaguacgucauccgcgcccagcuccacgugggcgccaagcaggagaacuggaacacggacaucaagacccugaaguucgacgcccuguccgggagccaggaggucgaguucaucggcuacggcaaggccacccucgagugccaggugcagaccgcgguggacuucgggaacuccuacaucgccgagauggagacggagagcuggaucgucgaccggcagugggcccaggaccugacccugcccuggcagagcggcuccgggggcguguggcgcgagaugcaccaccucguggaguucgagcccccgcacgccgccaccauccgcguccuggcgcuggggaaccaggagggcagccucaagaccgcccugacgggcgccaugcgggugaccaaggacaccaacgacaacaaccuguacaagcuccacgggggccacguguccugccgcgucaagcugagcgcccugacccucaaggggacguccuacaagaucugcaccgacaagauguucuucgugaagaaccccaccgacaccggccacgggacgguggucaugcaggugaaggugagcaagggcgcgcccugccggauccccgucaucguggccgacgaccugaccgccgccaucaacaagggcauccuggugaccgucaacccgaucgccuccaccaacgacgacgaggugcucaucgaggugaacccgcccuucggggacagcuacaucaucgucggccgcggggacucccggcugaccuaccaguggcacaaggagggcagcuccaucggcaagcuguucacgcagaccaugaaggggguggagcgccucgcggugaugggcgacaccgccugggacuucagcuccgccgggggcuucuucaccagcgucgggaagggcauccacacgguguucggcuccgccuuccaggggcuguucggcgggcugaacuggaucaccaaggugaucaugggcgccguccucaucuggguggggaucaacacccggaacaugaccaugagcauguccaugauccuggugggcgucaucaugauguuccugagccugggcgugggggcgugaggacuagucccuguucccagagcccacuuuuuuuucuuuuuuugaaauaaaauagccugucuuucagaucuaaaaaaaaaaaaaaaaaaaaaaaaaaaaaaaaaaaaaaaaaaaaaaaaaaaaaaaaaaaaaaaaugcaucccccccccccccccccccccccccccccccaaaggcucuuuucagagccaccagaauu

SEQ ID NO: 600 - RNA, 2389 nt, Artificial Sequence
  mRNA product Design a-2 comprising derived and/or modified sequence from YFV__NC_002031.1__X-SS-prME-XX (polyprotein: aa92-788) (opt1)
gggagaguccgcucagccagguugcagaagcggcuuagcguguguccuaaucuucucucugcguguagguaggccugugccgcaaacaagcuuaccaugcggggccugagcucccgcaagcggcgcagccacgacgugcucaccguccaguuccugauccuggggaugcuccugaugaccggcggggugacgcuggugcggaagaaccgcuggcuccugcugaacgucaccuccgaggaccucggcaagaccuucagcguggggaccggcaacugcacgaccaacauccuggaggccaaguacuggugccccgacuccauggaguacaacugcccgaaccugagcccccgggaggagcccgacgacaucgacugcuggugcuacggcguggagaacguccgcguggccuacgggaagugcgacuccgcgggccggagccgccggucccgccgggccaucgaccuccccacccacgagaaccacgggcugaagacccgccaggagaaguggaugacgggccggaugggggagcgccagcugcagaagaucgagcggugguucgugcgcaacccguucuucgccgucaccgcccucaccaucgccuaccuggugggcagcaacaugacccagcggguggucaucgcgcugcucgugcuggccgugggccccgccuacuccgcccacugcaucgggaucacggaccgcgacuucaucgagggcguccacgggggcaccugggugagcgcgacccuggagcaggacaagugcgugaccgucauggcccccgacaagcccucccucgacaucagccuggagacgguggccaucgaccggccggccgaggugcgcaaggucugcuacaacgccgugcugacccacgugaagaucaacgacaagugccccuccaccggcgaggcgcaccucgccgaggagaacgagggggacaacgccugcaagcggaccuacagcgaccggggcugggggaacggcugcgggcuguucggcaagggcuccaucgucgccugcgccaaguucacgugcgcgaaguccaugagccuguucgagguggaccagaccaagauccaguacgucauccgcgcccagcuccacgugggggccaagcaggagaacuggaacaccgacaucaagacccugaaguucgacgcccugagcggcagccaggagguggaguucaucggguacggcaaggccacgcucgagugccagguccagaccgcgguggacuucgggaacuccuacaucgccgagauggagaccgagagcuggaucguggaccggcagugggcccaggaccugacccugcccuggcaguccggcagcggcggggucuggcgcgagaugcaccaccucguggaguucgagcccccgcacgccgccacgauccgggugcuggcgcugggcaaccaggaggggucccucaagaccgcccugaccggcgccaugcgcgucaccaaggacacgaacgacaacaaccuguacaagcuccacgggggccacgugagcugccgggugaagcuguccgcccugacccucaagggcaccagcuacaagaucugcaccgacaagauguucuucgucaagaaccccacggacaccgggcacggcaccguggugaugcaggucaagguguccaagggggcgcccugccgcaucccggugaucgucgccgacgaccugaccgccgccaucaacaagggcauccuggugaccgugaacccgaucgccagcacgaacgacgacgagguccucaucgaggugaacccccccuucggcgacuccuacaucaucguggggcggggcgacagccgccugaccuaccaguggcacaaggagggguccagcaucggcaagcuguucacccagaccaugaagggggucgagcggcuggcggugaugggcgacacggccugggacuucuccagcgccggcggguucuucaccuccgugggcaaggggauccacaccgucuucggcagcgccuuccaggggcuguucggcggccucaacuggaucaccaaggugaucaugggggccgugcugaucugggucggcaucaacacgcgcaacaugaccauguccaugagcaugauccucgugggggugaucaugauguuccugagccugggcgucggggcggaccagggcugcgccaucaacuucggcaagugaggacuagucccuguucccagagcccacuuuuuuuucuuuuuuugaaauaaaauagccugucuuucagaucuaaaaaaaaaaaaaaaaaaaaaaaaaaaaaaaaaaaaaaaaaaaaaaaaaaaaaaaaaaaaaaaaugcaucccccccccccccccccccccccccccccccaaaggcucuuuucagagccaccagaauu

SEQ ID NO: 601 - RNA, 2326 nt, Artificial Sequence
  mRNA product Design a-2 comprising derived and/or modified sequence from YFV__NC_002031.1__SS-prME (polyprotein: M,aa104-778) (opt1)
gggagaguccgcucagccagguugcagaagcggcuuagcguguguccuaaucuucucucugcguguagguaggccugugccgcaaacaagcuuaccauggacgugcucaccguccaguuccugauccuggggaugcuccugaugaccggcggggugacgcuggugcggaagaaccgcuggcuccugcugaacgucaccuccgaggaccucggcaagaccuucagcguggggaccggcaacugcacgaccaacauccuggaggccaaguacuggugccccgacuccauggaguacaacugcccgaaccugagcccccgggaggagcccgacgacaucgacugcuggugcuacggcguggagaacguccgcguggccuacgggaagugcgacuccgcgggccggagccgccggucccgccgggccaucgaccuccccacccacgagaaccacgggcugaagacccgccaggagaaguggaugacgggccggaugggggagcgccagcugcagaagaucgagcggugguucgugcgcaacccguucuucgccgucaccgcccucaccaucgccuaccuggugggcagcaacaugacccagcggguggucaucgcgcugcucgugcuggccgugggccccgccuacuccgcccacugcaucgggaucacggaccgcgacuucaucgagggcguccacgggggcaccugggugagcgcgacccuggagcaggacaagugcgugaccgucauggcccccgacaagcccucccucgacaucagccuggagacgguggccaucgaccggccggccgaggugcgcaaggucugcuacaacgccgugcugacccacgugaagaucaacgacaagugccccuccaccggcgaggcgcaccucgccgaggagaacgagggggacaacgccugcaagcggaccuacagcgaccggggcugggggaacggcugcgggcuguucggcaagggcuccaucgucgccugcgccaaguucacgugcgcgaaguccaugagccuguucgagguggaccagaccaagauccaguacgucauccgcgcccagcuccacgugggggccaagcaggagaacuggaacaccgacaucaagacccugaaguucgacgcccugagcggcagccaggagguggaguucaucggguacggcaaggccacgcucgagugccagguccagaccgcgguggacuucgggaacuccuacaucgccgagauggagaccgagagcuggaucguggaccggcagugggcccaggaccugacccugcccuggcaguccggcagcggcggggucuggcgcgagaugcaccaccucguggaguucgagcccccgcacgccgccacgauccgggugcuggcgcugggcaaccaggaggggucccucaagaccgcccugaccggcgccaugcgcgucaccaaggacacgaacgacaacaaccuguacaagcuccacgggggccacgugagcugccgggugaagcuguccgcccugacccucaagggcaccagcuacaagaucugcaccgacaagauguucuucgucaagaaccccacggacaccgggcacggcaccguggugaugcaggucaagguguccaagggggcgcccugccgcaucccggugaucgucgccgacgaccugaccgccgccaucaacaagggcauccuggugaccgugaacccgaucgccagcacgaacgacgacgagguccucaucgaggugaacccccccuucggcgacuccuacaucaucguggggcggggcgacagccgccugaccuaccaguggcacaaggagggguccagcaucggcaagcuguucacccagaccaugaagggggucgagcggcuggcggugaugggcgacacggccugggacuucuccagcgccggcggguucuucaccuccgugggcaaggggauccacaccgucuucggcagcgccuuccaggggcuguucggcggccucaacuggaucaccaaggugaucaugggggccgugcugaucugggucggcaucaacacgcgcaacaugaccauguccaugagcaugauccucgugggggugaucaugauguuccugagccugggcgucggggcgugaggacuagucccuguucccagagcccacuuuuuuuucuuuuuuugaaauaaaauagccugucuuucagaucuaaaaaaaaaaaaaaaaaaaaaaaaaaaaaaaaaaaaaaaaaaaaaaaaaaaaaaaaaaaaaaaaugcaucccccccccccccccccccccccccccccccaaaggcucuuuucagagccaccagaauu

SEQ ID NO: 602 - RNA, 2353 nt, Artificial Sequence
  mRNA product Design a-2 comprising derived and/or modified sequence from YFV__NC_002031.1__SSIgE-prME-XX (polyprotein: aa122-788) (opt1)
gggagaguccgcucagccagguugcagaagcggcuuagcguguguccuaaucuucucucugcguguagguaggccugugccgcaaacaagcuuaccauggacuggaccuggauccuguuccucguggccgccgcgacccgcguccacagcgugacgcuggugcggaagaaccgcuggcuccugcugaacgucaccuccgaggaccucggcaagaccuucagcguggggaccggcaacugcacgaccaacauccuggaggccaaguacuggugccccgacuccauggaguacaacugcccgaaccugagcccccgggaggagcccgacgacaucgacugcuggugcuacggcguggagaacguccgcguggccuacgggaagugcgacuccgcgggccggagccgccggucccgccgggccaucgaccuccccacccacgagaaccacgggcugaagacccgccaggagaaguggaugacgggccggaugggggagcgccagcugcagaagaucgagcggugguucgugcgcaacccguucuucgccgucaccgcccucaccaucgccuaccuggugggcagcaacaugacccagcggguggucaucgcgcugcucgugcuggccgugggccccgccuacuccgcccacugcaucgggaucacggaccgcgacuucaucgagggcguccacgggggcaccugggugagcgcgacccuggagcaggacaagugcgugaccgucauggcccccgacaagcccucccucgacaucagccuggagacgguggccaucgaccggccggccgaggugcgcaaggucugcuacaacgccgugcugacccacgugaagaucaacgacaagugccccuccaccggcgaggcgcaccucgccgaggagaacgagggggacaacgccugcaagcggaccuacagcgaccggggcugggggaacggcugcgggcuguucggcaagggcuccaucgucgccugcgccaaguucacgugcgcgaaguccaugagccuguucgagguggaccagaccaagauccaguacgucauccgcgcccagcuccacgugggggccaagcaggagaacuggaacaccgacaucaagacccugaaguucgacgcccugagcggcagccaggagguggaguucaucggguacggcaaggccacgcucgagugccagguccagaccgcgguggacuucgggaacuccuacaucgccgagauggagaccgagagcuggaucguggaccggcagugggcccaggaccugacccugcccuggcaguccggcagcggcggggucuggcgcgagaugcaccaccucguggaguucgagcccccgcacgccgccacgauccgggugcuggcgcugggcaaccaggaggggucccucaagaccgcccugaccggcgccaugcgcgucaccaaggacacgaacgacaacaaccuguacaagcuccacgggggccacgugagcugccgggugaagcuguccgcccugacccucaagggcaccagcuacaagaucugcaccgacaagauguucuucgucaagaaccccacggacaccgggcacggcaccguggugaugcaggucaagguguccaagggggcgcccugccgcaucccggugaucgucgccgacgaccugaccgccgccaucaacaagggcauccuggugaccgugaacccgaucgccagcacgaacgacgacgagguccucaucgaggugaacccccccuucggcgacuccuacaucaucguggggcggggcgacagccgccugaccuaccaguggcacaaggagggguccagcaucggcaagcuguucacccagaccaugaagggggucgagcggcuggcggugaugggcgacacggccugggacuucuccagcgccggcggguucuucaccuccgugggcaaggggauccacaccgucuucggcagcgccuuccaggggcuguucggcggccucaacuggaucaccaaggugaucaugggggccgugcugaucugggucggcaucaacacgcgcaacaugaccauguccaugagcaugauccucgugggggugaucaugauguuccugagccugggcgucggggcggaccagggcugcgccaucaacuucggcaagugaggacuagucccuguucccagagcccacuuuuuuuucuuuuuuugaaauaaaauagccugucuuucagaucuaaaaaaaaaaaaaaaaaaaaaaaaaaaaaaaaaaaaaaaaaaaaaaaaaaaaaaaaaaaaaaaaugcaucccccccccccccccccccccccccccccccaaaggcucuuuucagagccaccagaauu

SEQ ID NO: 603 - RNA, 2323 nt, Artificial Sequence
  mRNA product Design a-2 comprising derived and/or modified sequence from YFV__NC_002031.1__SSIgE-prME (polyprotein: aa122-778) (opt1)
gggagaguccgcucagccagguugcagaagcggcuuagcguguguccuaaucuucucucugcguguagguaggccugugccgcaaacaagcuuaccauggacuggaccuggauccuguuccucguggccgccgcgacccgcguccacagcgugacgcuggugcggaagaaccgcuggcuccugcugaacgucaccuccgaggaccucggcaagaccuucagcguggggaccggcaacugcacgaccaacauccuggaggccaaguacuggugccccgacuccauggaguacaacugcccgaaccugagcccccgggaggagcccgacgacaucgacugcuggugcuacggcguggagaacguccgcguggccuacgggaagugcgacuccgcgggccggagccgccggucccgccgggccaucgaccuccccacccacgagaaccacgggcugaagacccgccaggagaaguggaugacgggccggaugggggagcgccagcugcagaagaucgagcggugguucgugcgcaacccguucuucgccgucaccgcccucaccaucgccuaccuggugggcagcaacaugacccagcggguggucaucgcgcugcucgugcuggccgugggccccgccuacuccgcccacugcaucgggaucacggaccgcgacuucaucgagggcguccacgggggcaccugggugagcgcgacccuggagcaggacaagugcgugaccgucauggcccccgacaagcccucccucgacaucagccuggagacgguggccaucgaccggccggccgaggugcgcaaggucugcuacaacgccgugcugacccacgugaagaucaacgacaagugccccuccaccggcgaggcgcaccucgccgaggagaacgagggggacaacgccugcaagcggaccuacagcgaccggggcugggggaacggcugcgggcuguucggcaagggcuccaucgucgccugcgccaaguucacgugcgcgaaguccaugagccuguucgagguggaccagaccaagauccaguacgucauccgcgcccagcuccacgugggggccaagcaggagaacuggaacaccgacaucaagacccugaaguucgacgcccugagcggcagccaggagguggaguucaucggguacggcaaggccacgcucgagugccagguccagaccgcgguggacuucgggaacuccuacaucgccgagauggagaccgagagcuggaucguggaccggcagugggcccaggaccugacccugcccuggcaguccggcagcggcggggucuggcgcgagaugcaccaccucguggaguucgagcccccgcacgccgccacgauccgggugcuggcgcugggcaaccaggaggggucccucaagaccgcccugaccggcgccaugcgcgucaccaaggacacgaacgacaacaaccuguacaagcuccacgggggccacgugagcugccgggugaagcuguccgcccugacccucaagggcaccagcuacaagaucugcaccgacaagauguucuucgucaagaaccccacggacaccgggcacggcaccguggugaugcaggucaagguguccaagggggcgcccugccgcaucccggugaucgucgccgacgaccugaccgccgccaucaacaagggcauccuggugaccgugaacccgaucgccagcacgaacgacgacgagguccucaucgaggugaacccccccuucggcgacuccuacaucaucguggggcggggcgacagccgccugaccuaccaguggcacaaggagggguccagcaucggcaagcuguucacccagaccaugaagggggucgagcggcuggcggugaugggcgacacggccugggacuucuccagcgccggcggguucuucaccuccgugggcaaggggauccacaccgucuucggcagcgccuuccaggggcuguucggcggccucaacuggaucaccaaggugaucaugggggccgugcugaucugggucggcaucaacacgcgcaacaugaccauguccaugagcaugauccucgugggggugaucaugauguuccugagccugggcgucggggcgugaggacuagucccuguucccagagcccacuuuuuuuucuuuuuuugaaauaaaauagccugucuuucagaucuaaaaaaaaaaaaaaaaaaaaaaaaaaaaaaaaaaaaaaaaaaaaaaaaaaaaaaaaaaaaaaaaugcaucccccccccccccccccccccccccccccccaaaggcucuuuucagagccaccagaauu

SEQ ID NO: 604 - RNA, 2371 nt, Artificial Sequence
  mRNA product Design a-2 comprising derived and/or modified sequence from YFV__NC_002031.1__SSjev-prME-XX (polyprotein: aa122-788) (opt1)
gggagaguccgcucagccagguugcagaagcggcuuagcguguguccuaaucuucucucugcguguagguaggccugugccgcaaacaagcuuaccaugggcaagcgcagcgccggguccaucauguggcuggccagccucgcgguggucaucgccugcgccggcgccgugacgcuggugcggaagaaccgcuggcuccugcugaacgucaccuccgaggaccucggcaagaccuucagcguggggaccggcaacugcacgaccaacauccuggaggccaaguacuggugccccgacuccauggaguacaacugcccgaaccugagcccccgggaggagcccgacgacaucgacugcuggugcuacggcguggagaacguccgcguggccuacgggaagugcgacuccgcgggccggagccgccggucccgccgggccaucgaccuccccacccacgagaaccacgggcugaagacccgccaggagaaguggaugacgggccggaugggggagcgccagcugcagaagaucgagcggugguucgugcgcaacccguucuucgccgucaccgcccucaccaucgccuaccuggugggcagcaacaugacccagcggguggucaucgcgcugcucgugcuggccgugggccccgccuacuccgcccacugcaucgggaucacggaccgcgacuucaucgagggcguccacgggggcaccugggugagcgcgacccuggagcaggacaagugcgugaccgucauggcccccgacaagcccucccucgacaucagccuggagacgguggccaucgaccggccggccgaggugcgcaaggucugcuacaacgccgugcugacccacgugaagaucaacgacaagugccccuccaccggcgaggcgcaccucgccgaggagaacgagggggacaacgccugcaagcggaccuacagcgaccggggcugggggaacggcugcgggcuguucggcaagggcuccaucgucgccugcgccaaguucacgugcgcgaaguccaugagccuguucgagguggaccagaccaagauccaguacgucauccgcgcccagcuccacgugggggccaagcaggagaacuggaacaccgacaucaagacccugaaguucgacgcccugagcggcagccaggagguggaguucaucggguacggcaaggccacgcucgagugccagguccagaccgcgguggacuucgggaacuccuacaucgccgagauggagaccgagagcuggaucguggaccggcagugggcccaggaccugacccugcccuggcaguccggcagcggcggggucuggcgcgagaugcaccaccucguggaguucgagcccccgcacgccgccacgauccgggugcuggcgcugggcaaccaggaggggucccucaagaccgcccugaccggcgccaugcgcgucaccaaggacacgaacgacaacaaccuguacaagcuccacgggggccacgugagcugccgggugaagcuguccgcccugacccucaagggcaccagcuacaagaucugcaccgacaagauguucuucgucaagaaccccacggacaccgggcacggcaccguggugaugcaggucaagguguccaagggggcgcccugccgcaucccggugaucgucgccgacgaccugaccgccgccaucaacaagggcauccuggugaccgugaacccgaucgccagcacgaacgacgacgagguccucaucgaggugaacccccccuucggcgacuccuacaucaucguggggcggggcgacagccgccugaccuaccaguggcacaaggagggguccagcaucggcaagcuguucacccagaccaugaagggggucgagcggcuggcggugaugggcgacacggccugggacuucuccagcgccggcggguucuucaccuccgugggcaaggggauccacaccgucuucggcagcgccuuccaggggcuguucggcggccucaacuggaucaccaaggugaucaugggggccgugcugaucugggucggcaucaacacgcgcaacaugaccauguccaugagcaugauccucgugggggugaucaugauguuccugagccugggcgucggggcggaccagggcugcgccaucaacuucggcaagugaggacuagucccuguucccagagcccacuuuuuuuucuuuuuuugaaauaaaauagccugucuuucagaucuaaaaaaaaaaaaaaaaaaaaaaaaaaaaaaaaaaaaaaaaaaaaaaaaaaaaaaaaaaaaaaaaugcaucccccccccccccccccccccccccccccccaaaggcucuuuucagagccaccagaauu

SEQ ID NO: 605 - RNA, 2341 nt, Artificial Sequence
  mRNA product Design a-2 comprising derived and/or modified sequence from YFV__NC_002031.1__SSjev-prME (polyprotein: aa122-778) (opt1)
gggagaguccgcucagccagguugcagaagcggcuuagcguguguccuaaucuucucucugcguguagguaggccugugccgcaaacaagcuuaccaugggcaagcgcagcgccggguccaucauguggcuggccagccucgcgguggucaucgccugcgccggcgccgugacgcuggugcggaagaaccgcuggcuccugcugaacgucaccuccgaggaccucggcaagaccuucagcguggggaccggcaacugcacgaccaacauccuggaggccaaguacuggugccccgacuccauggaguacaacugcccgaaccugagcccccgggaggagcccgacgacaucgacugcuggugcuacggcguggagaacguccgcguggccuacgggaagugcgacuccgcgggccggagccgccggucccgccgggccaucgaccuccccacccacgagaaccacgggcugaagacccgccaggagaaguggaugacgggccggaugggggagcgccagcugcagaagaucgagcggugguucgugcgcaacccguucuucgccgucaccgcccucaccaucgccuaccuggugggcagcaacaugacccagcggguggucaucgcgcugcucgugcuggccgugggccccgccuacuccgcccacugcaucgggaucacggaccgcgacuucaucgagggcguccacgggggcaccugggugagcgcgacccuggagcaggacaagugcgugaccgucauggcccccgacaagcccucccucgacaucagccuggagacgguggccaucgaccggccggccgaggugcgcaaggucugcuacaacgccgugcugacccacgugaagaucaacgacaagugccccuccaccggcgaggcgcaccucgccgaggagaacgagggggacaacgccugcaagcggaccuacagcgaccggggcugggggaacggcugcgggcuguucggcaagggcuccaucgucgccugcgccaaguucacgugcgcgaaguccaugagccuguucgagguggaccagaccaagauccaguacgucauccgcgcccagcuccacgugggggccaagcaggagaacuggaacaccgacaucaagacccugaaguucgacgcccugagcggcagccaggagguggaguucaucggguacggcaaggccacgcucgagugccagguccagaccgcgguggacuucgggaacuccuacaucgccgagauggagaccgagagcuggaucguggaccggcagugggcccaggaccugacccugcccuggcaguccggcagcggcggggucuggcgcgagaugcaccaccucguggaguucgagcccccgcacgccgccacgauccgggugcuggcgcugggcaaccaggaggggucccucaagaccgcccugaccggcgccaugcgcgucaccaaggacacgaacgacaacaaccuguacaagcuccacgggggccacgugagcugccgggugaagcuguccgcccugacccucaagggcaccagcuacaagaucugcaccgacaagauguucuucgucaagaaccccacggacaccgggcacggcaccguggugaugcaggucaagguguccaagggggcgcccugccgcaucccggugaucgucgccgacgaccugaccgccgccaucaacaagggcauccuggugaccgugaacccgaucgccagcacgaacgacgacgagguccucaucgaggugaacccccccuucggcgacuccuacaucaucguggggcggggcgacagccgccugaccuaccaguggcacaaggagggguccagcaucggcaagcuguucacccagaccaugaagggggucgagcggcuggcggugaugggcgacacggccugggacuucuccagcgccggcggguucuucaccuccgugggcaaggggauccacaccgucuucggcagcgccuuccaggggcuguucggcggccucaacuggaucaccaaggugaucaugggggccgugcugaucugggucggcaucaacacgcgcaacaugaccauguccaugagcaugauccucgugggggugaucaugauguuccugagccugggcgucggggcgugaggacuagucccuguucccagagcccacuuuuuuuucuuuuuuugaaauaaaauagccugucuuucagaucuaaaaaaaaaaaaaaaaaaaaaaaaaaaaaaaaaaaaaaaaaaaaaaaaaaaaaaaaaaaaaaaaugcaucccccccccccccccccccccccccccccccaaaggcucuuuucagagccaccagaauu

SEQ ID NO: 606 - RNA, 2389 nt, Artificial Sequence
  mRNA product Design a-2 comprising derived and/or modified sequence from YFV__NC_002031.1__X-SS-prME-XX (polyprotein: aa92-788) (opt1)
gggagaguccgcucagccagguugcagaagcggcuuagcguguguccuaaucuucucucugcguguagguaggccugugccgcaaacaagcuuaccaugcgcggccugagcucccggaagcgccggagccacgacgugcucaccguccaguuccugauccuggggaugcuccugaugaccggcggggugacgcuggugcgcaagaaccgguggcuccugcugaacgucaccuccgaggaccucggcaagaccuucagcguggggaccggcaacugcacgaccaacauccuggaggccaaguacuggugccccgacuccauggaguacaacugccccaaccugagcccccgcgaggagcccgacgacaucgacugcuggugcuacggcguggagaacguccggguggccuacgggaagugcgacuccgcgggccgcagccggcgcucccggcgcgccaucgaccuccccacccacgagaaccacgggcugaagacccggcaggagaaguggaugacgggccgcaugggggagcggcagcugcagaagaucgagcgcugguucgugcggaacccguucuucgccgucaccgcccucaccaucgccuaccuggugggcagcaacaugacccagcgcguggucaucgcgcugcucgugcuggccgugggccccgccuacuccgcccacugcaucgggaucacggaccgggacuucaucgagggcguccacgggggcaccugggugagcgcgacccuggagcaggacaagugcgugaccgucauggcccccgacaagcccucccucgacaucagccuggagacgguggccaucgaccgcccggccgaggugcggaaggucugcuacaacgccgugcugacccacgugaagaucaacgacaagugccccuccaccggcgaggcgcaccucgccgaggagaacgagggggacaacgccugcaagcgcaccuacagcgaccgcggcugggggaacggcugcgggcuguucggcaagggcuccaucgucgccugcgccaaguucacgugcgccaagagcaugucccuguucgagguggaccagaccaagauccaguacgucauccgggcgcagcuccacgugggggccaagcaggagaacuggaacaccgacaucaagacccugaaguucgacgcccugagcggcagccaggagguggaguucaucggguacggcaaggccacgcucgagugccagguccagaccgcgguggacuucgggaacuccuacaucgccgagauggagaccgagagcuggaucguggaccgccagugggcccaggaccugacccugcccuggcaguccggcagcggcggggucuggcgggagaugcaccaccucguggaguucgagcccccgcacgccgccacgauccgcgugcuggcgcugggcaaccaggaggggucccucaagaccgcccugaccggcgccaugcgggucaccaaggacacgaacgacaacaaccuguacaagcuccacgggggccacgugagcugccgcgugaagcuguccgcccugacccucaagggcaccagcuacaagaucugcaccgacaagauguucuucgucaagaaccccacggacaccgggcacggcaccguggugaugcaggucaagguguccaagggggcgcccugccggauccccgugaucgucgccgacgaccugaccgccgccaucaacaagggcauccuggugaccgugaacccgaucgccagcacgaacgacgacgagguccucaucgaggugaacccgcccuucggcgacuccuacaucaucguggggcgcggcgacagccggcugaccuaccaguggcacaaggagggguccagcaucggcaagcuguucacccagaccaugaagggggucgagcgccucgcggugaugggcgacacggccugggacuucuccagcgccggcggguucuucaccuccgugggcaaggggauccacaccgucuucggcagcgccuuccaggggcuguucggcggccugaacuggaucaccaaggugaucaugggggccgugcugaucugggucggcaucaacacgcggaacaugaccauguccaugagcaugauccucgugggggugaucaugauguuccugagccugggcgucggggcggaccagggcugcgccaucaacuucggcaagugaggacuagucccuguucccagagcccacuuuuuuuucuuuuuuugaaauaaaauagccugucuuucagaucuaaaaaaaaaaaaaaaaaaaaaaaaaaaaaaaaaaaaaaaaaaaaaaaaaaaaaaaaaaaaaaaaugcaucccccccccccccccccccccccccccccccaaaggcucuuuucagagccaccagaauu

SEQ ID NO: 607 - RNA, 2326 nt, Artificial Sequence
  mRNA product Design a-2 comprising derived and/or modified sequence from YFV__NC_002031.1__SS-prME (polyprotein: M,aa104-778) (opt1)
gggagaguccgcucagccagguugcagaagcggcuuagcguguguccuaaucuucucucugcguguagguaggccugugccgcaaacaagcuuaccauggacgugcugaccguccaguuccucauccugggcaugcugcucaugaccgggggcgugacgcuggugcgcaagaaccgguggcugcuccugaacgucaccagcgaggaccuggggaagaccuucuccgugggcaccgggaacugcacgaccaacauccucgaggccaaguacuggugccccgacagcauggaguacaacugccccaaccugagcccccgcgaggagcccgacgacaucgacugcuggugcuacggcguggagaacguccggguggccuacggcaagugcgacuccgcggggcgcucccggcgcagccggcgcgccaucgaccugcccacccacgagaaccacggccucaagacccggcaggagaaguggaugacggggcgcaugggcgagcggcagcugcagaagaucgagcgcugguucgugcggaacccguucuucgccgucaccgcccugaccaucgccuaccucgugggguccaacaugacccagcgcguggucaucgcgcugcuggugcucgccgugggccccgccuacagcgcccacugcaucggcaucacggaccgggacuucaucgaggggguccacggcgggaccuggguguccgcgacccuggagcaggacaagugcgugaccgucauggcccccgacaagcccagccuggacaucucccucgagacgguggccaucgaccgcccggccgaggugcggaaggucugcuacaacgccgugcugacccacgugaagaucaacgacaagugccccagcaccggcgaggcgcaccuggccgaggagaacgagggcgacaacgccugcaagcgcaccuacuccgaccggggguggggcaacgggugcggccucuucgggaagggcagcaucgucgccugcgccaaguucacgugcgcgaaguccaugagccuguucgagguggaccagaccaagauccaguacgucauccgcgcccagcugcacgugggcgccaagcaggagaacuggaacaccgacaucaagacccucaaguucgacgcccuguccgggagccaggagguggaguucaucggcuacgggaaggccacgcuggagugccagguccagaccgcgguggacuucggcaacuccuacaucgccgagauggagaccgagagcuggaucguggaccggcagugggcccaggaccucacccugcccuggcagagcggguccggcggcgucuggcgcgagaugcaccaccugguggaguucgagcccccgcacgccgccacgauccgcgugcucgcgcuggggaaccaggagggcagccugaagaccgcccucaccggggccaugcgggucaccaaggacacgaacgacaacaaccuguacaagcugcacggcgggcacguguccugccgcgugaagcucagcgcccugacccugaagggcaccuccuacaagaucugcaccgacaagauguucuucgucaagaaccccacggacaccggccacgggaccguggugaugcaggucaaggugagcaagggcgcgcccugccggauccccgugaucgucgccgacgaccucaccgccgccaucaacaaggggauccuggugaccgugaacccgaucgccuccacgaacgacgacgagguccugaucgaggugaacccgcccuucggcgacagcuacaucaucgugggccgcggggacucccggcucaccuaccaguggcacaaggagggcagcuccaucgggaagcuguucacccagaccaugaagggcgucgagcgccuggcggugaugggggacacggccugggacuucagcuccgccggcggcuucuucaccagcguggggaagggcauccacaccgucuucggguccgccuuccagggccucuucgggggccugaacuggaucaccaaggugaucaugggcgccgugcugaucugggucgggaucaacacgcggaacaugaccaugagcauguccaugauccuggugggcgugaucaugauguuccucagccugggggucggcgcgugaggacuagucccuguucccagagcccacuuuuuuuucuuuuuuugaaauaaaauagccugucuuucagaucuaaaaaaaaaaaaaaaaaaaaaaaaaaaaaaaaaaaaaaaaaaaaaaaaaaaaaaaaaaaaaaaaugcaucccccccccccccccccccccccccccccccaaaggcucuuuucagagccaccagaauu

SEQ ID NO: 608 - RNA, 2353 nt, Artificial Sequence
  mRNA product Design a-2 comprising derived and/or modified sequence from YFV__NC_002031.1__SSIgE-prME-XX (polyprotein: aa122-788) (opt1)
gggagaguccgcucagccagguugcagaagcggcuuagcguguguccuaaucuucucucugcguguagguaggccugugccgcaaacaagcuuaccauggacuggaccuggauccuguuccucguggccgccgcgacccgcguccacagcgugacgcuggugcggaagaaccgcuggcugcuccugaacgucaccuccgaggaccugggcaagaccuucagcguggggaccggcaacugcacgaccaacauccucgaggccaaguacuggugccccgacuccauggaguacaacugccccaaccugagcccccgggaggagcccgacgacaucgacugcuggugcuacgggguggagaacguccgcguggccuacggcaagugcgacuccgccgggcggagccgccggucccgccgggccaucgaccugcccacccacgagaaccacggccucaagacccgccaggagaaguggaugacgggccggaugggggagcgccagcugcagaagaucgagcggugguucgugcgcaacccguucuucgcggucaccgcccugaccaucgccuaccucgugggcagcaacaugacccagcggguggucaucgcccugcuggugcucgcgguggggcccgccuacuccgcccacugcaucggcaucacggaccgcgacuucaucgaggggguccacggcggcaccugggugagcgccacccuggagcaggacaagugcgugaccgucauggcccccgacaagcccucccuggacaucagccucgagacgguggcgaucgaccggccggccgaggugcgcaaggucugcuacaacgccgugcugacccacgugaagaucaacgacaagugccccuccaccggggaggcccaccuggccgaggagaacgagggcgacaacgcgugcaagcggaccuacagcgaccgcggguggggcaacggcugcggccucuucgggaagggguccaucgucgccugcgccaaguucacgugcgccaagagcaugucccuguucgagguggaccagaccaagauccaguacgucauccgggcccagcugcacgugggcgcgaagcaggagaacuggaacaccgacaucaagacccucaaguucgacgcccugagcgggucccaggagguggaguucaucggcuacggcaaggccacgcuggagugccagguccagaccgccguggacuucgggaacagcuacaucgccgagauggagaccgagagcuggaucguggaccgccagugggcgcaggaccucacccugcccuggcaguccggcagcgggggcgucuggcgcgagaugcaccaccugguggaguucgagcccccgcacgccgccacgauccgggugcucgcccuggggaaccaggagggcucccugaagaccgcgcucaccggcgccaugcgcgucaccaaggacacgaacgacaacaaccuguacaagcugcacgggggccacgugagcugccgggugaagcucuccgcccugacccugaaggggaccagcuacaagaucugcaccgacaagauguucuucgucaagaaccccacggacaccggccacgggaccguggugaugcaggucaagguguccaagggcgcccccugccgcauccccgugaucgucgccgacgaccucaccgcggccaucaacaagggcauccuggugaccgugaacccgaucgccagcacgaacgacgacgagguccugaucgaggugaacccgcccuucggggacuccuacaucaucgugggccgcggggacagccggcucaccuaccaguggcacaaggagggcuccagcaucggcaagcuguucacccagaccaugaagggggucgagcggcuggccgugaugggcgacacggccugggacuucuccagcgccgggggcuucuucaccuccguggggaagggcauccacaccgucuucggcagcgcguuccaggggcuguucggcgggcucaacuggaucaccaaggugaucaugggcgccgugcugaucugggucgggaucaacacgcgcaacaugaccauguccaugagcaugauccucgugggcgugaucaugauguuccugucccugggcgucggggccgaccagggcugcgccaucaacuucgggaagugaggacuagucccuguucccagagcccacuuuuuuuucuuuuuuugaaauaaaauagccugucuuucagaucuaaaaaaaaaaaaaaaaaaaaaaaaaaaaaaaaaaaaaaaaaaaaaaaaaaaaaaaaaaaaaaaaugcaucccccccccccccccccccccccccccccccaaaggcucuuuucagagccaccagaauu

SEQ ID NO: 609 - RNA, 2323 nt, Artificial Sequence
  mRNA product Design a-2 comprising derived and/or modified sequence from YFV__NC_002031.1__SSIgE-prME (polyprotein: aa122-778) (opt1)
gggagaguccgcucagccagguugcagaagcggcuuagcguguguccuaaucuucucucugcguguagguaggccugugccgcaaacaagcuuaccauggacuggaccuggauccuguuccucguggccgccgcgacccgcguccacagcgugacgcuggugcggaagaaccgcuggcugcuccugaacgucaccuccgaggaccugggcaagaccuucagcguggggaccggcaacugcacgaccaacauccucgaggccaaguacuggugccccgacuccauggaguacaacugccccaaccugagcccccgggaggagcccgacgacaucgacugcuggugcuacgggguggagaacguccgcguggccuacggcaagugcgacuccgccgggcggagccgccggucccgccgggccaucgaccugcccacccacgagaaccacggccucaagacccgccaggagaaguggaugacgggccggaugggggagcgccagcugcagaagaucgagcggugguucgugcgcaacccguucuucgcggucaccgcccugaccaucgccuaccucgugggcagcaacaugacccagcggguggucaucgcccugcuggugcucgcgguggggcccgccuacuccgcccacugcaucggcaucacggaccgcgacuucaucgaggggguccacggcggcaccugggugagcgccacccuggagcaggacaagugcgugaccgucauggcccccgacaagcccucccuggacaucagccucgagacgguggcgaucgaccggccggccgaggugcgcaaggucugcuacaacgccgugcugacccacgugaagaucaacgacaagugccccuccaccggggaggcccaccuggccgaggagaacgagggcgacaacgcgugcaagcggaccuacagcgaccgcggguggggcaacggcugcggccucuucgggaagggguccaucgucgccugcgccaaguucacgugcgccaagagcaugucccuguucgagguggaccagaccaagauccaguacgucauccgggcccagcugcacgugggcgcgaagcaggagaacuggaacaccgacaucaagacccucaaguucgacgcccugagcgggucccaggagguggaguucaucggcuacggcaaggccacgcuggagugccagguccagaccgccguggacuucgggaacagcuacaucgccgagauggagaccgagagcuggaucguggaccgccagugggcgcaggaccucacccugcccuggcaguccggcagcgggggcgucuggcgcgagaugcaccaccugguggaguucgagcccccgcacgccgccacgauccgggugcucgcccuggggaaccaggagggcucccugaagaccgcgcucaccggcgccaugcgcgucaccaaggacacgaacgacaacaaccuguacaagcugcacgggggccacgugagcugccgggugaagcucuccgcccugacccugaaggggaccagcuacaagaucugcaccgacaagauguucuucgucaagaaccccacggacaccggccacgggaccguggugaugcaggucaagguguccaagggcgcccccugccgcauccccgugaucgucgccgacgaccucaccgcggccaucaacaagggcauccuggugaccgugaacccgaucgccagcacgaacgacgacgagguccugaucgaggugaacccgcccuucggggacuccuacaucaucgugggccgcggggacagccggcucaccuaccaguggcacaaggagggcuccagcaucggcaagcuguucacccagaccaugaagggggucgagcggcuggccgugaugggcgacacggccugggacuucuccagcgccgggggcuucuucaccuccguggggaagggcauccacaccgucuucggcagcgcguuccaggggcuguucggcgggcucaacuggaucaccaaggugaucaugggcgccgugcugaucugggucgggaucaacacgcgcaacaugaccauguccaugagcaugauccucgugggcgugaucaugauguuccugucccugggcgucggggccugaggacuagucccuguucccagagcccacuuuuuuuucuuuuuuugaaauaaaauagccugucuuucagaucuaaaaaaaaaaaaaaaaaaaaaaaaaaaaaaaaaaaaaaaaaaaaaaaaaaaaaaaaaaaaaaaaugcaucccccccccccccccccccccccccccccccaaaggcucuuuucagagccaccagaauu

SEQ ID NO: 610 - RNA, 2371 nt, Artificial Sequence
  mRNA product Design a-2 comprising derived and/or modified sequence from YFV__NC_002031.1__SSjev-prME-XX (polyprotein: aa122-788) (opt1)
gggagaguccgcucagccagguugcagaagcggcuuagcguguguccuaaucuucucucugcguguagguaggccugugccgcaaacaagcuuaccaugggcaagcgcagcgccggguccaucauguggcuggccagccucgcgguggucaucgccugcgccggcgccgugacccuggugcggaagaaccgcuggcugcuccugaacgucaccuccgaggaccuggggaagacguucagcgugggcaccgggaacugcaccaccaacauccucgaggccaaguacuggugccccgacuccauggaguacaacugccccaaccugagcccccgggaggagcccgacgacaucgacugcuggugcuacggcguggagaacguccgcguggcguacggcaagugcgacuccgccgggcggagccgccggucccgccgggccaucgaccugcccacgcacgagaaccacggccucaagacccgccaggagaaguggaugaccgggcggaugggcgagcgccagcugcagaagaucgagcggugguucgugcgcaacccguucuucgccgucaccgcgcugacgaucgccuaccucguggggagcaacaugacccagcggguggucaucgcccugcuggugcucgccgugggccccgccuacuccgcgcacugcaucggcaucaccgaccgcgacuucaucgaggggguccacggcgggaccugggugagcgccacgcuggagcaggacaagugcgugaccgucauggcccccgacaagcccucccuggacaucagccucgagaccguggccaucgaccggccggccgaggugcgcaaggucugcuacaacgcggugcugacccacgugaagaucaacgacaagugccccuccacgggcgaggcccaccuggccgaggagaacgagggcgacaacgccugcaagcggaccuacagcgaccgcggguggggcaacgggugcggccucuucgggaagggcuccaucgucgccugcgcgaaguucacgugcgccaagagcaugucccuguucgagguggaccagaccaagauccaguacgucauccgggcccagcugcacgugggcgccaagcaggagaacuggaacaccgacaucaagacccucaaguucgacgcccugagcgggagccaggagguggaguucaucggcuacgggaaggcgacccuggagugccagguccagaccgccguggacuucggcaacuccuacaucgccgagauggagacggagagcuggaucguggaccgccagugggcccaggaccucacccugcccuggcaguccgggagcggcggcgucuggcgcgagaugcaccaccugguggaguucgagcccccgcacgcggccaccauccgggugcucgcccuggggaaccaggagggcucccugaagaccgcccucacgggggccaugcgcgucaccaaggacaccaacgacaacaaccuguacaagcugcacggcgggcacgugagcugccgggugaagcucuccgcgcugacccugaagggcacgagcuacaagaucugcaccgacaagauguucuucgucaagaaccccaccgacaccggccacgggacgguggugaugcaggucaagguguccaagggcgcccccugccgcauccccgugaucgucgccgacgaccucaccgccgccaucaacaaggggauccuggugaccgugaacccgaucgcgagcaccaacgacgacgagguccugaucgaggugaacccgcccuucggcgacuccuacaucaucgugggccgcggggacagccggcucaccuaccaguggcacaaggagggcuccagcaucgggaagcuguucacgcagaccaugaagggcgucgagcggcuggccgugaugggggacaccgccugggacuucuccagcgccggcggcuucuucaccuccguggggaagggcauccacacggucuucgggagcgccuuccagggccucuucgggggccugaacuggaucaccaaggugaucaugggcgcggugcugaucugggucgggaucaacacccgcaacaugaccauguccaugagcaugauccucgugggcgugaucaugauguuccugagccugggggucggcgccgaccaggggugcgccaucaacuucggcaagugaggacuagucccuguucccagagcccacuuuuuuuucuuuuuuugaaauaaaauagccugucuuucagaucuaaaaaaaaaaaaaaaaaaaaaaaaaaaaaaaaaaaaaaaaaaaaaaaaaaaaaaaaaaaaaaaaugcaucccccccccccccccccccccccccccccccaaaggcucuuuucagagccaccagaauu

SEQ ID NO: 611 - RNA, 2341 nt, Artificial Sequence
  mRNA product Design a-2 comprising derived and/or modified sequence from YFV__NC_002031.1__SSjev-prME (polyprotein: aa122-778) (opt1)
gggagaguccgcucagccagguugcagaagcggcuuagcguguguccuaaucuucucucugcguguagguaggccugugccgcaaacaagcuuaccaugggcaagcgcagcgccggguccaucauguggcuggccagccucgcgguggucaucgccugcgccggcgccgugacccuggugcggaagaaccgcuggcugcuccugaacgucaccuccgaggaccuggggaagacguucagcgugggcaccgggaacugcaccaccaacauccucgaggccaaguacuggugccccgacuccauggaguacaacugccccaaccugagcccccgggaggagcccgacgacaucgacugcuggugcuacggcguggagaacguccgcguggcguacggcaagugcgacuccgccgggcggagccgccggucccgccgggccaucgaccugcccacgcacgagaaccacggccucaagacccgccaggagaaguggaugaccgggcggaugggcgagcgccagcugcagaagaucgagcggugguucgugcgcaacccguucuucgccgucaccgcgcugacgaucgccuaccucguggggagcaacaugacccagcggguggucaucgcccugcuggugcucgccgugggccccgccuacuccgcgcacugcaucggcaucaccgaccgcgacuucaucgaggggguccacggcgggaccugggugagcgccacgcuggagcaggacaagugcgugaccgucauggcccccgacaagcccucccuggacaucagccucgagaccguggccaucgaccggccggccgaggugcgcaaggucugcuacaacgcggugcugacccacgugaagaucaacgacaagugccccuccacgggcgaggcccaccuggccgaggagaacgagggcgacaacgccugcaagcggaccuacagcgaccgcggguggggcaacgggugcggccucuucgggaagggcuccaucgucgccugcgcgaaguucacgugcgccaagagcaugucccuguucgagguggaccagaccaagauccaguacgucauccgggcccagcugcacgugggcgccaagcaggagaacuggaacaccgacaucaagacccucaaguucgacgcccugagcgggagccaggagguggaguucaucggcuacgggaaggcgacccuggagugccagguccagaccgccguggacuucggcaacuccuacaucgccgagauggagacggagagcuggaucguggaccgccagugggcccaggaccucacccugcccuggcaguccgggagcggcggcgucuggcgcgagaugcaccaccugguggaguucgagcccccgcacgcggccaccauccgggugcucgcccuggggaaccaggagggcucccugaagaccgcccucacgggggccaugcgcgucaccaaggacaccaacgacaacaaccuguacaagcugcacggcgggcacgugagcugccgggugaagcucuccgcgcugacccugaagggcacgagcuacaagaucugcaccgacaagauguucuucgucaagaaccccaccgacaccggccacgggacgguggugaugcaggucaagguguccaagggcgcccccugccgcauccccgugaucgucgccgacgaccucaccgccgccaucaacaaggggauccuggugaccgugaacccgaucgcgagcaccaacgacgacgagguccugaucgaggugaacccgcccuucggcgacuccuacaucaucgugggccgcggggacagccggcucaccuaccaguggcacaaggagggcuccagcaucgggaagcuguucacgcagaccaugaagggcgucgagcggcuggccgugaugggggacaccgccugggacuucuccagcgccggcggcuucuucaccuccguggggaagggcauccacacggucuucgggagcgccuuccagggccucuucgggggccugaacuggaucaccaaggugaucaugggcgcggugcugaucugggucgggaucaacacccgcaacaugaccauguccaugagcaugauccucgugggcgugaucaugauguuccugagccugggggucggcgccugaggacuagucccuguucccagagcccacuuuuuuuucuuuuuuugaaauaaaauagccugucuuucagaucuaaaaaaaaaaaaaaaaaaaaaaaaaaaaaaaaaaaaaaaaaaaaaaaaaaaaaaaaaaaaaaaaugcaucccccccccccccccccccccccccccccccaaaggcucuuuucagagccaccagaauu

SEQ ID NO: 612 - RNA, 2389 nt, Artificial Sequence
  mRNA product Design a-2 comprising derived and/or modified sequence from YFV__NC_002031.1__X-SS-prME-XX (polyprotein: aa92-788) (opt2)
gggagaguccgcucagccagguugcagaagcggcuuagcguguguccuaaucuucucucugcguguagguaggccugugccgcaaacaagcuuaccaugcgcggccucuccucccgcaagcgccgcucccacgacguccucaccguccaguuccucauccucggcaugcuccucaugaccggcggcgucacccucguccgcaagaaccgcuggcuccuccucaacgucaccuccgaggaccucggcaagaccuucuccgucggcaccggcaacugcaccaccaacauccucgaggccaaguacuggugccccgacuccauggaguacaacugccccaaccucuccccccgcgaggagcccgacgacaucgacugcuggugcuacggcgucgagaacguccgcgucgccuacggcaagugcgacuccgccggccgcucccgccgcucccgccgcgccaucgaccuccccacccacgagaaccacggccucaagacccgccaggagaaguggaugaccggccgcaugggcgagcgccagcuccagaagaucgagcgcugguucguccgcaaccccuucuucgccgucaccgcccucaccaucgccuaccucgucggcuccaacaugacccagcgcgucgucaucgcccuccucguccucgccgucggccccgccuacuccgcccacugcaucggcaucaccgaccgcgacuucaucgagggcguccacggcggcaccugggucuccgccacccucgagcaggacaagugcgucaccgucauggcccccgacaagcccucccucgacaucucccucgagaccgucgccaucgaccgccccgccgagguccgcaaggucugcuacaacgccguccucacccacgucaagaucaacgacaagugccccuccaccggcgaggcccaccucgccgaggagaacgagggcgacaacgccugcaagcgcaccuacuccgaccgcggcuggggcaacggcugcggccucuucggcaagggcuccaucgucgccugcgccaaguucaccugcgccaaguccaugucccucuucgaggucgaccagaccaagauccaguacgucauccgcgcccagcuccacgucggcgccaagcaggagaacuggaacaccgacaucaagacccucaaguucgacgcccucuccggcucccaggaggucgaguucaucggcuacggcaaggccacccucgagugccagguccagaccgccgucgacuucggcaacuccuacaucgccgagauggagaccgaguccuggaucgucgaccgccagugggcccaggaccucacccuccccuggcaguccggcuccggcggcgucuggcgcgagaugcaccaccucgucgaguucgagcccccccacgccgccaccauccgcguccucgcccucggcaaccaggagggcucccucaagaccgcccucaccggcgccaugcgcgucaccaaggacaccaacgacaacaaccucuacaagcuccacggcggccacgucuccugccgcgucaagcucuccgcccucacccucaagggcaccuccuacaagaucugcaccgacaagauguucuucgucaagaaccccaccgacaccggccacggcaccgucgucaugcaggucaaggucuccaagggcgcccccugccgcauccccgucaucgucgccgacgaccucaccgccgccaucaacaagggcauccucgucaccgucaaccccaucgccuccaccaacgacgacgagguccucaucgaggucaacccccccuucggcgacuccuacaucaucgucggccgcggcgacucccgccucaccuaccaguggcacaaggagggcuccuccaucggcaagcucuucacccagaccaugaagggcgucgagcgccucgccgucaugggcgacaccgccugggacuucuccuccgccggcggcuucuucaccuccgucggcaagggcauccacaccgucuucggcuccgccuuccagggccucuucggcggccucaacuggaucaccaaggucaucaugggcgccguccucaucugggucggcaucaacacccgcaacaugaccauguccauguccaugauccucgucggcgucaucaugauguuccucucccucggcgucggcgccgaccagggcugcgccaucaacuucggcaagugaggacuagucccuguucccagagcccacuuuuuuuucuuuuuuugaaauaaaauagccugucuuucagaucuaaaaaaaaaaaaaaaaaaaaaaaaaaaaaaaaaaaaaaaaaaaaaaaaaaaaaaaaaaaaaaaaugcaucccccccccccccccccccccccccccccccaaaggcucuuuucagagccaccagaauu

SEQ ID NO: 613 - RNA, 2326 nt, Artificial Sequence
  mRNA product Design a-2 comprising derived and/or modified sequence from YFV__NC_002031.1__SS-prME (polyprotein: M,aa104-778) (opt2)
gggagaguccgcucagccagguugcagaagcggcuuagcguguguccuaaucuucucucugcguguagguaggccugugccgcaaacaagcuuaccauggacguccucaccguccaguuccucauccucggcaugcuccucaugaccggcggcgucacccucguccgcaagaaccgcuggcuccuccucaacgucaccuccgaggaccucggcaagaccuucuccgucggcaccggcaacugcaccaccaacauccucgaggccaaguacuggugccccgacuccauggaguacaacugccccaaccucuccccccgcgaggagcccgacgacaucgacugcuggugcuacggcgucgagaacguccgcgucgccuacggcaagugcgacuccgccggccgcucccgccgcucccgccgcgccaucgaccuccccacccacgagaaccacggccucaagacccgccaggagaaguggaugaccggccgcaugggcgagcgccagcuccagaagaucgagcgcugguucguccgcaaccccuucuucgccgucaccgcccucaccaucgccuaccucgucggcuccaacaugacccagcgcgucgucaucgcccuccucguccucgccgucggccccgccuacuccgcccacugcaucggcaucaccgaccgcgacuucaucgagggcguccacggcggcaccugggucuccgccacccucgagcaggacaagugcgucaccgucauggcccccgacaagcccucccucgacaucucccucgagaccgucgccaucgaccgccccgccgagguccgcaaggucugcuacaacgccguccucacccacgucaagaucaacgacaagugccccuccaccggcgaggcccaccucgccgaggagaacgagggcgacaacgccugcaagcgcaccuacuccgaccgcggcuggggcaacggcugcggccucuucggcaagggcuccaucgucgccugcgccaaguucaccugcgccaaguccaugucccucuucgaggucgaccagaccaagauccaguacgucauccgcgcccagcuccacgucggcgccaagcaggagaacuggaacaccgacaucaagacccucaaguucgacgcccucuccggcucccaggaggucgaguucaucggcuacggcaaggccacccucgagugccagguccagaccgccgucgacuucggcaacuccuacaucgccgagauggagaccgaguccuggaucgucgaccgccagugggcccaggaccucacccuccccuggcaguccggcuccggcggcgucuggcgcgagaugcaccaccucgucgaguucgagcccccccacgccgccaccauccgcguccucgcccucggcaaccaggagggcucccucaagaccgcccucaccggcgccaugcgcgucaccaaggacaccaacgacaacaaccucuacaagcuccacggcggccacgucuccugccgcgucaagcucuccgcccucacccucaagggcaccuccuacaagaucugcaccgacaagauguucuucgucaagaaccccaccgacaccggccacggcaccgucgucaugcaggucaaggucuccaagggcgcccccugccgcauccccgucaucgucgccgacgaccucaccgccgccaucaacaagggcauccucgucaccgucaaccccaucgccuccaccaacgacgacgagguccucaucgaggucaacccccccuucggcgacuccuacaucaucgucggccgcggcgacucccgccucaccuaccaguggcacaaggagggcuccuccaucggcaagcucuucacccagaccaugaagggcgucgagcgccucgccgucaugggcgacaccgccugggacuucuccuccgccggcggcuucuucaccuccgucggcaagggcauccacaccgucuucggcuccgccuuccagggccucuucggcggccucaacuggaucaccaaggucaucaugggcgccguccucaucugggucggcaucaacacccgcaacaugaccauguccauguccaugauccucgucggcgucaucaugauguuccucucccucggcgucggcgccugaggacuagucccuguucccagagcccacuuuuuuuucuuuuuuugaaauaaaauagccugucuuucagaucuaaaaaaaaaaaaaaaaaaaaaaaaaaaaaaaaaaaaaaaaaaaaaaaaaaaaaaaaaaaaaaaaugcaucccccccccccccccccccccccccccccccaaaggcucuuuucagagccaccagaauu

SEQ ID NO: 614 - RNA, 2353 nt, Artificial Sequence
  mRNA product Design a-2 comprising derived and/or modified sequence from YFV__NC_002031.1__SSIgE-prME-XX (polyprotein: aa122-788) (opt2)
gggagaguccgcucagccagguugcagaagcggcuuagcguguguccuaaucuucucucugcguguagguaggccugugccgcaaacaagcuuaccauggacuggaccuggauccucuuccucgucgccgccgccacccgcguccacuccgucacccucguccgcaagaaccgcuggcuccuccucaacgucaccuccgaggaccucggcaagaccuucuccgucggcaccggcaacugcaccaccaacauccucgaggccaaguacuggugccccgacuccauggaguacaacugccccaaccucuccccccgcgaggagcccgacgacaucgacugcuggugcuacggcgucgagaacguccgcgucgccuacggcaagugcgacuccgccggccgcucccgccgcucccgccgcgccaucgaccuccccacccacgagaaccacggccucaagacccgccaggagaaguggaugaccggccgcaugggcgagcgccagcuccagaagaucgagcgcugguucguccgcaaccccuucuucgccgucaccgcccucaccaucgccuaccucgucggcuccaacaugacccagcgcgucgucaucgcccuccucguccucgccgucggccccgccuacuccgcccacugcaucggcaucaccgaccgcgacuucaucgagggcguccacggcggcaccugggucuccgccacccucgagcaggacaagugcgucaccgucauggcccccgacaagcccucccucgacaucucccucgagaccgucgccaucgaccgccccgccgagguccgcaaggucugcuacaacgccguccucacccacgucaagaucaacgacaagugccccuccaccggcgaggcccaccucgccgaggagaacgagggcgacaacgccugcaagcgcaccuacuccgaccgcggcuggggcaacggcugcggccucuucggcaagggcuccaucgucgccugcgccaaguucaccugcgccaaguccaugucccucuucgaggucgaccagaccaagauccaguacgucauccgcgcccagcuccacgucggcgccaagcaggagaacuggaacaccgacaucaagacccucaaguucgacgcccucuccggcucccaggaggucgaguucaucggcuacggcaaggccacccucgagugccagguccagaccgccgucgacuucggcaacuccuacaucgccgagauggagaccgaguccuggaucgucgaccgccagugggcccaggaccucacccuccccuggcaguccggcuccggcggcgucuggcgcgagaugcaccaccucgucgaguucgagcccccccacgccgccaccauccgcguccucgcccucggcaaccaggagggcucccucaagaccgcccucaccggcgccaugcgcgucaccaaggacaccaacgacaacaaccucuacaagcuccacggcggccacgucuccugccgcgucaagcucuccgcccucacccucaagggcaccuccuacaagaucugcaccgacaagauguucuucgucaagaaccccaccgacaccggccacggcaccgucgucaugcaggucaaggucuccaagggcgcccccugccgcauccccgucaucgucgccgacgaccucaccgccgccaucaacaagggcauccucgucaccgucaaccccaucgccuccaccaacgacgacgagguccucaucgaggucaacccccccuucggcgacuccuacaucaucgucggccgcggcgacucccgccucaccuaccaguggcacaaggagggcuccuccaucggcaagcucuucacccagaccaugaagggcgucgagcgccucgccgucaugggcgacaccgccugggacuucuccuccgccggcggcuucuucaccuccgucggcaagggcauccacaccgucuucggcuccgccuuccagggccucuucggcggccucaacuggaucaccaaggucaucaugggcgccguccucaucugggucggcaucaacacccgcaacaugaccauguccauguccaugauccucgucggcgucaucaugauguuccucucccucggcgucggcgccgaccagggcugcgccaucaacuucggcaagugaggacuagucccuguucccagagcccacuuuuuuuucuuuuuuugaaauaaaauagccugucuuucagaucuaaaaaaaaaaaaaaaaaaaaaaaaaaaaaaaaaaaaaaaaaaaaaaaaaaaaaaaaaaaaaaaaugcaucccccccccccccccccccccccccccccccaaaggcucuuuucagagccaccagaauu

SEQ ID NO: 615 - RNA, 2323 nt, Artificial Sequence
  mRNA product Design a-2 comprising derived and/or modified sequence from YFV__NC_002031.1__SSIgE-prME (polyprotein: aa122-778) (opt2)
gggagaguccgcucagccagguugcagaagcggcuuagcguguguccuaaucuucucucugcguguagguaggccugugccgcaaacaagcuuaccauggacuggaccuggauccucuuccucgucgccgccgccacccgcguccacuccgucacccucguccgcaagaaccgcuggcuccuccucaacgucaccuccgaggaccucggcaagaccuucuccgucggcaccggcaacugcaccaccaacauccucgaggccaaguacuggugccccgacuccauggaguacaacugccccaaccucuccccccgcgaggagcccgacgacaucgacugcuggugcuacggcgucgagaacguccgcgucgccuacggcaagugcgacuccgccggccgcucccgccgcucccgccgcgccaucgaccuccccacccacgagaaccacggccucaagacccgccaggagaaguggaugaccggccgcaugggcgagcgccagcuccagaagaucgagcgcugguucguccgcaaccccuucuucgccgucaccgcccucaccaucgccuaccucgucggcuccaacaugacccagcgcgucgucaucgcccuccucguccucgccgucggccccgccuacuccgcccacugcaucggcaucaccgaccgcgacuucaucgagggcguccacggcggcaccugggucuccgccacccucgagcaggacaagugcgucaccgucauggcccccgacaagcccucccucgacaucucccucgagaccgucgccaucgaccgccccgccgagguccgcaaggucugcuacaacgccguccucacccacgucaagaucaacgacaagugccccuccaccggcgaggcccaccucgccgaggagaacgagggcgacaacgccugcaagcgcaccuacuccgaccgcggcuggggcaacggcugcggccucuucggcaagggcuccaucgucgccugcgccaaguucaccugcgccaaguccaugucccucuucgaggucgaccagaccaagauccaguacgucauccgcgcccagcuccacgucggcgccaagcaggagaacuggaacaccgacaucaagacccucaaguucgacgcccucuccggcucccaggaggucgaguucaucggcuacggcaaggccacccucgagugccagguccagaccgccgucgacuucggcaacuccuacaucgccgagauggagaccgaguccuggaucgucgaccgccagugggcccaggaccucacccuccccuggcaguccggcuccggcggcgucuggcgcgagaugcaccaccucgucgaguucgagcccccccacgccgccaccauccgcguccucgcccucggcaaccaggagggcucccucaagaccgcccucaccggcgccaugcgcgucaccaaggacaccaacgacaacaaccucuacaagcuccacggcggccacgucuccugccgcgucaagcucuccgcccucacccucaagggcaccuccuacaagaucugcaccgacaagauguucuucgucaagaaccccaccgacaccggccacggcaccgucgucaugcaggucaaggucuccaagggcgcccccugccgcauccccgucaucgucgccgacgaccucaccgccgccaucaacaagggcauccucgucaccgucaaccccaucgccuccaccaacgacgacgagguccucaucgaggucaacccccccuucggcgacuccuacaucaucgucggccgcggcgacucccgccucaccuaccaguggcacaaggagggcuccuccaucggcaagcucuucacccagaccaugaagggcgucgagcgccucgccgucaugggcgacaccgccugggacuucuccuccgccggcggcuucuucaccuccgucggcaagggcauccacaccgucuucggcuccgccuuccagggccucuucggcggccucaacuggaucaccaaggucaucaugggcgccguccucaucugggucggcaucaacacccgcaacaugaccauguccauguccaugauccucgucggcgucaucaugauguuccucucccucggcgucggcgccugaggacuagucccuguucccagagcccacuuuuuuuucuuuuuuugaaauaaaauagccugucuuucagaucuaaaaaaaaaaaaaaaaaaaaaaaaaaaaaaaaaaaaaaaaaaaaaaaaaaaaaaaaaaaaaaaaugcaucccccccccccccccccccccccccccccccaaaggcucuuuucagagccaccagaauu

SEQ ID NO: 616 - RNA, 2371 nt, Artificial Sequence
  mRNA product Design a-2 comprising derived and/or modified sequence from YFV__NC_002031.1__SSjev-prME-XX (polyprotein: aa122-788) (opt2)
gggagaguccgcucagccagguugcagaagcggcuuagcguguguccuaaucuucucucugcguguagguaggccugugccgcaaacaagcuuaccaugggcaagcgcuccgccggcuccaucauguggcucgccucccucgccgucgucaucgccugcgccggcgccgucacccucguccgcaagaaccgcuggcuccuccucaacgucaccuccgaggaccucggcaagaccuucuccgucggcaccggcaacugcaccaccaacauccucgaggccaaguacuggugccccgacuccauggaguacaacugccccaaccucuccccccgcgaggagcccgacgacaucgacugcuggugcuacggcgucgagaacguccgcgucgccuacggcaagugcgacuccgccggccgcucccgccgcucccgccgcgccaucgaccuccccacccacgagaaccacggccucaagacccgccaggagaaguggaugaccggccgcaugggcgagcgccagcuccagaagaucgagcgcugguucguccgcaaccccuucuucgccgucaccgcccucaccaucgccuaccucgucggcuccaacaugacccagcgcgucgucaucgcccuccucguccucgccgucggccccgccuacuccgcccacugcaucggcaucaccgaccgcgacuucaucgagggcguccacggcggcaccugggucuccgccacccucgagcaggacaagugcgucaccgucauggcccccgacaagcccucccucgacaucucccucgagaccgucgccaucgaccgccccgccgagguccgcaaggucugcuacaacgccguccucacccacgucaagaucaacgacaagugccccuccaccggcgaggcccaccucgccgaggagaacgagggcgacaacgccugcaagcgcaccuacuccgaccgcggcuggggcaacggcugcggccucuucggcaagggcuccaucgucgccugcgccaaguucaccugcgccaaguccaugucccucuucgaggucgaccagaccaagauccaguacgucauccgcgcccagcuccacgucggcgccaagcaggagaacuggaacaccgacaucaagacccucaaguucgacgcccucuccggcucccaggaggucgaguucaucggcuacggcaaggccacccucgagugccagguccagaccgccgucgacuucggcaacuccuacaucgccgagauggagaccgaguccuggaucgucgaccgccagugggcccaggaccucacccuccccuggcaguccggcuccggcggcgucuggcgcgagaugcaccaccucgucgaguucgagcccccccacgccgccaccauccgcguccucgcccucggcaaccaggagggcucccucaagaccgcccucaccggcgccaugcgcgucaccaaggacaccaacgacaacaaccucuacaagcuccacggcggccacgucuccugccgcgucaagcucuccgcccucacccucaagggcaccuccuacaagaucugcaccgacaagauguucuucgucaagaaccccaccgacaccggccacggcaccgucgucaugcaggucaaggucuccaagggcgcccccugccgcauccccgucaucgucgccgacgaccucaccgccgccaucaacaagggcauccucgucaccgucaaccccaucgccuccaccaacgacgacgagguccucaucgaggucaacccccccuucggcgacuccuacaucaucgucggccgcggcgacucccgccucaccuaccaguggcacaaggagggcuccuccaucggcaagcucuucacccagaccaugaagggcgucgagcgccucgccgucaugggcgacaccgccugggacuucuccuccgccggcggcuucuucaccuccgucggcaagggcauccacaccgucuucggcuccgccuuccagggccucuucggcggccucaacuggaucaccaaggucaucaugggcgccguccucaucugggucggcaucaacacccgcaacaugaccauguccauguccaugauccucgucggcgucaucaugauguuccucucccucggcgucggcgccgaccagggcugcgccaucaacuucggcaagugaggacuagucccuguucccagagcccacuuuuuuuucuuuuuuugaaauaaaauagccugucuuucagaucuaaaaaaaaaaaaaaaaaaaaaaaaaaaaaaaaaaaaaaaaaaaaaaaaaaaaaaaaaaaaaaaaugcaucccccccccccccccccccccccccccccccaaaggcucuuuucagagccaccagaauu

SEQ ID NO: 617 - RNA, 2341 nt, Artificial Sequence
  mRNA product Design a-2 comprising derived and/or modified sequence from YFV__NC_002031.1__SSjev-prME (polyprotein: aa122-778) (opt2)
gggagaguccgcucagccagguugcagaagcggcuuagcguguguccuaaucuucucucugcguguagguaggccugugccgcaaacaagcuuaccaugggcaagcgcuccgccggcuccaucauguggcucgccucccucgccgucgucaucgccugcgccggcgccgucacccucguccgcaagaaccgcuggcuccuccucaacgucaccuccgaggaccucggcaagaccuucuccgucggcaccggcaacugcaccaccaacauccucgaggccaaguacuggugccccgacuccauggaguacaacugccccaaccucuccccccgcgaggagcccgacgacaucgacugcuggugcuacggcgucgagaacguccgcgucgccuacggcaagugcgacuccgccggccgcucccgccgcucccgccgcgccaucgaccuccccacccacgagaaccacggccucaagacccgccaggagaaguggaugaccggccgcaugggcgagcgccagcuccagaagaucgagcgcugguucguccgcaaccccuucuucgccgucaccgcccucaccaucgccuaccucgucggcuccaacaugacccagcgcgucgucaucgcccuccucguccucgccgucggccccgccuacuccgcccacugcaucggcaucaccgaccgcgacuucaucgagggcguccacggcggcaccugggucuccgccacccucgagcaggacaagugcgucaccgucauggcccccgacaagcccucccucgacaucucccucgagaccgucgccaucgaccgccccgccgagguccgcaaggucugcuacaacgccguccucacccacgucaagaucaacgacaagugccccuccaccggcgaggcccaccucgccgaggagaacgagggcgacaacgccugcaagcgcaccuacuccgaccgcggcuggggcaacggcugcggccucuucggcaagggcuccaucgucgccugcgccaaguucaccugcgccaaguccaugucccucuucgaggucgaccagaccaagauccaguacgucauccgcgcccagcuccacgucggcgccaagcaggagaacuggaacaccgacaucaagacccucaaguucgacgcccucuccggcucccaggaggucgaguucaucggcuacggcaaggccacccucgagugccagguccagaccgccgucgacuucggcaacuccuacaucgccgagauggagaccgaguccuggaucgucgaccgccagugggcccaggaccucacccuccccuggcaguccggcuccggcggcgucuggcgcgagaugcaccaccucgucgaguucgagcccccccacgccgccaccauccgcguccucgcccucggcaaccaggagggcucccucaagaccgcccucaccggcgccaugcgcgucaccaaggacaccaacgacaacaaccucuacaagcuccacggcggccacgucuccugccgcgucaagcucuccgcccucacccucaagggcaccuccuacaagaucugcaccgacaagauguucuucgucaagaaccccaccgacaccggccacggcaccgucgucaugcaggucaaggucuccaagggcgcccccugccgcauccccgucaucgucgccgacgaccucaccgccgccaucaacaagggcauccucgucaccgucaaccccaucgccuccaccaacgacgacgagguccucaucgaggucaacccccccuucggcgacuccuacaucaucgucggccgcggcgacucccgccucaccuaccaguggcacaaggagggcuccuccaucggcaagcucuucacccagaccaugaagggcgucgagcgccucgccgucaugggcgacaccgccugggacuucuccuccgccggcggcuucuucaccuccgucggcaagggcauccacaccgucuucggcuccgccuuccagggccucuucggcggccucaacuggaucaccaaggucaucaugggcgccguccucaucugggucggcaucaacacccgcaacaugaccauguccauguccaugauccucgucggcgucaucaugauguuccucucccucggcgucggcgccugaggacuagucccuguucccagagcccacuuuuuuuucuuuuuuugaaauaaaauagccugucuuucagaucuaaaaaaaaaaaaaaaaaaaaaaaaaaaaaaaaaaaaaaaaaaaaaaaaaaaaaaaaaaaaaaaaugcaucccccccccccccccccccccccccccccccaaaggcucuuuucagagccaccagaauu

SEQ ID NO: 618 - RNA, 2389 nt, Artificial Sequence
  mRNA product Design a-2 comprising derived and/or modified sequence from YFV__NC_002031.1__X-SS-prME-XX (polyprotein: aa92-788) (opt3)
gggagaguccgcucagccagguugcagaagcggcuuagcguguguccuaaucuucucucugcguguagguaggccugugccgcaaacaagcuuaccaugagaggccugagcuccaggaagcggcgcucucacgacgugcucaccguccaguuccuuauccuggggauguuguuaaugacaggagguguuacucuggugcguaaaaaccgauggcuacuccugaauguaacgucagaggaucuuggcaagaccuuuaguguggggacaggaaacugcacuaccaauauucuggaagccaaauacuggugucccgacagcauggaguauaacugcccuaauuuguccccaagagaggaaccggaugacauagauuguuggugcuacggcgucgaaaacgugaggguugcuuaugguaagugugacucugcagggcggucgcgcagaucaaggcgggccaucgaucuccccacacaugagaaucacggacugaaaacccgccaagagaaguggaugacuggccgaaugggcgaaagacagcugcagaagauugagaggugguucgugcggaacccuuucuucgcggucacagcucucaccaucgccuacuuaguggggagcaauaugacgcagcguguaguuauugcacugcuuguguuggccgucggaccagcuuauagugcacauugcaucgguauaacugaccgcgauuuuaucgaaggcgugcacgggggaaccuggguguccgccacacuggagcaagacaaaugugucacuguuauggcucccgauaagccuucucuagacauuagccucgagaccguggccaucgauagaccagcggaaguaaggaaagugugcuacaacgcaguccugacacaugugaagauuaaugacaaaugucccuccaccggcgaggcccaccuugcugaagagaacgaaggugacaaugccugcaagcggacguauucagaucgaggguggggaaacggcuguggccuguucgggaagggaaguaucguugcaugcgcuaaauuuacuugcgccaagagcaugucuuuguucgagguggaccagacaaaaauacaguacgucauucgcgcgcagcuccacgugggugccaagcaagagaauuggaacaccgauaucaaaacucugaaguuugacgcauuauccggcucacaggaaguagaguucauuggguacggaaaagcuacacuggaaugucagguucagaccgccguggauuuuggcaacagcuauaucgcugagauggaaacggagaguuggaucgucgacagacaaugggcccaggaucucacccuuccuuggcagucugguuccgggggcguguggagggagaugcaucaccuggucgaauuugagccaccgcaugcagccacaauucggguguuggcucuaggaaaucaagaaggcagccugaagacugcgcucaccggggcaaugcgcguuacaaaggacacuaacgauaauaaccuguacaaacuucacggaggucacgugucgugcagaguaaagcugucugccuugacccucaaaggcacauccuauaagauauguaccgacaaaauguuuuucgucaagaaucccacugauacggggcauggaacagugguuaugcaagugaaggucucaaaaggcgcuccuugcaggaucccagugauuguagccgacgaccugaccgcagccaucaacaaggguauauuagugacuguuaaucccauugcuaguaccaacgaugacgagguccugaucgaagugaauccuccauucggggauagcuacaucauugugggccguggagacucccggcuaacauaucaguggcacaaagagggcucuagcaucgggaagcucuuuacccagacuaugaaaggagucgagcgacuggccguuaugggugauacagcaugggacuucucaagugcgggcggguuuuucacguccgugggaaagggcauucauaccguguuugguagcgcuuuccaggggcuuuuuggcggauugaacuggauaacuaagguaaucaugggcgccguccugauuuggguggggaucaauacaagaaacaugaccaugucuaugucaaugauccucguuggagugauuaugauguuccugagucuuggcgucggugcagaucaggggugugccauaaauuuuggaaaaugaggacuagucccuguucccagagcccacuuuuuuuucuuuuuuugaaauaaaauagccugucuuucagaucuaaaaaaaaaaaaaaaaaaaaaaaaaaaaaaaaaaaaaaaaaaaaaaaaaaaaaaaaaaaaaaaaugcaucccccccccccccccccccccccccccccccaaaggcucuuuucagagccaccagaauu

SEQ ID NO: 619 - RNA, 2326 nt, Artificial Sequence
  mRNA product Design a-2 comprising derived and/or modified sequence from YFV__NC_002031.1__SS-prME (polyprotein: M,aa104-778) (opt3)
gggagaguccgcucagccagguugcagaagcggcuuagcguguguccuaaucuucucucugcguguagguaggccugugccgcaaacaagcuuaccauggacgugcugaccguccaguuccucauccuuggcaugcuguugaugacagggggaguuacuuuagugagaaagaacagguggcugcuacucaauguaacgagcgaggaucuggguaaaaccuuuuccgugggcacagggaacugcacuaccaauauucuugaagccaaguacuggugucccgacucuauggaguauaacugcccuaaucugucaccacgggaggaaccggaugacauagauuguuggugcuacggagucgaaaacgugcgcguugcuuauggcaaaugugacagugcaggucgaagccguagauccaggcgggccaucgauuugcccacacacgagaaucaugggcucaagacccgccaagagaaauggaugacuggaagaaugggcgaaaggcagcugcagaagauugagcggugguucgugcgcaacccuuucuucgcggucacagcucugaccaucgccuaccucgugggcucuaauaugacgcagcgaguaguuauugcauuacuggugcuugccgucgggccagcuuauucggcacacugcaucggaauaacugacagagauuuuaucgaaggugugcauggcgggaccugggugucagccacauuggagcaagacaagugugucacuguuauggcucccgauaaaccuagccuggacauuagucuagagaccguggccaucgauaggccagcggaaguacggaaggugugcuacaacgcaguccucacacacgugaaaauuaaugacaagugucccuccaccggagaggcccaucuggcugaagagaacgaaggcgacaaugccugcaaacguacguauucugaucgcgguugggggaacggauguggccuuuucggcaaggggagcaucguugcaugcgcuaaguuuacuugcgccaaauccaugucacuguucgagguggaccagacaaagauacaguacgucauuagagcgcaguugcacgugggagccaaacaagagaauuggaacaccgauaucaagacucucaaauuugacgcacugagugguagccaggaaguagaguucauuggcuacgggaaggcuacauuagaaugucagguucagaccgccguggauuuuggaaacucuuauaucgcugagauggaaacggaguccuggaucgucgacaggcaaugggcccaggaucugacccucccuuggcagucaggcagcggugggguguggcgggagaugcaccaucuugucgaauuugagccaccgcacgcagccacaauucgagugcuggcuuugggcaaucaagaaggaagucuaaaaacugcgcugaccggcgcaaugcgcguuacaaaggacacuaacgauaauaaccucuacaagcugcaugggggacacgugucuugcagaguaaaacuuuccgcccugaccuugaaggguacaagcuauaaaauauguaccgacaagauguuuuucgucaaaaaucccacugauacgggccacgggacagugguuaugcaagugaaggucucgaagggagcuccuugcaggaucccagugauuguagccgacgaccucaccgcagccaucaacaaaggcauacuggugacuguuaaucccauugcuucuaccaacgaugacgaggucuuaaucgaagugaauccuccauucggugauuccuacaucauuguggggcggggcgacucacgccugacauaucaguggcauaaggagggaaguagcaucggcaaacuauuuacccagacuaugaagggggucgagagacucgccguuaugggagauacagcaugggacuucuccucugcggguggcuuuuucacgagcguggggaaaggcauucacaccguguuuggaucagcuuuccagggucuguuugggggccuuaacuggauaacuaagguaaucaugggagccgucuugauuugggugggcaucaauacaaggaacaugaccaugaguauguccaugauccugguuggggugauuaugauguuccucagccugggagucggcgcaugaggacuagucccuguucccagagcccacuuuuuuuucuuuuuuugaaauaaaauagccugucuuucagaucuaaaaaaaaaaaaaaaaaaaaaaaaaaaaaaaaaaaaaaaaaaaaaaaaaaaaaaaaaaaaaaaaugcaucccccccccccccccccccccccccccccccaaaggcucuuuucagagccaccagaauu

SEQ ID NO: 620 - RNA, 2353 nt, Artificial Sequence
  mRNA product Design a-2 comprising derived and/or modified sequence from YFV__NC_002031.1__SSIgE-prME-XX (polyprotein: aa122-788) (opt3)
gggagaguccgcucagccagguugcagaagcggcuuagcguguguccuaaucuucucucugcguguagguaggccugugccgcaaacaagcuuaccauggacuggaccuggauccuguuccucguggccgcugcaacaagaguccacagcguuacucuggugcguaaaaaccgauggcuacuccugaauguaacgucagaggaucuuggcaagaccuuuaguguggggacaggaaacugcacuaccaauauucuggaagccaaauacuggugucccgacagcauggaguauaacugcccuaauuuguccccaagagaggaaccggaugacauagauuguuggugcuacggcgucgaaaacgugaggguugcuuaugguaagugugacucugcagggcggucgcgcagaucaaggcgggccaucgaucuccccacacaugagaaucacggacugaaaacccgccaagagaaguggaugacuggccgaaugggcgaaagacagcugcagaagauugagaggugguucgugcggaacccuuucuucgcggucacagcucucaccaucgccuacuuaguggggagcaauaugacgcagcguguaguuauugcacugcuuguguuggccgucggaccagcuuauagugcacauugcaucgguauaacugaccgcgauuuuaucgaaggcgugcacgggggaaccuggguguccgccacacuggagcaagacaaaugugucacuguuauggcucccgauaagccuucucuagacauuagccucgagaccguggccaucgauagaccagcggaaguaaggaaagugugcuacaacgcaguccugacacaugugaagauuaaugacaaaugucccuccaccggcgaggcccaccuugcugaagagaacgaaggugacaaugccugcaagcggacguauucagaucgaggguggggaaacggcuguggccuguucgggaagggaaguaucguugcaugcgcuaaauuuacuugcgccaagagcaugucuuuguucgagguggaccagacaaaaauacaguacgucauucgcgcgcagcuccacgugggugccaagcaagagaauuggaacaccgauaucaaaacucugaaguuugacgcauuauccggcucacaggaaguagaguucauuggguacggaaaagcuacacuggaaugucagguucagaccgccguggauuuuggcaacagcuauaucgcugagauggaaacggagaguuggaucgucgacagacaaugggcccaggaucucacccuuccuuggcagucugguuccgggggcguguggagggagaugcaucaccuggucgaauuugagccaccgcaugcagccacaauucggguguuggcucuaggaaaucaagaaggcagccugaagacugcgcucaccggggcaaugcgcguuacaaaggacacuaacgauaauaaccuguacaaacuucacggaggucacgugucgugcagaguaaagcugucugccuugacccucaaaggcacauccuauaagauauguaccgacaaaauguuuuucgucaagaaucccacugauacggggcauggaacagugguuaugcaagugaaggucucaaaaggcgcuccuugcaggaucccagugauuguagccgacgaccugaccgcagccaucaacaaggguauauuagugacuguuaaucccauugcuaguaccaacgaugacgagguccugaucgaagugaauccuccauucggggauagcuacaucauugugggccguggagacucccggcuaacauaucaguggcacaaagagggcucuagcaucgggaagcucuuuacccagacuaugaaaggagucgagcgacuggccguuaugggugauacagcaugggacuucucaagugcgggcggguuuuucacguccgugggaaagggcauucauaccguguuugguagcgcuuuccaggggcuuuuuggcggauugaacuggauaacuaagguaaucaugggcgccguccugauuuggguggggaucaauacaagaaacaugaccaugucuaugucaaugauccucguuggagugauuaugauguuccugagucuuggcgucggugcagaucaggggugugccauaaauuuuggaaaaugaggacuagucccuguucccagagcccacuuuuuuuucuuuuuuugaaauaaaauagccugucuuucagaucuaaaaaaaaaaaaaaaaaaaaaaaaaaaaaaaaaaaaaaaaaaaaaaaaaaaaaaaaaaaaaaaaugcaucccccccccccccccccccccccccccccccaaaggcucuuuucagagccaccagaauu

SEQ ID NO: 621 - RNA, 2323 nt, Artificial Sequence
  mRNA product Design a-2 comprising derived and/or modified sequence from YFV__NC_002031.1__SSIgE-prME (polyprotein: aa122-778) (opt3)
gggagaguccgcucagccagguugcagaagcggcuuagcguguguccuaaucuucucucugcguguagguaggccugugccgcaaacaagcuuaccauggacuggaccuggauccuguuccucguggccgcugcaacaagaguccacagcgugacccuggucagaaagaacagguggcuccuucugaauguuacaagcgaggacuugggcaaaacuuucuccguggggacgggaaacugcaccacaaauaucuuagaagccaaguacuggugucccgauucuauggaguauaacugcccuaaucugucaccacgggaggaaccggacgauauugacuguuggugcuacgguguagaaaacgugcgcgucgcuuauggcaaaugugauagugcagggcgaagccguagauccaggcgggccauagaccuacccacucacgagaaucauggacucaagacccgccaggagaaauggaugacaggcagaaugggugaaaggcaacugcagaagaucgagcggugguuugugcgcaacccuuucuuugcgguuaccgcucuuacuauugccuaccugguggggucuaauaugacacagcgagucgugaucgcauugcucguacuggccguuggaccagcuuauucggcacacugcauuggcaucaccgauagagacuucauagaaggcgugcaugggggaacgugggucucagccacucuggagcaggauaagugugugaccgugauggcucccgacaaaccuagccucgauaucaguuuagagacagucgccauugacaggccagcggaaguucggaaggugugcuacaacgcaguacugacucacgugaaaaucaaugauaagugucccuccaccggugaggcccaucuugcugaagagaacgaaggcgacaaugccugcaaacguacauauucugaccgcggguggggaaacggcugugguuuguuugggaagggaagcauugucgcaugcgcuaaguuuaccugcgccaaauccaugucacuguucgagguggaucaaacgaagauccaguacguuauaagagcgcagcuacacgugggcgccaaacaggagaauuggaacacugacauuaagacacucaaauucgaugcacugaguggcagccaagaagucgaguuuaucggguacggaaaggcuacccuugaaugucaggugcagacugccguagacuucgguaacucuuauauugcugagauggaaacagaguccuggaucguugauaggcagugggcccaagaccugaccuugccuuggcagucaggcagcgggggaguguggcgggagaugcaccaucucgucgaauuugagccaccgcacgcagccacgauccgagugcuggcuuuaggcaaucaggaagguagucugaaaaccgcgcucacaggggcaaugcgcgucacuaaggauaccaacgacaauaaccuuuacaagcugcauggcggacacgugucuugcagaguuaaauuguccgcccuaacacugaagggcacuagcuauaaaauuuguaccgauaagauguucuuugugaaaaaucccacagacaccgggcacggaacuguagucaugcaagugaagguuucgaagggugcuccuugcaggauaccagugaucgucgccgaugaccucacggcagccauuaacaaaggcauccuggugacaguaaaucccauagcuucuaccaacgacgaugaggugcuuauugaaguuaauccuccauucggggacuccuacaucaucgucggacggggcgauucacgccugacuuaucaguggcauaaggaggguaguagcauugggaaauuguucacccagacaaugaagggcguggagagacucgccgugaugggagacaccgcaugggauuuuuccucugcgggcggguucuuuacuagcgucggaaaagguauccacacaguuuucggcucagcuuuucaggggcuguucggaggcuuaaacuggauuacgaaggugauaaugggugccgugcugaucuggguagggauuaauaccaggaacaugacuaugaguauguccaugauccuagucggcgugaucaugauguuucucagccugggaguuggcgcaugaggacuagucccuguucccagagcccacuuuuuuuucuuuuuuugaaauaaaauagccugucuuucagaucuaaaaaaaaaaaaaaaaaaaaaaaaaaaaaaaaaaaaaaaaaaaaaaaaaaaaaaaaaaaaaaaaugcaucccccccccccccccccccccccccccccccaaaggcucuuuucagagccaccagaauu

SEQ ID NO: 622 - RNA, 2371 nt, Artificial Sequence
  mRNA product Design a-2 comprising derived and/or modified sequence from YFV__NC_002031.1__SSjev-prME-XX (polyprotein: aa122-788) (opt3)
gggagaguccgcucagccagguugcagaagcggcuuagcguguguccuaaucuucucucugcguguagguaggccugugccgcaaacaagcuuaccaugggcaagagaagcgccggguccaucauguggcuggcuucucucgcaguggucauugccugcgcgggagcuguuacucuggugcguaaaaaccgauggcuacuccugaauguaacgucagaggaucuuggcaagaccuuuaguguggggacaggaaacugcacuaccaauauucuggaagccaaauacuggugucccgacagcauggaguauaacugcccuaauuuguccccaagagaggaaccggaugacauagauuguuggugcuacggcgucgaaaacgugaggguugcuuaugguaagugugacucugcagggcggucgcgcagaucaaggcgggccaucgaucuccccacacaugagaaucacggacugaaaacccgccaagagaaguggaugacuggccgaaugggcgaaagacagcugcagaagauugagaggugguucgugcggaacccuuucuucgcggucacagcucucaccaucgccuacuuaguggggagcaauaugacgcagcguguaguuauugcacugcuuguguuggccgucggaccagcuuauagugcacauugcaucgguauaacugaccgcgauuuuaucgaaggcgugcacgggggaaccuggguguccgccacacuggagcaagacaaaugugucacuguuauggcucccgauaagccuucucuagacauuagccucgagaccguggccaucgauagaccagcggaaguaaggaaagugugcuacaacgcaguccugacacaugugaagauuaaugacaaaugucccuccaccggcgaggcccaccuugcugaagagaacgaaggugacaaugccugcaagcggacguauucagaucgaggguggggaaacggcuguggccuguucgggaagggaaguaucguugcaugcgcuaaauuuacuugcgccaagagcaugucuuuguucgagguggaccagacaaaaauacaguacgucauucgcgcgcagcuccacgugggugccaagcaagagaauuggaacaccgauaucaaaacucugaaguuugacgcauuauccggcucacaggaaguagaguucauuggguacggaaaagcuacacuggaaugucagguucagaccgccguggauuuuggcaacagcuauaucgcugagauggaaacggagaguuggaucgucgacagacaaugggcccaggaucucacccuuccuuggcagucugguuccgggggcguguggagggagaugcaucaccuggucgaauuugagccaccgcaugcagccacaauucggguguuggcucuaggaaaucaagaaggcagccugaagacugcgcucaccggggcaaugcgcguuacaaaggacacuaacgauaauaaccuguacaaacuucacggaggucacgugucgugcagaguaaagcugucugccuugacccucaaaggcacauccuauaagauauguaccgacaaaauguuuuucgucaagaaucccacugauacggggcauggaacagugguuaugcaagugaaggucucaaaaggcgcuccuugcaggaucccagugauuguagccgacgaccugaccgcagccaucaacaaggguauauuagugacuguuaaucccauugcuaguaccaacgaugacgagguccugaucgaagugaauccuccauucggggauagcuacaucauugugggccguggagacucccggcuaacauaucaguggcacaaagagggcucuagcaucgggaagcucuuuacccagacuaugaaaggagucgagcgacuggccguuaugggugauacagcaugggacuucucaagugcgggcggguuuuucacguccgugggaaagggcauucauaccguguuugguagcgcuuuccaggggcuuuuuggcggauugaacuggauaacuaagguaaucaugggcgccguccugauuuggguggggaucaauacaagaaacaugaccaugucuaugucaaugauccucguuggagugauuaugauguuccugagucuuggcgucggugcagaucaggggugugccauaaauuuuggaaaaugaggacuagucccuguucccagagcccacuuuuuuuucuuuuuuugaaauaaaauagccugucuuucagaucuaaaaaaaaaaaaaaaaaaaaaaaaaaaaaaaaaaaaaaaaaaaaaaaaaaaaaaaaaaaaaaaaugcaucccccccccccccccccccccccccccccccaaaggcucuuuucagagccaccagaauu

SEQ ID NO: 623 - RNA, 2341 nt, Artificial Sequence
  mRNA product Design a-2 comprising derived and/or modified sequence from YFV__NC_002031.1__SSjev-prME (polyprotein: aa122-778) (opt3)
gggagaguccgcucagccagguugcagaagcggcuuagcguguguccuaaucuucucucugcguguagguaggccugugccgcaaacaagcuuaccaugggcaagagaagcgccggguccaucauguggcuggcuucucucgcaguggucauugccugcgcgggagcugugacccuggucagaaagaacagguggcuccuucugaauguuacaagcgaggacuugggcaaaacuuucuccguggggacgggaaacugcaccacaaauaucuuagaagccaaguacuggugucccgauucuauggaguauaacugcccuaaucugucaccacgggaggaaccggacgauauugacuguuggugcuacgguguagaaaacgugcgcgucgcuuauggcaaaugugauagugcagggcgaagccguagauccaggcgggccauagaccuacccacucacgagaaucauggacucaagacccgccaggagaaauggaugacaggcagaaugggugaaaggcaacugcagaagaucgagcggugguuugugcgcaacccuuucuuugcgguuaccgcucuuacuauugccuaccugguggggucuaauaugacacagcgagucgugaucgcauugcucguacuggccguuggaccagcuuauucggcacacugcauuggcaucaccgauagagacuucauagaaggcgugcaugggggaacgugggucucagccacucuggagcaggauaagugugugaccgugauggcucccgacaaaccuagccucgauaucaguuuagagacagucgccauugacaggccagcggaaguucggaaggugugcuacaacgcaguacugacucacgugaaaaucaaugauaagugucccuccaccggugaggcccaucuugcugaagagaacgaaggcgacaaugccugcaaacguacauauucugaccgcggguggggaaacggcugugguuuguuugggaagggaagcauugucgcaugcgcuaaguuuaccugcgccaaauccaugucacuguucgagguggaucaaacgaagauccaguacguuauaagagcgcagcuacacgugggcgccaaacaggagaauuggaacacugacauuaagacacucaaauucgaugcacugaguggcagccaagaagucgaguuuaucggguacggaaaggcuacccuugaaugucaggugcagacugccguagacuucgguaacucuuauauugcugagauggaaacagaguccuggaucguugauaggcagugggcccaagaccugaccuugccuuggcagucaggcagcgggggaguguggcgggagaugcaccaucucgucgaauuugagccaccgcacgcagccacgauccgagugcuggcuuuaggcaaucaggaagguagucugaaaaccgcgcucacaggggcaaugcgcgucacuaaggauaccaacgacaauaaccuuuacaagcugcauggcggacacgugucuugcagaguuaaauuguccgcccuaacacugaagggcacuagcuauaaaauuuguaccgauaagauguucuuugugaaaaaucccacagacaccgggcacggaacuguagucaugcaagugaagguuucgaagggugcuccuugcaggauaccagugaucgucgccgaugaccucacggcagccauuaacaaaggcauccuggugacaguaaaucccauagcuucuaccaacgacgaugaggugcuuauugaaguuaauccuccauucggggacuccuacaucaucgucggacggggcgauucacgccugacuuaucaguggcauaaggaggguaguagcauugggaaauuguucacccagacaaugaagggcguggagagacucgccgugaugggagacaccgcaugggauuuuuccucugcgggcggguucuuuacuagcgucggaaaagguauccacacaguuuucggcucagcuuuucaggggcuguucggaggcuuaaacuggauuacgaaggugauaaugggugccgugcugaucuggguagggauuaauaccaggaacaugacuaugaguauguccaugauccuagucggcgugaucaugauguuucucagccugggaguuggcgcaugaggacuagucccuguucccagagcccacuuuuuuuucuuuuuuugaaauaaaauagccugucuuucagaucuaaaaaaaaaaaaaaaaaaaaaaaaaaaaaaaaaaaaaaaaaaaaaaaaaaaaaaaaaaaaaaaaugcaucccccccccccccccccccccccccccccccaaaggcucuuuucagagccaccagaauu

SEQ ID NO: 624 - RNA, 2389 nt, Artificial Sequence
  mRNA product Design a-2 comprising derived and/or modified sequence from YFV__NC_002031.1__X-SS-prME-XX (polyprotein: aa92-788) (opt4)
gggagaguccgcucagccagguugcagaagcggcuuagcguguguccuaaucuucucucugcguguagguaggccugugccgcaaacaagcuuaccaugagaggccugagcagcagaaagagaagaagccacgacgugcugaccgugcaguuccugauccugggcaugcugcugaugaccggcggcgugacccuggugagaaagaacagauggcugcugcugaacgugaccagcgaggaccugggcaagaccuucagcgugggcaccggcaacugcaccaccaacauccuggaggccaaguacuggugccccgacagcauggaguacaacugccccaaccugagccccagagaggagcccgacgacaucgacugcuggugcuacggcguggagaacgugagaguggccuacggcaagugcgacagcgccggcagaagcagaagaagcagaagagccaucgaccugcccacccacgagaaccacggccugaagaccagacaggagaaguggaugaccggcagaaugggcgagagacagcugcagaagaucgagagaugguucgugagaaaccccuucuucgccgugaccgcccugaccaucgccuaccuggugggcagcaacaugacccagagaguggugaucgcccugcuggugcuggccgugggccccgccuacagcgcccacugcaucggcaucaccgacagagacuucaucgagggcgugcacggcggcaccugggugagcgccacccuggagcaggacaagugcgugaccgugauggcccccgacaagcccagccuggacaucagccuggagaccguggccaucgacagacccgccgaggugagaaaggugugcuacaacgccgugcugacccacgugaagaucaacgacaagugccccagcaccggcgaggcccaccuggccgaggagaacgagggcgacaacgccugcaagagaaccuacagcgacagaggcuggggcaacggcugcggccuguucggcaagggcagcaucguggccugcgccaaguucaccugcgccaagagcaugagccuguucgagguggaccagaccaagauccaguacgugaucagagcccagcugcacgugggcgccaagcaggagaacuggaacaccgacaucaagacccugaaguucgacgcccugagcggcagccaggagguggaguucaucggcuacggcaaggccacccuggagugccaggugcagaccgccguggacuucggcaacagcuacaucgccgagauggagaccgagagcuggaucguggacagacagugggcccaggaccugacccugcccuggcagagcggcagcggcggcguguggagagagaugcaccaccugguggaguucgagcccccccacgccgccaccaucagagugcuggcccugggcaaccaggagggcagccugaagaccgcccugaccggcgccaugagagugaccaaggacaccaacgacaacaaccuguacaagcugcacggcggccacgugagcugcagagugaagcugagcgcccugacccugaagggcaccagcuacaagaucugcaccgacaagauguucuucgugaagaaccccaccgacaccggccacggcaccguggugaugcaggugaaggugagcaagggcgcccccugcagaauccccgugaucguggccgacgaccugaccgccgccaucaacaagggcauccuggugaccgugaaccccaucgccagcaccaacgacgacgaggugcugaucgaggugaacccccccuucggcgacagcuacaucaucgugggcagaggcgacagcagacugaccuaccaguggcacaaggagggcagcagcaucggcaagcuguucacccagaccaugaagggcguggagagacuggccgugaugggcgacaccgccugggacuucagcagcgccggcggcuucuucaccagcgugggcaagggcauccacaccguguucggcagcgccuuccagggccuguucggcggccugaacuggaucaccaaggugaucaugggcgccgugcugaucugggugggcaucaacaccagaaacaugaccaugagcaugagcaugauccuggugggcgugaucaugauguuccugagccugggcgugggcgccgaccagggcugcgccaucaacuucggcaagugaggacuagucccuguucccagagcccacuuuuuuuucuuuuuuugaaauaaaauagccugucuuucagaucuaaaaaaaaaaaaaaaaaaaaaaaaaaaaaaaaaaaaaaaaaaaaaaaaaaaaaaaaaaaaaaaaugcaucccccccccccccccccccccccccccccccaaaggcucuuuucagagccaccagaauu

SEQ ID NO: 625 - RNA, 2326 nt, Artificial Sequence
  mRNA product Design a-2 comprising derived and/or modified sequence from YFV__NC_002031.1__SS-prME (polyprotein: M,aa104-778) (opt4)
gggagaguccgcucagccagguugcagaagcggcuuagcguguguccuaaucuucucucugcguguagguaggccugugccgcaaacaagcuuaccauggacgugcugaccgugcaguuccugauccugggcaugcugcugaugaccggcggcgugacccuggugagaaagaacagauggcugcugcugaacgugaccagcgaggaccugggcaagaccuucagcgugggcaccggcaacugcaccaccaacauccuggaggccaaguacuggugccccgacagcauggaguacaacugccccaaccugagccccagagaggagcccgacgacaucgacugcuggugcuacggcguggagaacgugagaguggccuacggcaagugcgacagcgccggcagaagcagaagaagcagaagagccaucgaccugcccacccacgagaaccacggccugaagaccagacaggagaaguggaugaccggcagaaugggcgagagacagcugcagaagaucgagagaugguucgugagaaaccccuucuucgccgugaccgcccugaccaucgccuaccuggugggcagcaacaugacccagagaguggugaucgcccugcuggugcuggccgugggccccgccuacagcgcccacugcaucggcaucaccgacagagacuucaucgagggcgugcacggcggcaccugggugagcgccacccuggagcaggacaagugcgugaccgugauggcccccgacaagcccagccuggacaucagccuggagaccguggccaucgacagacccgccgaggugagaaaggugugcuacaacgccgugcugacccacgugaagaucaacgacaagugccccagcaccggcgaggcccaccuggccgaggagaacgagggcgacaacgccugcaagagaaccuacagcgacagaggcuggggcaacggcugcggccuguucggcaagggcagcaucguggccugcgccaaguucaccugcgccaagagcaugagccuguucgagguggaccagaccaagauccaguacgugaucagagcccagcugcacgugggcgccaagcaggagaacuggaacaccgacaucaagacccugaaguucgacgcccugagcggcagccaggagguggaguucaucggcuacggcaaggccacccuggagugccaggugcagaccgccguggacuucggcaacagcuacaucgccgagauggagaccgagagcuggaucguggacagacagugggcccaggaccugacccugcccuggcagagcggcagcggcggcguguggagagagaugcaccaccugguggaguucgagcccccccacgccgccaccaucagagugcuggcccugggcaaccaggagggcagccugaagaccgcccugaccggcgccaugagagugaccaaggacaccaacgacaacaaccuguacaagcugcacggcggccacgugagcugcagagugaagcugagcgcccugacccugaagggcaccagcuacaagaucugcaccgacaagauguucuucgugaagaaccccaccgacaccggccacggcaccguggugaugcaggugaaggugagcaagggcgcccccugcagaauccccgugaucguggccgacgaccugaccgccgccaucaacaagggcauccuggugaccgugaaccccaucgccagcaccaacgacgacgaggugcugaucgaggugaacccccccuucggcgacagcuacaucaucgugggcagaggcgacagcagacugaccuaccaguggcacaaggagggcagcagcaucggcaagcuguucacccagaccaugaagggcguggagagacuggccgugaugggcgacaccgccugggacuucagcagcgccggcggcuucuucaccagcgugggcaagggcauccacaccguguucggcagcgccuuccagggccuguucggcggccugaacuggaucaccaaggugaucaugggcgccgugcugaucugggugggcaucaacaccagaaacaugaccaugagcaugagcaugauccuggugggcgugaucaugauguuccugagccugggcgugggcgccugaggacuagucccuguucccagagcccacuuuuuuuucuuuuuuugaaauaaaauagccugucuuucagaucuaaaaaaaaaaaaaaaaaaaaaaaaaaaaaaaaaaaaaaaaaaaaaaaaaaaaaaaaaaaaaaaaugcaucccccccccccccccccccccccccccccccaaaggcucuuuucagagccaccagaauu

SEQ ID NO: 626 - RNA, 2353 nt, Artificial Sequence
  mRNA product Design a-2 comprising derived and/or modified sequence from YFV__NC_002031.1__SSIgE-prME-XX (polyprotein: aa122-788) (opt4)
gggagaguccgcucagccagguugcagaagcggcuuagcguguguccuaaucuucucucugcguguagguaggccugugccgcaaacaagcuuaccauggacuggaccuggauccuguuccugguggccgccgccaccagagugcacagcgugacccuggugagaaagaacagauggcugcugcugaacgugaccagcgaggaccugggcaagaccuucagcgugggcaccggcaacugcaccaccaacauccuggaggccaaguacuggugccccgacagcauggaguacaacugccccaaccugagccccagagaggagcccgacgacaucgacugcuggugcuacggcguggagaacgugagaguggccuacggcaagugcgacagcgccggcagaagcagaagaagcagaagagccaucgaccugcccacccacgagaaccacggccugaagaccagacaggagaaguggaugaccggcagaaugggcgagagacagcugcagaagaucgagagaugguucgugagaaaccccuucuucgccgugaccgcccugaccaucgccuaccuggugggcagcaacaugacccagagaguggugaucgcccugcuggugcuggccgugggccccgccuacagcgcccacugcaucggcaucaccgacagagacuucaucgagggcgugcacggcggcaccugggugagcgccacccuggagcaggacaagugcgugaccgugauggcccccgacaagcccagccuggacaucagccuggagaccguggccaucgacagacccgccgaggugagaaaggugugcuacaacgccgugcugacccacgugaagaucaacgacaagugccccagcaccggcgaggcccaccuggccgaggagaacgagggcgacaacgccugcaagagaaccuacagcgacagaggcuggggcaacggcugcggccuguucggcaagggcagcaucguggccugcgccaaguucaccugcgccaagagcaugagccuguucgagguggaccagaccaagauccaguacgugaucagagcccagcugcacgugggcgccaagcaggagaacuggaacaccgacaucaagacccugaaguucgacgcccugagcggcagccaggagguggaguucaucggcuacggcaaggccacccuggagugccaggugcagaccgccguggacuucggcaacagcuacaucgccgagauggagaccgagagcuggaucguggacagacagugggcccaggaccugacccugcccuggcagagcggcagcggcggcguguggagagagaugcaccaccugguggaguucgagcccccccacgccgccaccaucagagugcuggcccugggcaaccaggagggcagccugaagaccgcccugaccggcgccaugagagugaccaaggacaccaacgacaacaaccuguacaagcugcacggcggccacgugagcugcagagugaagcugagcgcccugacccugaagggcaccagcuacaagaucugcaccgacaagauguucuucgugaagaaccccaccgacaccggccacggcaccguggugaugcaggugaaggugagcaagggcgcccccugcagaauccccgugaucguggccgacgaccugaccgccgccaucaacaagggcauccuggugaccgugaaccccaucgccagcaccaacgacgacgaggugcugaucgaggugaacccccccuucggcgacagcuacaucaucgugggcagaggcgacagcagacugaccuaccaguggcacaaggagggcagcagcaucggcaagcuguucacccagaccaugaagggcguggagagacuggccgugaugggcgacaccgccugggacuucagcagcgccggcggcuucuucaccagcgugggcaagggcauccacaccguguucggcagcgccuuccagggccuguucggcggccugaacuggaucaccaaggugaucaugggcgccgugcugaucugggugggcaucaacaccagaaacaugaccaugagcaugagcaugauccuggugggcgugaucaugauguuccugagccugggcgugggcgccgaccagggcugcgccaucaacuucggcaagugaggacuagucccuguucccagagcccacuuuuuuuucuuuuuuugaaauaaaauagccugucuuucagaucuaaaaaaaaaaaaaaaaaaaaaaaaaaaaaaaaaaaaaaaaaaaaaaaaaaaaaaaaaaaaaaaaugcaucccccccccccccccccccccccccccccccaaaggcucuuuucagagccaccagaauu

SEQ ID NO: 627 - RNA, 2323 nt, Artificial Sequence
  mRNA product Design a-2 comprising derived and/or modified sequence from YFV__NC_002031.1__SSIgE-prME (polyprotein: aa122-778) (opt4)
gggagaguccgcucagccagguugcagaagcggcuuagcguguguccuaaucuucucucugcguguagguaggccugugccgcaaacaagcuuaccauggacuggaccuggauccuguuccugguggccgccgccaccagagugcacagcgugacccuggugagaaagaacagauggcugcugcugaacgugaccagcgaggaccugggcaagaccuucagcgugggcaccggcaacugcaccaccaacauccuggaggccaaguacuggugccccgacagcauggaguacaacugccccaaccugagccccagagaggagcccgacgacaucgacugcuggugcuacggcguggagaacgugagaguggccuacggcaagugcgacagcgccggcagaagcagaagaagcagaagagccaucgaccugcccacccacgagaaccacggccugaagaccagacaggagaaguggaugaccggcagaaugggcgagagacagcugcagaagaucgagagaugguucgugagaaaccccuucuucgccgugaccgcccugaccaucgccuaccuggugggcagcaacaugacccagagaguggugaucgcccugcuggugcuggccgugggccccgccuacagcgcccacugcaucggcaucaccgacagagacuucaucgagggcgugcacggcggcaccugggugagcgccacccuggagcaggacaagugcgugaccgugauggcccccgacaagcccagccuggacaucagccuggagaccguggccaucgacagacccgccgaggugagaaaggugugcuacaacgccgugcugacccacgugaagaucaacgacaagugccccagcaccggcgaggcccaccuggccgaggagaacgagggcgacaacgccugcaagagaaccuacagcgacagaggcuggggcaacggcugcggccuguucggcaagggcagcaucguggccugcgccaaguucaccugcgccaagagcaugagccuguucgagguggaccagaccaagauccaguacgugaucagagcccagcugcacgugggcgccaagcaggagaacuggaacaccgacaucaagacccugaaguucgacgcccugagcggcagccaggagguggaguucaucggcuacggcaaggccacccuggagugccaggugcagaccgccguggacuucggcaacagcuacaucgccgagauggagaccgagagcuggaucguggacagacagugggcccaggaccugacccugcccuggcagagcggcagcggcggcguguggagagagaugcaccaccugguggaguucgagcccccccacgccgccaccaucagagugcuggcccugggcaaccaggagggcagccugaagaccgcccugaccggcgccaugagagugaccaaggacaccaacgacaacaaccuguacaagcugcacggcggccacgugagcugcagagugaagcugagcgcccugacccugaagggcaccagcuacaagaucugcaccgacaagauguucuucgugaagaaccccaccgacaccggccacggcaccguggugaugcaggugaaggugagcaagggcgcccccugcagaauccccgugaucguggccgacgaccugaccgccgccaucaacaagggcauccuggugaccgugaaccccaucgccagcaccaacgacgacgaggugcugaucgaggugaacccccccuucggcgacagcuacaucaucgugggcagaggcgacagcagacugaccuaccaguggcacaaggagggcagcagcaucggcaagcuguucacccagaccaugaagggcguggagagacuggccgugaugggcgacaccgccugggacuucagcagcgccggcggcuucuucaccagcgugggcaagggcauccacaccguguucggcagcgccuuccagggccuguucggcggccugaacuggaucaccaaggugaucaugggcgccgugcugaucugggugggcaucaacaccagaaacaugaccaugagcaugagcaugauccuggugggcgugaucaugauguuccugagccugggcgugggcgccugaggacuagucccuguucccagagcccacuuuuuuuucuuuuuuugaaauaaaauagccugucuuucagaucuaaaaaaaaaaaaaaaaaaaaaaaaaaaaaaaaaaaaaaaaaaaaaaaaaaaaaaaaaaaaaaaaugcaucccccccccccccccccccccccccccccccaaaggcucuuuucagagccaccagaauu

SEQ ID NO: 628 - RNA, 2371 nt, Artificial Sequence
  mRNA product Design a-2 comprising derived and/or modified sequence from YFV__NC_002031.1__SSjev-prME-XX (polyprotein: aa122-788) (opt4)
gggagaguccgcucagccagguugcagaagcggcuuagcguguguccuaaucuucucucugcguguagguaggccugugccgcaaacaagcuuaccaugggcaagagaagcgccggcagcaucauguggcuggccagccuggccguggugaucgccugcgccggcgccgugacccuggugagaaagaacagauggcugcugcugaacgugaccagcgaggaccugggcaagaccuucagcgugggcaccggcaacugcaccaccaacauccuggaggccaaguacuggugccccgacagcauggaguacaacugccccaaccugagccccagagaggagcccgacgacaucgacugcuggugcuacggcguggagaacgugagaguggccuacggcaagugcgacagcgccggcagaagcagaagaagcagaagagccaucgaccugcccacccacgagaaccacggccugaagaccagacaggagaaguggaugaccggcagaaugggcgagagacagcugcagaagaucgagagaugguucgugagaaaccccuucuucgccgugaccgcccugaccaucgccuaccuggugggcagcaacaugacccagagaguggugaucgcccugcuggugcuggccgugggccccgccuacagcgcccacugcaucggcaucaccgacagagacuucaucgagggcgugcacggcggcaccugggugagcgccacccuggagcaggacaagugcgugaccgugauggcccccgacaagcccagccuggacaucagccuggagaccguggccaucgacagacccgccgaggugagaaaggugugcuacaacgccgugcugacccacgugaagaucaacgacaagugccccagcaccggcgaggcccaccuggccgaggagaacgagggcgacaacgccugcaagagaaccuacagcgacagaggcuggggcaacggcugcggccuguucggcaagggcagcaucguggccugcgccaaguucaccugcgccaagagcaugagccuguucgagguggaccagaccaagauccaguacgugaucagagcccagcugcacgugggcgccaagcaggagaacuggaacaccgacaucaagacccugaaguucgacgcccugagcggcagccaggagguggaguucaucggcuacggcaaggccacccuggagugccaggugcagaccgccguggacuucggcaacagcuacaucgccgagauggagaccgagagcuggaucguggacagacagugggcccaggaccugacccugcccuggcagagcggcagcggcggcguguggagagagaugcaccaccugguggaguucgagcccccccacgccgccaccaucagagugcuggcccugggcaaccaggagggcagccugaagaccgcccugaccggcgccaugagagugaccaaggacaccaacgacaacaaccuguacaagcugcacggcggccacgugagcugcagagugaagcugagcgcccugacccugaagggcaccagcuacaagaucugcaccgacaagauguucuucgugaagaaccccaccgacaccggccacggcaccguggugaugcaggugaaggugagcaagggcgcccccugcagaauccccgugaucguggccgacgaccugaccgccgccaucaacaagggcauccuggugaccgugaaccccaucgccagcaccaacgacgacgaggugcugaucgaggugaacccccccuucggcgacagcuacaucaucgugggcagaggcgacagcagacugaccuaccaguggcacaaggagggcagcagcaucggcaagcuguucacccagaccaugaagggcguggagagacuggccgugaugggcgacaccgccugggacuucagcagcgccggcggcuucuucaccagcgugggcaagggcauccacaccguguucggcagcgccuuccagggccuguucggcggccugaacuggaucaccaaggugaucaugggcgccgugcugaucugggugggcaucaacaccagaaacaugaccaugagcaugagcaugauccuggugggcgugaucaugauguuccugagccugggcgugggcgccgaccagggcugcgccaucaacuucggcaagugaggacuagucccuguucccagagcccacuuuuuuuucuuuuuuugaaauaaaauagccugucuuucagaucuaaaaaaaaaaaaaaaaaaaaaaaaaaaaaaaaaaaaaaaaaaaaaaaaaaaaaaaaaaaaaaaaugcaucccccccccccccccccccccccccccccccaaaggcucuuuucagagccaccagaauu

SEQ ID NO: 629 - RNA, 2341 nt, Artificial Sequence
  mRNA product Design a-2 comprising derived and/or modified sequence from YFV__NC_002031.1__SSjev-prME (polyprotein: aa122-778) (opt4)
gggagaguccgcucagccagguugcagaagcggcuuagcguguguccuaaucuucucucugcguguagguaggccugugccgcaaacaagcuuaccaugggcaagagaagcgccggcagcaucauguggcuggccagccuggccguggugaucgccugcgccggcgccgugacccuggugagaaagaacagauggcugcugcugaacgugaccagcgaggaccugggcaagaccuucagcgugggcaccggcaacugcaccaccaacauccuggaggccaaguacuggugccccgacagcauggaguacaacugccccaaccugagccccagagaggagcccgacgacaucgacugcuggugcuacggcguggagaacgugagaguggccuacggcaagugcgacagcgccggcagaagcagaagaagcagaagagccaucgaccugcccacccacgagaaccacggccugaagaccagacaggagaaguggaugaccggcagaaugggcgagagacagcugcagaagaucgagagaugguucgugagaaaccccuucuucgccgugaccgcccugaccaucgccuaccuggugggcagcaacaugacccagagaguggugaucgcccugcuggugcuggccgugggccccgccuacagcgcccacugcaucggcaucaccgacagagacuucaucgagggcgugcacggcggcaccugggugagcgccacccuggagcaggacaagugcgugaccgugauggcccccgacaagcccagccuggacaucagccuggagaccguggccaucgacagacccgccgaggugagaaaggugugcuacaacgccgugcugacccacgugaagaucaacgacaagugccccagcaccggcgaggcccaccuggccgaggagaacgagggcgacaacgccugcaagagaaccuacagcgacagaggcuggggcaacggcugcggccuguucggcaagggcagcaucguggccugcgccaaguucaccugcgccaagagcaugagccuguucgagguggaccagaccaagauccaguacgugaucagagcccagcugcacgugggcgccaagcaggagaacuggaacaccgacaucaagacccugaaguucgacgcccugagcggcagccaggagguggaguucaucggcuacggcaaggccacccuggagugccaggugcagaccgccguggacuucggcaacagcuacaucgccgagauggagaccgagagcuggaucguggacagacagugggcccaggaccugacccugcccuggcagagcggcagcggcggcguguggagagagaugcaccaccugguggaguucgagcccccccacgccgccaccaucagagugcuggcccugggcaaccaggagggcagccugaagaccgcccugaccggcgccaugagagugaccaaggacaccaacgacaacaaccuguacaagcugcacggcggccacgugagcugcagagugaagcugagcgcccugacccugaagggcaccagcuacaagaucugcaccgacaagauguucuucgugaagaaccccaccgacaccggccacggcaccguggugaugcaggugaaggugagcaagggcgcccccugcagaauccccgugaucguggccgacgaccugaccgccgccaucaacaagggcauccuggugaccgugaaccccaucgccagcaccaacgacgacgaggugcugaucgaggugaacccccccuucggcgacagcuacaucaucgugggcagaggcgacagcagacugaccuaccaguggcacaaggagggcagcagcaucggcaagcuguucacccagaccaugaagggcguggagagacuggccgugaugggcgacaccgccugggacuucagcagcgccggcggcuucuucaccagcgugggcaagggcauccacaccguguucggcagcgccuuccagggccuguucggcggccugaacuggaucaccaaggugaucaugggcgccgugcugaucugggugggcaucaacaccagaaacaugaccaugagcaugagcaugauccuggugggcgugaucaugauguuccugagccugggcgugggcgccugaggacuagucccuguucccagagcccacuuuuuuuucuuuuuuugaaauaaaauagccugucuuucagaucuaaaaaaaaaaaaaaaaaaaaaaaaaaaaaaaaaaaaaaaaaaaaaaaaaaaaaaaaaaaaaaaaugcaucccccccccccccccccccccccccccccccaaaggcucuuuucagagccaccagaauu

SEQ ID NO: 630 - RNA, 2389 nt, Artificial Sequence
  mRNA product Design a-2 comprising derived and/or modified sequence from YFV__NC_002031.1__X-SS-prME-XX (polyprotein: aa92-788) (opt5)
gggagaguccgcucagccagguugcagaagcggcuuagcguguguccuaaucuucucucugcguguagguaggccugugccgcaaacaagcuuaccaugagaggccugagcucccggaagcgcagaucucacgacgugcucaccguccaguuccugauccuugggaugcugcucaugacaggaggcguuacgcuggugcggaaaaaccgcuggcuucugcucaaugugaccagcgaggaucuggggaagacauuuuccgucggaaccggcaacugcacaaccaauauucuggaagccaaauacuggugucccgacucuauggaguauaacugcccuaaucucagcccgagagaagaacccgaugacaucgauuguuggugcuacgggguggaaaacguucggguggcuuauggaaagugugacuccgccggccgcucuagacggagccgcagagcgauugaucugccuacacaugagaaucacggccuuaaaacccggcaagagaaguggaugacggggcgcaugggagaaagacagcugcagaagaucgagcggugguucguccgcaaccccuuuuucgcugugaccgcccucacaauugccuaccugguuggcuccaauaugacccagagaguggucaucgcccuucuggugcucgcuguggggccugcuuauagcgcccauugcaucggaauuacagaccgggauuuuaucgaaggcguccacgggggaaccuggguuucugcgacgcuggagcaagacaaaugugugacagugauggcccccgauaagccuucccuggacauuagccucgagaccgucgcuaucgauagaccggccgaagugcgcaaaguuugcuacaacgcugugcugacacaugucaagauuaaugacaaaugucccucuaccggcgaggcccaccuugcggaagagaacgaaggcgacaaugccugcaagcggaccuauuccgauagaggguggggaaacggcugugggcuguucggaaagggcagcaucguggcuugcgccaaauuuacaugcgcuaagucuaugucccucuucgagguugaccagacgaaaauucaguacgugauccgcgcccagcugcacgucggggccaagcaagagaauuggaacaccgauaucaaaacacuuaaguuugacgcucugagcggaucccaggaaguggaguucauuggcuacggcaaagcgacccucgaaugucagguccagacagccguggauuuugggaacucuuauaucgcugagauggaaaccgagagcuggauuguugaccggcaaugggcccaggaucugacgcugccuuggcaguccggaagcggcgggguguggagagagaugcaucaccucgucgaguucgagcccccucaugccgcuacaauccgcgugcuggcccuuggaaaucaagaaggcucucugaagaccgcgcucaccggggcuaugcggguuacaaaggacaccaacgauaauaaccuguacaaacuucacggcggacacguguccugcagagucaagcugagcgcccucacacugaaaggcacgucuuauaagauuuguaccgacaaaauguuuuucgugaagaaucccacagauaccgggcauggaacagugguuaugcaggucaaggugagcaaaggcgccccgugccgcaucccugugaucgucgcugacgaccugaccgccgcuauuaacaaggggauccucgugacgguuaaucccauugccuccaccaacgaugacgaggugcugaucgaagucaauccucccuucggagauucuuacauuaucgugggccggggagacagcagacuuacauaucaguggcacaaagagggcuccagcaucggaaagcuguuuacccagacaaugaaaggcguugagcgccucgcggugaugggggauaccgccugggacuucucuuccgcuggaggcuuuuucacgagcgucgggaaggggauucauacaguguuuggcucugccuuccaagggcuguuuggcggacugaacuggaucaccaagguuauuaugggcgcugugcuuaucugggucgggauuaauacacggaacaugaccauguccaugagcaugauccucgugggagugauuaugauguuccugucccugggcgucggggccgaucagggaugugcgaucaauuuuggcaaaugaggacuagucccuguucccagagcccacuuuuuuuucuuuuuuugaaauaaaauagccugucuuucagaucuaaaaaaaaaaaaaaaaaaaaaaaaaaaaaaaaaaaaaaaaaaaaaaaaaaaaaaaaaaaaaaaaugcaucccccccccccccccccccccccccccccccaaaggcucuuuucagagccaccagaauu

SEQ ID NO: 631 - RNA, 2326 nt, Artificial Sequence
  mRNA product Design a-2 comprising derived and/or modified sequence from YFV__NC_002031.1__SS-prME (polyprotein: M,aa104-778) (opt5)
gggagaguccgcucagccagguugcagaagcggcuuagcguguguccuaaucuucucucugcguguagguaggccugugccgcaaacaagcuuaccauggacgugcugaccguccaguuccucauccugggcaugcuucugaugacagggggaguuacgcucgugagaaagaaccgguggcugcuucugaaugugaccagcgaggaucucggcaaaacauuuuccgucgggaccggaaacugcacaaccaauauucuggaagccaaguacuggugucccgacucuauggaguauaacugcccuaaucugagcccgcgcgaagaacccgaugacaucgauuguuggugcuacggcguggaaaacguuagaguggcuuaugggaaaugugacuccgccggacggucucgcagaagccggcgcgcgauugaucucccuacacacgagaaucauggccugaagaccagacaagagaaauggaugacgggccggaugggggaacgccagcuucagaagaucgagagaugguucguccggaaccccuuuuucgcugugaccgcccugacaauugccuaccucguuggauccaauaugacccagcgcguggucaucgcucugcuugugcuggccgugggcccugcuuauucugcccacugcaucgggauuacagacagagauuuuaucgaaggaguccauggcgggaccuggguuagcgcgacgcucgagcaagacaagugugugacagugauggcccccgauaaaccuucccuggacauuagccuggagaccgucgcuaucgaucggccggccgaagugcgcaagguuugcuacaacgcugugcucacacacgucaaaauuaaugacaagugucccucuaccggagaggcccaucuggcggaagagaacgaaggcgacaaugccugcaaaagaaccuauuccgaucggggcugggggaacggauguggccuuuucgggaagggaagcaucguggcuugcgccaaguuuacaugcgcuaaaucuaugucccuguucgagguugaccagacgaagauucaguacgugaucagagcccagcuccacgucggcgccaaacaagagaauuggaacaccgauaucaagacacugaaauuugacgcucuuagcgggucucaggaaguggaguucauuggauacggcaaggcgacccuggaaugucagguccagacagccguggauuuuggcaacuccuauaucgcugagauggaaaccgagagcuggauuguugaccgccaaugggcccaggaucucacgcugccuuggcaguccgggucuggaggcguguggcgggagaugcaccaucuggucgaguucgagcccccucacgccgcuacaaucagagugcucgcccuggggaaucaagaaggaagccuuaaaaccgcgcugaccggcgcuaugcgcguuacaaaggacaccaacgauaauaaccucuacaagcugcaugggggccacguguccugccgggucaaacuuagcgcccugacacucaagggaacgucuuauaaaauuuguaccgacaagauguuuuucgugaaaaaucccacagauaccggccacgggacagugguuaugcaggucaagguguccaagggagccccgugcagaaucccugugaucgucgcugacgaccugaccgccgcuauuaacaaaggcauccuggugacgguuaaucccauugccagcaccaacgaugacgaggugcucaucgaagucaauccucccuucggggauucuuacauuaucgugggacgcggcgacagccggcugacauaucaguggcauaaggagggguccucuaucggcaaacuuuuuacccagacaaugaagggaguugagagacuggcggugaugggcgauaccgccugggacuucagcuccgcugggggauuuuucacgagcgucggcaaagggauucacacaguguuuggaucugccuuccaaggccucuuugggggccugaacuggaucaccaagguuauuaugggagcugugcugaucugggucggcauuaauacacgcaacaugaccauguccaugagcaugauccuugugggggugauuaugauguuccucucucugggagucggcgccugaggacuagucccuguucccagagcccacuuuuuuuucuuuuuuugaaauaaaauagccugucuuucagaucuaaaaaaaaaaaaaaaaaaaaaaaaaaaaaaaaaaaaaaaaaaaaaaaaaaaaaaaaaaaaaaaaugcaucccccccccccccccccccccccccccccccaaaggcucuuuucagagccaccagaauu

SEQ ID NO: 632 - RNA, 2353 nt, Artificial Sequence
  mRNA product Design a-2 comprising derived and/or modified sequence from YFV__NC_002031.1__SSIgE-prME-XX (polyprotein: aa122-788) (opt5)
gggagaguccgcucagccagguugcagaagcggcuuagcguguguccuaaucuucucucugcguguagguaggccugugccgcaaacaagcuuaccauggacuggaccuggauccuguuccucguggccgcugccacaagaguccacagcguuacgcuggugcggaaaaaccgcuggcuucugcucaaugugaccagcgaggaucuggggaagacauuuuccgucggaaccggcaacugcacaaccaauauucuggaagccaaauacuggugucccgacucuauggaguauaacugcccuaaucucagcccgagagaagaacccgaugacaucgauuguuggugcuacgggguggaaaacguucggguggcuuauggaaagugugacuccgccggccgcucuagacggagccgcagagcgauugaucugccuacacaugagaaucacggccuuaaaacccggcaagagaaguggaugacggggcgcaugggagaaagacagcugcagaagaucgagcggugguucguccgcaaccccuuuuucgcugugaccgcccucacaauugccuaccugguuggcuccaauaugacccagagaguggucaucgcccuucuggugcucgcuguggggccugcuuauagcgcccauugcaucggaauuacagaccgggauuuuaucgaaggcguccacgggggaaccuggguuucugcgacgcuggagcaagacaaaugugugacagugauggcccccgauaagccuucccuggacauuagccucgagaccgucgcuaucgauagaccggccgaagugcgcaaaguuugcuacaacgcugugcugacacaugucaagauuaaugacaaaugucccucuaccggcgaggcccaccuugcggaagagaacgaaggcgacaaugccugcaagcggaccuauuccgauagaggguggggaaacggcugugggcuguucggaaagggcagcaucguggcuugcgccaaauuuacaugcgcuaagucuaugucccucuucgagguugaccagacgaaaauucaguacgugauccgcgcccagcugcacgucggggccaagcaagagaauuggaacaccgauaucaaaacacuuaaguuugacgcucugagcggaucccaggaaguggaguucauuggcuacggcaaagcgacccucgaaugucagguccagacagccguggauuuugggaacucuuauaucgcugagauggaaaccgagagcuggauuguugaccggcaaugggcccaggaucugacgcugccuuggcaguccggaagcggcgggguguggagagagaugcaucaccucgucgaguucgagcccccucaugccgcuacaauccgcgugcuggcccuuggaaaucaagaaggcucucugaagaccgcgcucaccggggcuaugcggguuacaaaggacaccaacgauaauaaccuguacaaacuucacggcggacacguguccugcagagucaagcugagcgcccucacacugaaaggcacgucuuauaagauuuguaccgacaaaauguuuuucgugaagaaucccacagauaccgggcauggaacagugguuaugcaggucaaggugagcaaaggcgccccgugccgcaucccugugaucgucgcugacgaccugaccgccgcuauuaacaaggggauccucgugacgguuaaucccauugccuccaccaacgaugacgaggugcugaucgaagucaauccucccuucggagauucuuacauuaucgugggccggggagacagcagacuuacauaucaguggcacaaagagggcuccagcaucggaaagcuguuuacccagacaaugaaaggcguugagcgccucgcggugaugggggauaccgccugggacuucucuuccgcuggaggcuuuuucacgagcgucgggaaggggauucauacaguguuuggcucugccuuccaagggcuguuuggcggacugaacuggaucaccaagguuauuaugggcgcugugcuuaucugggucgggauuaauacacggaacaugaccauguccaugagcaugauccucgugggagugauuaugauguuccugucccugggcgucggggccgaucagggaugugcgaucaauuuuggcaaaugaggacuagucccuguucccagagcccacuuuuuuuucuuuuuuugaaauaaaauagccugucuuucagaucuaaaaaaaaaaaaaaaaaaaaaaaaaaaaaaaaaaaaaaaaaaaaaaaaaaaaaaaaaaaaaaaaugcaucccccccccccccccccccccccccccccccaaaggcucuuuucagagccaccagaauu

SEQ ID NO: 633 - RNA, 2323 nt, Artificial Sequence
  mRNA product Design a-2 comprising derived and/or modified sequence from YFV__NC_002031.1__SSIgE-prME (polyprotein: aa122-778) (opt5)
gggagaguccgcucagccagguugcagaagcggcuuagcguguguccuaaucuucucucugcguguagguaggccugugccgcaaacaagcuuaccauggacuggaccuggauccuguuccucguggccgcugccacaagaguccacagcgugacccuggucagaaagaaccgguggcuccugcuuaauguuacaagcgaggaccugggcaaaacguucuccguggggaccggaaacugcacaaccaauauccucgaagccaaguacuggugucccgauucuauggaguauaacugcccuaaucugagcccgcgcgaggaacccgacgauauugacuguuggugcuacggcguggaaaacgucagaguggcuuaugggaaaugugauuccgccggacggucucgcagaagccggcgcgcgaucgaccuuccuacacacgagaaucauggccugaagaccagacaggagaaauggaugacagggcggaugggagaacgccaacuccagaagauugagagaugguuuguucggaaccccuucuuugcugugaccgcccugacgaucgccuaccuggucggcuccaauaugacccagcgcgugguuauugcucuccuggugcuugccgucggcccugcuuauucugcccacugcaucgggaucacagauagagacuucauugaaggagugcauggcgggaccugggugagcgcgacacuggagcaggauaagugugucaccguuauggcccccgacaaaccuucccucgauaucagccuggagacgguggcuauugaccggccggccgaagugcgcaaggucugcuacaacgcugugcuuacacacguuaaaaucaaugauaagugucccucuaccggagaggcccaucuggcggaagagaacgaaggcgacaaugccugcaaaagaacauauuccgaccggggguggggaaacggcuguggccucuuugggaagggaagcauuguggcuugcgccaaguuuaccugcgcuaaaucuaugucccuguucgaggucgaucaaaccaagauccaguacgugauuagagcccagcugcacguuggcgccaaacaggagaauuggaacacagacaucaagacgcucaaauucgaugcucugagcgggucucaagaaguggaguuuaucggauacggcaaggcgacccuugaaugucagguccagacagccguggacuucgggaacuccuauauugcugagauggaaaccgagagcuggaucgucgaucgccagugggcccaagaccugacacucccuuggcaguccggaucuggcggcguguggcgggagaugcaccaucugguugaauuugagcccccucacgccgcuaccauuagagugcuugcccuggggaaucaggaaggaagccucaaaacggcgcugacaggcgcuaugcgcgucaccaaggauaccaacgacaauaaccuguacaagcuccaugggggacacguguccugccggguuaaacugagcgcccuuacacugaagggcaccucuuauaaaaucuguacagauaagauguucuuugugaaaaaucccacggacaccgggcacggcacagucgugaugcaagugaagguuuccaagggagccccgugccgcauuccugucaucguggcugaugaccucaccgccgcuaucaacaaaggcauucuggugacagucaaucccaucgccagcaccaacgacgaugaggugcuuauugaaguuaauccucccuucggggacucuuacaucauugugggaagaggcgauagccggcugacguaucaguggcauaaggagggguccucuaucggaaaacucuucacccagacaaugaagggcgucgagagacuggcggugaugggggacaccgccugggauuuuagcuccgcuggcggauucuuuacaagcguuggcaaagggauccacaccguguucggaucugccuuucagggccuguucgggggacucaacuggauuacgaaggucaucaugggcgcugugcugauuuggguugggaucaauacacgcaacaugaccauguccaugagcaugauucuugugggcgucaucaugauguuucugucucucggagugggcgccugaggacuagucccuguucccagagcccacuuuuuuuucuuuuuuugaaauaaaauagccugucuuucagaucuaaaaaaaaaaaaaaaaaaaaaaaaaaaaaaaaaaaaaaaaaaaaaaaaaaaaaaaaaaaaaaaaugcaucccccccccccccccccccccccccccccccaaaggcucuuuucagagccaccagaauu

SEQ ID NO: 634 - RNA, 2371 nt, Artificial Sequence
  mRNA product Design a-2 comprising derived and/or modified sequence from YFV__NC_002031.1__SSjev-prME-XX (polyprotein: aa122-788) (opt5)
gggagaguccgcucagccagguugcagaagcggcuuagcguguguccuaaucuucucucugcguguagguaggccugugccgcaaacaagcuuaccaugggcaagagaagcgccggguccaucauguggcuggcuucucucgccguggucauugcgugcgcuggagccguuacgcuggugcggaaaaaccgcuggcuucugcucaaugugaccagcgaggaucuggggaagacauuuuccgucggaaccggcaacugcacaaccaauauucuggaagccaaauacuggugucccgacucuauggaguauaacugcccuaaucucagcccgagagaagaacccgaugacaucgauuguuggugcuacgggguggaaaacguucggguggcuuauggaaagugugacuccgccggccgcucuagacggagccgcagagcgauugaucugccuacacaugagaaucacggccuuaaaacccggcaagagaaguggaugacggggcgcaugggagaaagacagcugcagaagaucgagcggugguucguccgcaaccccuuuuucgcugugaccgcccucacaauugccuaccugguuggcuccaauaugacccagagaguggucaucgcccuucuggugcucgcuguggggccugcuuauagcgcccauugcaucggaauuacagaccgggauuuuaucgaaggcguccacgggggaaccuggguuucugcgacgcuggagcaagacaaaugugugacagugauggcccccgauaagccuucccuggacauuagccucgagaccgucgcuaucgauagaccggccgaagugcgcaaaguuugcuacaacgcugugcugacacaugucaagauuaaugacaaaugucccucuaccggcgaggcccaccuugcggaagagaacgaaggcgacaaugccugcaagcggaccuauuccgauagaggguggggaaacggcugugggcuguucggaaagggcagcaucguggcuugcgccaaauuuacaugcgcuaagucuaugucccucuucgagguugaccagacgaaaauucaguacgugauccgcgcccagcugcacgucggggccaagcaagagaauuggaacaccgauaucaaaacacuuaaguuugacgcucugagcggaucccaggaaguggaguucauuggcuacggcaaagcgacccucgaaugucagguccagacagccguggauuuugggaacucuuauaucgcugagauggaaaccgagagcuggauuguugaccggcaaugggcccaggaucugacgcugccuuggcaguccggaagcggcgggguguggagagagaugcaucaccucgucgaguucgagcccccucaugccgcuacaauccgcgugcuggcccuuggaaaucaagaaggcucucugaagaccgcgcucaccggggcuaugcggguuacaaaggacaccaacgauaauaaccuguacaaacuucacggcggacacguguccugcagagucaagcugagcgcccucacacugaaaggcacgucuuauaagauuuguaccgacaaaauguuuuucgugaagaaucccacagauaccgggcauggaacagugguuaugcaggucaaggugagcaaaggcgccccgugccgcaucccugugaucgucgcugacgaccugaccgccgcuauuaacaaggggauccucgugacgguuaaucccauugccuccaccaacgaugacgaggugcugaucgaagucaauccucccuucggagauucuuacauuaucgugggccggggagacagcagacuuacauaucaguggcacaaagagggcuccagcaucggaaagcuguuuacccagacaaugaaaggcguugagcgccucgcggugaugggggauaccgccugggacuucucuuccgcuggaggcuuuuucacgagcgucgggaaggggauucauacaguguuuggcucugccuuccaagggcuguuuggcggacugaacuggaucaccaagguuauuaugggcgcugugcuuaucugggucgggauuaauacacggaacaugaccauguccaugagcaugauccucgugggagugauuaugauguuccugucccugggcgucggggccgaucagggaugugcgaucaauuuuggcaaaugaggacuagucccuguucccagagcccacuuuuuuuucuuuuuuugaaauaaaauagccugucuuucagaucuaaaaaaaaaaaaaaaaaaaaaaaaaaaaaaaaaaaaaaaaaaaaaaaaaaaaaaaaaaaaaaaaugcaucccccccccccccccccccccccccccccccaaaggcucuuuucagagccaccagaauu

SEQ ID NO: 635 - RNA, 2341 nt, Artificial Sequence
  mRNA product Design a-2 comprising derived and/or modified sequence from YFV__NC_002031.1__SSjev-prME (polyprotein: aa122-778) (opt5)
gggagaguccgcucagccagguugcagaagcggcuuagcguguguccuaaucuucucucugcguguagguaggccugugccgcaaacaagcuuaccaugggcaagagaagcgccggguccaucauguggcuggcuucucucgccguggucauugcgugcgcuggagccgugacccuggucagaaagaaccgguggcuccugcuuaauguuacaagcgaggaccugggcaaaacguucuccguggggaccggaaacugcacaaccaauauccucgaagccaaguacuggugucccgauucuauggaguauaacugcccuaaucugagcccgcgcgaggaacccgacgauauugacuguuggugcuacggcguggaaaacgucagaguggcuuaugggaaaugugauuccgccggacggucucgcagaagccggcgcgcgaucgaccuuccuacacacgagaaucauggccugaagaccagacaggagaaauggaugacagggcggaugggagaacgccaacuccagaagauugagagaugguuuguucggaaccccuucuuugcugugaccgcccugacgaucgccuaccuggucggcuccaauaugacccagcgcgugguuauugcucuccuggugcuugccgucggcccugcuuauucugcccacugcaucgggaucacagauagagacuucauugaaggagugcauggcgggaccugggugagcgcgacacuggagcaggauaagugugucaccguuauggcccccgacaaaccuucccucgauaucagccuggagacgguggcuauugaccggccggccgaagugcgcaaggucugcuacaacgcugugcuuacacacguuaaaaucaaugauaagugucccucuaccggagaggcccaucuggcggaagagaacgaaggcgacaaugccugcaaaagaacauauuccgaccggggguggggaaacggcuguggccucuuugggaagggaagcauuguggcuugcgccaaguuuaccugcgcuaaaucuaugucccuguucgaggucgaucaaaccaagauccaguacgugauuagagcccagcugcacguuggcgccaaacaggagaauuggaacacagacaucaagacgcucaaauucgaugcucugagcgggucucaagaaguggaguuuaucggauacggcaaggcgacccuugaaugucagguccagacagccguggacuucgggaacuccuauauugcugagauggaaaccgagagcuggaucgucgaucgccagugggcccaagaccugacacucccuuggcaguccggaucuggcggcguguggcgggagaugcaccaucugguugaauuugagcccccucacgccgcuaccauuagagugcuugcccuggggaaucaggaaggaagccucaaaacggcgcugacaggcgcuaugcgcgucaccaaggauaccaacgacaauaaccuguacaagcuccaugggggacacguguccugccggguuaaacugagcgcccuuacacugaagggcaccucuuauaaaaucuguacagauaagauguucuuugugaaaaaucccacggacaccgggcacggcacagucgugaugcaagugaagguuuccaagggagccccgugccgcauuccugucaucguggcugaugaccucaccgccgcuaucaacaaaggcauucuggugacagucaaucccaucgccagcaccaacgacgaugaggugcuuauugaaguuaauccucccuucggggacucuuacaucauugugggaagaggcgauagccggcugacguaucaguggcauaaggagggguccucuaucggaaaacucuucacccagacaaugaagggcgucgagagacuggcggugaugggggacaccgccugggauuuuagcuccgcuggcggauucuuuacaagcguuggcaaagggauccacaccguguucggaucugccuuucagggccuguucgggggacucaacuggauuacgaaggucaucaugggcgcugugcugauuuggguugggaucaauacacgcaacaugaccauguccaugagcaugauucuugugggcgucaucaugauguuucugucucucggagugggcgccugaggacuagucccuguucccagagcccacuuuuuuuucuuuuuuugaaauaaaauagccugucuuucagaucuaaaaaaaaaaaaaaaaaaaaaaaaaaaaaaaaaaaaaaaaaaaaaaaaaaaaaaaaaaaaaaaaugcaucccccccccccccccccccccccccccccccaaaggcucuuuucagagccaccagaauu

SEQ ID NO: 636 - RNA, 2389 nt, Artificial Sequence
  mRNA product Design a-2 comprising derived and/or modified sequence from YFV__NC_002031.1__X-SS-prME-XX (polyprotein: aa92-788) (opt6)
gggagaguccgcucagccagguugcagaagcggcuuagcguguguccuaaucuucucucugcguguagguaggccugugccgcaaacaagcuuaccaugagaggauuaucaaguagaaaaagaagaucacaugauguacuaaccgugcaauuuuugaucuuagggaugcucuuaaugacaggagguguuacauuaguaagaaagaaucgauggcugcuuuuaaaugugacaucagaggauuuagggaaaacauuuucgguaggaacaggaaauuguacuacaaauauacuugaagcaaaauauuggugcccagacucuauggaauauaauuguccaaauuuaaguccuagagaagaaccugacgauauagauuguugguguuaugguguagaaaauguaagaguagcauacggcaaaugcgauagugcaggacguucuagacguucaaggagagccauagaucugcccacucacgaaaaucacggauugaaaacacgacaagaaaaauggaugacugggcgaaugggagaaagacaacuacagaaaauugaaagaugguucguuagaaauccauucuuugccguaacagcuuuaacaauagccuauuuaguagguaguaauaugacacaaagaguaguaauagcauugcuaguguuagcaguuggaccagcuuauagugcacauugcauaggaauaacagauagagacuuuauagaaggaguacacgggggaacuuggguaagugccacuuuagaacaagauaaauguguuacagugauggcgccagauaaaccaagucuggacauaaguuuggaaacaguagcgauugauagacccgcagaaguaagaaaaguuuguuauaaugcuguucuaacccauguuaaaauaaaugauaaaugcccuagcaccggagaagcccaucuagcagaagaaaaugaaggagauaacgcauguaaacgaacauacucagauagaggauggggcaacggauguggcuuguuuggaaaagguagcauaguagcaugcgcuaaauuuacaugcgcaaagucaaugucauuauuugaaguagaucaaacaaaaauacaauauguaauaagagcucaauuacacgugggugcaaaacaagaaaauuggaauacagacauaaagacacuaaaguucgacgcauuaaguggaucacaagagguagaauuuauaggguacggaaaagcgacuuuagagugucaaguccaaacagcaguagauuucgguaacucauacauagcagaaauggaaacugaaaguuggauaguagauagacaaugggcacaagacuugacacuaccuuggcaaucaggaagcggaggaguauggagagaaaugcaucauuuaguagaauuugaaccaccucaugcagcaacaauaagaguauuagcccuaggaaaccaagaaggaaguuuaaaaacagcacuaacaggagcuaugagaguaacaaaagauacaaaugacaacaaucuauacaaauuacacggaggacauguaagcugccggguaaaguugagcgcacuaacauuaaaaggaacgaguuauaaaauaugcacagauaaaauguucuuuguuaaaaauccuacagauaccggucauggaacaguaguaaugcaaguaaaaguaaguaaaggcgcucccuguagaauaccuguaauagucgcagacgauuuaaccgcagcaauaaauaaaggaauauuagucacgguaaacccaauagcgucaacaaaugaugaugaaguauuaauagaaguuaacccaccuuuuggagacaguuauauaauagucggaaggggugauaguagacuaacauaccaauggcauaaagaaggaagcucaauaggaaaauuauuuacucaaaccaugaaagguguagaaaggcuagcuguuaugggugacacagcaugggauuuuucaagcgcaggaggguucuuuacaucaguagguaaaggaauacauacaguauuuggaagugcauuucaaggauuauuuggugguuuaaauuggauaacaaaaguaauaaugggcgcaguuuuaauauggguagguauaaacacaagaaauaugacaaugucuaugaguaugauauuggucggaguaauaaugauguuuuuaucacuaggagugggugcagaucaagguugcgcuauuaauuuuggaaaaugaggacuagucccuguucccagagcccacuuuuuuuucuuuuuuugaaauaaaauagccugucuuucagaucuaaaaaaaaaaaaaaaaaaaaaaaaaaaaaaaaaaaaaaaaaaaaaaaaaaaaaaaaaaaaaaaaugcaucccccccccccccccccccccccccccccccaaaggcucuuuucagagccaccagaauu

SEQ ID NO: 637 - RNA, 2326 nt, Artificial Sequence
  mRNA product Design a-2 comprising derived and/or modified sequence from YFV__NC_002031.1__SS-prME (polyprotein: M,aa104-778) (opt6)
gggagaguccgcucagccagguugcagaagcggcuuagcguguguccuaaucuucucucugcguguagguaggccugugccgcaaacaagcuuaccauggauguucuaacaguacaauuuuuaauauuagggauguuauuaaugacaggaggcguaacauuaguacgaaagaaucgauggcuauuacuaaacguuacgucugaagauuuaggaaaaacauuuagcguaggaacaggaaauugcaccacgaauaucuuagaagcaaaauauugguguccagauaguauggaauacaauuguccaaauuuaaguccuagagaggaacccgacgauauagauugcugguguuacggaguggaaaauguaagaguagcauauggaaaaugugacagcgcagguagaaguagaagaucacgacgagcaauugaucuacccacucaugagaaccauggacuaaaaacaagacaagaaaaauggaugacagguagaaugggcgaaagacaauuacagaaaauagaaagaugguuuguacgaaauccuuucuuugcugucacugcauuaacuauagcuuauuuaguaggaaguaacaugacucaaagaguaguaauagcacuauuaguacuagcaguaggaccagcuuacagugcacacuguauagggauaacggauagagauuuuauagaaggaguacauggggguacaugggugucugccacuuuagaacaagacaaauguguuacaguuauggccccagauaaacccucuuuagacauaucauuagaaacuguagcaauagauagaccggcggaagugagaaagguauguuauaaugcaguacuaacccauguaaaaauuaaugacaaaugcccaucaacaggagaggcucaucuagcugaagaaaaugaaggagacaaugcuugcaaacguacauauucagacaggggguggggaaauggauguggauuauuugguaaagggucaauaguagcaugugcaaaauuuacaugcgcaaaaaguaugagcuuauuugaaguagaucaaacaaaaauccaauauguaauuagagcucaacuucacguaggagcaaaacaagagaauuggaacacagauauaaaaacauuaaaauuugacgcuuugucuggaagucaagaagucgaauuuauuggcuauggaaaggcaacauuagaaugccaaguucaaaccgcaguagauuuuggaaauucauacauagcagaaauggagacugaaaguuggauaguagauagacagugggcucaagaccuaacuuuaccauggcaaucaggaaguggugguguauggagagaaaugcaucauuuaguagaauuugaaccaccacaugcagcaacaauuagaguacuagcauuaggaaaucaagaagguaguuuaaagacagcgcuuaccggagcaaugagaguuacaaaagauacuaaugacaauaauuuauauaaacuucauggaggacauguuagcuguagagucaaauuaagugcauuaacacucaaaggaacaucauacaaaauauguacagauaaaauguuuuucgucaagaauccaacagauacaggacauggaacaguuguaaugcaaguaaaaguaucaaaaggagcaccuugcagaauaccaguaauaguagcagaugauuuaacagccgcaauuaauaaagggauauuaguaacaguaaacccuauagcaaguacaaaugaugaugaagucuugauagaaguaaauccaccauuuggagauucguauauaauagucggaagaggagauagucgauuaacauaucaauggcauaaagaagguucaucaauaggaaaauuauuuacacaaaccaugaaaggaguugaaagauuagcuguaaugggggacacagcuugggauuuuucuagcgcaggaggauucuuuacauccguaggaaaagguauacacacaguauuuggcucagcauuccaaggguuauuuggugguuuaaauuggauaacaaaagugauuaugggagcagugcuaaucuggguaggaauaaauacaagaaauaugacaaugaguaugagcaugauucucguaggaguaauaaugauguuccuuaguuugggaguuggcgcuugaggacuagucccuguucccagagcccacuuuuuuuucuuuuuuugaaauaaaauagccugucuuucagaucuaaaaaaaaaaaaaaaaaaaaaaaaaaaaaaaaaaaaaaaaaaaaaaaaaaaaaaaaaaaaaaaaugcaucccccccccccccccccccccccccccccccaaaggcucuuuucagagccaccagaauu

SEQ ID NO: 638 - RNA, 2353 nt, Artificial Sequence
  mRNA product Design a-2 comprising derived and/or modified sequence from YFV__NC_002031.1__SSIgE-prME-XX (polyprotein: aa122-788) (opt6)
gggagaguccgcucagccagguugcagaagcggcuuagcguguguccuaaucuucucucugcguguagguaggccugugccgcaaacaagcuuaccauggacuggacauggauauuauuuuuaguagcagcagcaacaagaguacauucaguuacauuaguaagaaagaaucgauggcugcuuuuaaaugugacaucagaggauuuagggaaaacauuuucgguaggaacaggaaauuguacuacaaauauacuugaagcaaaauauuggugcccagacucuauggaauauaauuguccaaauuuaaguccuagagaagaaccugacgauauagauuguugguguuaugguguagaaaauguaagaguagcauacggcaaaugcgauagugcaggacguucuagacguucaaggagagccauagaucugcccacucacgaaaaucacggauugaaaacacgacaagaaaaauggaugacugggcgaaugggagaaagacaacuacagaaaauugaaagaugguucguuagaaauccauucuuugccguaacagcuuuaacaauagccuauuuaguagguaguaauaugacacaaagaguaguaauagcauugcuaguguuagcaguuggaccagcuuauagugcacauugcauaggaauaacagauagagacuuuauagaaggaguacacgggggaacuuggguaagugccacuuuagaacaagauaaauguguuacagugauggcgccagauaaaccaagucuggacauaaguuuggaaacaguagcgauugauagacccgcagaaguaagaaaaguuuguuauaaugcuguucuaacccauguuaaaauaaaugauaaaugcccuagcaccggagaagcccaucuagcagaagaaaaugaaggagauaacgcauguaaacgaacauacucagauagaggauggggcaacggauguggcuuguuuggaaaagguagcauaguagcaugcgcuaaauuuacaugcgcaaagucaaugucauuauuugaaguagaucaaacaaaaauacaauauguaauaagagcucaauuacacgugggugcaaaacaagaaaauuggaauacagacauaaagacacuaaaguucgacgcauuaaguggaucacaagagguagaauuuauaggguacggaaaagcgacuuuagagugucaaguccaaacagcaguagauuucgguaacucauacauagcagaaauggaaacugaaaguuggauaguagauagacaaugggcacaagacuugacacuaccuuggcaaucaggaagcggaggaguauggagagaaaugcaucauuuaguagaauuugaaccaccucaugcagcaacaauaagaguauuagcccuaggaaaccaagaaggaaguuuaaaaacagcacuaacaggagcuaugagaguaacaaaagauacaaaugacaacaaucuauacaaauuacacggaggacauguaagcugccggguaaaguugagcgcacuaacauuaaaaggaacgaguuauaaaauaugcacagauaaaauguucuuuguuaaaaauccuacagauaccggucauggaacaguaguaaugcaaguaaaaguaaguaaaggcgcucccuguagaauaccuguaauagucgcagacgauuuaaccgcagcaauaaauaaaggaauauuagucacgguaaacccaauagcgucaacaaaugaugaugaaguauuaauagaaguuaacccaccuuuuggagacaguuauauaauagucggaaggggugauaguagacuaacauaccaauggcauaaagaaggaagcucaauaggaaaauuauuuacucaaaccaugaaagguguagaaaggcuagcuguuaugggugacacagcaugggauuuuucaagcgcaggaggguucuuuacaucaguagguaaaggaauacauacaguauuuggaagugcauuucaaggauuauuuggugguuuaaauuggauaacaaaaguaauaaugggcgcaguuuuaauauggguagguauaaacacaagaaauaugacaaugucuaugaguaugauauuggucggaguaauaaugauguuuuuaucacuaggagugggugcagaucaagguugcgcuauuaauuuuggaaaaugaggacuagucccuguucccagagcccacuuuuuuuucuuuuuuugaaauaaaauagccugucuuucagaucuaaaaaaaaaaaaaaaaaaaaaaaaaaaaaaaaaaaaaaaaaaaaaaaaaaaaaaaaaaaaaaaaugcaucccccccccccccccccccccccccccccccaaaggcucuuuucagagccaccagaauu

SEQ ID NO: 639 - RNA, 2323 nt, Artificial Sequence
  mRNA product Design a-2 comprising derived and/or modified sequence from YFV__NC_002031.1__SSIgE-prME (polyprotein: aa122-778) (opt6)
gggagaguccgcucagccagguugcagaagcggcuuagcguguguccuaaucuucucucugcguguagguaggccugugccgcaaacaagcuuaccauggacuggacauggauauuauuuuuaguagcagcagcaacaagaguacauucaguaacauuagucagaaagaacagaugguuauuacugaacguaacaagugaagacuuaggaaaaacauuuaguguaggcacaggaaauugcacaacaaauauacuugaagcaaaauauugguguccagauagcauggaauauaauuguccaaauuuaucaccuagagaggaacccgaugauauagauuguugguguuauggaguugaaaacgugcgaguagcauaugguaaaugugauagcgcaggaagaaguagaagaaguagaagggcaauagacuuaccaacucaugaaaaccauggauuaaaaacaagacaggaaaaauggaugacaggaagaaugggagaacgacaauuacagaaaauagaaagaugguucguaagaaauccauucuuugcaguaacagcauuaacaauagcauaucuaguuggaaguaacaugacucaaagaguaguaauagcauuguuaguacuagcaguaggaccggcuuauagcgcacauuguauagggauaacagauagagacuuuauagaaggagugcacgguggaacauggguuucagcaacgcuagagcaagauaaauguguaacgguaauggcgccggauaaaccaagccuugacauaucacuagaaacgguugcaaucgaucgaccagccgaaguaagaaaaguaugcuauaaugcggucuuaacacacguaaaaauaaaugauaaauguccuucaacgggagaagcacauuuagcagaagaaaacgaaggagacaacgcguguaaaagaacauauucagauaggggcuggggaaacggcugcgguuuauuuggaaaaggaaguauaguagcaugcgcaaaauuuacuugcgcaaaaaguaugaguuuauucgaaguugaucaaacaaagauacaauauguaauacgagcacaauuacauguaggugcaaagcaagaaaauuggaauacagacauaaaaacauugaaauuugacgcuuugaguggaucacaagaaguagaauuuauaggauacggaaaagcuacauuagaaugucaaguacaaacugcaguagauuuuggaaauucguauauagcagaaauggaaacugaaucauggauuguagauaggcaaugggcacaagauuuaaccuugccauggcaaagcggaagcggggguguauggcgggaaaugcaucauuuaguagaguucgaacccccacacgcggcuaccauaagaguacuagcauuaggaaaucaagaagggagucucaagacagcacucacaggugcaaugcgaguaacgaaagauacaaaugacaauaaucuauacaaacuacacggaggacauguaucuugcagaguaaaauuaucugcauuaacacuaaaagggacaaguuacaaaauuuguacagauaagauguucuuugucaaaaacccaacagacacgggacacggaacgguagucaugcaaguuaaaguaagcaaaggagcgccaugcagaauaccaguaaucgucgcagaugauuuaacagccgcaauaaauaaagguauauuaguaacgguaaauccaauagcgaguaccaaugaugaugaaguacuaauagaagugaacccaccauuuggugauagcuauauaauaguagggcgaggagauucaagauuaacauaucaauggcauaaagaagguaguaguauaggaaaauuauuuacacaaacuaugaaaggcguagaaagacuagcagucaugggagauacagcaugggauuucucaagugcaggcggauuuuucacaagcgucggaaaaggaauacauacaguguuugguagugcguuucaaggauuauucggaggacuaaauuggauaacgaaaguaauuaugggagcaguucucauaugggucggaauaaauacaaggaacaugacuaugaguaugagcaugauccuaguaggaguaauaaugauguuucuaagccuaggcguuggugcaugaggacuagucccuguucccagagcccacuuuuuuuucuuuuuuugaaauaaaauagccugucuuucagaucuaaaaaaaaaaaaaaaaaaaaaaaaaaaaaaaaaaaaaaaaaaaaaaaaaaaaaaaaaaaaaaaaugcaucccccccccccccccccccccccccccccccaaaggcucuuuucagagccaccagaauu

SEQ ID NO: 640 - RNA, 2371 nt, Artificial Sequence
  mRNA product Design a-2 comprising derived and/or modified sequence from YFV__NC_002031.1__SSjev-prME-XX (polyprotein: aa122-788) (opt6)
gggagaguccgcucagccagguugcagaagcggcuuagcguguguccuaaucuucucucugcguguagguaggccugugccgcaaacaagcuuaccaugggaaaaagaagugcaggaaguauaaugugguuggcaaguuuagcaguaguaauagcaugugcaggagcaguuacauuaguaagaaagaaucgauggcugcuuuuaaaugugacaucagaggauuuagggaaaacauuuucgguaggaacaggaaauuguacuacaaauauacuugaagcaaaauauuggugcccagacucuauggaauauaauuguccaaauuuaaguccuagagaagaaccugacgauauagauuguugguguuaugguguagaaaauguaagaguagcauacggcaaaugcgauagugcaggacguucuagacguucaaggagagccauagaucugcccacucacgaaaaucacggauugaaaacacgacaagaaaaauggaugacugggcgaaugggagaaagacaacuacagaaaauugaaagaugguucguuagaaauccauucuuugccguaacagcuuuaacaauagccuauuuaguagguaguaauaugacacaaagaguaguaauagcauugcuaguguuagcaguuggaccagcuuauagugcacauugcauaggaauaacagauagagacuuuauagaaggaguacacgggggaacuuggguaagugccacuuuagaacaagauaaauguguuacagugauggcgccagauaaaccaagucuggacauaaguuuggaaacaguagcgauugauagacccgcagaaguaagaaaaguuuguuauaaugcuguucuaacccauguuaaaauaaaugauaaaugcccuagcaccggagaagcccaucuagcagaagaaaaugaaggagauaacgcauguaaacgaacauacucagauagaggauggggcaacggauguggcuuguuuggaaaagguagcauaguagcaugcgcuaaauuuacaugcgcaaagucaaugucauuauuugaaguagaucaaacaaaaauacaauauguaauaagagcucaauuacacgugggugcaaaacaagaaaauuggaauacagacauaaagacacuaaaguucgacgcauuaaguggaucacaagagguagaauuuauaggguacggaaaagcgacuuuagagugucaaguccaaacagcaguagauuucgguaacucauacauagcagaaauggaaacugaaaguuggauaguagauagacaaugggcacaagacuugacacuaccuuggcaaucaggaagcggaggaguauggagagaaaugcaucauuuaguagaauuugaaccaccucaugcagcaacaauaagaguauuagcccuaggaaaccaagaaggaaguuuaaaaacagcacuaacaggagcuaugagaguaacaaaagauacaaaugacaacaaucuauacaaauuacacggaggacauguaagcugccggguaaaguugagcgcacuaacauuaaaaggaacgaguuauaaaauaugcacagauaaaauguucuuuguuaaaaauccuacagauaccggucauggaacaguaguaaugcaaguaaaaguaaguaaaggcgcucccuguagaauaccuguaauagucgcagacgauuuaaccgcagcaauaaauaaaggaauauuagucacgguaaacccaauagcgucaacaaaugaugaugaaguauuaauagaaguuaacccaccuuuuggagacaguuauauaauagucggaaggggugauaguagacuaacauaccaauggcauaaagaaggaagcucaauaggaaaauuauuuacucaaaccaugaaagguguagaaaggcuagcuguuaugggugacacagcaugggauuuuucaagcgcaggaggguucuuuacaucaguagguaaaggaauacauacaguauuuggaagugcauuucaaggauuauuuggugguuuaaauuggauaacaaaaguaauaaugggcgcaguuuuaauauggguagguauaaacacaagaaauaugacaaugucuaugaguaugauauuggucggaguaauaaugauguuuuuaucacuaggagugggugcagaucaagguugcgcuauuaauuuuggaaaaugaggacuagucccuguucccagagcccacuuuuuuuucuuuuuuugaaauaaaauagccugucuuucagaucuaaaaaaaaaaaaaaaaaaaaaaaaaaaaaaaaaaaaaaaaaaaaaaaaaaaaaaaaaaaaaaaaugcaucccccccccccccccccccccccccccccccaaaggcucuuuucagagccaccagaauu

SEQ ID NO: 641 - RNA, 2341 nt, Artificial Sequence
  mRNA product Design a-2 comprising derived and/or modified sequence from YFV__NC_002031.1__SSjev-prME (polyprotein: aa122-778) (opt6)
gggagaguccgcucagccagguugcagaagcggcuuagcguguguccuaaucuucucucugcguguagguaggccugugccgcaaacaagcuuaccaugggaaaaagaagugcaggaaguauaaugugguuggcaaguuuagcaguaguaauagcaugugcaggagcaguaacauuagucagaaagaacagaugguuauuacugaacguaacaagugaagacuuaggaaaaacauuuaguguaggcacaggaaauugcacaacaaauauacuugaagcaaaauauugguguccagauagcauggaauauaauuguccaaauuuaucaccuagagaggaacccgaugauauagauuguugguguuauggaguugaaaacgugcgaguagcauaugguaaaugugauagcgcaggaagaaguagaagaaguagaagggcaauagacuuaccaacucaugaaaaccauggauuaaaaacaagacaggaaaaauggaugacaggaagaaugggagaacgacaauuacagaaaauagaaagaugguucguaagaaauccauucuuugcaguaacagcauuaacaauagcauaucuaguuggaaguaacaugacucaaagaguaguaauagcauuguuaguacuagcaguaggaccggcuuauagcgcacauuguauagggauaacagauagagacuuuauagaaggagugcacgguggaacauggguuucagcaacgcuagagcaagauaaauguguaacgguaauggcgccggauaaaccaagccuugacauaucacuagaaacgguugcaaucgaucgaccagccgaaguaagaaaaguaugcuauaaugcggucuuaacacacguaaaaauaaaugauaaauguccuucaacgggagaagcacauuuagcagaagaaaacgaaggagacaacgcguguaaaagaacauauucagauaggggcuggggaaacggcugcgguuuauuuggaaaaggaaguauaguagcaugcgcaaaauuuacuugcgcaaaaaguaugaguuuauucgaaguugaucaaacaaagauacaauauguaauacgagcacaauuacauguaggugcaaagcaagaaaauuggaauacagacauaaaaacauugaaauuugacgcuuugaguggaucacaagaaguagaauuuauaggauacggaaaagcuacauuagaaugucaaguacaaacugcaguagauuuuggaaauucguauauagcagaaauggaaacugaaucauggauuguagauaggcaaugggcacaagauuuaaccuugccauggcaaagcggaagcggggguguauggcgggaaaugcaucauuuaguagaguucgaacccccacacgcggcuaccauaagaguacuagcauuaggaaaucaagaagggagucucaagacagcacucacaggugcaaugcgaguaacgaaagauacaaaugacaauaaucuauacaaacuacacggaggacauguaucuugcagaguaaaauuaucugcauuaacacuaaaagggacaaguuacaaaauuuguacagauaagauguucuuugucaaaaacccaacagacacgggacacggaacgguagucaugcaaguuaaaguaagcaaaggagcgccaugcagaauaccaguaaucgucgcagaugauuuaacagccgcaauaaauaaagguauauuaguaacgguaaauccaauagcgaguaccaaugaugaugaaguacuaauagaagugaacccaccauuuggugauagcuauauaauaguagggcgaggagauucaagauuaacauaucaauggcauaaagaagguaguaguauaggaaaauuauuuacacaaacuaugaaaggcguagaaagacuagcagucaugggagauacagcaugggauuucucaagugcaggcggauuuuucacaagcgucggaaaaggaauacauacaguguuugguagugcguuucaaggauuauucggaggacuaaauuggauaacgaaaguaauuaugggagcaguucucauaugggucggaauaaauacaaggaacaugacuaugaguaugagcaugauccuaguaggaguaauaaugauguuucuaagccuaggcguuggugcaugaggacuagucccuguucccagagcccacuuuuuuuucuuuuuuugaaauaaaauagccugucuuucagaucuaaaaaaaaaaaaaaaaaaaaaaaaaaaaaaaaaaaaaaaaaaaaaaaaaaaaaaaaaaaaaaaaugcaucccccccccccccccccccccccccccccccaaaggcucuuuucagagccaccagaauu

SEQ ID NO: 642 - RNA, 2389 nt, Artificial Sequence
  mRNA product Design a-2 comprising derived and/or modified sequence from YFV__NC_002031.1__X-SS-prME-XX (polyprotein: aa92-788) (opt11)
gggagaguccgcucagccagguugcagaagcggcuuagcguguguccuaaucuucucucugcguguagguaggccugugccgcaaacaagcuuaccaugcggggacuaagcagcagaaaaagacgcagccacgaugugcucaccgugcaauuccucauacuggggaugcuccuaaugaccggaggcgugacccuaguaaggaaaaacagauggcuacuacuaaacguaaccucagaagaucuaggaaagacauuuucagucggcacaggcaacugcacaaccaacauacuagaagcaaaauauuggugcccagacagcauggaauacaacugucccaaccucagcccaagagaggaaccagacgacauagacugcugguguuacggaguagaaaacguaagaguggcauacggcaaaugcgacagcgcaggcaggagccgaagaucccgcagagccaucgacuugcccacgcacgaaaaccacggccucaaaacacgacaagaaaaauggaugacagggcgaaugggagaacgacagcuccagaaaauagaacgaugguucguccggaacccguucuucgcaguaacggcacuaacaaucgcauaccucguaggcagcaacaugacacaaagaguggucaucgcgcuacucguacuagcaguggggcccgcauacagugcacacugcauaggaaucacagaccgugacuucaucgaaggcguacacggaggaacguggguaagcgcgacacuggaacaagacaaaugcgugacaguaauggcaccagacaaaccaagccuagacauaucccuagaaacggucgccaucgaccgucccgcagaaguacgaaagguaugcuauaaugcaguccucacacacgucaaaauaaacgacaaaugccccagcacgggcgaagcacaccucgccgaagaaaacgaaggggauaacgcgugcaaacgcaccuacuccgacaggggauggggcaacggaugcggacuguucggaaaaggauccauagucgcaugcgcaaaauuuaccugcgcaaaaagcaugagcuuguucgagguagaccaaacgaagauccaauacguaauccgagcucaacuacacguuggggccaagcaagagaacuggaauacggacaucaaaacacuaaaauucgacgcacucuccggcucacaagaagucgaguucaucggcuacggcaaagcaacacuagaaugccaaguacaaacagcgguggacuucggcaacagcuacauagcagaaauggaaacagaaagcuggauaguagaccgacaaugggcacaagaccuaacucugccauggcaaagcggcucaggaggaguguggagagagaugcaccaccugguagaguucgaacccccacacgcagcaacaauaaggguacuggcacuaggcaaccaagaaggcagccuaaaaaccgcacucacaggagccaugcgcgugacgaaggacaccaacgacaacaaccucuacaaacuccacggagggcacguauccugccgcguaaaacuaucagcacuaacgcuaaaaggaacaagcuacaaaauaugcacagacaaaauguucuucgucaaaaaccccacagacacaggccacggcacagucguaaugcaagugaaggucagcaagggggcccccugccgaaucccagucauaguggcagacgaccucacggccgccaucaacaaagggauccugguaacagugaacccaauagcaucgaccaacgacgacgaaguccucauagaagugaaucccccguucggcgacagcuacaucaucguaggacgcggcgacucccgacugacguaccaauggcauaaagaaggcagcagcauuggaaaacuauucacccaaaccaugaagggcgucgaaagacucgcggugaugggagacaccgcaugggacuucucgagcgcaggcggcuucuucacaagcguaggaaaagggauucacacaguauucggauccgcauuccaaggccucuucgggggacuaaacuggauaacgaaaguaauaaugggagcaguucucauauggguaggaaucaacacacgaaacaugacaauguccaugucaaugauacucguaggcguaaucaugauguuucugucacucggagugggagcagaccaagguugcgccauaaacuucggcaagugaggacuagucccuguucccagagcccacuuuuuuuucuuuuuuugaaauaaaauagccugucuuucagaucuaaaaaaaaaaaaaaaaaaaaaaaaaaaaaaaaaaaaaaaaaaaaaaaaaaaaaaaaaaaaaaaaugcaucccccccccccccccccccccccccccccccaaaggcucuuuucagagccaccagaauu

SEQ ID NO: 643 - RNA, 2326 nt, Artificial Sequence
  mRNA product Design a-2 comprising derived and/or modified sequence from YFV__NC_002031.1__SS-prME (polyprotein: M,aa104-778) (opt11)
gggagaguccgcucagccagguugcagaagcggcuuagcguguguccuaaucuucucucugcguguagguaggccugugccgcaaacaagcuuaccauggacguccuuacgguacaauuccuaauacuaggaaugcuucucaugaccgggggcgucacccuaguccggaaaaacagauggcuacugcuaaauguuacaagcgaagaccuuggcaagacauucagcguaggcacgggcaacuguacaaccaacauacuagaagcgaaauacuggugcccagacuccauggaguacaacugccccaaccuaagcccacgggaagaacccgacgacauagacugcugguguuacggggucgaaaacguccgcgucgcauacgggaaaugcgauagcgcaggccgcaguagacgcucccgccgcgccauagaccuaccaacgcacgagaaccacggccucaaaacucgccaagaaaaauggaugacagggcgaaugggugaacgccaacuacagaagaucgaaaggugguucgucaggaacccauucuucgcagugaccgcacuaacgauagccuaccuagugggaucaaacaugacgcaacgagucgugaucgcacuccuaguacuggccguaggaccggccuacuccgcgcacugcaucggcauaacggauagggacuucauugaaggaguacauggcggcacgugggucagcgcgacacucgaacaagacaaaugcguaaccgugauggcacccgacaaaccgagucuugacauaagccuggaaacgguagcgauagaucguccagccgaaguaagaaaaguaugcuacaacgcaguccuaacacacguaaaaauaaacgacaaaugcccaagcacaggggaagcccaccucgcagaagagaacgaaggcgacaacgcaugcaaacgcacauacuccgacaggggaugggggaauggcugcggacuauucgggaaaggaagcaucgucgcgugcgccaaauucacaugcgccaagagcaugagccuguucgaagucgaccaaacaaaaauccaauacguaauacgcgcgcaacugcacguaggagcgaaacaggaaaacuggaacacggacauuaaaacccucaaauucgacgcgcucucaggaucacaagaagucgaguucaucggcuacggcaaggcaacgcucgaaugccaaguacaaacagcaguagacuucggaaacagcuacauugccgagauggaaaccgagagcuggauagucgacagacaaugggcccaagaccuaacccugccauggcaaucaggcuccgggggcgucuggcgagagaugcaccaccuaguagaguucgaaccaccccacgccgccacgaucagaguacuggcccugggcaaccaagaaggcucacucaagacggcgcucacaggagcaaugagggucacgaaagacaccaacgacaacaaccucuacaaacuacacggagggcacgugagcugccggguaaaacugagcgcacucacucugaagggaacaagcuacaagauaugcaccgacaaaauguucuucgugaaaaacccaaccgacacuggacacggcacggucguuaugcaagucaagguaucaaaaggagccccaugcagaaucccaguaauaguagcggacgaccuaacagccgccauaaacaaaggaauccuagucacgguaaauccgauagcaucgaccaacgacgacgaaguacuaauagaagugaacccaccauucggcgacagcuacauaauagucgggagaggcgacucgcgacuaaccuaccaauggcacaaggaagggagcucuaucgggaaacuauucacccaaacgaugaagggcguagaaaggcucgcagucaugggcgacaccgcaugggacuucuccagcgcgggaggcuucuuuacuucagugggaaaagggauacacaccgucuucggcagcgcauuccagggccuauucggcggguuaaacuggaucacgaaagugauaaugggggcaguucucaucugggucggaauaaacacacguaacaugaccaugagcaugagcaugauccuagucggggucauaaugauguucuugagcuugggaguaggugcaugaggacuagucccuguucccagagcccacuuuuuuuucuuuuuuugaaauaaaauagccugucuuucagaucuaaaaaaaaaaaaaaaaaaaaaaaaaaaaaaaaaaaaaaaaaaaaaaaaaaaaaaaaaaaaaaaaugcaucccccccccccccccccccccccccccccccaaaggcucuuuucagagccaccagaauu

SEQ ID NO: 644 - RNA, 2353 nt, Artificial Sequence
  mRNA product Design a-2 comprising derived and/or modified sequence from YFV__NC_002031.1__SSIgE-prME-XX (polyprotein: aa122-788) (opt11)
gggagaguccgcucagccagguugcagaagcggcuuagcguguguccuaaucuucucucugcguguagguaggccugugccgcaaacaagcuuaccauggauuggacguggauacucuuucucguggccgcggccacgcgcgugcacucggugacccuaguaaggaaaaacagauggcuacuacuaaacguaaccucagaagaucuaggaaagacauuuucagucggcacaggcaacugcacaaccaacauacuagaagcaaaauauuggugcccagacagcauggaauacaacugucccaaccucagcccaagagaggaaccagacgacauagacugcugguguuacggaguagaaaacguaagaguggcauacggcaaaugcgacagcgcaggcaggagccgaagaucccgcagagccaucgacuugcccacgcacgaaaaccacggccucaaaacacgacaagaaaaauggaugacagggcgaaugggagaacgacagcuccagaaaauagaacgaugguucguccggaacccguucuucgcaguaacggcacuaacaaucgcauaccucguaggcagcaacaugacacaaagaguggucaucgcgcuacucguacuagcaguggggcccgcauacagugcacacugcauaggaaucacagaccgugacuucaucgaaggcguacacggaggaacguggguaagcgcgacacuggaacaagacaaaugcgugacaguaauggcaccagacaaaccaagccuagacauaucccuagaaacggucgccaucgaccgucccgcagaaguacgaaagguaugcuauaaugcaguccucacacacgucaaaauaaacgacaaaugccccagcacgggcgaagcacaccucgccgaagaaaacgaaggggauaacgcgugcaaacgcaccuacuccgacaggggauggggcaacggaugcggacuguucggaaaaggauccauagucgcaugcgcaaaauuuaccugcgcaaaaagcaugagcuuguucgagguagaccaaacgaagauccaauacguaauccgagcucaacuacacguuggggccaagcaagagaacuggaauacggacaucaaaacacuaaaauucgacgcacucuccggcucacaagaagucgaguucaucggcuacggcaaagcaacacuagaaugccaaguacaaacagcgguggacuucggcaacagcuacauagcagaaauggaaacagaaagcuggauaguagaccgacaaugggcacaagaccuaacucugccauggcaaagcggcucaggaggaguguggagagagaugcaccaccugguagaguucgaacccccacacgcagcaacaauaaggguacuggcacuaggcaaccaagaaggcagccuaaaaaccgcacucacaggagccaugcgcgugacgaaggacaccaacgacaacaaccucuacaaacuccacggagggcacguauccugccgcguaaaacuaucagcacuaacgcuaaaaggaacaagcuacaaaauaugcacagacaaaauguucuucgucaaaaaccccacagacacaggccacggcacagucguaaugcaagugaaggucagcaagggggcccccugccgaaucccagucauaguggcagacgaccucacggccgccaucaacaaagggauccugguaacagugaacccaauagcaucgaccaacgacgacgaaguccucauagaagugaaucccccguucggcgacagcuacaucaucguaggacgcggcgacucccgacugacguaccaauggcauaaagaaggcagcagcauuggaaaacuauucacccaaaccaugaagggcgucgaaagacucgcggugaugggagacaccgcaugggacuucucgagcgcaggcggcuucuucacaagcguaggaaaagggauucacacaguauucggauccgcauuccaaggccucuucgggggacuaaacuggauaacgaaaguaauaaugggagcaguucucauauggguaggaaucaacacacgaaacaugacaauguccaugucaaugauacucguaggcguaaucaugauguuucugucacucggagugggagcagaccaagguugcgccauaaacuucggcaagugaggacuagucccuguucccagagcccacuuuuuuuucuuuuuuugaaauaaaauagccugucuuucagaucuaaaaaaaaaaaaaaaaaaaaaaaaaaaaaaaaaaaaaaaaaaaaaaaaaaaaaaaaaaaaaaaaugcaucccccccccccccccccccccccccccccccaaaggcucuuuucagagccaccagaauu

SEQ ID NO: 645 - RNA, 2323 nt, Artificial Sequence
  mRNA product Design a-2 comprising derived and/or modified sequence from YFV__NC_002031.1__SSIgE-prME (polyprotein: aa122-778) (opt11)
gggagaguccgcucagccagguugcagaagcggcuuagcguguguccuaaucuucucucugcguguagguaggccugugccgcaaacaagcuuaccauggauuggacguggauacucuuucucguggccgcggccacgcgcgugcacucggugacccuaguccgcaaaaacagauggcuacuacuaaacguaacaagcgaagaccugggcaaaacauucagcguuggcacaggcaauugcacgacaaacauacucgaagcaaaauacuggugccccgacagcauggaauacaacugcccaaaucuaagcccacgcgaagaaccagacgacaucgacuguuggugcuacggagucgaaaacgugagggucgcauacgguaaaugcgacagcgcuggcagaagcagacgcucccgacgagccauugaccucccuacccacgaaaaccacggccuaaaaacccggcaggaaaaauggaugacaggccggaugggagaacgccaacuacagaaaauagagaggugguuuguaagaaacccauucuucgccguaaccgcgcucaccaucgcuuaccucguaggaucaaacaugacgcaaagaguagugaucgcgcuacucguacuagcgguaggccccgccuacagcgcacacugcaucggcaucacugacagggacuucauagaaggcguccacgggggcacguggguuagcgccacacucgaacaagacaaaugcgucacagugauggcaccagacaaacccucacuagacaucucacuagaaaccgucgcaaucgaccgcccagcagaagucaggaaagugugcuacaacgccgucuuaacccacguaaaaauaaaugauaaaugcccaagcacgggagaggcacaccuagcggaagaaaacgaaggcgacaacgcgugcaaacguaccuacagcgacagaggguggggcaacggaugcggcuuauucggaaaaggaaguaucguagcaugcgcaaaauuuaccugcgccaaaagcaugucccuauucgaaguagaucaaacaaaaauacaauacgucauccgagcccaacuacacgugggggcaaaacaagaaaacuggaacaccgacaucaaaacacucaaauucgaugcccuaagcggcucccaagaaguagaguucaucgguuacggcaaggccacgcucgagugccaaguccaaacagcaguagacuucgggaacucauacaucgccgagauggaaacggaaucauggauugucgacagacaaugggcacaagaccuaacacuaccauggcaaucaggcagcggaggggucuggcgagaaaugcaccaccuaguagaguucgaacccccacacgccgcaacaauccgaguacuagcccucggaaaccaagaaggaucacuaaaaaccgcacucaccggcgcaaugcgcguaacaaaagauacaaacgacaacaaccuauacaaacuacacggcggacacgucagcugccgcgucaaacuauccgcccuaacacuaaaaggaacaagcuacaaaauaugcacagacaaaauguucuucgucaaaaauccgacugacacgggccacggcacagucguaaugcaaguaaaagucucaaaaggcgcaccaugcagaaucccaguaaucgucgccgaugaccuaacagccgcaaucaacaagggcauccucguaacaguaaaccccauagccagcaccaacgacgacgaaguccuaaucgaagucaacccacccuucggagacagcuacauaauaguaggacgaggggacucacgccuaaccuaccaauggcacaaagaaggauccucaaucggcaaacuguucacacaaacgaugaaaggcguagaaagacucgcaguaaugggcgauacggccugggacuucucaagcgcgggcggcuucuucacgagcgucggaaaaggcauccauacaguauucggaagcgcauuccaaggccuauuuggaggccucaacuggauaacaaaagugaucaugggagcaguacugaucugggucggcaucaacacccgcaacaugacgaugagcaugucaaugauccucgugggaguaauaaugauguuccucagccugggcguaggcgcaugaggacuagucccuguucccagagcccacuuuuuuuucuuuuuuugaaauaaaauagccugucuuucagaucuaaaaaaaaaaaaaaaaaaaaaaaaaaaaaaaaaaaaaaaaaaaaaaaaaaaaaaaaaaaaaaaaugcaucccccccccccccccccccccccccccccccaaaggcucuuuucagagccaccagaauu

SEQ ID NO: 646 - RNA, 2371 nt, Artificial Sequence
  mRNA product Design a-2 comprising derived and/or modified sequence from YFV__NC_002031.1__SSjev-prME-XX (polyprotein: aa122-788) (opt11)
gggagaguccgcucagccagguugcagaagcggcuuagcguguguccuaaucuucucucugcguguagguaggccugugccgcaaacaagcuuaccauggggaaaaggagcgcgggcucgauaaugugguuggccucgcucgcggucgugaucgcgugcgcgggcgcggugacccuaguaaggaaaaacagauggcuacuacuaaacguaaccucagaagaucuaggaaagacauuuucagucggcacaggcaacugcacaaccaacauacuagaagcaaaauauuggugcccagacagcauggaauacaacugucccaaccucagcccaagagaggaaccagacgacauagacugcugguguuacggaguagaaaacguaagaguggcauacggcaaaugcgacagcgcaggcaggagccgaagaucccgcagagccaucgacuugcccacgcacgaaaaccacggccucaaaacacgacaagaaaaauggaugacagggcgaaugggagaacgacagcuccagaaaauagaacgaugguucguccggaacccguucuucgcaguaacggcacuaacaaucgcauaccucguaggcagcaacaugacacaaagaguggucaucgcgcuacucguacuagcaguggggcccgcauacagugcacacugcauaggaaucacagaccgugacuucaucgaaggcguacacggaggaacguggguaagcgcgacacuggaacaagacaaaugcgugacaguaauggcaccagacaaaccaagccuagacauaucccuagaaacggucgccaucgaccgucccgcagaaguacgaaagguaugcuauaaugcaguccucacacacgucaaaauaaacgacaaaugccccagcacgggcgaagcacaccucgccgaagaaaacgaaggggauaacgcgugcaaacgcaccuacuccgacaggggauggggcaacggaugcggacuguucggaaaaggauccauagucgcaugcgcaaaauuuaccugcgcaaaaagcaugagcuuguucgagguagaccaaacgaagauccaauacguaauccgagcucaacuacacguuggggccaagcaagagaacuggaauacggacaucaaaacacuaaaauucgacgcacucuccggcucacaagaagucgaguucaucggcuacggcaaagcaacacuagaaugccaaguacaaacagcgguggacuucggcaacagcuacauagcagaaauggaaacagaaagcuggauaguagaccgacaaugggcacaagaccuaacucugccauggcaaagcggcucaggaggaguguggagagagaugcaccaccugguagaguucgaacccccacacgcagcaacaauaaggguacuggcacuaggcaaccaagaaggcagccuaaaaaccgcacucacaggagccaugcgcgugacgaaggacaccaacgacaacaaccucuacaaacuccacggagggcacguauccugccgcguaaaacuaucagcacuaacgcuaaaaggaacaagcuacaaaauaugcacagacaaaauguucuucgucaaaaaccccacagacacaggccacggcacagucguaaugcaagugaaggucagcaagggggcccccugccgaaucccagucauaguggcagacgaccucacggccgccaucaacaaagggauccugguaacagugaacccaauagcaucgaccaacgacgacgaaguccucauagaagugaaucccccguucggcgacagcuacaucaucguaggacgcggcgacucccgacugacguaccaauggcauaaagaaggcagcagcauuggaaaacuauucacccaaaccaugaagggcgucgaaagacucgcggugaugggagacaccgcaugggacuucucgagcgcaggcggcuucuucacaagcguaggaaaagggauucacacaguauucggauccgcauuccaaggccucuucgggggacuaaacuggauaacgaaaguaauaaugggagcaguucucauauggguaggaaucaacacacgaaacaugacaauguccaugucaaugauacucguaggcguaaucaugauguuucugucacucggagugggagcagaccaagguugcgccauaaacuucggcaagugaggacuagucccuguucccagagcccacuuuuuuuucuuuuuuugaaauaaaauagccugucuuucagaucuaaaaaaaaaaaaaaaaaaaaaaaaaaaaaaaaaaaaaaaaaaaaaaaaaaaaaaaaaaaaaaaaugcaucccccccccccccccccccccccccccccccaaaggcucuuuucagagccaccagaauu

SEQ ID NO: 647 - RNA, 2341 nt, Artificial Sequence
  mRNA product Design a-2 comprising derived and/or modified sequence from YFV__NC_002031.1__SSjev-prME (polyprotein: aa122-778) (opt11)
gggagaguccgcucagccagguugcagaagcggcuuagcguguguccuaaucuucucucugcguguagguaggccugugccgcaaacaagcuuaccauggggaaaaggagcgcgggcucgauaaugugguuggccucgcucgcggucgugaucgcgugcgcgggcgcggugacccuaguccgcaaaaacagauggcuacuacuaaacguaacaagcgaagaccugggcaaaacauucagcguuggcacaggcaauugcacgacaaacauacucgaagcaaaauacuggugccccgacagcauggaauacaacugcccaaaucuaagcccacgcgaagaaccagacgacaucgacuguuggugcuacggagucgaaaacgugagggucgcauacgguaaaugcgacagcgcuggcagaagcagacgcucccgacgagccauugaccucccuacccacgaaaaccacggccuaaaaacccggcaggaaaaauggaugacaggccggaugggagaacgccaacuacagaaaauagagaggugguuuguaagaaacccauucuucgccguaaccgcgcucaccaucgcuuaccucguaggaucaaacaugacgcaaagaguagugaucgcgcuacucguacuagcgguaggccccgccuacagcgcacacugcaucggcaucacugacagggacuucauagaaggcguccacgggggcacguggguuagcgccacacucgaacaagacaaaugcgucacagugauggcaccagacaaacccucacuagacaucucacuagaaaccgucgcaaucgaccgcccagcagaagucaggaaagugugcuacaacgccgucuuaacccacguaaaaauaaaugauaaaugcccaagcacgggagaggcacaccuagcggaagaaaacgaaggcgacaacgcgugcaaacguaccuacagcgacagaggguggggcaacggaugcggcuuauucggaaaaggaaguaucguagcaugcgcaaaauuuaccugcgccaaaagcaugucccuauucgaaguagaucaaacaaaaauacaauacgucauccgagcccaacuacacgugggggcaaaacaagaaaacuggaacaccgacaucaaaacacucaaauucgaugcccuaagcggcucccaagaaguagaguucaucgguuacggcaaggccacgcucgagugccaaguccaaacagcaguagacuucgggaacucauacaucgccgagauggaaacggaaucauggauugucgacagacaaugggcacaagaccuaacacuaccauggcaaucaggcagcggaggggucuggcgagaaaugcaccaccuaguagaguucgaacccccacacgccgcaacaauccgaguacuagcccucggaaaccaagaaggaucacuaaaaaccgcacucaccggcgcaaugcgcguaacaaaagauacaaacgacaacaaccuauacaaacuacacggcggacacgucagcugccgcgucaaacuauccgcccuaacacuaaaaggaacaagcuacaaaauaugcacagacaaaauguucuucgucaaaaauccgacugacacgggccacggcacagucguaaugcaaguaaaagucucaaaaggcgcaccaugcagaaucccaguaaucgucgccgaugaccuaacagccgcaaucaacaagggcauccucguaacaguaaaccccauagccagcaccaacgacgacgaaguccuaaucgaagucaacccacccuucggagacagcuacauaauaguaggacgaggggacucacgccuaaccuaccaauggcacaaagaaggauccucaaucggcaaacuguucacacaaacgaugaaaggcguagaaagacucgcaguaaugggcgauacggccugggacuucucaagcgcgggcggcuucuucacgagcgucggaaaaggcauccauacaguauucggaagcgcauuccaaggccuauuuggaggccucaacuggauaacaaaagugaucaugggagcaguacugaucugggucggcaucaacacccgcaacaugacgaugagcaugucaaugauccucgugggaguaauaaugauguuccucagccugggcguaggcgcaugaggacuagucccuguucccagagcccacuuuuuuuucuuuuuuugaaauaaaauagccugucuuucagaucuaaaaaaaaaaaaaaaaaaaaaaaaaaaaaaaaaaaaaaaaaaaaaaaaaaaaaaaaaaaaaaaaugcaucccccccccccccccccccccccccccccccaaaggcucuuuucagagccaccagaauu

SEQ ID NO: 648 - RNA, 2434 nt, Artificial Sequence
  mRNA product Design b-4 comprising derived and/or modified sequence from YFV__NC_002031.1__X-SS-prME-XX (polyprotein: aa92-788) (wt)
gggagagucccgcagucggcguccagcggcucugcuuguucgugugugugucguugcaggccuuauucaagcuuaccaugagaggauuguccucaaggaaacgccguucccaugauguucugacugugcaauuccuaauuuugggaaugcuguugaugacggguggagugaccuuggugcggaaaaacagaugguugcuccuaaaugugacaucugaggaccucgggaaaacauucucugugggcacaggcaacugcacaacaaacauuuuggaagccaaguacuggugcccagacucaauggaauacaacugucccaaucucaguccaagagaggagccagaugacauugauugcuggugcuaugggguggaaaacguuagagucgcauaugguaagugugacucagcaggcaggucuaggaggucaagaagggccauugacuugccuacgcaugaaaaccaugguuugaagacccggcaagaaaaauggaugacuggaagaaugggugaaaggcaacuccaaaagauugagagaugguucgugaggaaccccuuuuuugcagugacggcucugaccauugccuaccuugugggaagcaacaugacgcaacgagucgugauugcccuacuggucuuggcuguugguccggccuacucagcucacugcauuggaauuacugacagggauuucauugagggggugcauggaggaacuuggguuucagcuacccuggagcaagacaagugugucacuguuauggccccugacaagccuucauuggacaucucacuagagacaguagccauugauagaccugcugaggugaggaaaguguguuacaaugcaguucucacucaugugaagauuaaugacaagugccccagcacuggagaggcccaccuagcugaagagaacgaaggggacaaugcgugcaagcgcacuuauucugauagaggcuggggcaauggcuguggccuauuugggaaagggagcauuguggcaugcgccaaauucacuugugccaaauccaugaguuuguuugagguugaucagaccaaaauucaguaugucaucagagcacaauugcauguaggggccaagcaggaaaauuggaauaccgacauuaagacucucaaguuugaugcccugucaggcucccaggaagucgaguucauuggguauggaaaagcuacacuggaaugccaggugcaaacugcgguggacuuugguaacaguuacaucgcugagauggaaacagagagcuggauaguggacagacagugggcccaggacuugacccugccauggcagaguggaaguggcgggguguggagagagaugcaucaucuugucgaauuugaaccuccgcaugccgccacuaucagaguacuggcccugggaaaccaggaaggcuccuugaaaacagcucuuacuggcgcaaugaggguuacaaaggacacaaaugacaacaaccuuuacaaacuacaugguggacauguuucuugcagagugaaauugucagcuuugacacucaaggggacauccuacaaaauaugcacugacaaaauguuuuuugucaagaacccaacugacacuggccauggcacuguugugaugcaggugaaagugucaaaaggagcccccugcaggauuccagugauaguagcugaugaucuuacagcggcaaucaauaaaggcauuuugguuacaguuaaccccaucgccucaaccaaugaugaugaagugcugauugaggugaacccaccuuuuggagacagcuacauuaucguugggagaggagauucacgucucacuuaccaguggcacaaagagggaagcucaauaggaaaguuguucacucagaccaugaaaggcguggaacgccuggccgucaugggagacaccgccugggauuucagcuccgcuggaggguucuucacuucgguugggaaaggaauccauacgguguuuggcucugccuuucaggggcuauuuggcggcuugaacuggauaacaaaggucaucaugggggcgguacuuauauggguuggcaucaacacaagaaacaugacaauguccaugagcaugaucuugguaggagugaucaugauguuuuugucucuaggaguuggggcggaucaaggaugcgccaucaacuuuggcaaguaaggacuaguaauaaggaaacuguaugaaugucugugggcaggaagugaagagauccuucuguaaagguuuuuggaauuaugucugcugaauaauaaacuuuuuugaaauaauaaaucugguagaaaaaugagaucuaaaaaaaaaaaaaaaaaaaaaaaaaaaaaaaaaaaaaaaaaaaaaaaaaaaaaaaaaaaaaaaaugcaucccccccccccccccccccccccccccccccaaaggcucuuuucagagccaccagaauu

SEQ ID NO: 649 - RNA, 2401 nt, Artificial Sequence
  mRNA product Design b-4 comprising derived and/or modified sequence from YFV__NC_002031.1__SS-prME (polyprotein: M,aa104-778) (wt)
gggagagucccgcagucggcguccagcggcucugcuuguucgugugugugucguugcaggccuuauucaagcuuaccauggauguucugacugugcaauuccuaauuuugggaaugcuguugaugacggguggagugaccuuggugcggaaaaacagaugguugcuccuaaaugugacaucugaggaccucgggaaaacauucucugugggcacaggcaacugcacaacaaacauuuuggaagccaaguacuggugcccagacucaauggaauacaacugucccaaucucaguccaagagaggagccagaugacauugauugcuggugcuaugggguggaaaacguuagagucgcauaugguaagugugacucagcaggcaggucuaggaggucaagaagggccauugacuugccuacgcaugaaaaccaugguuugaagacccggcaagaaaaauggaugacuggaagaaugggugaaaggcaacuccaaaagauugagagaugguucgugaggaaccccuuuuuugcagugacggcucugaccauugccuaccuugugggaagcaacaugacgcaacgagucgugauugcccuacuggucuuggcuguugguccggccuacucagcucacugcauuggaauuacugacagggauuucauugagggggugcauggaggaacuuggguuucagcuacccuggagcaagacaagugugucacuguuauggccccugacaagccuucauuggacaucucacuagagacaguagccauugauagaccugcugaggugaggaaaguguguuacaaugcaguucucacucaugugaagauuaaugacaagugccccagcacuggagaggcccaccuagcugaagagaacgaaggggacaaugcgugcaagcgcacuuauucugauagaggcuggggcaauggcuguggccuauuugggaaagggagcauuguggcaugcgccaaauucacuugugccaaauccaugaguuuguuugagguugaucagaccaaaauucaguaugucaucagagcacaauugcauguaggggccaagcaggaaaauuggaauaccgacauuaagacucucaaguuugaugcccugucaggcucccaggaagucgaguucauuggguauggaaaagcuacacuggaaugccaggugcaaacugcgguggacuuugguaacaguuacaucgcugagauggaaacagagagcuggauaguggacagacagugggcccaggacuugacccugccauggcagaguggaaguggcgggguguggagagagaugcaucaucuugucgaauuugaaccuccgcaugccgccacuaucagaguacuggcccugggaaaccaggaaggcuccuugaaaacagcucuuacuggcgcaaugaggguuacaaaggacacaaaugacaacaaccuuuacaaacuacaugguggacauguuucuugcagagugaaauugucagcuuugacacucaaggggacauccuacaaaauaugcacugacaaaauguuuuuugucaagaacccaacugacacuggccauggcacuguugugaugcaggugaaagugucaaaaggagcccccugcaggauuccagugauaguagcugaugaucuuacagcggcaaucaauaaaggcauuuugguuacaguuaaccccaucgccucaaccaaugaugaugaagugcugauugaggugaacccaccuuuuggagacagcuacauuaucguugggagaggagauucacgucucacuuaccaguggcacaaagagggaagcucaauaggaaaguuguucacucagaccaugaaaggcguggaacgccuggccgucaugggagacaccgccugggauuucagcuccgcuggaggguucuucacuucgguugggaaaggaauccauacgguguuuggcucugccuuucaggggcuauuuggcggcuugaacuggauaacaaaggucaucaugggggcgguacuuauauggguuggcaucaacacaagaaacaugacaauguccaugagcaugaucuugguaggagugaucaugauguuuuugucucuaggaguuggggcggaucaaggaugcgccaucaacuuuggcaaguaaggacuaguaauaaggaaacuguaugaaugucugugggcaggaagugaagagauccuucuguaaagguuuuuggaauuaugucugcugaauaauaaacuuuuuugaaauaauaaaucugguagaaaaaugagaucuaaaaaaaaaaaaaaaaaaaaaaaaaaaaaaaaaaaaaaaaaaaaaaaaaaaaaaaaaaaaaaaaugcaucccccccccccccccccccccccccccccccaaaggcucuuuucagagccaccagaauu

SEQ ID NO: 650 - RNA, 2398 nt, Artificial Sequence
  mRNA product Design b-4 comprising derived and/or modified sequence from YFV__NC_002031.1__SSIgE-prME-XX (polyprotein: aa122-788) (wt)
gggagagucccgcagucggcguccagcggcucugcuuguucgugugugugucguugcaggccuuauucaagcuuaccauggacuggaccuggauccuguuccucguggccgccgcgacccgcguccacagcgugaccuuggugcggaaaaacagaugguugcuccuaaaugugacaucugaggaccucgggaaaacauucucugugggcacaggcaacugcacaacaaacauuuuggaagccaaguacuggugcccagacucaauggaauacaacugucccaaucucaguccaagagaggagccagaugacauugauugcuggugcuaugggguggaaaacguuagagucgcauaugguaagugugacucagcaggcaggucuaggaggucaagaagggccauugacuugccuacgcaugaaaaccaugguuugaagacccggcaagaaaaauggaugacuggaagaaugggugaaaggcaacuccaaaagauugagagaugguucgugaggaaccccuuuuuugcagugacggcucugaccauugccuaccuugugggaagcaacaugacgcaacgagucgugauugcccuacuggucuuggcuguugguccggccuacucagcucacugcauuggaauuacugacagggauuucauugagggggugcauggaggaacuuggguuucagcuacccuggagcaagacaagugugucacuguuauggccccugacaagccuucauuggacaucucacuagagacaguagccauugauagaccugcugaggugaggaaaguguguuacaaugcaguucucacucaugugaagauuaaugacaagugccccagcacuggagaggcccaccuagcugaagagaacgaaggggacaaugcgugcaagcgcacuuauucugauagaggcuggggcaauggcuguggccuauuugggaaagggagcauuguggcaugcgccaaauucacuugugccaaauccaugaguuuguuugagguugaucagaccaaaauucaguaugucaucagagcacaauugcauguaggggccaagcaggaaaauuggaauaccgacauuaagacucucaaguuugaugcccugucaggcucccaggaagucgaguucauuggguauggaaaagcuacacuggaaugccaggugcaaacugcgguggacuuugguaacaguuacaucgcugagauggaaacagagagcuggauaguggacagacagugggcccaggacuugacccugccauggcagaguggaaguggcgggguguggagagagaugcaucaucuugucgaauuugaaccuccgcaugccgccacuaucagaguacuggcccugggaaaccaggaaggcuccuugaaaacagcucuuacuggcgcaaugaggguuacaaaggacacaaaugacaacaaccuuuacaaacuacaugguggacauguuucuugcagagugaaauugucagcuuugacacucaaggggacauccuacaaaauaugcacugacaaaauguuuuuugucaagaacccaacugacacuggccauggcacuguugugaugcaggugaaagugucaaaaggagcccccugcaggauuccagugauaguagcugaugaucuuacagcggcaaucaauaaaggcauuuugguuacaguuaaccccaucgccucaaccaaugaugaugaagugcugauugaggugaacccaccuuuuggagacagcuacauuaucguugggagaggagauucacgucucacuuaccaguggcacaaagagggaagcucaauaggaaaguuguucacucagaccaugaaaggcguggaacgccuggccgucaugggagacaccgccugggauuucagcuccgcuggaggguucuucacuucgguugggaaaggaauccauacgguguuuggcucugccuuucaggggcuauuuggcggcuugaacuggauaacaaaggucaucaugggggcgguacuuauauggguuggcaucaacacaagaaacaugacaauguccaugagcaugaucuugguaggagugaucaugauguuuuugucucuaggaguuggggcggaucaaggaugcgccaucaacuuuggcaaguaaggacuaguaauaaggaaacuguaugaaugucugugggcaggaagugaagagauccuucuguaaagguuuuuggaauuaugucugcugaauaauaaacuuuuuugaaauaauaaaucugguagaaaaaugagaucuaaaaaaaaaaaaaaaaaaaaaaaaaaaaaaaaaaaaaaaaaaaaaaaaaaaaaaaaaaaaaaaaugcaucccccccccccccccccccccccccccccccaaaggcucuuuucagagccaccagaauu

SEQ ID NO: 651 - RNA, 2368 nt, Artificial Sequence
  mRNA product Design b-4 comprising derived and/or modified sequence from YFV__NC_002031.1__SSIgE-prME (polyprotein: aa122-778) (wt)
gggagagucccgcagucggcguccagcggcucugcuuguucgugugugugucguugcaggccuuauucaagcuuaccauggacuggaccuggauccuguuccucguggccgccgcgacccgcguccacagcgugaccuuggugcggaaaaacagaugguugcuccuaaaugugacaucugaggaccucgggaaaacauucucugugggcacaggcaacugcacaacaaacauuuuggaagccaaguacuggugcccagacucaauggaauacaacugucccaaucucaguccaagagaggagccagaugacauugauugcuggugcuaugggguggaaaacguuagagucgcauaugguaagugugacucagcaggcaggucuaggaggucaagaagggccauugacuugccuacgcaugaaaaccaugguuugaagacccggcaagaaaaauggaugacuggaagaaugggugaaaggcaacuccaaaagauugagagaugguucgugaggaaccccuuuuuugcagugacggcucugaccauugccuaccuugugggaagcaacaugacgcaacgagucgugauugcccuacuggucuuggcuguugguccggccuacucagcucacugcauuggaauuacugacagggauuucauugagggggugcauggaggaacuuggguuucagcuacccuggagcaagacaagugugucacuguuauggccccugacaagccuucauuggacaucucacuagagacaguagccauugauagaccugcugaggugaggaaaguguguuacaaugcaguucucacucaugugaagauuaaugacaagugccccagcacuggagaggcccaccuagcugaagagaacgaaggggacaaugcgugcaagcgcacuuauucugauagaggcuggggcaauggcuguggccuauuugggaaagggagcauuguggcaugcgccaaauucacuugugccaaauccaugaguuuguuugagguugaucagaccaaaauucaguaugucaucagagcacaauugcauguaggggccaagcaggaaaauuggaauaccgacauuaagacucucaaguuugaugcccugucaggcucccaggaagucgaguucauuggguauggaaaagcuacacuggaaugccaggugcaaacugcgguggacuuugguaacaguuacaucgcugagauggaaacagagagcuggauaguggacagacagugggcccaggacuugacccugccauggcagaguggaaguggcgggguguggagagagaugcaucaucuugucgaauuugaaccuccgcaugccgccacuaucagaguacuggcccugggaaaccaggaaggcuccuugaaaacagcucuuacuggcgcaaugaggguuacaaaggacacaaaugacaacaaccuuuacaaacuacaugguggacauguuucuugcagagugaaauugucagcuuugacacucaaggggacauccuacaaaauaugcacugacaaaauguuuuuugucaagaacccaacugacacuggccauggcacuguugugaugcaggugaaagugucaaaaggagcccccugcaggauuccagugauaguagcugaugaucuuacagcggcaaucaauaaaggcauuuugguuacaguuaaccccaucgccucaaccaaugaugaugaagugcugauugaggugaacccaccuuuuggagacagcuacauuaucguugggagaggagauucacgucucacuuaccaguggcacaaagagggaagcucaauaggaaaguuguucacucagaccaugaaaggcguggaacgccuggccgucaugggagacaccgccugggauuucagcuccgcuggaggguucuucacuucgguugggaaaggaauucauacgguguuuggcucugccuuucaggggcuauuuggcggcuugaacuggauaacaaaggucaucaugggggcgguacuuauauggguuggcaucaacacaagaaacaugacaauguccaugagcaugaucuugguaggagugaucaugauguuuuugucucuaggaguuggggcguaaggacuaguaauaaggaaacuguaugaaugucugugggcaggaagugaagagauccuucuguaaagguuuuuggaauuaugucugcugaauaauaaacuuuuuugaaauaauaaaucugguagaaaaaugagaucuaaaaaaaaaaaaaaaaaaaaaaaaaaaaaaaaaaaaaaaaaaaaaaaaaaaaaaaaaaaaaaaaugcaucccccccccccccccccccccccccccccccaaaggcucuuuucagagccaccagaauu

SEQ ID NO: 652 - RNA, 2416 nt, Artificial Sequence
  mRNA product Design b-4 comprising derived and/or modified sequence from YFV__NC_002031.1__SSjev-prME-XX (polyprotein: aa122-788) (wt)
gggagagucccgcagucggcguccagcggcucugcuuguucgugugugugucguugcaggccuuauucaagcuuaccauggguaaacggagcgcuggcucaaucauguggcucgcgagcuuggcaguugucauagcuugugcaggagccgugaccuuggugcggaaaaacagaugguugcuccuaaaugugacaucugaggaccucgggaaaacauucucugugggcacaggcaacugcacaacaaacauuuuggaagccaaguacuggugcccagacucaauggaauacaacugucccaaucucaguccaagagaggagccagaugacauugauugcuggugcuaugggguggaaaacguuagagucgcauaugguaagugugacucagcaggcaggucuaggaggucaagaagggccauugacuugccuacgcaugaaaaccaugguuugaagacccggcaagaaaaauggaugacuggaagaaugggugaaaggcaacuccaaaagauugagagaugguucgugaggaaccccuuuuuugcagugacggcucugaccauugccuaccuugugggaagcaacaugacgcaacgagucgugauugcccuacuggucuuggcuguugguccggccuacucagcucacugcauuggaauuacugacagggauuucauugagggggugcauggaggaacuuggguuucagcuacccuggagcaagacaagugugucacuguuauggccccugacaagccuucauuggacaucucacuagagacaguagccauugauagaccugcugaggugaggaaaguguguuacaaugcaguucucacucaugugaagauuaaugacaagugccccagcacuggagaggcccaccuagcugaagagaacgaaggggacaaugcgugcaagcgcacuuauucugauagaggcuggggcaauggcuguggccuauuugggaaagggagcauuguggcaugcgccaaauucacuugugccaaauccaugaguuuguuugagguugaucagaccaaaauucaguaugucaucagagcacaauugcauguaggggccaagcaggaaaauuggaauaccgacauuaagacucucaaguuugaugcccugucaggcucccaggaagucgaguucauuggguauggaaaagcuacacuggaaugccaggugcaaacugcgguggacuuugguaacaguuacaucgcugagauggaaacagagagcuggauaguggacagacagugggcccaggacuugacccugccauggcagaguggaaguggcgggguguggagagagaugcaucaucuugucgaauuugaaccuccgcaugccgccacuaucagaguacuggcccugggaaaccaggaaggcuccuugaaaacagcucuuacuggcgcaaugaggguuacaaaggacacaaaugacaacaaccuuuacaaacuacaugguggacauguuucuugcagagugaaauugucagcuuugacacucaaggggacauccuacaaaauaugcacugacaaaauguuuuuugucaagaacccaacugacacuggccauggcacuguugugaugcaggugaaagugucaaaaggagcccccugcaggauuccagugauaguagcugaugaucuuacagcggcaaucaauaaaggcauuuugguuacaguuaaccccaucgccucaaccaaugaugaugaagugcugauugaggugaacccaccuuuuggagacagcuacauuaucguugggagaggagauucacgucucacuuaccaguggcacaaagagggaagcucaauaggaaaguuguucacucagaccaugaaaggcguggaacgccuggccgucaugggagacaccgccugggauuucagcuccgcuggaggguucuucacuucgguugggaaaggaauccauacgguguuuggcucugccuuucaggggcuauuuggcggcuugaacuggauaacaaaggucaucaugggggcgguacuuauauggguuggcaucaacacaagaaacaugacaauguccaugagcaugaucuugguaggagugaucaugauguuuuugucucuaggaguuggggcggaucaaggaugcgccaucaacuuuggcaaguaaggacuaguaauaaggaaacuguaugaaugucugugggcaggaagugaagagauccuucuguaaagguuuuuggaauuaugucugcugaauaauaaacuuuuuugaaauaauaaaucugguagaaaaaugagaucuaaaaaaaaaaaaaaaaaaaaaaaaaaaaaaaaaaaaaaaaaaaaaaaaaaaaaaaaaaaaaaaaugcaucccccccccccccccccccccccccccccccaaaggcucuuuucagagccaccagaauu

SEQ ID NO: 653 - RNA, 2386 nt, Artificial Sequence
  mRNA product Design b-4 comprising derived and/or modified sequence from YFV__NC_002031.1__SSjev-prME (polyprotein: aa122-778) (wt)
gggagagucccgcagucggcguccagcggcucugcuuguucgugugugugucguugcaggccuuauucaagcuuaccauggguaaacggagcgcuggcucaaucauguggcucgcgagcuuggcaguugucauagcuugugcaggagccgugaccuuggugcggaaaaacagaugguugcuccuaaaugugacaucugaggaccucgggaaaacauucucugugggcacaggcaacugcacaacaaacauuuuggaagccaaguacuggugcccagacucaauggaauacaacugucccaaucucaguccaagagaggagccagaugacauugauugcuggugcuaugggguggaaaacguuagagucgcauaugguaagugugacucagcaggcaggucuaggaggucaagaagggccauugacuugccuacgcaugaaaaccaugguuugaagacccggcaagaaaaauggaugacuggaagaaugggugaaaggcaacuccaaaagauugagagaugguucgugaggaaccccuuuuuugcagugacggcucugaccauugccuaccuugugggaagcaacaugacgcaacgagucgugauugcccuacuggucuuggcuguugguccggccuacucagcucacugcauuggaauuacugacagggauuucauugagggggugcauggaggaacuuggguuucagcuacccuggagcaagacaagugugucacuguuauggccccugacaagccuucauuggacaucucacuagagacaguagccauugauagaccugcugaggugaggaaaguguguuacaaugcaguucucacucaugugaagauuaaugacaagugccccagcacuggagaggcccaccuagcugaagagaacgaaggggacaaugcgugcaagcgcacuuauucugauagaggcuggggcaauggcuguggccuauuugggaaagggagcauuguggcaugcgccaaauucacuugugccaaauccaugaguuuguuugagguugaucagaccaaaauucaguaugucaucagagcacaauugcauguaggggccaagcaggaaaauuggaauaccgacauuaagacucucaaguuugaugcccugucaggcucccaggaagucgaguucauuggguauggaaaagcuacacuggaaugccaggugcaaacugcgguggacuuugguaacaguuacaucgcugagauggaaacagagagcuggauaguggacagacagugggcccaggacuugacccugccauggcagaguggaaguggcgggguguggagagagaugcaucaucuugucgaauuugaaccuccgcaugccgccacuaucagaguacuggcccugggaaaccaggaaggcuccuugaaaacagcucuuacuggcgcaaugaggguuacaaaggacacaaaugacaacaaccuuuacaaacuacaugguggacauguuucuugcagagugaaauugucagcuuugacacucaaggggacauccuacaaaauaugcacugacaaaauguuuuuugucaagaacccaacugacacuggccauggcacuguugugaugcaggugaaagugucaaaaggagcccccugcaggauuccagugauaguagcugaugaucuuacagcggcaaucaauaaaggcauuuugguuacaguuaaccccaucgccucaaccaaugaugaugaagugcugauugaggugaacccaccuuuuggagacagcuacauuaucguugggagaggagauucacgucucacuuaccaguggcacaaagagggaagcucaauaggaaaguuguucacucagaccaugaaaggcguggaacgccuggccgucaugggagacaccgccugggauuucagcuccgcuggaggguucuucacuucgguugggaaaggaauucauacgguguuuggcucugccuuucaggggcuauuuggcggcuugaacuggauaacaaaggucaucaugggggcgguacuuauauggguuggcaucaacacaagaaacaugacaauguccaugagcaugaucuugguaggagugaucaugauguuuuugucucuaggaguuggggcguaaggacuaguaauaaggaaacuguaugaaugucugugggcaggaagugaagagauccuucuguaaagguuuuuggaauuaugucugcugaauaauaaacuuuuuugaaauaauaaaucugguagaaaaaugagaucuaaaaaaaaaaaaaaaaaaaaaaaaaaaaaaaaaaaaaaaaaaaaaaaaaaaaaaaaaaaaaaaaugcaucccccccccccccccccccccccccccccccaaaggcucuuuucagagccaccagaauu

SEQ ID NO: 654 - RNA, 2434 nt, Artificial Sequence
  mRNA product Design b-4 comprising derived and/or modified sequence from YFV__NC_002031.1__X-SS-prME-XX (polyprotein: aa92-788) (opt1) R7232
gggagagucccgcagucggcguccagcggcucugcuuguucgugugugugucguugcaggccuuauucaagcuuaccaugcggggccugagcucccgcaagcggcgcagccacgacgugcucaccguccaguuccugauccuggggaugcuccugaugaccggcggggugacgcuggugcggaagaaccgcuggcuccugcugaacgucaccuccgaggaccucggcaagaccuucagcguggggaccggcaacugcacgaccaacauccuggaggccaaguacuggugccccgacuccauggaguacaacugcccgaaccugagcccccgggaggagcccgacgacaucgacugcuggugcuacggcguggagaacguccgcguggccuacgggaagugcgacuccgcgggccggagccgccggucccgccgggccaucgaccuccccacccacgagaaccacgggcugaagacccgccaggagaaguggaugacgggccggaugggggagcgccagcugcagaagaucgagcggugguucgugcgcaacccguucuucgccgucaccgcccucaccaucgccuaccuggugggcagcaacaugacccagcggguggucaucgcgcugcucgugcuggccgugggccccgccuacuccgcccacugcaucgggaucacggaccgcgacuucaucgagggcguccacgggggcaccugggugagcgcgacccuggagcaggacaagugcgugaccgucauggcccccgacaagcccucccucgacaucagccuggagacgguggccaucgaccggccggccgaggugcgcaaggucugcuacaacgccgugcugacccacgugaagaucaacgacaagugccccuccaccggcgaggcgcaccucgccgaggagaacgagggggacaacgccugcaagcggaccuacagcgaccggggcugggggaacggcugcgggcuguucggcaagggcuccaucgucgccugcgccaaguucacgugcgcgaagagcaugucccuguucgagguggaccagaccaagauccaguacgucauccgcgcccagcuccacgugggggccaagcaggagaacuggaacaccgacaucaagacccugaaguucgacgcccugagcggcagccaggagguggaguucaucggguacggcaaggccacgcucgagugccagguccagaccgcgguggacuucgggaacuccuacaucgccgagauggagaccgagagcuggaucguggaccggcagugggcccaggaccugacccugcccuggcaguccggcagcggcggggucuggcgcgagaugcaccaccucguggaguucgagcccccgcacgccgccacgauccgggugcuggcgcugggcaaccaggaggggucccucaagaccgcccugaccggcgccaugcgcgucaccaaggacacgaacgacaacaaccuguacaagcuccacgggggccacgugagcugccgggugaagcuguccgcccugacccucaagggcaccagcuacaagaucugcaccgacaagauguucuucgucaagaaccccacggacaccgggcacggcaccguggugaugcaggucaagguguccaagggggcgcccugccgcaucccggugaucgucgccgacgaccugaccgccgccaucaacaagggcauccuggugaccgugaacccgaucgccagcacgaacgacgacgagguccucaucgaggugaacccccccuucggcgacuccuacaucaucguggggcggggcgacagccgccugaccuaccaguggcacaaggagggguccagcaucggcaagcuguucacccagaccaugaagggggucgagcggcuggcggugaugggcgacacggccugggacuucuccagcgccggcggguucuucaccuccgugggcaaggggauccacaccgucuucggcagcgccuuccaggggcucuucggcggccugaacuggaucaccaaggugaucaugggggccgugcugaucugggucggcaucaacacgcgcaacaugaccauguccaugagcaugauccucgugggggugaucaugauguuccugagccugggcgucggggcggaccagggcugcgccaucaacuucggcaagugaggacuaguaauaaggaaacuguaugaaugucugugggcaggaagugaagagauccuucuguaaagguuuuuggaauuaugucugcugaauaauaaacuuuuuugaaauaauaaaucugguagaaaaaugagaucuaaaaaaaaaaaaaaaaaaaaaaaaaaaaaaaaaaaaaaaaaaaaaaaaaaaaaaaaaaaaaaaaugcaucccccccccccccccccccccccccccccccaaaggcucuuuucagagccaccagaauu

SEQ ID NO: 655 - RNA, 2371 nt, Artificial Sequence
  mRNA product Design b-4 comprising derived and/or modified sequence from YFV__NC_002031.1__SS-prME (polyprotein: M,aa104-778) (opt1)
gggagagucccgcagucggcguccagcggcucugcuuguucgugugugugucguugcaggccuuauucaagcuuaccauggacgugcugaccguccaguuccucauccugggcaugcugcucaugaccgggggcgugacccugguccggaagaaccgcuggcuccugcugaacgugaccagcgaggaccucggcaagacguucuccguggggaccggcaacugcaccaccaacauccuggaggccaaguacuggugccccgacagcauggaguacaacugccccaaccuguccccgcgggaggagcccgacgacaucgacugcuggugcuacggggucgagaacgugcgcguggccuacggcaagugcgacagcgcggggcggucccgccggagccgccgggccaucgaccugcccacccacgagaaccacggccucaagacccggcaggagaaguggaugacggggcgcaugggcgagcggcagcugcagaagaucgagcgcugguucgugcggaacccguucuucgccgucaccgcgcugaccaucgccuaccucguggggagcaacaugacccagcgcguggucaucgcccugcuggugcucgccgugggccccgccuacuccgcgcacugcaucgggaucacggaccgggacuucaucgagggcguccacggcgggaccugggugagcgccacccuggagcaggacaagugcgugaccgucauggcccccgacaagcccucccuggacaucagccucgagacgguggccaucgaccgcccggcggaggugcggaaggucugcuacaacgccgugcugacccacgugaagaucaacgacaagugccccuccaccggcgaggcccaccuggccgaggagaacgagggggacaacgccugcaagcgcaccuacagcgaccggggcugggggaacggcugcggccucuucgggaagggcuccaucgucgcgugcgccaaguucacgugcgccaagagcaugucccuguucgagguggaccagaccaagauccaguacgugauccgcgcccagcugcacgucggggccaagcaggagaacuggaacaccgacaucaagacccucaaguucgacgcgcugagcggcucccaggagguggaguucaucggcuacgggaaggccacgcuggagugccaggugcagaccgccgucgacuucggcaacagcuacaucgccgagauggagaccgaguccuggaucguggaccggcagugggcccaggaccucacccugcccuggcagagcggguccggcgggguguggcgcgagaugcaccaccuggucgaguucgagcccccgcacgcggccacgauccgggugcucgcccugggcaaccaggagggcagccugaagaccgcccucaccggggccaugcgcgucaccaaggacacgaacgacaacaaccuguacaagcugcacggcgggcacguguccugccgggugaagcucagcgcgcugacccugaagggcaccuccuacaagaucugcaccgacaagauguucuucgucaagaaccccacggacaccgggcacggcaccguggugaugcaggucaaggugagcaagggcgcccccugccgcaucccggugaucgucgccgacgaccucaccgccgcgaucaacaaggggauccuggugacggugaaccccaucgccagcaccaacgacgacgagguccugaucgaggugaacccgcccuucggcgacuccuacaucaucguggggcggggcgacagccgccucaccuaccaguggcacaaggagggguccagcaucggcaagcuguucacccagacgaugaagggcgucgagcggcuggccgugaugggggacaccgccugggacuucuccagcgccggcggguucuucaccuccgugggcaagggcauccacaccgucuucgggagcgcguuccagggccucuucgggggccugaacuggaucaccaaggugaucaugggggccgugcugaucugggucggcaucaacacgcgcaacaugaccauguccaugagcaugauccucgugggcgugaucaugauguuccugucccugggggucggcgccugaggacuaguaauaaggaaacuguaugaaugucugugggcaggaagugaagagauccuucuguaaagguuuuuggaauuaugucugcugaauaauaaacuuuuuugaaauaauaaaucugguagaaaaaugagaucuaaaaaaaaaaaaaaaaaaaaaaaaaaaaaaaaaaaaaaaaaaaaaaaaaaaaaaaaaaaaaaaaugcaucccccccccccccccccccccccccccccccaaaggcucuuuucagagccaccagaauu

SEQ ID NO: 656 - RNA, 2398 nt, Artificial Sequence
  mRNA product Design b-4 comprising derived and/or modified sequence from YFV__NC_002031.1__SSIgE-prME-XX (polyprotein: aa122-788) (opt1)
gggagagucccgcagucggcguccagcggcucugcuuguucgugugugugucguugcaggccuuauucaagcuuaccauggacuggaccuggauccuguuccucguggccgccgcgacccgcguccacagcgugacgcuggugcggaagaaccgcuggcuccugcugaacgucaccuccgaggaccucggcaagaccuucagcguggggaccggcaacugcacgaccaacauccuggaggccaaguacuggugccccgacuccauggaguacaacugcccgaaccugagcccccgggaggagcccgacgacaucgacugcuggugcuacggcguggagaacguccgcguggccuacgggaagugcgacuccgcgggccggagccgccggucccgccgggccaucgaccuccccacccacgagaaccacgggcugaagacccgccaggagaaguggaugacgggccggaugggggagcgccagcugcagaagaucgagcggugguucgugcgcaacccguucuucgccgucaccgcccucaccaucgccuaccuggugggcagcaacaugacccagcggguggucaucgcgcugcucgugcuggccgugggccccgccuacuccgcccacugcaucgggaucacggaccgcgacuucaucgagggcguccacgggggcaccugggugagcgcgacccuggagcaggacaagugcgugaccgucauggcccccgacaagcccucccucgacaucagccuggagacgguggccaucgaccggccggccgaggugcgcaaggucugcuacaacgccgugcugacccacgugaagaucaacgacaagugccccuccaccggcgaggcgcaccucgccgaggagaacgagggggacaacgccugcaagcggaccuacagcgaccggggcugggggaacggcugcgggcuguucggcaagggcuccaucgucgccugcgccaaguucacgugcgcgaagagcaugucccuguucgagguggaccagaccaagauccaguacgucauccgcgcccagcuccacgugggggccaagcaggagaacuggaacaccgacaucaagacccugaaguucgacgcccugagcggcagccaggagguggaguucaucggguacggcaaggccacgcucgagugccagguccagaccgcgguggacuucgggaacuccuacaucgccgagauggagaccgagagcuggaucguggaccggcagugggcccaggaccugacccugcccuggcaguccggcagcggcggggucuggcgcgagaugcaccaccucguggaguucgagcccccgcacgccgccacgauccgggugcuggcgcugggcaaccaggaggggucccucaagaccgcccugaccggcgccaugcgcgucaccaaggacacgaacgacaacaaccuguacaagcuccacgggggccacgugagcugccgggugaagcuguccgcccugacccucaagggcaccagcuacaagaucugcaccgacaagauguucuucgucaagaaccccacggacaccgggcacggcaccguggugaugcaggucaagguguccaagggggcgcccugccgcaucccggugaucgucgccgacgaccugaccgccgccaucaacaagggcauccuggugaccgugaacccgaucgccagcacgaacgacgacgagguccucaucgaggugaacccccccuucggcgacuccuacaucaucguggggcggggcgacagccgccugaccuaccaguggcacaaggagggguccagcaucggcaagcuguucacccagaccaugaagggggucgagcggcuggcggugaugggcgacacggccugggacuucuccagcgccggcggguucuucaccuccgugggcaaggggauccacaccgucuucggcagcgccuuccaggggcucuucggcggccugaacuggaucaccaaggugaucaugggggccgugcugaucugggucggcaucaacacgcgcaacaugaccauguccaugagcaugauccucgugggggugaucaugauguuccugagccugggcgucggggcggaccagggcugcgccaucaacuucggcaagugaggacuaguaauaaggaaacuguaugaaugucugugggcaggaagugaagagauccuucuguaaagguuuuuggaauuaugucugcugaauaauaaacuuuuuugaaauaauaaaucugguagaaaaaugagaucuaaaaaaaaaaaaaaaaaaaaaaaaaaaaaaaaaaaaaaaaaaaaaaaaaaaaaaaaaaaaaaaaugcaucccccccccccccccccccccccccccccccaaaggcucuuuucagagccaccagaauu

SEQ ID NO: 657 - RNA, 2368 nt, Artificial Sequence
  mRNA product Design b-4 comprising derived and/or modified sequence from YFV__NC_002031.1__SSIgE-prME (polyprotein: aa122-778) (opt1)
gggagagucccgcagucggcguccagcggcucugcuuguucgugugugugucguugcaggccuuauucaagcuuaccauggacuggaccuggauccuguuccucguggccgccgcgacccgcguccacagcgugacccugguccgcaagaaccgguggcuccugcugaacgugaccagcgaggaccucggcaagacguucuccguggggaccggcaacugcaccaccaacauccuggaggccaaguacuggugccccgacagcauggaguacaacugcccgaaccuguccccgcgcgaggagcccgacgacaucgacugcuggugcuacggggucgagaacgugcggguggccuacggcaagugcgacagcgcggggcgcucccggcgcagccggcgcgccaucgaccuccccacgcacgagaaccacggccugaagacccggcaggagaaguggaugaccggccgcaugggggagcggcagcugcagaagaucgagcgcugguucguccggaaccccuucuucgccgugaccgcccucacgaucgccuaccuggugggcuccaacaugacccagcgcgucgugaucgcgcugcucgugcuggccgucgggcccgccuacagcgcccacugcaucggcaucaccgaccgggacuucaucgagggggugcacggcggcaccuggguguccgcgacgcuggagcaggacaagugcgucaccgugauggcccccgacaagcccagccucgacaucucccuggagaccguggccaucgaccgcccggccgagguccggaaggugugcuacaacgccgugcugacccacgucaagaucaacgacaagugccccagcacgggggaggcgcaccucgccgaggagaacgagggcgacaacgccugcaagcgcaccuacuccgaccggggguggggcaacggcugcgggcuguucggcaaggggagcaucguggccugcgccaaguucaccugcgcgaaguccaugagccuguucgagguggaccagaccaagauccaguacgucauccgcgcccagcuccacgugggcgccaagcaggagaacuggaacacggacaucaagacccugaaguucgacgcccuguccgggagccaggaggucgaguucaucggcuacggcaaggccacccucgagugccaggugcagaccgcgguggacuucgggaacuccuacaucgccgagauggagacggagagcuggaucgucgaccggcagugggcccaggaccugacccugcccuggcagagcggcuccgggggcguguggcgcgagaugcaccaccucguggaguucgagcccccgcacgccgccaccauccgcguccuggcgcuggggaaccaggagggcagccucaagaccgcccugacgggcgccaugcgggugaccaaggacaccaacgacaacaaccuguacaagcuccacgggggccacguguccugccgcgucaagcugagcgcccugacccucaaggggacguccuacaagaucugcaccgacaagauguucuucgugaagaaccccaccgacaccggccacgggacgguggucaugcaggugaaggugagcaagggcgcgcccugccggauccccgucaucguggccgacgaccugaccgccgccaucaacaagggcauccuggugaccgucaacccgaucgccuccaccaacgacgacgaggugcucaucgaggugaacccgcccuucggggacagcuacaucaucgucggccgcggggacucccggcugaccuaccaguggcacaaggagggcagcuccaucggcaagcuguucacgcagaccaugaaggggguggagcgccucgcggugaugggcgacaccgccugggacuucagcuccgccgggggcuucuucaccagcgucgggaagggcauccacacgguguucggcuccgccuuccaggggcuguucggcgggcugaacuggaucaccaaggugaucaugggcgccguccucaucuggguggggaucaacacccggaacaugaccaugagcauguccaugauccuggugggcgucaucaugauguuccugagccugggcgugggggcgugaggacuaguaauaaggaaacuguaugaaugucugugggcaggaagugaagagauccuucuguaaagguuuuuggaauuaugucugcugaauaauaaacuuuuuugaaauaauaaaucugguagaaaaaugagaucuaaaaaaaaaaaaaaaaaaaaaaaaaaaaaaaaaaaaaaaaaaaaaaaaaaaaaaaaaaaaaaaaugcaucccccccccccccccccccccccccccccccaaaggcucuuuucagagccaccagaauu

SEQ ID NO: 658 - RNA, 2416 nt, Artificial Sequence
  mRNA product Design b-4 comprising derived and/or modified sequence from YFV__NC_002031.1__SSjev-prME-XX (polyprotein: aa122-788) (opt1)
gggagagucccgcagucggcguccagcggcucugcuuguucgugugugugucguugcaggccuuauucaagcuuaccaugggcaagcgcagcgccggguccaucauguggcuggccagccucgcgguggucaucgccugcgccggcgccgugacgcuggugcggaagaaccgcuggcuccugcugaacgucaccuccgaggaccucggcaagaccuucagcguggggaccggcaacugcacgaccaacauccuggaggccaaguacuggugccccgacuccauggaguacaacugcccgaaccugagcccccgggaggagcccgacgacaucgacugcuggugcuacggcguggagaacguccgcguggccuacgggaagugcgacuccgcgggccggagccgccggucccgccgggccaucgaccuccccacccacgagaaccacgggcugaagacccgccaggagaaguggaugacgggccggaugggggagcgccagcugcagaagaucgagcggugguucgugcgcaacccguucuucgccgucaccgcccucaccaucgccuaccuggugggcagcaacaugacccagcggguggucaucgcgcugcucgugcuggccgugggccccgccuacuccgcccacugcaucgggaucacggaccgcgacuucaucgagggcguccacgggggcaccugggugagcgcgacccuggagcaggacaagugcgugaccgucauggcccccgacaagcccucccucgacaucagccuggagacgguggccaucgaccggccggccgaggugcgcaaggucugcuacaacgccgugcugacccacgugaagaucaacgacaagugccccuccaccggcgaggcgcaccucgccgaggagaacgagggggacaacgccugcaagcggaccuacagcgaccggggcugggggaacggcugcgggcuguucggcaagggcuccaucgucgccugcgccaaguucacgugcgcgaagagcaugucccuguucgagguggaccagaccaagauccaguacgucauccgcgcccagcuccacgugggggccaagcaggagaacuggaacaccgacaucaagacccugaaguucgacgcccugagcggcagccaggagguggaguucaucggguacggcaaggccacgcucgagugccagguccagaccgcgguggacuucgggaacuccuacaucgccgagauggagaccgagagcuggaucguggaccggcagugggcccaggaccugacccugcccuggcaguccggcagcggcggggucuggcgcgagaugcaccaccucguggaguucgagcccccgcacgccgccacgauccgggugcuggcgcugggcaaccaggaggggucccucaagaccgcccugaccggcgccaugcgcgucaccaaggacacgaacgacaacaaccuguacaagcuccacgggggccacgugagcugccgggugaagcuguccgcccugacccucaagggcaccagcuacaagaucugcaccgacaagauguucuucgucaagaaccccacggacaccgggcacggcaccguggugaugcaggucaagguguccaagggggcgcccugccgcaucccggugaucgucgccgacgaccugaccgccgccaucaacaagggcauccuggugaccgugaacccgaucgccagcacgaacgacgacgagguccucaucgaggugaacccccccuucggcgacuccuacaucaucguggggcggggcgacagccgccugaccuaccaguggcacaaggagggguccagcaucggcaagcuguucacccagaccaugaagggggucgagcggcuggcggugaugggcgacacggccugggacuucuccagcgccggcggguucuucaccuccgugggcaaggggauccacaccgucuucggcagcgccuuccaggggcucuucggcggccugaacuggaucaccaaggugaucaugggggccgugcugaucugggucggcaucaacacgcgcaacaugaccauguccaugagcaugauccucgugggggugaucaugauguuccugagccugggcgucggggcggaccagggcugcgccaucaacuucggcaagugaggacuaguaauaaggaaacuguaugaaugucugugggcaggaagugaagagauccuucuguaaagguuuuuggaauuaugucugcugaauaauaaacuuuuuugaaauaauaaaucugguagaaaaaugagaucuaaaaaaaaaaaaaaaaaaaaaaaaaaaaaaaaaaaaaaaaaaaaaaaaaaaaaaaaaaaaaaaaugcaucccccccccccccccccccccccccccccccaaaggcucuuuucagagccaccagaauu

SEQ ID NO: 659 - RNA, 2386 nt, Artificial Sequence
  mRNA product Design b-4 comprising derived and/or modified sequence from YFV__NC_002031.1__SSjev-prME (polyprotein: aa122-778) (opt1)
gggagagucccgcagucggcguccagcggcucugcuuguucgugugugugucguugcaggccuuauucaagcuuaccaugggcaagcgcagcgccggguccaucauguggcuggccagccucgcgguggucaucgccugcgccggcgccgugacccugguccgcaagaaccgguggcuccugcugaacgugaccagcgaggaccucggcaagacguucuccguggggaccggcaacugcaccaccaacauccuggaggccaaguacuggugccccgacagcauggaguacaacugcccgaaccuguccccgcgcgaggagcccgacgacaucgacugcuggugcuacggggucgagaacgugcggguggccuacggcaagugcgacagcgcggggcgcucccggcgcagccggcgcgccaucgaccuccccacgcacgagaaccacggccugaagacccggcaggagaaguggaugaccggccgcaugggggagcggcagcugcagaagaucgagcgcugguucguccggaaccccuucuucgccgugaccgcccucacgaucgccuaccuggugggcuccaacaugacccagcgcgucgugaucgcgcugcucgugcuggccgucgggcccgccuacagcgcccacugcaucggcaucaccgaccgggacuucaucgagggggugcacggcggcaccuggguguccgcgacgcuggagcaggacaagugcgucaccgugauggcccccgacaagcccagccucgacaucucccuggagaccguggccaucgaccgcccggccgagguccggaaggugugcuacaacgccgugcugacccacgucaagaucaacgacaagugccccagcacgggggaggcgcaccucgccgaggagaacgagggcgacaacgccugcaagcgcaccuacuccgaccggggguggggcaacggcugcgggcuguucggcaaggggagcaucguggccugcgccaaguucaccugcgcgaaguccaugagccuguucgagguggaccagaccaagauccaguacgucauccgcgcccagcuccacgugggcgccaagcaggagaacuggaacacggacaucaagacccugaaguucgacgcccuguccgggagccaggaggucgaguucaucggcuacggcaaggccacccucgagugccaggugcagaccgcgguggacuucgggaacuccuacaucgccgagauggagacggagagcuggaucgucgaccggcagugggcccaggaccugacccugcccuggcagagcggcuccgggggcguguggcgcgagaugcaccaccucguggaguucgagcccccgcacgccgccaccauccgcguccuggcgcuggggaaccaggagggcagccucaagaccgcccugacgggcgccaugcgggugaccaaggacaccaacgacaacaaccuguacaagcuccacgggggccacguguccugccgcgucaagcugagcgcccugacccucaaggggacguccuacaagaucugcaccgacaagauguucuucgugaagaaccccaccgacaccggccacgggacgguggucaugcaggugaaggugagcaagggcgcgcccugccggauccccgucaucguggccgacgaccugaccgccgccaucaacaagggcauccuggugaccgucaacccgaucgccuccaccaacgacgacgaggugcucaucgaggugaacccgcccuucggggacagcuacaucaucgucggccgcggggacucccggcugaccuaccaguggcacaaggagggcagcuccaucggcaagcuguucacgcagaccaugaaggggguggagcgccucgcggugaugggcgacaccgccugggacuucagcuccgccgggggcuucuucaccagcgucgggaagggcauccacacgguguucggcuccgccuuccaggggcuguucggcgggcugaacuggaucaccaaggugaucaugggcgccguccucaucuggguggggaucaacacccggaacaugaccaugagcauguccaugauccuggugggcgucaucaugauguuccugagccugggcgugggggcgugaggacuaguaauaaggaaacuguaugaaugucugugggcaggaagugaagagauccuucuguaaagguuuuuggaauuaugucugcugaauaauaaacuuuuuugaaauaauaaaucugguagaaaaaugagaucuaaaaaaaaaaaaaaaaaaaaaaaaaaaaaaaaaaaaaaaaaaaaaaaaaaaaaaaaaaaaaaaaugcaucccccccccccccccccccccccccccccccaaaggcucuuuucagagccaccagaauu

SEQ ID NO: 660 - RNA, 2434 nt, Artificial Sequence
  mRNA product Design b-4 comprising derived and/or modified sequence from YFV__NC_002031.1__X-SS-prME-XX (polyprotein: aa92-788) (opt1)
gggagagucccgcagucggcguccagcggcucugcuuguucgugugugugucguugcaggccuuauucaagcuuaccaugcggggccugagcucccgcaagcggcgcagccacgacgugcucaccguccaguuccugauccuggggaugcuccugaugaccggcggggugacgcuggugcggaagaaccgcuggcuccugcugaacgucaccuccgaggaccucggcaagaccuucagcguggggaccggcaacugcacgaccaacauccuggaggccaaguacuggugccccgacuccauggaguacaacugcccgaaccugagcccccgggaggagcccgacgacaucgacugcuggugcuacggcguggagaacguccgcguggccuacgggaagugcgacuccgcgggccggagccgccggucccgccgggccaucgaccuccccacccacgagaaccacgggcugaagacccgccaggagaaguggaugacgggccggaugggggagcgccagcugcagaagaucgagcggugguucgugcgcaacccguucuucgccgucaccgcccucaccaucgccuaccuggugggcagcaacaugacccagcggguggucaucgcgcugcucgugcuggccgugggccccgccuacuccgcccacugcaucgggaucacggaccgcgacuucaucgagggcguccacgggggcaccugggugagcgcgacccuggagcaggacaagugcgugaccgucauggcccccgacaagcccucccucgacaucagccuggagacgguggccaucgaccggccggccgaggugcgcaaggucugcuacaacgccgugcugacccacgugaagaucaacgacaagugccccuccaccggcgaggcgcaccucgccgaggagaacgagggggacaacgccugcaagcggaccuacagcgaccggggcugggggaacggcugcgggcuguucggcaagggcuccaucgucgccugcgccaaguucacgugcgcgaaguccaugagccuguucgagguggaccagaccaagauccaguacgucauccgcgcccagcuccacgugggggccaagcaggagaacuggaacaccgacaucaagacccugaaguucgacgcccugagcggcagccaggagguggaguucaucggguacggcaaggccacgcucgagugccagguccagaccgcgguggacuucgggaacuccuacaucgccgagauggagaccgagagcuggaucguggaccggcagugggcccaggaccugacccugcccuggcaguccggcagcggcggggucuggcgcgagaugcaccaccucguggaguucgagcccccgcacgccgccacgauccgggugcuggcgcugggcaaccaggaggggucccucaagaccgcccugaccggcgccaugcgcgucaccaaggacacgaacgacaacaaccuguacaagcuccacgggggccacgugagcugccgggugaagcuguccgcccugacccucaagggcaccagcuacaagaucugcaccgacaagauguucuucgucaagaaccccacggacaccgggcacggcaccguggugaugcaggucaagguguccaagggggcgcccugccgcaucccggugaucgucgccgacgaccugaccgccgccaucaacaagggcauccuggugaccgugaacccgaucgccagcacgaacgacgacgagguccucaucgaggugaacccccccuucggcgacuccuacaucaucguggggcggggcgacagccgccugaccuaccaguggcacaaggagggguccagcaucggcaagcuguucacccagaccaugaagggggucgagcggcuggcggugaugggcgacacggccugggacuucuccagcgccggcggguucuucaccuccgugggcaaggggauccacaccgucuucggcagcgccuuccaggggcuguucggcggccucaacuggaucaccaaggugaucaugggggccgugcugaucugggucggcaucaacacgcgcaacaugaccauguccaugagcaugauccucgugggggugaucaugauguuccugagccugggcgucggggcggaccagggcugcgccaucaacuucggcaagugaggacuaguaauaaggaaacuguaugaaugucugugggcaggaagugaagagauccuucuguaaagguuuuuggaauuaugucugcugaauaauaaacuuuuuugaaauaauaaaucugguagaaaaaugagaucuaaaaaaaaaaaaaaaaaaaaaaaaaaaaaaaaaaaaaaaaaaaaaaaaaaaaaaaaaaaaaaaaugcaucccccccccccccccccccccccccccccccaaaggcucuuuucagagccaccagaauu

SEQ ID NO: 661 - RNA, 2371 nt, Artificial Sequence
  mRNA product Design b-4 comprising derived and/or modified sequence from YFV__NC_002031.1__SS-prME (polyprotein: M,aa104-778) (opt1)
gggagagucccgcagucggcguccagcggcucugcuuguucgugugugugucguugcaggccuuauucaagcuuaccauggacgugcucaccguccaguuccugauccuggggaugcuccugaugaccggcggggugacgcuggugcggaagaaccgcuggcuccugcugaacgucaccuccgaggaccucggcaagaccuucagcguggggaccggcaacugcacgaccaacauccuggaggccaaguacuggugccccgacuccauggaguacaacugcccgaaccugagcccccgggaggagcccgacgacaucgacugcuggugcuacggcguggagaacguccgcguggccuacgggaagugcgacuccgcgggccggagccgccggucccgccgggccaucgaccuccccacccacgagaaccacgggcugaagacccgccaggagaaguggaugacgggccggaugggggagcgccagcugcagaagaucgagcggugguucgugcgcaacccguucuucgccgucaccgcccucaccaucgccuaccuggugggcagcaacaugacccagcggguggucaucgcgcugcucgugcuggccgugggccccgccuacuccgcccacugcaucgggaucacggaccgcgacuucaucgagggcguccacgggggcaccugggugagcgcgacccuggagcaggacaagugcgugaccgucauggcccccgacaagcccucccucgacaucagccuggagacgguggccaucgaccggccggccgaggugcgcaaggucugcuacaacgccgugcugacccacgugaagaucaacgacaagugccccuccaccggcgaggcgcaccucgccgaggagaacgagggggacaacgccugcaagcggaccuacagcgaccggggcugggggaacggcugcgggcuguucggcaagggcuccaucgucgccugcgccaaguucacgugcgcgaaguccaugagccuguucgagguggaccagaccaagauccaguacgucauccgcgcccagcuccacgugggggccaagcaggagaacuggaacaccgacaucaagacccugaaguucgacgcccugagcggcagccaggagguggaguucaucggguacggcaaggccacgcucgagugccagguccagaccgcgguggacuucgggaacuccuacaucgccgagauggagaccgagagcuggaucguggaccggcagugggcccaggaccugacccugcccuggcaguccggcagcggcggggucuggcgcgagaugcaccaccucguggaguucgagcccccgcacgccgccacgauccgggugcuggcgcugggcaaccaggaggggucccucaagaccgcccugaccggcgccaugcgcgucaccaaggacacgaacgacaacaaccuguacaagcuccacgggggccacgugagcugccgggugaagcuguccgcccugacccucaagggcaccagcuacaagaucugcaccgacaagauguucuucgucaagaaccccacggacaccgggcacggcaccguggugaugcaggucaagguguccaagggggcgcccugccgcaucccggugaucgucgccgacgaccugaccgccgccaucaacaagggcauccuggugaccgugaacccgaucgccagcacgaacgacgacgagguccucaucgaggugaacccccccuucggcgacuccuacaucaucguggggcggggcgacagccgccugaccuaccaguggcacaaggagggguccagcaucggcaagcuguucacccagaccaugaagggggucgagcggcuggcggugaugggcgacacggccugggacuucuccagcgccggcggguucuucaccuccgugggcaaggggauccacaccgucuucggcagcgccuuccaggggcuguucggcggccucaacuggaucaccaaggugaucaugggggccgugcugaucugggucggcaucaacacgcgcaacaugaccauguccaugagcaugauccucgugggggugaucaugauguuccugagccugggcgucggggcgugaggacuaguaauaaggaaacuguaugaaugucugugggcaggaagugaagagauccuucuguaaagguuuuuggaauuaugucugcugaauaauaaacuuuuuugaaauaauaaaucugguagaaaaaugagaucuaaaaaaaaaaaaaaaaaaaaaaaaaaaaaaaaaaaaaaaaaaaaaaaaaaaaaaaaaaaaaaaaugcaucccccccccccccccccccccccccccccccaaaggcucuuuucagagccaccagaauu

SEQ ID NO: 662 - RNA, 2398 nt, Artificial Sequence
  mRNA product Design b-4 comprising derived and/or modified sequence from YFV__NC_002031.1__SSIgE-prME-XX (polyprotein: aa122-788) (opt1)
gggagagucccgcagucggcguccagcggcucugcuuguucgugugugugucguugcaggccuuauucaagcuuaccauggacuggaccuggauccuguuccucguggccgccgcgacccgcguccacagcgugacgcuggugcggaagaaccgcuggcuccugcugaacgucaccuccgaggaccucggcaagaccuucagcguggggaccggcaacugcacgaccaacauccuggaggccaaguacuggugccccgacuccauggaguacaacugcccgaaccugagcccccgggaggagcccgacgacaucgacugcuggugcuacggcguggagaacguccgcguggccuacgggaagugcgacuccgcgggccggagccgccggucccgccgggccaucgaccuccccacccacgagaaccacgggcugaagacccgccaggagaaguggaugacgggccggaugggggagcgccagcugcagaagaucgagcggugguucgugcgcaacccguucuucgccgucaccgcccucaccaucgccuaccuggugggcagcaacaugacccagcggguggucaucgcgcugcucgugcuggccgugggccccgccuacuccgcccacugcaucgggaucacggaccgcgacuucaucgagggcguccacgggggcaccugggugagcgcgacccuggagcaggacaagugcgugaccgucauggcccccgacaagcccucccucgacaucagccuggagacgguggccaucgaccggccggccgaggugcgcaaggucugcuacaacgccgugcugacccacgugaagaucaacgacaagugccccuccaccggcgaggcgcaccucgccgaggagaacgagggggacaacgccugcaagcggaccuacagcgaccggggcugggggaacggcugcgggcuguucggcaagggcuccaucgucgccugcgccaaguucacgugcgcgaaguccaugagccuguucgagguggaccagaccaagauccaguacgucauccgcgcccagcuccacgugggggccaagcaggagaacuggaacaccgacaucaagacccugaaguucgacgcccugagcggcagccaggagguggaguucaucggguacggcaaggccacgcucgagugccagguccagaccgcgguggacuucgggaacuccuacaucgccgagauggagaccgagagcuggaucguggaccggcagugggcccaggaccugacccugcccuggcaguccggcagcggcggggucuggcgcgagaugcaccaccucguggaguucgagcccccgcacgccgccacgauccgggugcuggcgcugggcaaccaggaggggucccucaagaccgcccugaccggcgccaugcgcgucaccaaggacacgaacgacaacaaccuguacaagcuccacgggggccacgugagcugccgggugaagcuguccgcccugacccucaagggcaccagcuacaagaucugcaccgacaagauguucuucgucaagaaccccacggacaccgggcacggcaccguggugaugcaggucaagguguccaagggggcgcccugccgcaucccggugaucgucgccgacgaccugaccgccgccaucaacaagggcauccuggugaccgugaacccgaucgccagcacgaacgacgacgagguccucaucgaggugaacccccccuucggcgacuccuacaucaucguggggcggggcgacagccgccugaccuaccaguggcacaaggagggguccagcaucggcaagcuguucacccagaccaugaagggggucgagcggcuggcggugaugggcgacacggccugggacuucuccagcgccggcggguucuucaccuccgugggcaaggggauccacaccgucuucggcagcgccuuccaggggcuguucggcggccucaacuggaucaccaaggugaucaugggggccgugcugaucugggucggcaucaacacgcgcaacaugaccauguccaugagcaugauccucgugggggugaucaugauguuccugagccugggcgucggggcggaccagggcugcgccaucaacuucggcaagugaggacuaguaauaaggaaacuguaugaaugucugugggcaggaagugaagagauccuucuguaaagguuuuuggaauuaugucugcugaauaauaaacuuuuuugaaauaauaaaucugguagaaaaaugagaucuaaaaaaaaaaaaaaaaaaaaaaaaaaaaaaaaaaaaaaaaaaaaaaaaaaaaaaaaaaaaaaaaugcaucccccccccccccccccccccccccccccccaaaggcucuuuucagagccaccagaauu

SEQ ID NO: 663 - RNA, 2368 nt, Artificial Sequence
  mRNA product Design b-4 comprising derived and/or modified sequence from YFV__NC_002031.1__SSIgE-prME (polyprotein: aa122-778) (opt1)
gggagagucccgcagucggcguccagcggcucugcuuguucgugugugugucguugcaggccuuauucaagcuuaccauggacuggaccuggauccuguuccucguggccgccgcgacccgcguccacagcgugacgcuggugcggaagaaccgcuggcuccugcugaacgucaccuccgaggaccucggcaagaccuucagcguggggaccggcaacugcacgaccaacauccuggaggccaaguacuggugccccgacuccauggaguacaacugcccgaaccugagcccccgggaggagcccgacgacaucgacugcuggugcuacggcguggagaacguccgcguggccuacgggaagugcgacuccgcgggccggagccgccggucccgccgggccaucgaccuccccacccacgagaaccacgggcugaagacccgccaggagaaguggaugacgggccggaugggggagcgccagcugcagaagaucgagcggugguucgugcgcaacccguucuucgccgucaccgcccucaccaucgccuaccuggugggcagcaacaugacccagcggguggucaucgcgcugcucgugcuggccgugggccccgccuacuccgcccacugcaucgggaucacggaccgcgacuucaucgagggcguccacgggggcaccugggugagcgcgacccuggagcaggacaagugcgugaccgucauggcccccgacaagcccucccucgacaucagccuggagacgguggccaucgaccggccggccgaggugcgcaaggucugcuacaacgccgugcugacccacgugaagaucaacgacaagugccccuccaccggcgaggcgcaccucgccgaggagaacgagggggacaacgccugcaagcggaccuacagcgaccggggcugggggaacggcugcgggcuguucggcaagggcuccaucgucgccugcgccaaguucacgugcgcgaaguccaugagccuguucgagguggaccagaccaagauccaguacgucauccgcgcccagcuccacgugggggccaagcaggagaacuggaacaccgacaucaagacccugaaguucgacgcccugagcggcagccaggagguggaguucaucggguacggcaaggccacgcucgagugccagguccagaccgcgguggacuucgggaacuccuacaucgccgagauggagaccgagagcuggaucguggaccggcagugggcccaggaccugacccugcccuggcaguccggcagcggcggggucuggcgcgagaugcaccaccucguggaguucgagcccccgcacgccgccacgauccgggugcuggcgcugggcaaccaggaggggucccucaagaccgcccugaccggcgccaugcgcgucaccaaggacacgaacgacaacaaccuguacaagcuccacgggggccacgugagcugccgggugaagcuguccgcccugacccucaagggcaccagcuacaagaucugcaccgacaagauguucuucgucaagaaccccacggacaccgggcacggcaccguggugaugcaggucaagguguccaagggggcgcccugccgcaucccggugaucgucgccgacgaccugaccgccgccaucaacaagggcauccuggugaccgugaacccgaucgccagcacgaacgacgacgagguccucaucgaggugaacccccccuucggcgacuccuacaucaucguggggcggggcgacagccgccugaccuaccaguggcacaaggagggguccagcaucggcaagcuguucacccagaccaugaagggggucgagcggcuggcggugaugggcgacacggccugggacuucuccagcgccggcggguucuucaccuccgugggcaaggggauccacaccgucuucggcagcgccuuccaggggcuguucggcggccucaacuggaucaccaaggugaucaugggggccgugcugaucugggucggcaucaacacgcgcaacaugaccauguccaugagcaugauccucgugggggugaucaugauguuccugagccugggcgucggggcgugaggacuaguaauaaggaaacuguaugaaugucugugggcaggaagugaagagauccuucuguaaagguuuuuggaauuaugucugcugaauaauaaacuuuuuugaaauaauaaaucugguagaaaaaugagaucuaaaaaaaaaaaaaaaaaaaaaaaaaaaaaaaaaaaaaaaaaaaaaaaaaaaaaaaaaaaaaaaaugcaucccccccccccccccccccccccccccccccaaaggcucuuuucagagccaccagaauu

SEQ ID NO: 664 - RNA, 2416 nt, Artificial Sequence
  mRNA product Design b-4 comprising derived and/or modified sequence from YFV__NC_002031.1__SSjev-prME-XX (polyprotein: aa122-788) (opt1)
gggagagucccgcagucggcguccagcggcucugcuuguucgugugugugucguugcaggccuuauucaagcuuaccaugggcaagcgcagcgccggguccaucauguggcuggccagccucgcgguggucaucgccugcgccggcgccgugacgcuggugcggaagaaccgcuggcuccugcugaacgucaccuccgaggaccucggcaagaccuucagcguggggaccggcaacugcacgaccaacauccuggaggccaaguacuggugccccgacuccauggaguacaacugcccgaaccugagcccccgggaggagcccgacgacaucgacugcuggugcuacggcguggagaacguccgcguggccuacgggaagugcgacuccgcgggccggagccgccggucccgccgggccaucgaccuccccacccacgagaaccacgggcugaagacccgccaggagaaguggaugacgggccggaugggggagcgccagcugcagaagaucgagcggugguucgugcgcaacccguucuucgccgucaccgcccucaccaucgccuaccuggugggcagcaacaugacccagcggguggucaucgcgcugcucgugcuggccgugggccccgccuacuccgcccacugcaucgggaucacggaccgcgacuucaucgagggcguccacgggggcaccugggugagcgcgacccuggagcaggacaagugcgugaccgucauggcccccgacaagcccucccucgacaucagccuggagacgguggccaucgaccggccggccgaggugcgcaaggucugcuacaacgccgugcugacccacgugaagaucaacgacaagugccccuccaccggcgaggcgcaccucgccgaggagaacgagggggacaacgccugcaagcggaccuacagcgaccggggcugggggaacggcugcgggcuguucggcaagggcuccaucgucgccugcgccaaguucacgugcgcgaaguccaugagccuguucgagguggaccagaccaagauccaguacgucauccgcgcccagcuccacgugggggccaagcaggagaacuggaacaccgacaucaagacccugaaguucgacgcccugagcggcagccaggagguggaguucaucggguacggcaaggccacgcucgagugccagguccagaccgcgguggacuucgggaacuccuacaucgccgagauggagaccgagagcuggaucguggaccggcagugggcccaggaccugacccugcccuggcaguccggcagcggcggggucuggcgcgagaugcaccaccucguggaguucgagcccccgcacgccgccacgauccgggugcuggcgcugggcaaccaggaggggucccucaagaccgcccugaccggcgccaugcgcgucaccaaggacacgaacgacaacaaccuguacaagcuccacgggggccacgugagcugccgggugaagcuguccgcccugacccucaagggcaccagcuacaagaucugcaccgacaagauguucuucgucaagaaccccacggacaccgggcacggcaccguggugaugcaggucaagguguccaagggggcgcccugccgcaucccggugaucgucgccgacgaccugaccgccgccaucaacaagggcauccuggugaccgugaacccgaucgccagcacgaacgacgacgagguccucaucgaggugaacccccccuucggcgacuccuacaucaucguggggcggggcgacagccgccugaccuaccaguggcacaaggagggguccagcaucggcaagcuguucacccagaccaugaagggggucgagcggcuggcggugaugggcgacacggccugggacuucuccagcgccggcggguucuucaccuccgugggcaaggggauccacaccgucuucggcagcgccuuccaggggcuguucggcggccucaacuggaucaccaaggugaucaugggggccgugcugaucugggucggcaucaacacgcgcaacaugaccauguccaugagcaugauccucgugggggugaucaugauguuccugagccugggcgucggggcggaccagggcugcgccaucaacuucggcaagugaggacuaguaauaaggaaacuguaugaaugucugugggcaggaagugaagagauccuucuguaaagguuuuuggaauuaugucugcugaauaauaaacuuuuuugaaauaauaaaucugguagaaaaaugagaucuaaaaaaaaaaaaaaaaaaaaaaaaaaaaaaaaaaaaaaaaaaaaaaaaaaaaaaaaaaaaaaaaugcaucccccccccccccccccccccccccccccccaaaggcucuuuucagagccaccagaauu

SEQ ID NO: 665 - RNA, 2386 nt, Artificial Sequence
  mRNA product Design b-4 comprising derived and/or modified sequence from YFV__NC_002031.1__SSjev-prME (polyprotein: aa122-778) (opt1)
gggagagucccgcagucggcguccagcggcucugcuuguucgugugugugucguugcaggccuuauucaagcuuaccaugggcaagcgcagcgccggguccaucauguggcuggccagccucgcgguggucaucgccugcgccggcgccgugacgcuggugcggaagaaccgcuggcuccugcugaacgucaccuccgaggaccucggcaagaccuucagcguggggaccggcaacugcacgaccaacauccuggaggccaaguacuggugccccgacuccauggaguacaacugcccgaaccugagcccccgggaggagcccgacgacaucgacugcuggugcuacggcguggagaacguccgcguggccuacgggaagugcgacuccgcgggccggagccgccggucccgccgggccaucgaccuccccacccacgagaaccacgggcugaagacccgccaggagaaguggaugacgggccggaugggggagcgccagcugcagaagaucgagcggugguucgugcgcaacccguucuucgccgucaccgcccucaccaucgccuaccuggugggcagcaacaugacccagcggguggucaucgcgcugcucgugcuggccgugggccccgccuacuccgcccacugcaucgggaucacggaccgcgacuucaucgagggcguccacgggggcaccugggugagcgcgacccuggagcaggacaagugcgugaccgucauggcccccgacaagcccucccucgacaucagccuggagacgguggccaucgaccggccggccgaggugcgcaaggucugcuacaacgccgugcugacccacgugaagaucaacgacaagugccccuccaccggcgaggcgcaccucgccgaggagaacgagggggacaacgccugcaagcggaccuacagcgaccggggcugggggaacggcugcgggcuguucggcaagggcuccaucgucgccugcgccaaguucacgugcgcgaaguccaugagccuguucgagguggaccagaccaagauccaguacgucauccgcgcccagcuccacgugggggccaagcaggagaacuggaacaccgacaucaagacccugaaguucgacgcccugagcggcagccaggagguggaguucaucggguacggcaaggccacgcucgagugccagguccagaccgcgguggacuucgggaacuccuacaucgccgagauggagaccgagagcuggaucguggaccggcagugggcccaggaccugacccugcccuggcaguccggcagcggcggggucuggcgcgagaugcaccaccucguggaguucgagcccccgcacgccgccacgauccgggugcuggcgcugggcaaccaggaggggucccucaagaccgcccugaccggcgccaugcgcgucaccaaggacacgaacgacaacaaccuguacaagcuccacgggggccacgugagcugccgggugaagcuguccgcccugacccucaagggcaccagcuacaagaucugcaccgacaagauguucuucgucaagaaccccacggacaccgggcacggcaccguggugaugcaggucaagguguccaagggggcgcccugccgcaucccggugaucgucgccgacgaccugaccgccgccaucaacaagggcauccuggugaccgugaacccgaucgccagcacgaacgacgacgagguccucaucgaggugaacccccccuucggcgacuccuacaucaucguggggcggggcgacagccgccugaccuaccaguggcacaaggagggguccagcaucggcaagcuguucacccagaccaugaagggggucgagcggcuggcggugaugggcgacacggccugggacuucuccagcgccggcggguucuucaccuccgugggcaaggggauccacaccgucuucggcagcgccuuccaggggcuguucggcggccucaacuggaucaccaaggugaucaugggggccgugcugaucugggucggcaucaacacgcgcaacaugaccauguccaugagcaugauccucgugggggugaucaugauguuccugagccugggcgucggggcgugaggacuaguaauaaggaaacuguaugaaugucugugggcaggaagugaagagauccuucuguaaagguuuuuggaauuaugucugcugaauaauaaacuuuuuugaaauaauaaaucugguagaaaaaugagaucuaaaaaaaaaaaaaaaaaaaaaaaaaaaaaaaaaaaaaaaaaaaaaaaaaaaaaaaaaaaaaaaaugcaucccccccccccccccccccccccccccccccaaaggcucuuuucagagccaccagaauu

SEQ ID NO: 666 - RNA, 2434 nt, Artificial Sequence
  mRNA product Design b-4 comprising derived and/or modified sequence from YFV__NC_002031.1__X-SS-prME-XX (polyprotein: aa92-788) (opt1)
gggagagucccgcagucggcguccagcggcucugcuuguucgugugugugucguugcaggccuuauucaagcuuaccaugcgcggccugagcucccggaagcgccggagccacgacgugcucaccguccaguuccugauccuggggaugcuccugaugaccggcggggugacgcuggugcgcaagaaccgguggcuccugcugaacgucaccuccgaggaccucggcaagaccuucagcguggggaccggcaacugcacgaccaacauccuggaggccaaguacuggugccccgacuccauggaguacaacugccccaaccugagcccccgcgaggagcccgacgacaucgacugcuggugcuacggcguggagaacguccggguggccuacgggaagugcgacuccgcgggccgcagccggcgcucccggcgcgccaucgaccuccccacccacgagaaccacgggcugaagacccggcaggagaaguggaugacgggccgcaugggggagcggcagcugcagaagaucgagcgcugguucgugcggaacccguucuucgccgucaccgcccucaccaucgccuaccuggugggcagcaacaugacccagcgcguggucaucgcgcugcucgugcuggccgugggccccgccuacuccgcccacugcaucgggaucacggaccgggacuucaucgagggcguccacgggggcaccugggugagcgcgacccuggagcaggacaagugcgugaccgucauggcccccgacaagcccucccucgacaucagccuggagacgguggccaucgaccgcccggccgaggugcggaaggucugcuacaacgccgugcugacccacgugaagaucaacgacaagugccccuccaccggcgaggcgcaccucgccgaggagaacgagggggacaacgccugcaagcgcaccuacagcgaccgcggcugggggaacggcugcgggcuguucggcaagggcuccaucgucgccugcgccaaguucacgugcgccaagagcaugucccuguucgagguggaccagaccaagauccaguacgucauccgggcgcagcuccacgugggggccaagcaggagaacuggaacaccgacaucaagacccugaaguucgacgcccugagcggcagccaggagguggaguucaucggguacggcaaggccacgcucgagugccagguccagaccgcgguggacuucgggaacuccuacaucgccgagauggagaccgagagcuggaucguggaccgccagugggcccaggaccugacccugcccuggcaguccggcagcggcggggucuggcgggagaugcaccaccucguggaguucgagcccccgcacgccgccacgauccgcgugcuggcgcugggcaaccaggaggggucccucaagaccgcccugaccggcgccaugcgggucaccaaggacacgaacgacaacaaccuguacaagcuccacgggggccacgugagcugccgcgugaagcuguccgcccugacccucaagggcaccagcuacaagaucugcaccgacaagauguucuucgucaagaaccccacggacaccgggcacggcaccguggugaugcaggucaagguguccaagggggcgcccugccggauccccgugaucgucgccgacgaccugaccgccgccaucaacaagggcauccuggugaccgugaacccgaucgccagcacgaacgacgacgagguccucaucgaggugaacccgcccuucggcgacuccuacaucaucguggggcgcggcgacagccggcugaccuaccaguggcacaaggagggguccagcaucggcaagcuguucacccagaccaugaagggggucgagcgccucgcggugaugggcgacacggccugggacuucuccagcgccggcggguucuucaccuccgugggcaaggggauccacaccgucuucggcagcgccuuccaggggcuguucggcggccugaacuggaucaccaaggugaucaugggggccgugcugaucugggucggcaucaacacgcggaacaugaccauguccaugagcaugauccucgugggggugaucaugauguuccugagccugggcgucggggcggaccagggcugcgccaucaacuucggcaagugaggacuaguaauaaggaaacuguaugaaugucugugggcaggaagugaagagauccuucuguaaagguuuuuggaauuaugucugcugaauaauaaacuuuuuugaaauaauaaaucugguagaaaaaugagaucuaaaaaaaaaaaaaaaaaaaaaaaaaaaaaaaaaaaaaaaaaaaaaaaaaaaaaaaaaaaaaaaaugcaucccccccccccccccccccccccccccccccaaaggcucuuuucagagccaccagaauu

SEQ ID NO: 667 - RNA, 2371 nt, Artificial Sequence
  mRNA product Design b-4 comprising derived and/or modified sequence from YFV__NC_002031.1__SS-prME (polyprotein: M,aa104-778) (opt1)
gggagagucccgcagucggcguccagcggcucugcuuguucgugugugugucguugcaggccuuauucaagcuuaccauggacgugcugaccguccaguuccucauccugggcaugcugcucaugaccgggggcgugacgcuggugcgcaagaaccgguggcugcuccugaacgucaccagcgaggaccuggggaagaccuucuccgugggcaccgggaacugcacgaccaacauccucgaggccaaguacuggugccccgacagcauggaguacaacugccccaaccugagcccccgcgaggagcccgacgacaucgacugcuggugcuacggcguggagaacguccggguggccuacggcaagugcgacuccgcggggcgcucccggcgcagccggcgcgccaucgaccugcccacccacgagaaccacggccucaagacccggcaggagaaguggaugacggggcgcaugggcgagcggcagcugcagaagaucgagcgcugguucgugcggaacccguucuucgccgucaccgcccugaccaucgccuaccucgugggguccaacaugacccagcgcguggucaucgcgcugcuggugcucgccgugggccccgccuacagcgcccacugcaucggcaucacggaccgggacuucaucgaggggguccacggcgggaccuggguguccgcgacccuggagcaggacaagugcgugaccgucauggcccccgacaagcccagccuggacaucucccucgagacgguggccaucgaccgcccggccgaggugcggaaggucugcuacaacgccgugcugacccacgugaagaucaacgacaagugccccagcaccggcgaggcgcaccuggccgaggagaacgagggcgacaacgccugcaagcgcaccuacuccgaccggggguggggcaacgggugcggccucuucgggaagggcagcaucgucgccugcgccaaguucacgugcgcgaaguccaugagccuguucgagguggaccagaccaagauccaguacgucauccgcgcccagcugcacgugggcgccaagcaggagaacuggaacaccgacaucaagacccucaaguucgacgcccuguccgggagccaggagguggaguucaucggcuacgggaaggccacgcuggagugccagguccagaccgcgguggacuucggcaacuccuacaucgccgagauggagaccgagagcuggaucguggaccggcagugggcccaggaccucacccugcccuggcagagcggguccggcggcgucuggcgcgagaugcaccaccugguggaguucgagcccccgcacgccgccacgauccgcgugcucgcgcuggggaaccaggagggcagccugaagaccgcccucaccggggccaugcgggucaccaaggacacgaacgacaacaaccuguacaagcugcacggcgggcacguguccugccgcgugaagcucagcgcccugacccugaagggcaccuccuacaagaucugcaccgacaagauguucuucgucaagaaccccacggacaccggccacgggaccguggugaugcaggucaaggugagcaagggcgcgcccugccggauccccgugaucgucgccgacgaccucaccgccgccaucaacaaggggauccuggugaccgugaacccgaucgccuccacgaacgacgacgagguccugaucgaggugaacccgcccuucggcgacagcuacaucaucgugggccgcggggacucccggcucaccuaccaguggcacaaggagggcagcuccaucgggaagcuguucacccagaccaugaagggcgucgagcgccuggcggugaugggggacacggccugggacuucagcuccgccggcggcuucuucaccagcguggggaagggcauccacaccgucuucggguccgccuuccagggccucuucgggggccugaacuggaucaccaaggugaucaugggcgccgugcugaucugggucgggaucaacacgcggaacaugaccaugagcauguccaugauccuggugggcgugaucaugauguuccucagccugggggucggcgcgugaggacuaguaauaaggaaacuguaugaaugucugugggcaggaagugaagagauccuucuguaaagguuuuuggaauuaugucugcugaauaauaaacuuuuuugaaauaauaaaucugguagaaaaaugagaucuaaaaaaaaaaaaaaaaaaaaaaaaaaaaaaaaaaaaaaaaaaaaaaaaaaaaaaaaaaaaaaaaugcaucccccccccccccccccccccccccccccccaaaggcucuuuucagagccaccagaauu

SEQ ID NO: 668 - RNA, 2398 nt, Artificial Sequence
  mRNA product Design b-4 comprising derived and/or modified sequence from YFV__NC_002031.1__SSIgE-prME-XX (polyprotein: aa122-788) (opt1)
gggagagucccgcagucggcguccagcggcucugcuuguucgugugugugucguugcaggccuuauucaagcuuaccauggacuggaccuggauccuguuccucguggccgccgcgacccgcguccacagcgugacgcuggugcggaagaaccgcuggcugcuccugaacgucaccuccgaggaccugggcaagaccuucagcguggggaccggcaacugcacgaccaacauccucgaggccaaguacuggugccccgacuccauggaguacaacugccccaaccugagcccccgggaggagcccgacgacaucgacugcuggugcuacgggguggagaacguccgcguggccuacggcaagugcgacuccgccgggcggagccgccggucccgccgggccaucgaccugcccacccacgagaaccacggccucaagacccgccaggagaaguggaugacgggccggaugggggagcgccagcugcagaagaucgagcggugguucgugcgcaacccguucuucgcggucaccgcccugaccaucgccuaccucgugggcagcaacaugacccagcggguggucaucgcccugcuggugcucgcgguggggcccgccuacuccgcccacugcaucggcaucacggaccgcgacuucaucgaggggguccacggcggcaccugggugagcgccacccuggagcaggacaagugcgugaccgucauggcccccgacaagcccucccuggacaucagccucgagacgguggcgaucgaccggccggccgaggugcgcaaggucugcuacaacgccgugcugacccacgugaagaucaacgacaagugccccuccaccggggaggcccaccuggccgaggagaacgagggcgacaacgcgugcaagcggaccuacagcgaccgcggguggggcaacggcugcggccucuucgggaagggguccaucgucgccugcgccaaguucacgugcgccaagagcaugucccuguucgagguggaccagaccaagauccaguacgucauccgggcccagcugcacgugggcgcgaagcaggagaacuggaacaccgacaucaagacccucaaguucgacgcccugagcgggucccaggagguggaguucaucggcuacggcaaggccacgcuggagugccagguccagaccgccguggacuucgggaacagcuacaucgccgagauggagaccgagagcuggaucguggaccgccagugggcgcaggaccucacccugcccuggcaguccggcagcgggggcgucuggcgcgagaugcaccaccugguggaguucgagcccccgcacgccgccacgauccgggugcucgcccuggggaaccaggagggcucccugaagaccgcgcucaccggcgccaugcgcgucaccaaggacacgaacgacaacaaccuguacaagcugcacgggggccacgugagcugccgggugaagcucuccgcccugacccugaaggggaccagcuacaagaucugcaccgacaagauguucuucgucaagaaccccacggacaccggccacgggaccguggugaugcaggucaagguguccaagggcgcccccugccgcauccccgugaucgucgccgacgaccucaccgcggccaucaacaagggcauccuggugaccgugaacccgaucgccagcacgaacgacgacgagguccugaucgaggugaacccgcccuucggggacuccuacaucaucgugggccgcggggacagccggcucaccuaccaguggcacaaggagggcuccagcaucggcaagcuguucacccagaccaugaagggggucgagcggcuggccgugaugggcgacacggccugggacuucuccagcgccgggggcuucuucaccuccguggggaagggcauccacaccgucuucggcagcgcguuccaggggcuguucggcgggcucaacuggaucaccaaggugaucaugggcgccgugcugaucugggucgggaucaacacgcgcaacaugaccauguccaugagcaugauccucgugggcgugaucaugauguuccugucccugggcgucggggccgaccagggcugcgccaucaacuucgggaagugaggacuaguaauaaggaaacuguaugaaugucugugggcaggaagugaagagauccuucuguaaagguuuuuggaauuaugucugcugaauaauaaacuuuuuugaaauaauaaaucugguagaaaaaugagaucuaaaaaaaaaaaaaaaaaaaaaaaaaaaaaaaaaaaaaaaaaaaaaaaaaaaaaaaaaaaaaaaaugcaucccccccccccccccccccccccccccccccaaaggcucuuuucagagccaccagaauu

SEQ ID NO: 669 - RNA, 2368 nt, Artificial Sequence
  mRNA product Design b-4 comprising derived and/or modified sequence from YFV__NC_002031.1__SSIgE-prME (polyprotein: aa122-778) (opt1)
gggagagucccgcagucggcguccagcggcucugcuuguucgugugugugucguugcaggccuuauucaagcuuaccauggacuggaccuggauccuguuccucguggccgccgcgacccgcguccacagcgugacgcuggugcggaagaaccgcuggcugcuccugaacgucaccuccgaggaccugggcaagaccuucagcguggggaccggcaacugcacgaccaacauccucgaggccaaguacuggugccccgacuccauggaguacaacugccccaaccugagcccccgggaggagcccgacgacaucgacugcuggugcuacgggguggagaacguccgcguggccuacggcaagugcgacuccgccgggcggagccgccggucccgccgggccaucgaccugcccacccacgagaaccacggccucaagacccgccaggagaaguggaugacgggccggaugggggagcgccagcugcagaagaucgagcggugguucgugcgcaacccguucuucgcggucaccgcccugaccaucgccuaccucgugggcagcaacaugacccagcggguggucaucgcccugcuggugcucgcgguggggcccgccuacuccgcccacugcaucggcaucacggaccgcgacuucaucgaggggguccacggcggcaccugggugagcgccacccuggagcaggacaagugcgugaccgucauggcccccgacaagcccucccuggacaucagccucgagacgguggcgaucgaccggccggccgaggugcgcaaggucugcuacaacgccgugcugacccacgugaagaucaacgacaagugccccuccaccggggaggcccaccuggccgaggagaacgagggcgacaacgcgugcaagcggaccuacagcgaccgcggguggggcaacggcugcggccucuucgggaagggguccaucgucgccugcgccaaguucacgugcgccaagagcaugucccuguucgagguggaccagaccaagauccaguacgucauccgggcccagcugcacgugggcgcgaagcaggagaacuggaacaccgacaucaagacccucaaguucgacgcccugagcgggucccaggagguggaguucaucggcuacggcaaggccacgcuggagugccagguccagaccgccguggacuucgggaacagcuacaucgccgagauggagaccgagagcuggaucguggaccgccagugggcgcaggaccucacccugcccuggcaguccggcagcgggggcgucuggcgcgagaugcaccaccugguggaguucgagcccccgcacgccgccacgauccgggugcucgcccuggggaaccaggagggcucccugaagaccgcgcucaccggcgccaugcgcgucaccaaggacacgaacgacaacaaccuguacaagcugcacgggggccacgugagcugccgggugaagcucuccgcccugacccugaaggggaccagcuacaagaucugcaccgacaagauguucuucgucaagaaccccacggacaccggccacgggaccguggugaugcaggucaagguguccaagggcgcccccugccgcauccccgugaucgucgccgacgaccucaccgcggccaucaacaagggcauccuggugaccgugaacccgaucgccagcacgaacgacgacgagguccugaucgaggugaacccgcccuucggggacuccuacaucaucgugggccgcggggacagccggcucaccuaccaguggcacaaggagggcuccagcaucggcaagcuguucacccagaccaugaagggggucgagcggcuggccgugaugggcgacacggccugggacuucuccagcgccgggggcuucuucaccuccguggggaagggcauccacaccgucuucggcagcgcguuccaggggcuguucggcgggcucaacuggaucaccaaggugaucaugggcgccgugcugaucugggucgggaucaacacgcgcaacaugaccauguccaugagcaugauccucgugggcgugaucaugauguuccugucccugggcgucggggccugaggacuaguaauaaggaaacuguaugaaugucugugggcaggaagugaagagauccuucuguaaagguuuuuggaauuaugucugcugaauaauaaacuuuuuugaaauaauaaaucugguagaaaaaugagaucuaaaaaaaaaaaaaaaaaaaaaaaaaaaaaaaaaaaaaaaaaaaaaaaaaaaaaaaaaaaaaaaaugcaucccccccccccccccccccccccccccccccaaaggcucuuuucagagccaccagaauu

SEQ ID NO: 670 - RNA, 2416 nt, Artificial Sequence
  mRNA product Design b-4 comprising derived and/or modified sequence from YFV__NC_002031.1__SSjev-prME-XX (polyprotein: aa122-788) (opt1)
gggagagucccgcagucggcguccagcggcucugcuuguucgugugugugucguugcaggccuuauucaagcuuaccaugggcaagcgcagcgccggguccaucauguggcuggccagccucgcgguggucaucgccugcgccggcgccgugacccuggugcggaagaaccgcuggcugcuccugaacgucaccuccgaggaccuggggaagacguucagcgugggcaccgggaacugcaccaccaacauccucgaggccaaguacuggugccccgacuccauggaguacaacugccccaaccugagcccccgggaggagcccgacgacaucgacugcuggugcuacggcguggagaacguccgcguggcguacggcaagugcgacuccgccgggcggagccgccggucccgccgggccaucgaccugcccacgcacgagaaccacggccucaagacccgccaggagaaguggaugaccgggcggaugggcgagcgccagcugcagaagaucgagcggugguucgugcgcaacccguucuucgccgucaccgcgcugacgaucgccuaccucguggggagcaacaugacccagcggguggucaucgcccugcuggugcucgccgugggccccgccuacuccgcgcacugcaucggcaucaccgaccgcgacuucaucgaggggguccacggcgggaccugggugagcgccacgcuggagcaggacaagugcgugaccgucauggcccccgacaagcccucccuggacaucagccucgagaccguggccaucgaccggccggccgaggugcgcaaggucugcuacaacgcggugcugacccacgugaagaucaacgacaagugccccuccacgggcgaggcccaccuggccgaggagaacgagggcgacaacgccugcaagcggaccuacagcgaccgcggguggggcaacgggugcggccucuucgggaagggcuccaucgucgccugcgcgaaguucacgugcgccaagagcaugucccuguucgagguggaccagaccaagauccaguacgucauccgggcccagcugcacgugggcgccaagcaggagaacuggaacaccgacaucaagacccucaaguucgacgcccugagcgggagccaggagguggaguucaucggcuacgggaaggcgacccuggagugccagguccagaccgccguggacuucggcaacuccuacaucgccgagauggagacggagagcuggaucguggaccgccagugggcccaggaccucacccugcccuggcaguccgggagcggcggcgucuggcgcgagaugcaccaccugguggaguucgagcccccgcacgcggccaccauccgggugcucgcccuggggaaccaggagggcucccugaagaccgcccucacgggggccaugcgcgucaccaaggacaccaacgacaacaaccuguacaagcugcacggcgggcacgugagcugccgggugaagcucuccgcgcugacccugaagggcacgagcuacaagaucugcaccgacaagauguucuucgucaagaaccccaccgacaccggccacgggacgguggugaugcaggucaagguguccaagggcgcccccugccgcauccccgugaucgucgccgacgaccucaccgccgccaucaacaaggggauccuggugaccgugaacccgaucgcgagcaccaacgacgacgagguccugaucgaggugaacccgcccuucggcgacuccuacaucaucgugggccgcggggacagccggcucaccuaccaguggcacaaggagggcuccagcaucgggaagcuguucacgcagaccaugaagggcgucgagcggcuggccgugaugggggacaccgccugggacuucuccagcgccggcggcuucuucaccuccguggggaagggcauccacacggucuucgggagcgccuuccagggccucuucgggggccugaacuggaucaccaaggugaucaugggcgcggugcugaucugggucgggaucaacacccgcaacaugaccauguccaugagcaugauccucgugggcgugaucaugauguuccugagccugggggucggcgccgaccaggggugcgccaucaacuucggcaagugaggacuaguaauaaggaaacuguaugaaugucugugggcaggaagugaagagauccuucuguaaagguuuuuggaauuaugucugcugaauaauaaacuuuuuugaaauaauaaaucugguagaaaaaugagaucuaaaaaaaaaaaaaaaaaaaaaaaaaaaaaaaaaaaaaaaaaaaaaaaaaaaaaaaaaaaaaaaaugcaucccccccccccccccccccccccccccccccaaaggcucuuuucagagccaccagaauu

SEQ ID NO: 671 - RNA, 2386 nt, Artificial Sequence
  mRNA product Design b-4 comprising derived and/or modified sequence from YFV__NC_002031.1__SSjev-prME (polyprotein: aa122-778) (opt1)
gggagagucccgcagucggcguccagcggcucugcuuguucgugugugugucguugcaggccuuauucaagcuuaccaugggcaagcgcagcgccggguccaucauguggcuggccagccucgcgguggucaucgccugcgccggcgccgugacccuggugcggaagaaccgcuggcugcuccugaacgucaccuccgaggaccuggggaagacguucagcgugggcaccgggaacugcaccaccaacauccucgaggccaaguacuggugccccgacuccauggaguacaacugccccaaccugagcccccgggaggagcccgacgacaucgacugcuggugcuacggcguggagaacguccgcguggcguacggcaagugcgacuccgccgggcggagccgccggucccgccgggccaucgaccugcccacgcacgagaaccacggccucaagacccgccaggagaaguggaugaccgggcggaugggcgagcgccagcugcagaagaucgagcggugguucgugcgcaacccguucuucgccgucaccgcgcugacgaucgccuaccucguggggagcaacaugacccagcggguggucaucgcccugcuggugcucgccgugggccccgccuacuccgcgcacugcaucggcaucaccgaccgcgacuucaucgaggggguccacggcgggaccugggugagcgccacgcuggagcaggacaagugcgugaccgucauggcccccgacaagcccucccuggacaucagccucgagaccguggccaucgaccggccggccgaggugcgcaaggucugcuacaacgcggugcugacccacgugaagaucaacgacaagugccccuccacgggcgaggcccaccuggccgaggagaacgagggcgacaacgccugcaagcggaccuacagcgaccgcggguggggcaacgggugcggccucuucgggaagggcuccaucgucgccugcgcgaaguucacgugcgccaagagcaugucccuguucgagguggaccagaccaagauccaguacgucauccgggcccagcugcacgugggcgccaagcaggagaacuggaacaccgacaucaagacccucaaguucgacgcccugagcgggagccaggagguggaguucaucggcuacgggaaggcgacccuggagugccagguccagaccgccguggacuucggcaacuccuacaucgccgagauggagacggagagcuggaucguggaccgccagugggcccaggaccucacccugcccuggcaguccgggagcggcggcgucuggcgcgagaugcaccaccugguggaguucgagcccccgcacgcggccaccauccgggugcucgcccuggggaaccaggagggcucccugaagaccgcccucacgggggccaugcgcgucaccaaggacaccaacgacaacaaccuguacaagcugcacggcgggcacgugagcugccgggugaagcucuccgcgcugacccugaagggcacgagcuacaagaucugcaccgacaagauguucuucgucaagaaccccaccgacaccggccacgggacgguggugaugcaggucaagguguccaagggcgcccccugccgcauccccgugaucgucgccgacgaccucaccgccgccaucaacaaggggauccuggugaccgugaacccgaucgcgagcaccaacgacgacgagguccugaucgaggugaacccgcccuucggcgacuccuacaucaucgugggccgcggggacagccggcucaccuaccaguggcacaaggagggcuccagcaucgggaagcuguucacgcagaccaugaagggcgucgagcggcuggccgugaugggggacaccgccugggacuucuccagcgccggcggcuucuucaccuccguggggaagggcauccacacggucuucgggagcgccuuccagggccucuucgggggccugaacuggaucaccaaggugaucaugggcgcggugcugaucugggucgggaucaacacccgcaacaugaccauguccaugagcaugauccucgugggcgugaucaugauguuccugagccugggggucggcgccugaggacuaguaauaaggaaacuguaugaaugucugugggcaggaagugaagagauccuucuguaaagguuuuuggaauuaugucugcugaauaauaaacuuuuuugaaauaauaaaucugguagaaaaaugagaucuaaaaaaaaaaaaaaaaaaaaaaaaaaaaaaaaaaaaaaaaaaaaaaaaaaaaaaaaaaaaaaaaugcaucccccccccccccccccccccccccccccccaaaggcucuuuucagagccaccagaauu

SEQ ID NO: 672 - RNA, 2434 nt, Artificial Sequence
  mRNA product Design b-4 comprising derived and/or modified sequence from YFV__NC_002031.1__X-SS-prME-XX (polyprotein: aa92-788) (opt2)
gggagagucccgcagucggcguccagcggcucugcuuguucgugugugugucguugcaggccuuauucaagcuuaccaugcgcggccucuccucccgcaagcgccgcucccacgacguccucaccguccaguuccucauccucggcaugcuccucaugaccggcggcgucacccucguccgcaagaaccgcuggcuccuccucaacgucaccuccgaggaccucggcaagaccuucuccgucggcaccggcaacugcaccaccaacauccucgaggccaaguacuggugccccgacuccauggaguacaacugccccaaccucuccccccgcgaggagcccgacgacaucgacugcuggugcuacggcgucgagaacguccgcgucgccuacggcaagugcgacuccgccggccgcucccgccgcucccgccgcgccaucgaccuccccacccacgagaaccacggccucaagacccgccaggagaaguggaugaccggccgcaugggcgagcgccagcuccagaagaucgagcgcugguucguccgcaaccccuucuucgccgucaccgcccucaccaucgccuaccucgucggcuccaacaugacccagcgcgucgucaucgcccuccucguccucgccgucggccccgccuacuccgcccacugcaucggcaucaccgaccgcgacuucaucgagggcguccacggcggcaccugggucuccgccacccucgagcaggacaagugcgucaccgucauggcccccgacaagcccucccucgacaucucccucgagaccgucgccaucgaccgccccgccgagguccgcaaggucugcuacaacgccguccucacccacgucaagaucaacgacaagugccccuccaccggcgaggcccaccucgccgaggagaacgagggcgacaacgccugcaagcgcaccuacuccgaccgcggcuggggcaacggcugcggccucuucggcaagggcuccaucgucgccugcgccaaguucaccugcgccaaguccaugucccucuucgaggucgaccagaccaagauccaguacgucauccgcgcccagcuccacgucggcgccaagcaggagaacuggaacaccgacaucaagacccucaaguucgacgcccucuccggcucccaggaggucgaguucaucggcuacggcaaggccacccucgagugccagguccagaccgccgucgacuucggcaacuccuacaucgccgagauggagaccgaguccuggaucgucgaccgccagugggcccaggaccucacccuccccuggcaguccggcuccggcggcgucuggcgcgagaugcaccaccucgucgaguucgagcccccccacgccgccaccauccgcguccucgcccucggcaaccaggagggcucccucaagaccgcccucaccggcgccaugcgcgucaccaaggacaccaacgacaacaaccucuacaagcuccacggcggccacgucuccugccgcgucaagcucuccgcccucacccucaagggcaccuccuacaagaucugcaccgacaagauguucuucgucaagaaccccaccgacaccggccacggcaccgucgucaugcaggucaaggucuccaagggcgcccccugccgcauccccgucaucgucgccgacgaccucaccgccgccaucaacaagggcauccucgucaccgucaaccccaucgccuccaccaacgacgacgagguccucaucgaggucaacccccccuucggcgacuccuacaucaucgucggccgcggcgacucccgccucaccuaccaguggcacaaggagggcuccuccaucggcaagcucuucacccagaccaugaagggcgucgagcgccucgccgucaugggcgacaccgccugggacuucuccuccgccggcggcuucuucaccuccgucggcaagggcauccacaccgucuucggcuccgccuuccagggccucuucggcggccucaacuggaucaccaaggucaucaugggcgccguccucaucugggucggcaucaacacccgcaacaugaccauguccauguccaugauccucgucggcgucaucaugauguuccucucccucggcgucggcgccgaccagggcugcgccaucaacuucggcaagugaggacuaguaauaaggaaacuguaugaaugucugugggcaggaagugaagagauccuucuguaaagguuuuuggaauuaugucugcugaauaauaaacuuuuuugaaauaauaaaucugguagaaaaaugagaucuaaaaaaaaaaaaaaaaaaaaaaaaaaaaaaaaaaaaaaaaaaaaaaaaaaaaaaaaaaaaaaaaugcaucccccccccccccccccccccccccccccccaaaggcucuuuucagagccaccagaauu

SEQ ID NO: 673 - RNA, 2371 nt, Artificial Sequence
  mRNA product Design b-4 comprising derived and/or modified sequence from YFV__NC_002031.1__SS-prME (polyprotein: M,aa104-778) (opt2)
gggagagucccgcagucggcguccagcggcucugcuuguucgugugugugucguugcaggccuuauucaagcuuaccauggacguccucaccguccaguuccucauccucggcaugcuccucaugaccggcggcgucacccucguccgcaagaaccgcuggcuccuccucaacgucaccuccgaggaccucggcaagaccuucuccgucggcaccggcaacugcaccaccaacauccucgaggccaaguacuggugccccgacuccauggaguacaacugccccaaccucuccccccgcgaggagcccgacgacaucgacugcuggugcuacggcgucgagaacguccgcgucgccuacggcaagugcgacuccgccggccgcucccgccgcucccgccgcgccaucgaccuccccacccacgagaaccacggccucaagacccgccaggagaaguggaugaccggccgcaugggcgagcgccagcuccagaagaucgagcgcugguucguccgcaaccccuucuucgccgucaccgcccucaccaucgccuaccucgucggcuccaacaugacccagcgcgucgucaucgcccuccucguccucgccgucggccccgccuacuccgcccacugcaucggcaucaccgaccgcgacuucaucgagggcguccacggcggcaccugggucuccgccacccucgagcaggacaagugcgucaccgucauggcccccgacaagcccucccucgacaucucccucgagaccgucgccaucgaccgccccgccgagguccgcaaggucugcuacaacgccguccucacccacgucaagaucaacgacaagugccccuccaccggcgaggcccaccucgccgaggagaacgagggcgacaacgccugcaagcgcaccuacuccgaccgcggcuggggcaacggcugcggccucuucggcaagggcuccaucgucgccugcgccaaguucaccugcgccaaguccaugucccucuucgaggucgaccagaccaagauccaguacgucauccgcgcccagcuccacgucggcgccaagcaggagaacuggaacaccgacaucaagacccucaaguucgacgcccucuccggcucccaggaggucgaguucaucggcuacggcaaggccacccucgagugccagguccagaccgccgucgacuucggcaacuccuacaucgccgagauggagaccgaguccuggaucgucgaccgccagugggcccaggaccucacccuccccuggcaguccggcuccggcggcgucuggcgcgagaugcaccaccucgucgaguucgagcccccccacgccgccaccauccgcguccucgcccucggcaaccaggagggcucccucaagaccgcccucaccggcgccaugcgcgucaccaaggacaccaacgacaacaaccucuacaagcuccacggcggccacgucuccugccgcgucaagcucuccgcccucacccucaagggcaccuccuacaagaucugcaccgacaagauguucuucgucaagaaccccaccgacaccggccacggcaccgucgucaugcaggucaaggucuccaagggcgcccccugccgcauccccgucaucgucgccgacgaccucaccgccgccaucaacaagggcauccucgucaccgucaaccccaucgccuccaccaacgacgacgagguccucaucgaggucaacccccccuucggcgacuccuacaucaucgucggccgcggcgacucccgccucaccuaccaguggcacaaggagggcuccuccaucggcaagcucuucacccagaccaugaagggcgucgagcgccucgccgucaugggcgacaccgccugggacuucuccuccgccggcggcuucuucaccuccgucggcaagggcauccacaccgucuucggcuccgccuuccagggccucuucggcggccucaacuggaucaccaaggucaucaugggcgccguccucaucugggucggcaucaacacccgcaacaugaccauguccauguccaugauccucgucggcgucaucaugauguuccucucccucggcgucggcgccugaggacuaguaauaaggaaacuguaugaaugucugugggcaggaagugaagagauccuucuguaaagguuuuuggaauuaugucugcugaauaauaaacuuuuuugaaauaauaaaucugguagaaaaaugagaucuaaaaaaaaaaaaaaaaaaaaaaaaaaaaaaaaaaaaaaaaaaaaaaaaaaaaaaaaaaaaaaaaugcaucccccccccccccccccccccccccccccccaaaggcucuuuucagagccaccagaauu

SEQ ID NO: 674 - RNA, 2398 nt, Artificial Sequence
  mRNA product Design b-4 comprising derived and/or modified sequence from YFV__NC_002031.1__SSIgE-prME-XX (polyprotein: aa122-788) (opt2)
gggagagucccgcagucggcguccagcggcucugcuuguucgugugugugucguugcaggccuuauucaagcuuaccauggacuggaccuggauccucuuccucgucgccgccgccacccgcguccacuccgucacccucguccgcaagaaccgcuggcuccuccucaacgucaccuccgaggaccucggcaagaccuucuccgucggcaccggcaacugcaccaccaacauccucgaggccaaguacuggugccccgacuccauggaguacaacugccccaaccucuccccccgcgaggagcccgacgacaucgacugcuggugcuacggcgucgagaacguccgcgucgccuacggcaagugcgacuccgccggccgcucccgccgcucccgccgcgccaucgaccuccccacccacgagaaccacggccucaagacccgccaggagaaguggaugaccggccgcaugggcgagcgccagcuccagaagaucgagcgcugguucguccgcaaccccuucuucgccgucaccgcccucaccaucgccuaccucgucggcuccaacaugacccagcgcgucgucaucgcccuccucguccucgccgucggccccgccuacuccgcccacugcaucggcaucaccgaccgcgacuucaucgagggcguccacggcggcaccugggucuccgccacccucgagcaggacaagugcgucaccgucauggcccccgacaagcccucccucgacaucucccucgagaccgucgccaucgaccgccccgccgagguccgcaaggucugcuacaacgccguccucacccacgucaagaucaacgacaagugccccuccaccggcgaggcccaccucgccgaggagaacgagggcgacaacgccugcaagcgcaccuacuccgaccgcggcuggggcaacggcugcggccucuucggcaagggcuccaucgucgccugcgccaaguucaccugcgccaaguccaugucccucuucgaggucgaccagaccaagauccaguacgucauccgcgcccagcuccacgucggcgccaagcaggagaacuggaacaccgacaucaagacccucaaguucgacgcccucuccggcucccaggaggucgaguucaucggcuacggcaaggccacccucgagugccagguccagaccgccgucgacuucggcaacuccuacaucgccgagauggagaccgaguccuggaucgucgaccgccagugggcccaggaccucacccuccccuggcaguccggcuccggcggcgucuggcgcgagaugcaccaccucgucgaguucgagcccccccacgccgccaccauccgcguccucgcccucggcaaccaggagggcucccucaagaccgcccucaccggcgccaugcgcgucaccaaggacaccaacgacaacaaccucuacaagcuccacggcggccacgucuccugccgcgucaagcucuccgcccucacccucaagggcaccuccuacaagaucugcaccgacaagauguucuucgucaagaaccccaccgacaccggccacggcaccgucgucaugcaggucaaggucuccaagggcgcccccugccgcauccccgucaucgucgccgacgaccucaccgccgccaucaacaagggcauccucgucaccgucaaccccaucgccuccaccaacgacgacgagguccucaucgaggucaacccccccuucggcgacuccuacaucaucgucggccgcggcgacucccgccucaccuaccaguggcacaaggagggcuccuccaucggcaagcucuucacccagaccaugaagggcgucgagcgccucgccgucaugggcgacaccgccugggacuucuccuccgccggcggcuucuucaccuccgucggcaagggcauccacaccgucuucggcuccgccuuccagggccucuucggcggccucaacuggaucaccaaggucaucaugggcgccguccucaucugggucggcaucaacacccgcaacaugaccauguccauguccaugauccucgucggcgucaucaugauguuccucucccucggcgucggcgccgaccagggcugcgccaucaacuucggcaagugaggacuaguaauaaggaaacuguaugaaugucugugggcaggaagugaagagauccuucuguaaagguuuuuggaauuaugucugcugaauaauaaacuuuuuugaaauaauaaaucugguagaaaaaugagaucuaaaaaaaaaaaaaaaaaaaaaaaaaaaaaaaaaaaaaaaaaaaaaaaaaaaaaaaaaaaaaaaaugcaucccccccccccccccccccccccccccccccaaaggcucuuuucagagccaccagaauu

SEQ ID NO: 675 - RNA, 2368 nt, Artificial Sequence
  mRNA product Design b-4 comprising derived and/or modified sequence from YFV__NC_002031.1__SSIgE-prME (polyprotein: aa122-778) (opt2)
gggagagucccgcagucggcguccagcggcucugcuuguucgugugugugucguugcaggccuuauucaagcuuaccauggacuggaccuggauccucuuccucgucgccgccgccacccgcguccacuccgucacccucguccgcaagaaccgcuggcuccuccucaacgucaccuccgaggaccucggcaagaccuucuccgucggcaccggcaacugcaccaccaacauccucgaggccaaguacuggugccccgacuccauggaguacaacugccccaaccucuccccccgcgaggagcccgacgacaucgacugcuggugcuacggcgucgagaacguccgcgucgccuacggcaagugcgacuccgccggccgcucccgccgcucccgccgcgccaucgaccuccccacccacgagaaccacggccucaagacccgccaggagaaguggaugaccggccgcaugggcgagcgccagcuccagaagaucgagcgcugguucguccgcaaccccuucuucgccgucaccgcccucaccaucgccuaccucgucggcuccaacaugacccagcgcgucgucaucgcccuccucguccucgccgucggccccgccuacuccgcccacugcaucggcaucaccgaccgcgacuucaucgagggcguccacggcggcaccugggucuccgccacccucgagcaggacaagugcgucaccgucauggcccccgacaagcccucccucgacaucucccucgagaccgucgccaucgaccgccccgccgagguccgcaaggucugcuacaacgccguccucacccacgucaagaucaacgacaagugccccuccaccggcgaggcccaccucgccgaggagaacgagggcgacaacgccugcaagcgcaccuacuccgaccgcggcuggggcaacggcugcggccucuucggcaagggcuccaucgucgccugcgccaaguucaccugcgccaaguccaugucccucuucgaggucgaccagaccaagauccaguacgucauccgcgcccagcuccacgucggcgccaagcaggagaacuggaacaccgacaucaagacccucaaguucgacgcccucuccggcucccaggaggucgaguucaucggcuacggcaaggccacccucgagugccagguccagaccgccgucgacuucggcaacuccuacaucgccgagauggagaccgaguccuggaucgucgaccgccagugggcccaggaccucacccuccccuggcaguccggcuccggcggcgucuggcgcgagaugcaccaccucgucgaguucgagcccccccacgccgccaccauccgcguccucgcccucggcaaccaggagggcucccucaagaccgcccucaccggcgccaugcgcgucaccaaggacaccaacgacaacaaccucuacaagcuccacggcggccacgucuccugccgcgucaagcucuccgcccucacccucaagggcaccuccuacaagaucugcaccgacaagauguucuucgucaagaaccccaccgacaccggccacggcaccgucgucaugcaggucaaggucuccaagggcgcccccugccgcauccccgucaucgucgccgacgaccucaccgccgccaucaacaagggcauccucgucaccgucaaccccaucgccuccaccaacgacgacgagguccucaucgaggucaacccccccuucggcgacuccuacaucaucgucggccgcggcgacucccgccucaccuaccaguggcacaaggagggcuccuccaucggcaagcucuucacccagaccaugaagggcgucgagcgccucgccgucaugggcgacaccgccugggacuucuccuccgccggcggcuucuucaccuccgucggcaagggcauccacaccgucuucggcuccgccuuccagggccucuucggcggccucaacuggaucaccaaggucaucaugggcgccguccucaucugggucggcaucaacacccgcaacaugaccauguccauguccaugauccucgucggcgucaucaugauguuccucucccucggcgucggcgccugaggacuaguaauaaggaaacuguaugaaugucugugggcaggaagugaagagauccuucuguaaagguuuuuggaauuaugucugcugaauaauaaacuuuuuugaaauaauaaaucugguagaaaaaugagaucuaaaaaaaaaaaaaaaaaaaaaaaaaaaaaaaaaaaaaaaaaaaaaaaaaaaaaaaaaaaaaaaaugcaucccccccccccccccccccccccccccccccaaaggcucuuuucagagccaccagaauu

SEQ ID NO: 676 - RNA, 2416 nt, Artificial Sequence
  mRNA product Design b-4 comprising derived and/or modified sequence from YFV__NC_002031.1__SSjev-prME-XX (polyprotein: aa122-788) (opt2)
gggagagucccgcagucggcguccagcggcucugcuuguucgugugugugucguugcaggccuuauucaagcuuaccaugggcaagcgcuccgccggcuccaucauguggcucgccucccucgccgucgucaucgccugcgccggcgccgucacccucguccgcaagaaccgcuggcuccuccucaacgucaccuccgaggaccucggcaagaccuucuccgucggcaccggcaacugcaccaccaacauccucgaggccaaguacuggugccccgacuccauggaguacaacugccccaaccucuccccccgcgaggagcccgacgacaucgacugcuggugcuacggcgucgagaacguccgcgucgccuacggcaagugcgacuccgccggccgcucccgccgcucccgccgcgccaucgaccuccccacccacgagaaccacggccucaagacccgccaggagaaguggaugaccggccgcaugggcgagcgccagcuccagaagaucgagcgcugguucguccgcaaccccuucuucgccgucaccgcccucaccaucgccuaccucgucggcuccaacaugacccagcgcgucgucaucgcccuccucguccucgccgucggccccgccuacuccgcccacugcaucggcaucaccgaccgcgacuucaucgagggcguccacggcggcaccugggucuccgccacccucgagcaggacaagugcgucaccgucauggcccccgacaagcccucccucgacaucucccucgagaccgucgccaucgaccgccccgccgagguccgcaaggucugcuacaacgccguccucacccacgucaagaucaacgacaagugccccuccaccggcgaggcccaccucgccgaggagaacgagggcgacaacgccugcaagcgcaccuacuccgaccgcggcuggggcaacggcugcggccucuucggcaagggcuccaucgucgccugcgccaaguucaccugcgccaaguccaugucccucuucgaggucgaccagaccaagauccaguacgucauccgcgcccagcuccacgucggcgccaagcaggagaacuggaacaccgacaucaagacccucaaguucgacgcccucuccggcucccaggaggucgaguucaucggcuacggcaaggccacccucgagugccagguccagaccgccgucgacuucggcaacuccuacaucgccgagauggagaccgaguccuggaucgucgaccgccagugggcccaggaccucacccuccccuggcaguccggcuccggcggcgucuggcgcgagaugcaccaccucgucgaguucgagcccccccacgccgccaccauccgcguccucgcccucggcaaccaggagggcucccucaagaccgcccucaccggcgccaugcgcgucaccaaggacaccaacgacaacaaccucuacaagcuccacggcggccacgucuccugccgcgucaagcucuccgcccucacccucaagggcaccuccuacaagaucugcaccgacaagauguucuucgucaagaaccccaccgacaccggccacggcaccgucgucaugcaggucaaggucuccaagggcgcccccugccgcauccccgucaucgucgccgacgaccucaccgccgccaucaacaagggcauccucgucaccgucaaccccaucgccuccaccaacgacgacgagguccucaucgaggucaacccccccuucggcgacuccuacaucaucgucggccgcggcgacucccgccucaccuaccaguggcacaaggagggcuccuccaucggcaagcucuucacccagaccaugaagggcgucgagcgccucgccgucaugggcgacaccgccugggacuucuccuccgccggcggcuucuucaccuccgucggcaagggcauccacaccgucuucggcuccgccuuccagggccucuucggcggccucaacuggaucaccaaggucaucaugggcgccguccucaucugggucggcaucaacacccgcaacaugaccauguccauguccaugauccucgucggcgucaucaugauguuccucucccucggcgucggcgccgaccagggcugcgccaucaacuucggcaagugaggacuaguaauaaggaaacuguaugaaugucugugggcaggaagugaagagauccuucuguaaagguuuuuggaauuaugucugcugaauaauaaacuuuuuugaaauaauaaaucugguagaaaaaugagaucuaaaaaaaaaaaaaaaaaaaaaaaaaaaaaaaaaaaaaaaaaaaaaaaaaaaaaaaaaaaaaaaaugcaucccccccccccccccccccccccccccccccaaaggcucuuuucagagccaccagaauu

SEQ ID NO: 677 - RNA, 2386 nt, Artificial Sequence
  mRNA product Design b-4 comprising derived and/or modified sequence from YFV__NC_002031.1__SSjev-prME (polyprotein: aa122-778) (opt2)
gggagagucccgcagucggcguccagcggcucugcuuguucgugugugugucguugcaggccuuauucaagcuuaccaugggcaagcgcuccgccggcuccaucauguggcucgccucccucgccgucgucaucgccugcgccggcgccgucacccucguccgcaagaaccgcuggcuccuccucaacgucaccuccgaggaccucggcaagaccuucuccgucggcaccggcaacugcaccaccaacauccucgaggccaaguacuggugccccgacuccauggaguacaacugccccaaccucuccccccgcgaggagcccgacgacaucgacugcuggugcuacggcgucgagaacguccgcgucgccuacggcaagugcgacuccgccggccgcucccgccgcucccgccgcgccaucgaccuccccacccacgagaaccacggccucaagacccgccaggagaaguggaugaccggccgcaugggcgagcgccagcuccagaagaucgagcgcugguucguccgcaaccccuucuucgccgucaccgcccucaccaucgccuaccucgucggcuccaacaugacccagcgcgucgucaucgcccuccucguccucgccgucggccccgccuacuccgcccacugcaucggcaucaccgaccgcgacuucaucgagggcguccacggcggcaccugggucuccgccacccucgagcaggacaagugcgucaccgucauggcccccgacaagcccucccucgacaucucccucgagaccgucgccaucgaccgccccgccgagguccgcaaggucugcuacaacgccguccucacccacgucaagaucaacgacaagugccccuccaccggcgaggcccaccucgccgaggagaacgagggcgacaacgccugcaagcgcaccuacuccgaccgcggcuggggcaacggcugcggccucuucggcaagggcuccaucgucgccugcgccaaguucaccugcgccaaguccaugucccucuucgaggucgaccagaccaagauccaguacgucauccgcgcccagcuccacgucggcgccaagcaggagaacuggaacaccgacaucaagacccucaaguucgacgcccucuccggcucccaggaggucgaguucaucggcuacggcaaggccacccucgagugccagguccagaccgccgucgacuucggcaacuccuacaucgccgagauggagaccgaguccuggaucgucgaccgccagugggcccaggaccucacccuccccuggcaguccggcuccggcggcgucuggcgcgagaugcaccaccucgucgaguucgagcccccccacgccgccaccauccgcguccucgcccucggcaaccaggagggcucccucaagaccgcccucaccggcgccaugcgcgucaccaaggacaccaacgacaacaaccucuacaagcuccacggcggccacgucuccugccgcgucaagcucuccgcccucacccucaagggcaccuccuacaagaucugcaccgacaagauguucuucgucaagaaccccaccgacaccggccacggcaccgucgucaugcaggucaaggucuccaagggcgcccccugccgcauccccgucaucgucgccgacgaccucaccgccgccaucaacaagggcauccucgucaccgucaaccccaucgccuccaccaacgacgacgagguccucaucgaggucaacccccccuucggcgacuccuacaucaucgucggccgcggcgacucccgccucaccuaccaguggcacaaggagggcuccuccaucggcaagcucuucacccagaccaugaagggcgucgagcgccucgccgucaugggcgacaccgccugggacuucuccuccgccggcggcuucuucaccuccgucggcaagggcauccacaccgucuucggcuccgccuuccagggccucuucggcggccucaacuggaucaccaaggucaucaugggcgccguccucaucugggucggcaucaacacccgcaacaugaccauguccauguccaugauccucgucggcgucaucaugauguuccucucccucggcgucggcgccugaggacuaguaauaaggaaacuguaugaaugucugugggcaggaagugaagagauccuucuguaaagguuuuuggaauuaugucugcugaauaauaaacuuuuuugaaauaauaaaucugguagaaaaaugagaucuaaaaaaaaaaaaaaaaaaaaaaaaaaaaaaaaaaaaaaaaaaaaaaaaaaaaaaaaaaaaaaaaugcaucccccccccccccccccccccccccccccccaaaggcucuuuucagagccaccagaauu

SEQ ID NO: 678 - RNA, 2434 nt, Artificial Sequence
  mRNA product Design b-4 comprising derived and/or modified sequence from YFV__NC_002031.1__X-SS-prME-XX (polyprotein: aa92-788) (opt3)
gggagagucccgcagucggcguccagcggcucugcuuguucgugugugugucguugcaggccuuauucaagcuuaccaugagaggccugagcuccaggaagcggcgcucucacgacgugcucaccguccaguuccuuauccuggggauguuguuaaugacaggagguguuacucuggugcguaaaaaccgauggcuacuccugaauguaacgucagaggaucuuggcaagaccuuuaguguggggacaggaaacugcacuaccaauauucuggaagccaaauacuggugucccgacagcauggaguauaacugcccuaauuuguccccaagagaggaaccggaugacauagauuguuggugcuacggcgucgaaaacgugaggguugcuuaugguaagugugacucugcagggcggucgcgcagaucaaggcgggccaucgaucuccccacacaugagaaucacggacugaaaacccgccaagagaaguggaugacuggccgaaugggcgaaagacagcugcagaagauugagaggugguucgugcggaacccuuucuucgcggucacagcucucaccaucgccuacuuaguggggagcaauaugacgcagcguguaguuauugcacugcuuguguuggccgucggaccagcuuauagugcacauugcaucgguauaacugaccgcgauuuuaucgaaggcgugcacgggggaaccuggguguccgccacacuggagcaagacaaaugugucacuguuauggcucccgauaagccuucucuagacauuagccucgagaccguggccaucgauagaccagcggaaguaaggaaagugugcuacaacgcaguccugacacaugugaagauuaaugacaaaugucccuccaccggcgaggcccaccuugcugaagagaacgaaggugacaaugccugcaagcggacguauucagaucgaggguggggaaacggcuguggccuguucgggaagggaaguaucguugcaugcgcuaaauuuacuugcgccaagagcaugucuuuguucgagguggaccagacaaaaauacaguacgucauucgcgcgcagcuccacgugggugccaagcaagagaauuggaacaccgauaucaaaacucugaaguuugacgcauuauccggcucacaggaaguagaguucauuggguacggaaaagcuacacuggaaugucagguucagaccgccguggauuuuggcaacagcuauaucgcugagauggaaacggagaguuggaucgucgacagacaaugggcccaggaucucacccuuccuuggcagucugguuccgggggcguguggagggagaugcaucaccuggucgaauuugagccaccgcaugcagccacaauucggguguuggcucuaggaaaucaagaaggcagccugaagacugcgcucaccggggcaaugcgcguuacaaaggacacuaacgauaauaaccuguacaaacuucacggaggucacgugucgugcagaguaaagcugucugccuugacccucaaaggcacauccuauaagauauguaccgacaaaauguuuuucgucaagaaucccacugauacggggcauggaacagugguuaugcaagugaaggucucaaaaggcgcuccuugcaggaucccagugauuguagccgacgaccugaccgcagccaucaacaaggguauauuagugacuguuaaucccauugcuaguaccaacgaugacgagguccugaucgaagugaauccuccauucggggauagcuacaucauugugggccguggagacucccggcuaacauaucaguggcacaaagagggcucuagcaucgggaagcucuuuacccagacuaugaaaggagucgagcgacuggccguuaugggugauacagcaugggacuucucaagugcgggcggguuuuucacguccgugggaaagggcauucauaccguguuugguagcgcuuuccaggggcuuuuuggcggauugaacuggauaacuaagguaaucaugggcgccguccugauuuggguggggaucaauacaagaaacaugaccaugucuaugucaaugauccucguuggagugauuaugauguuccugagucuuggcgucggugcagaucaggggugugccauaaauuuuggaaaaugaggacuaguaauaaggaaacuguaugaaugucugugggcaggaagugaagagauccuucuguaaagguuuuuggaauuaugucugcugaauaauaaacuuuuuugaaauaauaaaucugguagaaaaaugagaucuaaaaaaaaaaaaaaaaaaaaaaaaaaaaaaaaaaaaaaaaaaaaaaaaaaaaaaaaaaaaaaaaugcaucccccccccccccccccccccccccccccccaaaggcucuuuucagagccaccagaauu

SEQ ID NO: 679 - RNA, 2371 nt, Artificial Sequence
  mRNA product Design b-4 comprising derived and/or modified sequence from YFV__NC_002031.1__SS-prME (polyprotein: M,aa104-778) (opt3)
gggagagucccgcagucggcguccagcggcucugcuuguucgugugugugucguugcaggccuuauucaagcuuaccauggacgugcugaccguccaguuccucauccuuggcaugcuguugaugacagggggaguuacuuuagugagaaagaacagguggcugcuacucaauguaacgagcgaggaucuggguaaaaccuuuuccgugggcacagggaacugcacuaccaauauucuugaagccaaguacuggugucccgacucuauggaguauaacugcccuaaucugucaccacgggaggaaccggaugacauagauuguuggugcuacggagucgaaaacgugcgcguugcuuauggcaaaugugacagugcaggucgaagccguagauccaggcgggccaucgauuugcccacacacgagaaucaugggcucaagacccgccaagagaaauggaugacuggaagaaugggcgaaaggcagcugcagaagauugagcggugguucgugcgcaacccuuucuucgcggucacagcucugaccaucgccuaccucgugggcucuaauaugacgcagcgaguaguuauugcauuacuggugcuugccgucgggccagcuuauucggcacacugcaucggaauaacugacagagauuuuaucgaaggugugcauggcgggaccugggugucagccacauuggagcaagacaagugugucacuguuauggcucccgauaaaccuagccuggacauuagucuagagaccguggccaucgauaggccagcggaaguacggaaggugugcuacaacgcaguccucacacacgugaaaauuaaugacaagugucccuccaccggagaggcccaucuggcugaagagaacgaaggcgacaaugccugcaaacguacguauucugaucgcgguugggggaacggauguggccuuuucggcaaggggagcaucguugcaugcgcuaaguuuacuugcgccaaauccaugucacuguucgagguggaccagacaaagauacaguacgucauuagagcgcaguugcacgugggagccaaacaagagaauuggaacaccgauaucaagacucucaaauuugacgcacugagugguagccaggaaguagaguucauuggcuacgggaaggcuacauuagaaugucagguucagaccgccguggauuuuggaaacucuuauaucgcugagauggaaacggaguccuggaucgucgacaggcaaugggcccaggaucugacccucccuuggcagucaggcagcggugggguguggcgggagaugcaccaucuugucgaauuugagccaccgcacgcagccacaauucgagugcuggcuuugggcaaucaagaaggaagucuaaaaacugcgcugaccggcgcaaugcgcguuacaaaggacacuaacgauaauaaccucuacaagcugcaugggggacacgugucuugcagaguaaaacuuuccgcccugaccuugaaggguacaagcuauaaaauauguaccgacaagauguuuuucgucaaaaaucccacugauacgggccacgggacagugguuaugcaagugaaggucucgaagggagcuccuugcaggaucccagugauuguagccgacgaccucaccgcagccaucaacaaaggcauacuggugacuguuaaucccauugcuucuaccaacgaugacgaggucuuaaucgaagugaauccuccauucggugauuccuacaucauuguggggcggggcgacucacgccugacauaucaguggcauaaggagggaaguagcaucggcaaacuauuuacccagacuaugaagggggucgagagacucgccguuaugggagauacagcaugggacuucuccucugcggguggcuuuuucacgagcguggggaaaggcauucacaccguguuuggaucagcuuuccagggucuguuugggggccuuaacuggauaacuaagguaaucaugggagccgucuugauuugggugggcaucaauacaaggaacaugaccaugaguauguccaugauccugguuggggugauuaugauguuccucagccugggagucggcgcaugaggacuaguaauaaggaaacuguaugaaugucugugggcaggaagugaagagauccuucuguaaagguuuuuggaauuaugucugcugaauaauaaacuuuuuugaaauaauaaaucugguagaaaaaugagaucuaaaaaaaaaaaaaaaaaaaaaaaaaaaaaaaaaaaaaaaaaaaaaaaaaaaaaaaaaaaaaaaaugcaucccccccccccccccccccccccccccccccaaaggcucuuuucagagccaccagaauu

SEQ ID NO: 680 - RNA, 2398 nt, Artificial Sequence
  mRNA product Design b-4 comprising derived and/or modified sequence from YFV__NC_002031.1__SSIgE-prME-XX (polyprotein: aa122-788) (opt3)
gggagagucccgcagucggcguccagcggcucugcuuguucgugugugugucguugcaggccuuauucaagcuuaccauggacuggaccuggauccuguuccucguggccgcugcaacaagaguccacagcguuacucuggugcguaaaaaccgauggcuacuccugaauguaacgucagaggaucuuggcaagaccuuuaguguggggacaggaaacugcacuaccaauauucuggaagccaaauacuggugucccgacagcauggaguauaacugcccuaauuuguccccaagagaggaaccggaugacauagauuguuggugcuacggcgucgaaaacgugaggguugcuuaugguaagugugacucugcagggcggucgcgcagaucaaggcgggccaucgaucuccccacacaugagaaucacggacugaaaacccgccaagagaaguggaugacuggccgaaugggcgaaagacagcugcagaagauugagaggugguucgugcggaacccuuucuucgcggucacagcucucaccaucgccuacuuaguggggagcaauaugacgcagcguguaguuauugcacugcuuguguuggccgucggaccagcuuauagugcacauugcaucgguauaacugaccgcgauuuuaucgaaggcgugcacgggggaaccuggguguccgccacacuggagcaagacaaaugugucacuguuauggcucccgauaagccuucucuagacauuagccucgagaccguggccaucgauagaccagcggaaguaaggaaagugugcuacaacgcaguccugacacaugugaagauuaaugacaaaugucccuccaccggcgaggcccaccuugcugaagagaacgaaggugacaaugccugcaagcggacguauucagaucgaggguggggaaacggcuguggccuguucgggaagggaaguaucguugcaugcgcuaaauuuacuugcgccaagagcaugucuuuguucgagguggaccagacaaaaauacaguacgucauucgcgcgcagcuccacgugggugccaagcaagagaauuggaacaccgauaucaaaacucugaaguuugacgcauuauccggcucacaggaaguagaguucauuggguacggaaaagcuacacuggaaugucagguucagaccgccguggauuuuggcaacagcuauaucgcugagauggaaacggagaguuggaucgucgacagacaaugggcccaggaucucacccuuccuuggcagucugguuccgggggcguguggagggagaugcaucaccuggucgaauuugagccaccgcaugcagccacaauucggguguuggcucuaggaaaucaagaaggcagccugaagacugcgcucaccggggcaaugcgcguuacaaaggacacuaacgauaauaaccuguacaaacuucacggaggucacgugucgugcagaguaaagcugucugccuugacccucaaaggcacauccuauaagauauguaccgacaaaauguuuuucgucaagaaucccacugauacggggcauggaacagugguuaugcaagugaaggucucaaaaggcgcuccuugcaggaucccagugauuguagccgacgaccugaccgcagccaucaacaaggguauauuagugacuguuaaucccauugcuaguaccaacgaugacgagguccugaucgaagugaauccuccauucggggauagcuacaucauugugggccguggagacucccggcuaacauaucaguggcacaaagagggcucuagcaucgggaagcucuuuacccagacuaugaaaggagucgagcgacuggccguuaugggugauacagcaugggacuucucaagugcgggcggguuuuucacguccgugggaaagggcauucauaccguguuugguagcgcuuuccaggggcuuuuuggcggauugaacuggauaacuaagguaaucaugggcgccguccugauuuggguggggaucaauacaagaaacaugaccaugucuaugucaaugauccucguuggagugauuaugauguuccugagucuuggcgucggugcagaucaggggugugccauaaauuuuggaaaaugaggacuaguaauaaggaaacuguaugaaugucugugggcaggaagugaagagauccuucuguaaagguuuuuggaauuaugucugcugaauaauaaacuuuuuugaaauaauaaaucugguagaaaaaugagaucuaaaaaaaaaaaaaaaaaaaaaaaaaaaaaaaaaaaaaaaaaaaaaaaaaaaaaaaaaaaaaaaaugcaucccccccccccccccccccccccccccccccaaaggcucuuuucagagccaccagaauu

SEQ ID NO: 681 - RNA, 2368 nt, Artificial Sequence
  mRNA product Design b-4 comprising derived and/or modified sequence from YFV__NC_002031.1__SSIgE-prME (polyprotein: aa122-778) (opt3)
gggagagucccgcagucggcguccagcggcucugcuuguucgugugugugucguugcaggccuuauucaagcuuaccauggacuggaccuggauccuguuccucguggccgcugcaacaagaguccacagcgugacccuggucagaaagaacagguggcuccuucugaauguuacaagcgaggacuugggcaaaacuuucuccguggggacgggaaacugcaccacaaauaucuuagaagccaaguacuggugucccgauucuauggaguauaacugcccuaaucugucaccacgggaggaaccggacgauauugacuguuggugcuacgguguagaaaacgugcgcgucgcuuauggcaaaugugauagugcagggcgaagccguagauccaggcgggccauagaccuacccacucacgagaaucauggacucaagacccgccaggagaaauggaugacaggcagaaugggugaaaggcaacugcagaagaucgagcggugguuugugcgcaacccuuucuuugcgguuaccgcucuuacuauugccuaccugguggggucuaauaugacacagcgagucgugaucgcauugcucguacuggccguuggaccagcuuauucggcacacugcauuggcaucaccgauagagacuucauagaaggcgugcaugggggaacgugggucucagccacucuggagcaggauaagugugugaccgugauggcucccgacaaaccuagccucgauaucaguuuagagacagucgccauugacaggccagcggaaguucggaaggugugcuacaacgcaguacugacucacgugaaaaucaaugauaagugucccuccaccggugaggcccaucuugcugaagagaacgaaggcgacaaugccugcaaacguacauauucugaccgcggguggggaaacggcugugguuuguuugggaagggaagcauugucgcaugcgcuaaguuuaccugcgccaaauccaugucacuguucgagguggaucaaacgaagauccaguacguuauaagagcgcagcuacacgugggcgccaaacaggagaauuggaacacugacauuaagacacucaaauucgaugcacugaguggcagccaagaagucgaguuuaucggguacggaaaggcuacccuugaaugucaggugcagacugccguagacuucgguaacucuuauauugcugagauggaaacagaguccuggaucguugauaggcagugggcccaagaccugaccuugccuuggcagucaggcagcgggggaguguggcgggagaugcaccaucucgucgaauuugagccaccgcacgcagccacgauccgagugcuggcuuuaggcaaucaggaagguagucugaaaaccgcgcucacaggggcaaugcgcgucacuaaggauaccaacgacaauaaccuuuacaagcugcauggcggacacgugucuugcagaguuaaauuguccgcccuaacacugaagggcacuagcuauaaaauuuguaccgauaagauguucuuugugaaaaaucccacagacaccgggcacggaacuguagucaugcaagugaagguuucgaagggugcuccuugcaggauaccagugaucgucgccgaugaccucacggcagccauuaacaaaggcauccuggugacaguaaaucccauagcuucuaccaacgacgaugaggugcuuauugaaguuaauccuccauucggggacuccuacaucaucgucggacggggcgauucacgccugacuuaucaguggcauaaggaggguaguagcauugggaaauuguucacccagacaaugaagggcguggagagacucgccgugaugggagacaccgcaugggauuuuuccucugcgggcggguucuuuacuagcgucggaaaagguauccacacaguuuucggcucagcuuuucaggggcuguucggaggcuuaaacuggauuacgaaggugauaaugggugccgugcugaucuggguagggauuaauaccaggaacaugacuaugaguauguccaugauccuagucggcgugaucaugauguuucucagccugggaguuggcgcaugaggacuaguaauaaggaaacuguaugaaugucugugggcaggaagugaagagauccuucuguaaagguuuuuggaauuaugucugcugaauaauaaacuuuuuugaaauaauaaaucugguagaaaaaugagaucuaaaaaaaaaaaaaaaaaaaaaaaaaaaaaaaaaaaaaaaaaaaaaaaaaaaaaaaaaaaaaaaaugcaucccccccccccccccccccccccccccccccaaaggcucuuuucagagccaccagaauu

SEQ ID NO: 682 - RNA, 2416 nt, Artificial Sequence
  mRNA product Design b-4 comprising derived and/or modified sequence from YFV__NC_002031.1__SSjev-prME-XX (polyprotein: aa122-788) (opt3)
gggagagucccgcagucggcguccagcggcucugcuuguucgugugugugucguugcaggccuuauucaagcuuaccaugggcaagagaagcgccggguccaucauguggcuggcuucucucgcaguggucauugccugcgcgggagcuguuacucuggugcguaaaaaccgauggcuacuccugaauguaacgucagaggaucuuggcaagaccuuuaguguggggacaggaaacugcacuaccaauauucuggaagccaaauacuggugucccgacagcauggaguauaacugcccuaauuuguccccaagagaggaaccggaugacauagauuguuggugcuacggcgucgaaaacgugaggguugcuuaugguaagugugacucugcagggcggucgcgcagaucaaggcgggccaucgaucuccccacacaugagaaucacggacugaaaacccgccaagagaaguggaugacuggccgaaugggcgaaagacagcugcagaagauugagaggugguucgugcggaacccuuucuucgcggucacagcucucaccaucgccuacuuaguggggagcaauaugacgcagcguguaguuauugcacugcuuguguuggccgucggaccagcuuauagugcacauugcaucgguauaacugaccgcgauuuuaucgaaggcgugcacgggggaaccuggguguccgccacacuggagcaagacaaaugugucacuguuauggcucccgauaagccuucucuagacauuagccucgagaccguggccaucgauagaccagcggaaguaaggaaagugugcuacaacgcaguccugacacaugugaagauuaaugacaaaugucccuccaccggcgaggcccaccuugcugaagagaacgaaggugacaaugccugcaagcggacguauucagaucgaggguggggaaacggcuguggccuguucgggaagggaaguaucguugcaugcgcuaaauuuacuugcgccaagagcaugucuuuguucgagguggaccagacaaaaauacaguacgucauucgcgcgcagcuccacgugggugccaagcaagagaauuggaacaccgauaucaaaacucugaaguuugacgcauuauccggcucacaggaaguagaguucauuggguacggaaaagcuacacuggaaugucagguucagaccgccguggauuuuggcaacagcuauaucgcugagauggaaacggagaguuggaucgucgacagacaaugggcccaggaucucacccuuccuuggcagucugguuccgggggcguguggagggagaugcaucaccuggucgaauuugagccaccgcaugcagccacaauucggguguuggcucuaggaaaucaagaaggcagccugaagacugcgcucaccggggcaaugcgcguuacaaaggacacuaacgauaauaaccuguacaaacuucacggaggucacgugucgugcagaguaaagcugucugccuugacccucaaaggcacauccuauaagauauguaccgacaaaauguuuuucgucaagaaucccacugauacggggcauggaacagugguuaugcaagugaaggucucaaaaggcgcuccuugcaggaucccagugauuguagccgacgaccugaccgcagccaucaacaaggguauauuagugacuguuaaucccauugcuaguaccaacgaugacgagguccugaucgaagugaauccuccauucggggauagcuacaucauugugggccguggagacucccggcuaacauaucaguggcacaaagagggcucuagcaucgggaagcucuuuacccagacuaugaaaggagucgagcgacuggccguuaugggugauacagcaugggacuucucaagugcgggcggguuuuucacguccgugggaaagggcauucauaccguguuugguagcgcuuuccaggggcuuuuuggcggauugaacuggauaacuaagguaaucaugggcgccguccugauuuggguggggaucaauacaagaaacaugaccaugucuaugucaaugauccucguuggagugauuaugauguuccugagucuuggcgucggugcagaucaggggugugccauaaauuuuggaaaaugaggacuaguaauaaggaaacuguaugaaugucugugggcaggaagugaagagauccuucuguaaagguuuuuggaauuaugucugcugaauaauaaacuuuuuugaaauaauaaaucugguagaaaaaugagaucuaaaaaaaaaaaaaaaaaaaaaaaaaaaaaaaaaaaaaaaaaaaaaaaaaaaaaaaaaaaaaaaaugcaucccccccccccccccccccccccccccccccaaaggcucuuuucagagccaccagaauu

SEQ ID NO: 683 - RNA, 2386 nt, Artificial Sequence
  mRNA product Design b-4 comprising derived and/or modified sequence from YFV__NC_002031.1__SSjev-prME (polyprotein: aa122-778) (opt3)
gggagagucccgcagucggcguccagcggcucugcuuguucgugugugugucguugcaggccuuauucaagcuuaccaugggcaagagaagcgccggguccaucauguggcuggcuucucucgcaguggucauugccugcgcgggagcugugacccuggucagaaagaacagguggcuccuucugaauguuacaagcgaggacuugggcaaaacuuucuccguggggacgggaaacugcaccacaaauaucuuagaagccaaguacuggugucccgauucuauggaguauaacugcccuaaucugucaccacgggaggaaccggacgauauugacuguuggugcuacgguguagaaaacgugcgcgucgcuuauggcaaaugugauagugcagggcgaagccguagauccaggcgggccauagaccuacccacucacgagaaucauggacucaagacccgccaggagaaauggaugacaggcagaaugggugaaaggcaacugcagaagaucgagcggugguuugugcgcaacccuuucuuugcgguuaccgcucuuacuauugccuaccugguggggucuaauaugacacagcgagucgugaucgcauugcucguacuggccguuggaccagcuuauucggcacacugcauuggcaucaccgauagagacuucauagaaggcgugcaugggggaacgugggucucagccacucuggagcaggauaagugugugaccgugauggcucccgacaaaccuagccucgauaucaguuuagagacagucgccauugacaggccagcggaaguucggaaggugugcuacaacgcaguacugacucacgugaaaaucaaugauaagugucccuccaccggugaggcccaucuugcugaagagaacgaaggcgacaaugccugcaaacguacauauucugaccgcggguggggaaacggcugugguuuguuugggaagggaagcauugucgcaugcgcuaaguuuaccugcgccaaauccaugucacuguucgagguggaucaaacgaagauccaguacguuauaagagcgcagcuacacgugggcgccaaacaggagaauuggaacacugacauuaagacacucaaauucgaugcacugaguggcagccaagaagucgaguuuaucggguacggaaaggcuacccuugaaugucaggugcagacugccguagacuucgguaacucuuauauugcugagauggaaacagaguccuggaucguugauaggcagugggcccaagaccugaccuugccuuggcagucaggcagcgggggaguguggcgggagaugcaccaucucgucgaauuugagccaccgcacgcagccacgauccgagugcuggcuuuaggcaaucaggaagguagucugaaaaccgcgcucacaggggcaaugcgcgucacuaaggauaccaacgacaauaaccuuuacaagcugcauggcggacacgugucuugcagaguuaaauuguccgcccuaacacugaagggcacuagcuauaaaauuuguaccgauaagauguucuuugugaaaaaucccacagacaccgggcacggaacuguagucaugcaagugaagguuucgaagggugcuccuugcaggauaccagugaucgucgccgaugaccucacggcagccauuaacaaaggcauccuggugacaguaaaucccauagcuucuaccaacgacgaugaggugcuuauugaaguuaauccuccauucggggacuccuacaucaucgucggacggggcgauucacgccugacuuaucaguggcauaaggaggguaguagcauugggaaauuguucacccagacaaugaagggcguggagagacucgccgugaugggagacaccgcaugggauuuuuccucugcgggcggguucuuuacuagcgucggaaaagguauccacacaguuuucggcucagcuuuucaggggcuguucggaggcuuaaacuggauuacgaaggugauaaugggugccgugcugaucuggguagggauuaauaccaggaacaugacuaugaguauguccaugauccuagucggcgugaucaugauguuucucagccugggaguuggcgcaugaggacuaguaauaaggaaacuguaugaaugucugugggcaggaagugaagagauccuucuguaaagguuuuuggaauuaugucugcugaauaauaaacuuuuuugaaauaauaaaucugguagaaaaaugagaucuaaaaaaaaaaaaaaaaaaaaaaaaaaaaaaaaaaaaaaaaaaaaaaaaaaaaaaaaaaaaaaaaugcaucccccccccccccccccccccccccccccccaaaggcucuuuucagagccaccagaauu

SEQ ID NO: 684 - RNA, 2434 nt, Artificial Sequence
  mRNA product Design b-4 comprising derived and/or modified sequence from YFV__NC_002031.1__X-SS-prME-XX (polyprotein: aa92-788) (opt4)
gggagagucccgcagucggcguccagcggcucugcuuguucgugugugugucguugcaggccuuauucaagcuuaccaugagaggccugagcagcagaaagagaagaagccacgacgugcugaccgugcaguuccugauccugggcaugcugcugaugaccggcggcgugacccuggugagaaagaacagauggcugcugcugaacgugaccagcgaggaccugggcaagaccuucagcgugggcaccggcaacugcaccaccaacauccuggaggccaaguacuggugccccgacagcauggaguacaacugccccaaccugagccccagagaggagcccgacgacaucgacugcuggugcuacggcguggagaacgugagaguggccuacggcaagugcgacagcgccggcagaagcagaagaagcagaagagccaucgaccugcccacccacgagaaccacggccugaagaccagacaggagaaguggaugaccggcagaaugggcgagagacagcugcagaagaucgagagaugguucgugagaaaccccuucuucgccgugaccgcccugaccaucgccuaccuggugggcagcaacaugacccagagaguggugaucgcccugcuggugcuggccgugggccccgccuacagcgcccacugcaucggcaucaccgacagagacuucaucgagggcgugcacggcggcaccugggugagcgccacccuggagcaggacaagugcgugaccgugauggcccccgacaagcccagccuggacaucagccuggagaccguggccaucgacagacccgccgaggugagaaaggugugcuacaacgccgugcugacccacgugaagaucaacgacaagugccccagcaccggcgaggcccaccuggccgaggagaacgagggcgacaacgccugcaagagaaccuacagcgacagaggcuggggcaacggcugcggccuguucggcaagggcagcaucguggccugcgccaaguucaccugcgccaagagcaugagccuguucgagguggaccagaccaagauccaguacgugaucagagcccagcugcacgugggcgccaagcaggagaacuggaacaccgacaucaagacccugaaguucgacgcccugagcggcagccaggagguggaguucaucggcuacggcaaggccacccuggagugccaggugcagaccgccguggacuucggcaacagcuacaucgccgagauggagaccgagagcuggaucguggacagacagugggcccaggaccugacccugcccuggcagagcggcagcggcggcguguggagagagaugcaccaccugguggaguucgagcccccccacgccgccaccaucagagugcuggcccugggcaaccaggagggcagccugaagaccgcccugaccggcgccaugagagugaccaaggacaccaacgacaacaaccuguacaagcugcacggcggccacgugagcugcagagugaagcugagcgcccugacccugaagggcaccagcuacaagaucugcaccgacaagauguucuucgugaagaaccccaccgacaccggccacggcaccguggugaugcaggugaaggugagcaagggcgcccccugcagaauccccgugaucguggccgacgaccugaccgccgccaucaacaagggcauccuggugaccgugaaccccaucgccagcaccaacgacgacgaggugcugaucgaggugaacccccccuucggcgacagcuacaucaucgugggcagaggcgacagcagacugaccuaccaguggcacaaggagggcagcagcaucggcaagcuguucacccagaccaugaagggcguggagagacuggccgugaugggcgacaccgccugggacuucagcagcgccggcggcuucuucaccagcgugggcaagggcauccacaccguguucggcagcgccuuccagggccuguucggcggccugaacuggaucaccaaggugaucaugggcgccgugcugaucugggugggcaucaacaccagaaacaugaccaugagcaugagcaugauccuggugggcgugaucaugauguuccugagccugggcgugggcgccgaccagggcugcgccaucaacuucggcaagugaggacuaguaauaaggaaacuguaugaaugucugugggcaggaagugaagagauccuucuguaaagguuuuuggaauuaugucugcugaauaauaaacuuuuuugaaauaauaaaucugguagaaaaaugagaucuaaaaaaaaaaaaaaaaaaaaaaaaaaaaaaaaaaaaaaaaaaaaaaaaaaaaaaaaaaaaaaaaugcaucccccccccccccccccccccccccccccccaaaggcucuuuucagagccaccagaauu

SEQ ID NO: 685 - RNA, 2371 nt, Artificial Sequence
  mRNA product Design b-4 comprising derived and/or modified sequence from YFV__NC_002031.1__SS-prME (polyprotein: M,aa104-778) (opt4)
gggagagucccgcagucggcguccagcggcucugcuuguucgugugugugucguugcaggccuuauucaagcuuaccauggacgugcugaccgugcaguuccugauccugggcaugcugcugaugaccggcggcgugacccuggugagaaagaacagauggcugcugcugaacgugaccagcgaggaccugggcaagaccuucagcgugggcaccggcaacugcaccaccaacauccuggaggccaaguacuggugccccgacagcauggaguacaacugccccaaccugagccccagagaggagcccgacgacaucgacugcuggugcuacggcguggagaacgugagaguggccuacggcaagugcgacagcgccggcagaagcagaagaagcagaagagccaucgaccugcccacccacgagaaccacggccugaagaccagacaggagaaguggaugaccggcagaaugggcgagagacagcugcagaagaucgagagaugguucgugagaaaccccuucuucgccgugaccgcccugaccaucgccuaccuggugggcagcaacaugacccagagaguggugaucgcccugcuggugcuggccgugggccccgccuacagcgcccacugcaucggcaucaccgacagagacuucaucgagggcgugcacggcggcaccugggugagcgccacccuggagcaggacaagugcgugaccgugauggcccccgacaagcccagccuggacaucagccuggagaccguggccaucgacagacccgccgaggugagaaaggugugcuacaacgccgugcugacccacgugaagaucaacgacaagugccccagcaccggcgaggcccaccuggccgaggagaacgagggcgacaacgccugcaagagaaccuacagcgacagaggcuggggcaacggcugcggccuguucggcaagggcagcaucguggccugcgccaaguucaccugcgccaagagcaugagccuguucgagguggaccagaccaagauccaguacgugaucagagcccagcugcacgugggcgccaagcaggagaacuggaacaccgacaucaagacccugaaguucgacgcccugagcggcagccaggagguggaguucaucggcuacggcaaggccacccuggagugccaggugcagaccgccguggacuucggcaacagcuacaucgccgagauggagaccgagagcuggaucguggacagacagugggcccaggaccugacccugcccuggcagagcggcagcggcggcguguggagagagaugcaccaccugguggaguucgagcccccccacgccgccaccaucagagugcuggcccugggcaaccaggagggcagccugaagaccgcccugaccggcgccaugagagugaccaaggacaccaacgacaacaaccuguacaagcugcacggcggccacgugagcugcagagugaagcugagcgcccugacccugaagggcaccagcuacaagaucugcaccgacaagauguucuucgugaagaaccccaccgacaccggccacggcaccguggugaugcaggugaaggugagcaagggcgcccccugcagaauccccgugaucguggccgacgaccugaccgccgccaucaacaagggcauccuggugaccgugaaccccaucgccagcaccaacgacgacgaggugcugaucgaggugaacccccccuucggcgacagcuacaucaucgugggcagaggcgacagcagacugaccuaccaguggcacaaggagggcagcagcaucggcaagcuguucacccagaccaugaagggcguggagagacuggccgugaugggcgacaccgccugggacuucagcagcgccggcggcuucuucaccagcgugggcaagggcauccacaccguguucggcagcgccuuccagggccuguucggcggccugaacuggaucaccaaggugaucaugggcgccgugcugaucugggugggcaucaacaccagaaacaugaccaugagcaugagcaugauccuggugggcgugaucaugauguuccugagccugggcgugggcgccugaggacuaguaauaaggaaacuguaugaaugucugugggcaggaagugaagagauccuucuguaaagguuuuuggaauuaugucugcugaauaauaaacuuuuuugaaauaauaaaucugguagaaaaaugagaucuaaaaaaaaaaaaaaaaaaaaaaaaaaaaaaaaaaaaaaaaaaaaaaaaaaaaaaaaaaaaaaaaugcaucccccccccccccccccccccccccccccccaaaggcucuuuucagagccaccagaauu

SEQ ID NO: 686 - RNA, 2398 nt, Artificial Sequence
  mRNA product Design b-4 comprising derived and/or modified sequence from YFV__NC_002031.1__SSIgE-prME-XX (polyprotein: aa122-788) (opt4)
gggagagucccgcagucggcguccagcggcucugcuuguucgugugugugucguugcaggccuuauucaagcuuaccauggacuggaccuggauccuguuccugguggccgccgccaccagagugcacagcgugacccuggugagaaagaacagauggcugcugcugaacgugaccagcgaggaccugggcaagaccuucagcgugggcaccggcaacugcaccaccaacauccuggaggccaaguacuggugccccgacagcauggaguacaacugccccaaccugagccccagagaggagcccgacgacaucgacugcuggugcuacggcguggagaacgugagaguggccuacggcaagugcgacagcgccggcagaagcagaagaagcagaagagccaucgaccugcccacccacgagaaccacggccugaagaccagacaggagaaguggaugaccggcagaaugggcgagagacagcugcagaagaucgagagaugguucgugagaaaccccuucuucgccgugaccgcccugaccaucgccuaccuggugggcagcaacaugacccagagaguggugaucgcccugcuggugcuggccgugggccccgccuacagcgcccacugcaucggcaucaccgacagagacuucaucgagggcgugcacggcggcaccugggugagcgccacccuggagcaggacaagugcgugaccgugauggcccccgacaagcccagccuggacaucagccuggagaccguggccaucgacagacccgccgaggugagaaaggugugcuacaacgccgugcugacccacgugaagaucaacgacaagugccccagcaccggcgaggcccaccuggccgaggagaacgagggcgacaacgccugcaagagaaccuacagcgacagaggcuggggcaacggcugcggccuguucggcaagggcagcaucguggccugcgccaaguucaccugcgccaagagcaugagccuguucgagguggaccagaccaagauccaguacgugaucagagcccagcugcacgugggcgccaagcaggagaacuggaacaccgacaucaagacccugaaguucgacgcccugagcggcagccaggagguggaguucaucggcuacggcaaggccacccuggagugccaggugcagaccgccguggacuucggcaacagcuacaucgccgagauggagaccgagagcuggaucguggacagacagugggcccaggaccugacccugcccuggcagagcggcagcggcggcguguggagagagaugcaccaccugguggaguucgagcccccccacgccgccaccaucagagugcuggcccugggcaaccaggagggcagccugaagaccgcccugaccggcgccaugagagugaccaaggacaccaacgacaacaaccuguacaagcugcacggcggccacgugagcugcagagugaagcugagcgcccugacccugaagggcaccagcuacaagaucugcaccgacaagauguucuucgugaagaaccccaccgacaccggccacggcaccguggugaugcaggugaaggugagcaagggcgcccccugcagaauccccgugaucguggccgacgaccugaccgccgccaucaacaagggcauccuggugaccgugaaccccaucgccagcaccaacgacgacgaggugcugaucgaggugaacccccccuucggcgacagcuacaucaucgugggcagaggcgacagcagacugaccuaccaguggcacaaggagggcagcagcaucggcaagcuguucacccagaccaugaagggcguggagagacuggccgugaugggcgacaccgccugggacuucagcagcgccggcggcuucuucaccagcgugggcaagggcauccacaccguguucggcagcgccuuccagggccuguucggcggccugaacuggaucaccaaggugaucaugggcgccgugcugaucugggugggcaucaacaccagaaacaugaccaugagcaugagcaugauccuggugggcgugaucaugauguuccugagccugggcgugggcgccgaccagggcugcgccaucaacuucggcaagugaggacuaguaauaaggaaacuguaugaaugucugugggcaggaagugaagagauccuucuguaaagguuuuuggaauuaugucugcugaauaauaaacuuuuuugaaauaauaaaucugguagaaaaaugagaucuaaaaaaaaaaaaaaaaaaaaaaaaaaaaaaaaaaaaaaaaaaaaaaaaaaaaaaaaaaaaaaaaugcaucccccccccccccccccccccccccccccccaaaggcucuuuucagagccaccagaauu

SEQ ID NO: 687 - RNA, 2368 nt, Artificial Sequence
  mRNA product Design b-4 comprising derived and/or modified sequence from YFV__NC_002031.1__SSIgE-prME (polyprotein: aa122-778) (opt4)
gggagagucccgcagucggcguccagcggcucugcuuguucgugugugugucguugcaggccuuauucaagcuuaccauggacuggaccuggauccuguuccugguggccgccgccaccagagugcacagcgugacccuggugagaaagaacagauggcugcugcugaacgugaccagcgaggaccugggcaagaccuucagcgugggcaccggcaacugcaccaccaacauccuggaggccaaguacuggugccccgacagcauggaguacaacugccccaaccugagccccagagaggagcccgacgacaucgacugcuggugcuacggcguggagaacgugagaguggccuacggcaagugcgacagcgccggcagaagcagaagaagcagaagagccaucgaccugcccacccacgagaaccacggccugaagaccagacaggagaaguggaugaccggcagaaugggcgagagacagcugcagaagaucgagagaugguucgugagaaaccccuucuucgccgugaccgcccugaccaucgccuaccuggugggcagcaacaugacccagagaguggugaucgcccugcuggugcuggccgugggccccgccuacagcgcccacugcaucggcaucaccgacagagacuucaucgagggcgugcacggcggcaccugggugagcgccacccuggagcaggacaagugcgugaccgugauggcccccgacaagcccagccuggacaucagccuggagaccguggccaucgacagacccgccgaggugagaaaggugugcuacaacgccgugcugacccacgugaagaucaacgacaagugccccagcaccggcgaggcccaccuggccgaggagaacgagggcgacaacgccugcaagagaaccuacagcgacagaggcuggggcaacggcugcggccuguucggcaagggcagcaucguggccugcgccaaguucaccugcgccaagagcaugagccuguucgagguggaccagaccaagauccaguacgugaucagagcccagcugcacgugggcgccaagcaggagaacuggaacaccgacaucaagacccugaaguucgacgcccugagcggcagccaggagguggaguucaucggcuacggcaaggccacccuggagugccaggugcagaccgccguggacuucggcaacagcuacaucgccgagauggagaccgagagcuggaucguggacagacagugggcccaggaccugacccugcccuggcagagcggcagcggcggcguguggagagagaugcaccaccugguggaguucgagcccccccacgccgccaccaucagagugcuggcccugggcaaccaggagggcagccugaagaccgcccugaccggcgccaugagagugaccaaggacaccaacgacaacaaccuguacaagcugcacggcggccacgugagcugcagagugaagcugagcgcccugacccugaagggcaccagcuacaagaucugcaccgacaagauguucuucgugaagaaccccaccgacaccggccacggcaccguggugaugcaggugaaggugagcaagggcgcccccugcagaauccccgugaucguggccgacgaccugaccgccgccaucaacaagggcauccuggugaccgugaaccccaucgccagcaccaacgacgacgaggugcugaucgaggugaacccccccuucggcgacagcuacaucaucgugggcagaggcgacagcagacugaccuaccaguggcacaaggagggcagcagcaucggcaagcuguucacccagaccaugaagggcguggagagacuggccgugaugggcgacaccgccugggacuucagcagcgccggcggcuucuucaccagcgugggcaagggcauccacaccguguucggcagcgccuuccagggccuguucggcggccugaacuggaucaccaaggugaucaugggcgccgugcugaucugggugggcaucaacaccagaaacaugaccaugagcaugagcaugauccuggugggcgugaucaugauguuccugagccugggcgugggcgccugaggacuaguaauaaggaaacuguaugaaugucugugggcaggaagugaagagauccuucuguaaagguuuuuggaauuaugucugcugaauaauaaacuuuuuugaaauaauaaaucugguagaaaaaugagaucuaaaaaaaaaaaaaaaaaaaaaaaaaaaaaaaaaaaaaaaaaaaaaaaaaaaaaaaaaaaaaaaaugcaucccccccccccccccccccccccccccccccaaaggcucuuuucagagccaccagaauu

SEQ ID NO: 688 - RNA, 2416 nt, Artificial Sequence
  mRNA product Design b-4 comprising derived and/or modified sequence from YFV__NC_002031.1__SSjev-prME-XX (polyprotein: aa122-788) (opt4)
gggagagucccgcagucggcguccagcggcucugcuuguucgugugugugucguugcaggccuuauucaagcuuaccaugggcaagagaagcgccggcagcaucauguggcuggccagccuggccguggugaucgccugcgccggcgccgugacccuggugagaaagaacagauggcugcugcugaacgugaccagcgaggaccugggcaagaccuucagcgugggcaccggcaacugcaccaccaacauccuggaggccaaguacuggugccccgacagcauggaguacaacugccccaaccugagccccagagaggagcccgacgacaucgacugcuggugcuacggcguggagaacgugagaguggccuacggcaagugcgacagcgccggcagaagcagaagaagcagaagagccaucgaccugcccacccacgagaaccacggccugaagaccagacaggagaaguggaugaccggcagaaugggcgagagacagcugcagaagaucgagagaugguucgugagaaaccccuucuucgccgugaccgcccugaccaucgccuaccuggugggcagcaacaugacccagagaguggugaucgcccugcuggugcuggccgugggccccgccuacagcgcccacugcaucggcaucaccgacagagacuucaucgagggcgugcacggcggcaccugggugagcgccacccuggagcaggacaagugcgugaccgugauggcccccgacaagcccagccuggacaucagccuggagaccguggccaucgacagacccgccgaggugagaaaggugugcuacaacgccgugcugacccacgugaagaucaacgacaagugccccagcaccggcgaggcccaccuggccgaggagaacgagggcgacaacgccugcaagagaaccuacagcgacagaggcuggggcaacggcugcggccuguucggcaagggcagcaucguggccugcgccaaguucaccugcgccaagagcaugagccuguucgagguggaccagaccaagauccaguacgugaucagagcccagcugcacgugggcgccaagcaggagaacuggaacaccgacaucaagacccugaaguucgacgcccugagcggcagccaggagguggaguucaucggcuacggcaaggccacccuggagugccaggugcagaccgccguggacuucggcaacagcuacaucgccgagauggagaccgagagcuggaucguggacagacagugggcccaggaccugacccugcccuggcagagcggcagcggcggcguguggagagagaugcaccaccugguggaguucgagcccccccacgccgccaccaucagagugcuggcccugggcaaccaggagggcagccugaagaccgcccugaccggcgccaugagagugaccaaggacaccaacgacaacaaccuguacaagcugcacggcggccacgugagcugcagagugaagcugagcgcccugacccugaagggcaccagcuacaagaucugcaccgacaagauguucuucgugaagaaccccaccgacaccggccacggcaccguggugaugcaggugaaggugagcaagggcgcccccugcagaauccccgugaucguggccgacgaccugaccgccgccaucaacaagggcauccuggugaccgugaaccccaucgccagcaccaacgacgacgaggugcugaucgaggugaacccccccuucggcgacagcuacaucaucgugggcagaggcgacagcagacugaccuaccaguggcacaaggagggcagcagcaucggcaagcuguucacccagaccaugaagggcguggagagacuggccgugaugggcgacaccgccugggacuucagcagcgccggcggcuucuucaccagcgugggcaagggcauccacaccguguucggcagcgccuuccagggccuguucggcggccugaacuggaucaccaaggugaucaugggcgccgugcugaucugggugggcaucaacaccagaaacaugaccaugagcaugagcaugauccuggugggcgugaucaugauguuccugagccugggcgugggcgccgaccagggcugcgccaucaacuucggcaagugaggacuaguaauaaggaaacuguaugaaugucugugggcaggaagugaagagauccuucuguaaagguuuuuggaauuaugucugcugaauaauaaacuuuuuugaaauaauaaaucugguagaaaaaugagaucuaaaaaaaaaaaaaaaaaaaaaaaaaaaaaaaaaaaaaaaaaaaaaaaaaaaaaaaaaaaaaaaaugcaucccccccccccccccccccccccccccccccaaaggcucuuuucagagccaccagaauu

SEQ ID NO: 689 - RNA, 2386 nt, Artificial Sequence
  mRNA product Design b-4 comprising derived and/or modified sequence from YFV__NC_002031.1__SSjev-prME (polyprotein: aa122-778) (opt4)
gggagagucccgcagucggcguccagcggcucugcuuguucgugugugugucguugcaggccuuauucaagcuuaccaugggcaagagaagcgccggcagcaucauguggcuggccagccuggccguggugaucgccugcgccggcgccgugacccuggugagaaagaacagauggcugcugcugaacgugaccagcgaggaccugggcaagaccuucagcgugggcaccggcaacugcaccaccaacauccuggaggccaaguacuggugccccgacagcauggaguacaacugccccaaccugagccccagagaggagcccgacgacaucgacugcuggugcuacggcguggagaacgugagaguggccuacggcaagugcgacagcgccggcagaagcagaagaagcagaagagccaucgaccugcccacccacgagaaccacggccugaagaccagacaggagaaguggaugaccggcagaaugggcgagagacagcugcagaagaucgagagaugguucgugagaaaccccuucuucgccgugaccgcccugaccaucgccuaccuggugggcagcaacaugacccagagaguggugaucgcccugcuggugcuggccgugggccccgccuacagcgcccacugcaucggcaucaccgacagagacuucaucgagggcgugcacggcggcaccugggugagcgccacccuggagcaggacaagugcgugaccgugauggcccccgacaagcccagccuggacaucagccuggagaccguggccaucgacagacccgccgaggugagaaaggugugcuacaacgccgugcugacccacgugaagaucaacgacaagugccccagcaccggcgaggcccaccuggccgaggagaacgagggcgacaacgccugcaagagaaccuacagcgacagaggcuggggcaacggcugcggccuguucggcaagggcagcaucguggccugcgccaaguucaccugcgccaagagcaugagccuguucgagguggaccagaccaagauccaguacgugaucagagcccagcugcacgugggcgccaagcaggagaacuggaacaccgacaucaagacccugaaguucgacgcccugagcggcagccaggagguggaguucaucggcuacggcaaggccacccuggagugccaggugcagaccgccguggacuucggcaacagcuacaucgccgagauggagaccgagagcuggaucguggacagacagugggcccaggaccugacccugcccuggcagagcggcagcggcggcguguggagagagaugcaccaccugguggaguucgagcccccccacgccgccaccaucagagugcuggcccugggcaaccaggagggcagccugaagaccgcccugaccggcgccaugagagugaccaaggacaccaacgacaacaaccuguacaagcugcacggcggccacgugagcugcagagugaagcugagcgcccugacccugaagggcaccagcuacaagaucugcaccgacaagauguucuucgugaagaaccccaccgacaccggccacggcaccguggugaugcaggugaaggugagcaagggcgcccccugcagaauccccgugaucguggccgacgaccugaccgccgccaucaacaagggcauccuggugaccgugaaccccaucgccagcaccaacgacgacgaggugcugaucgaggugaacccccccuucggcgacagcuacaucaucgugggcagaggcgacagcagacugaccuaccaguggcacaaggagggcagcagcaucggcaagcuguucacccagaccaugaagggcguggagagacuggccgugaugggcgacaccgccugggacuucagcagcgccggcggcuucuucaccagcgugggcaagggcauccacaccguguucggcagcgccuuccagggccuguucggcggccugaacuggaucaccaaggugaucaugggcgccgugcugaucugggugggcaucaacaccagaaacaugaccaugagcaugagcaugauccuggugggcgugaucaugauguuccugagccugggcgugggcgccugaggacuaguaauaaggaaacuguaugaaugucugugggcaggaagugaagagauccuucuguaaagguuuuuggaauuaugucugcugaauaauaaacuuuuuugaaauaauaaaucugguagaaaaaugagaucuaaaaaaaaaaaaaaaaaaaaaaaaaaaaaaaaaaaaaaaaaaaaaaaaaaaaaaaaaaaaaaaaugcaucccccccccccccccccccccccccccccccaaaggcucuuuucagagccaccagaauu

SEQ ID NO: 690 - RNA, 2434 nt, Artificial Sequence
  mRNA product Design b-4 comprising derived and/or modified sequence from YFV__NC_002031.1__X-SS-prME-XX (polyprotein: aa92-788) (opt5)
gggagagucccgcagucggcguccagcggcucugcuuguucgugugugugucguugcaggccuuauucaagcuuaccaugagaggccugagcucccggaagcgcagaucucacgacgugcucaccguccaguuccugauccuugggaugcugcucaugacaggaggcguuacgcuggugcggaaaaaccgcuggcuucugcucaaugugaccagcgaggaucuggggaagacauuuuccgucggaaccggcaacugcacaaccaauauucuggaagccaaauacuggugucccgacucuauggaguauaacugcccuaaucucagcccgagagaagaacccgaugacaucgauuguuggugcuacgggguggaaaacguucggguggcuuauggaaagugugacuccgccggccgcucuagacggagccgcagagcgauugaucugccuacacaugagaaucacggccuuaaaacccggcaagagaaguggaugacggggcgcaugggagaaagacagcugcagaagaucgagcggugguucguccgcaaccccuuuuucgcugugaccgcccucacaauugccuaccugguuggcuccaauaugacccagagaguggucaucgcccuucuggugcucgcuguggggccugcuuauagcgcccauugcaucggaauuacagaccgggauuuuaucgaaggcguccacgggggaaccuggguuucugcgacgcuggagcaagacaaaugugugacagugauggcccccgauaagccuucccuggacauuagccucgagaccgucgcuaucgauagaccggccgaagugcgcaaaguuugcuacaacgcugugcugacacaugucaagauuaaugacaaaugucccucuaccggcgaggcccaccuugcggaagagaacgaaggcgacaaugccugcaagcggaccuauuccgauagaggguggggaaacggcugugggcuguucggaaagggcagcaucguggcuugcgccaaauuuacaugcgcuaagucuaugucccucuucgagguugaccagacgaaaauucaguacgugauccgcgcccagcugcacgucggggccaagcaagagaauuggaacaccgauaucaaaacacuuaaguuugacgcucugagcggaucccaggaaguggaguucauuggcuacggcaaagcgacccucgaaugucagguccagacagccguggauuuugggaacucuuauaucgcugagauggaaaccgagagcuggauuguugaccggcaaugggcccaggaucugacgcugccuuggcaguccggaagcggcgggguguggagagagaugcaucaccucgucgaguucgagcccccucaugccgcuacaauccgcgugcuggcccuuggaaaucaagaaggcucucugaagaccgcgcucaccggggcuaugcggguuacaaaggacaccaacgauaauaaccuguacaaacuucacggcggacacguguccugcagagucaagcugagcgcccucacacugaaaggcacgucuuauaagauuuguaccgacaaaauguuuuucgugaagaaucccacagauaccgggcauggaacagugguuaugcaggucaaggugagcaaaggcgccccgugccgcaucccugugaucgucgcugacgaccugaccgccgcuauuaacaaggggauccucgugacgguuaaucccauugccuccaccaacgaugacgaggugcugaucgaagucaauccucccuucggagauucuuacauuaucgugggccggggagacagcagacuuacauaucaguggcacaaagagggcuccagcaucggaaagcuguuuacccagacaaugaaaggcguugagcgccucgcggugaugggggauaccgccugggacuucucuuccgcuggaggcuuuuucacgagcgucgggaaggggauucauacaguguuuggcucugccuuccaagggcuguuuggcggacugaacuggaucaccaagguuauuaugggcgcugugcuuaucugggucgggauuaauacacggaacaugaccauguccaugagcaugauccucgugggagugauuaugauguuccugucccugggcgucggggccgaucagggaugugcgaucaauuuuggcaaaugaggacuaguaauaaggaaacuguaugaaugucugugggcaggaagugaagagauccuucuguaaagguuuuuggaauuaugucugcugaauaauaaacuuuuuugaaauaauaaaucugguagaaaaaugagaucuaaaaaaaaaaaaaaaaaaaaaaaaaaaaaaaaaaaaaaaaaaaaaaaaaaaaaaaaaaaaaaaaugcaucccccccccccccccccccccccccccccccaaaggcucuuuucagagccaccagaauu

SEQ ID NO: 691 - RNA, 2371 nt, Artificial Sequence
  mRNA product Design b-4 comprising derived and/or modified sequence from YFV__NC_002031.1__SS-prME (polyprotein: M,aa104-778) (opt5)
gggagagucccgcagucggcguccagcggcucugcuuguucgugugugugucguugcaggccuuauucaagcuuaccauggacgugcugaccguccaguuccucauccugggcaugcuucugaugacagggggaguuacgcucgugagaaagaaccgguggcugcuucugaaugugaccagcgaggaucucggcaaaacauuuuccgucgggaccggaaacugcacaaccaauauucuggaagccaaguacuggugucccgacucuauggaguauaacugcccuaaucugagcccgcgcgaagaacccgaugacaucgauuguuggugcuacggcguggaaaacguuagaguggcuuaugggaaaugugacuccgccggacggucucgcagaagccggcgcgcgauugaucucccuacacacgagaaucauggccugaagaccagacaagagaaauggaugacgggccggaugggggaacgccagcuucagaagaucgagagaugguucguccggaaccccuuuuucgcugugaccgcccugacaauugccuaccucguuggauccaauaugacccagcgcguggucaucgcucugcuugugcuggccgugggcccugcuuauucugcccacugcaucgggauuacagacagagauuuuaucgaaggaguccauggcgggaccuggguuagcgcgacgcucgagcaagacaagugugugacagugauggcccccgauaaaccuucccuggacauuagccuggagaccgucgcuaucgaucggccggccgaagugcgcaagguuugcuacaacgcugugcucacacacgucaaaauuaaugacaagugucccucuaccggagaggcccaucuggcggaagagaacgaaggcgacaaugccugcaaaagaaccuauuccgaucggggcugggggaacggauguggccuuuucgggaagggaagcaucguggcuugcgccaaguuuacaugcgcuaaaucuaugucccuguucgagguugaccagacgaagauucaguacgugaucagagcccagcuccacgucggcgccaaacaagagaauuggaacaccgauaucaagacacugaaauuugacgcucuuagcgggucucaggaaguggaguucauuggauacggcaaggcgacccuggaaugucagguccagacagccguggauuuuggcaacuccuauaucgcugagauggaaaccgagagcuggauuguugaccgccaaugggcccaggaucucacgcugccuuggcaguccgggucuggaggcguguggcgggagaugcaccaucuggucgaguucgagcccccucacgccgcuacaaucagagugcucgcccuggggaaucaagaaggaagccuuaaaaccgcgcugaccggcgcuaugcgcguuacaaaggacaccaacgauaauaaccucuacaagcugcaugggggccacguguccugccgggucaaacuuagcgcccugacacucaagggaacgucuuauaaaauuuguaccgacaagauguuuuucgugaaaaaucccacagauaccggccacgggacagugguuaugcaggucaagguguccaagggagccccgugcagaaucccugugaucgucgcugacgaccugaccgccgcuauuaacaaaggcauccuggugacgguuaaucccauugccagcaccaacgaugacgaggugcucaucgaagucaauccucccuucggggauucuuacauuaucgugggacgcggcgacagccggcugacauaucaguggcauaaggagggguccucuaucggcaaacuuuuuacccagacaaugaagggaguugagagacuggcggugaugggcgauaccgccugggacuucagcuccgcugggggauuuuucacgagcgucggcaaagggauucacacaguguuuggaucugccuuccaaggccucuuugggggccugaacuggaucaccaagguuauuaugggagcugugcugaucugggucggcauuaauacacgcaacaugaccauguccaugagcaugauccuugugggggugauuaugauguuccucucucugggagucggcgccugaggacuaguaauaaggaaacuguaugaaugucugugggcaggaagugaagagauccuucuguaaagguuuuuggaauuaugucugcugaauaauaaacuuuuuugaaauaauaaaucugguagaaaaaugagaucuaaaaaaaaaaaaaaaaaaaaaaaaaaaaaaaaaaaaaaaaaaaaaaaaaaaaaaaaaaaaaaaaugcaucccccccccccccccccccccccccccccccaaaggcucuuuucagagccaccagaauu

SEQ ID NO: 692 - RNA, 2398 nt, Artificial Sequence
  mRNA product Design b-4 comprising derived and/or modified sequence from YFV__NC_002031.1__SSIgE-prME-XX (polyprotein: aa122-788) (opt5)
gggagagucccgcagucggcguccagcggcucugcuuguucgugugugugucguugcaggccuuauucaagcuuaccauggacuggaccuggauccuguuccucguggccgcugccacaagaguccacagcguuacgcuggugcggaaaaaccgcuggcuucugcucaaugugaccagcgaggaucuggggaagacauuuuccgucggaaccggcaacugcacaaccaauauucuggaagccaaauacuggugucccgacucuauggaguauaacugcccuaaucucagcccgagagaagaacccgaugacaucgauuguuggugcuacgggguggaaaacguucggguggcuuauggaaagugugacuccgccggccgcucuagacggagccgcagagcgauugaucugccuacacaugagaaucacggccuuaaaacccggcaagagaaguggaugacggggcgcaugggagaaagacagcugcagaagaucgagcggugguucguccgcaaccccuuuuucgcugugaccgcccucacaauugccuaccugguuggcuccaauaugacccagagaguggucaucgcccuucuggugcucgcuguggggccugcuuauagcgcccauugcaucggaauuacagaccgggauuuuaucgaaggcguccacgggggaaccuggguuucugcgacgcuggagcaagacaaaugugugacagugauggcccccgauaagccuucccuggacauuagccucgagaccgucgcuaucgauagaccggccgaagugcgcaaaguuugcuacaacgcugugcugacacaugucaagauuaaugacaaaugucccucuaccggcgaggcccaccuugcggaagagaacgaaggcgacaaugccugcaagcggaccuauuccgauagaggguggggaaacggcugugggcuguucggaaagggcagcaucguggcuugcgccaaauuuacaugcgcuaagucuaugucccucuucgagguugaccagacgaaaauucaguacgugauccgcgcccagcugcacgucggggccaagcaagagaauuggaacaccgauaucaaaacacuuaaguuugacgcucugagcggaucccaggaaguggaguucauuggcuacggcaaagcgacccucgaaugucagguccagacagccguggauuuugggaacucuuauaucgcugagauggaaaccgagagcuggauuguugaccggcaaugggcccaggaucugacgcugccuuggcaguccggaagcggcgggguguggagagagaugcaucaccucgucgaguucgagcccccucaugccgcuacaauccgcgugcuggcccuuggaaaucaagaaggcucucugaagaccgcgcucaccggggcuaugcggguuacaaaggacaccaacgauaauaaccuguacaaacuucacggcggacacguguccugcagagucaagcugagcgcccucacacugaaaggcacgucuuauaagauuuguaccgacaaaauguuuuucgugaagaaucccacagauaccgggcauggaacagugguuaugcaggucaaggugagcaaaggcgccccgugccgcaucccugugaucgucgcugacgaccugaccgccgcuauuaacaaggggauccucgugacgguuaaucccauugccuccaccaacgaugacgaggugcugaucgaagucaauccucccuucggagauucuuacauuaucgugggccggggagacagcagacuuacauaucaguggcacaaagagggcuccagcaucggaaagcuguuuacccagacaaugaaaggcguugagcgccucgcggugaugggggauaccgccugggacuucucuuccgcuggaggcuuuuucacgagcgucgggaaggggauucauacaguguuuggcucugccuuccaagggcuguuuggcggacugaacuggaucaccaagguuauuaugggcgcugugcuuaucugggucgggauuaauacacggaacaugaccauguccaugagcaugauccucgugggagugauuaugauguuccugucccugggcgucggggccgaucagggaugugcgaucaauuuuggcaaaugaggacuaguaauaaggaaacuguaugaaugucugugggcaggaagugaagagauccuucuguaaagguuuuuggaauuaugucugcugaauaauaaacuuuuuugaaauaauaaaucugguagaaaaaugagaucuaaaaaaaaaaaaaaaaaaaaaaaaaaaaaaaaaaaaaaaaaaaaaaaaaaaaaaaaaaaaaaaaugcaucccccccccccccccccccccccccccccccaaaggcucuuuucagagccaccagaauu

SEQ ID NO: 693 - RNA, 2368 nt, Artificial Sequence
  mRNA product Design b-4 comprising derived and/or modified sequence from YFV__NC_002031.1__SSIgE-prME (polyprotein: aa122-778) (opt5)
gggagagucccgcagucggcguccagcggcucugcuuguucgugugugugucguugcaggccuuauucaagcuuaccauggacuggaccuggauccuguuccucguggccgcugccacaagaguccacagcgugacccuggucagaaagaaccgguggcuccugcuuaauguuacaagcgaggaccugggcaaaacguucuccguggggaccggaaacugcacaaccaauauccucgaagccaaguacuggugucccgauucuauggaguauaacugcccuaaucugagcccgcgcgaggaacccgacgauauugacuguuggugcuacggcguggaaaacgucagaguggcuuaugggaaaugugauuccgccggacggucucgcagaagccggcgcgcgaucgaccuuccuacacacgagaaucauggccugaagaccagacaggagaaauggaugacagggcggaugggagaacgccaacuccagaagauugagagaugguuuguucggaaccccuucuuugcugugaccgcccugacgaucgccuaccuggucggcuccaauaugacccagcgcgugguuauugcucuccuggugcuugccgucggcccugcuuauucugcccacugcaucgggaucacagauagagacuucauugaaggagugcauggcgggaccugggugagcgcgacacuggagcaggauaagugugucaccguuauggcccccgacaaaccuucccucgauaucagccuggagacgguggcuauugaccggccggccgaagugcgcaaggucugcuacaacgcugugcuuacacacguuaaaaucaaugauaagugucccucuaccggagaggcccaucuggcggaagagaacgaaggcgacaaugccugcaaaagaacauauuccgaccggggguggggaaacggcuguggccucuuugggaagggaagcauuguggcuugcgccaaguuuaccugcgcuaaaucuaugucccuguucgaggucgaucaaaccaagauccaguacgugauuagagcccagcugcacguuggcgccaaacaggagaauuggaacacagacaucaagacgcucaaauucgaugcucugagcgggucucaagaaguggaguuuaucggauacggcaaggcgacccuugaaugucagguccagacagccguggacuucgggaacuccuauauugcugagauggaaaccgagagcuggaucgucgaucgccagugggcccaagaccugacacucccuuggcaguccggaucuggcggcguguggcgggagaugcaccaucugguugaauuugagcccccucacgccgcuaccauuagagugcuugcccuggggaaucaggaaggaagccucaaaacggcgcugacaggcgcuaugcgcgucaccaaggauaccaacgacaauaaccuguacaagcuccaugggggacacguguccugccggguuaaacugagcgcccuuacacugaagggcaccucuuauaaaaucuguacagauaagauguucuuugugaaaaaucccacggacaccgggcacggcacagucgugaugcaagugaagguuuccaagggagccccgugccgcauuccugucaucguggcugaugaccucaccgccgcuaucaacaaaggcauucuggugacagucaaucccaucgccagcaccaacgacgaugaggugcuuauugaaguuaauccucccuucggggacucuuacaucauugugggaagaggcgauagccggcugacguaucaguggcauaaggagggguccucuaucggaaaacucuucacccagacaaugaagggcgucgagagacuggcggugaugggggacaccgccugggauuuuagcuccgcuggcggauucuuuacaagcguuggcaaagggauccacaccguguucggaucugccuuucagggccuguucgggggacucaacuggauuacgaaggucaucaugggcgcugugcugauuuggguugggaucaauacacgcaacaugaccauguccaugagcaugauucuugugggcgucaucaugauguuucugucucucggagugggcgccugaggacuaguaauaaggaaacuguaugaaugucugugggcaggaagugaagagauccuucuguaaagguuuuuggaauuaugucugcugaauaauaaacuuuuuugaaauaauaaaucugguagaaaaaugagaucuaaaaaaaaaaaaaaaaaaaaaaaaaaaaaaaaaaaaaaaaaaaaaaaaaaaaaaaaaaaaaaaaugcaucccccccccccccccccccccccccccccccaaaggcucuuuucagagccaccagaauu

SEQ ID NO: 694 - RNA, 2416 nt, Artificial Sequence
  mRNA product Design b-4 comprising derived and/or modified sequence from YFV__NC_002031.1__SSjev-prME-XX (polyprotein: aa122-788) (opt5)
gggagagucccgcagucggcguccagcggcucugcuuguucgugugugugucguugcaggccuuauucaagcuuaccaugggcaagagaagcgccggguccaucauguggcuggcuucucucgccguggucauugcgugcgcuggagccguuacgcuggugcggaaaaaccgcuggcuucugcucaaugugaccagcgaggaucuggggaagacauuuuccgucggaaccggcaacugcacaaccaauauucuggaagccaaauacuggugucccgacucuauggaguauaacugcccuaaucucagcccgagagaagaacccgaugacaucgauuguuggugcuacgggguggaaaacguucggguggcuuauggaaagugugacuccgccggccgcucuagacggagccgcagagcgauugaucugccuacacaugagaaucacggccuuaaaacccggcaagagaaguggaugacggggcgcaugggagaaagacagcugcagaagaucgagcggugguucguccgcaaccccuuuuucgcugugaccgcccucacaauugccuaccugguuggcuccaauaugacccagagaguggucaucgcccuucuggugcucgcuguggggccugcuuauagcgcccauugcaucggaauuacagaccgggauuuuaucgaaggcguccacgggggaaccuggguuucugcgacgcuggagcaagacaaaugugugacagugauggcccccgauaagccuucccuggacauuagccucgagaccgucgcuaucgauagaccggccgaagugcgcaaaguuugcuacaacgcugugcugacacaugucaagauuaaugacaaaugucccucuaccggcgaggcccaccuugcggaagagaacgaaggcgacaaugccugcaagcggaccuauuccgauagaggguggggaaacggcugugggcuguucggaaagggcagcaucguggcuugcgccaaauuuacaugcgcuaagucuaugucccucuucgagguugaccagacgaaaauucaguacgugauccgcgcccagcugcacgucggggccaagcaagagaauuggaacaccgauaucaaaacacuuaaguuugacgcucugagcggaucccaggaaguggaguucauuggcuacggcaaagcgacccucgaaugucagguccagacagccguggauuuugggaacucuuauaucgcugagauggaaaccgagagcuggauuguugaccggcaaugggcccaggaucugacgcugccuuggcaguccggaagcggcgggguguggagagagaugcaucaccucgucgaguucgagcccccucaugccgcuacaauccgcgugcuggcccuuggaaaucaagaaggcucucugaagaccgcgcucaccggggcuaugcggguuacaaaggacaccaacgauaauaaccuguacaaacuucacggcggacacguguccugcagagucaagcugagcgcccucacacugaaaggcacgucuuauaagauuuguaccgacaaaauguuuuucgugaagaaucccacagauaccgggcauggaacagugguuaugcaggucaaggugagcaaaggcgccccgugccgcaucccugugaucgucgcugacgaccugaccgccgcuauuaacaaggggauccucgugacgguuaaucccauugccuccaccaacgaugacgaggugcugaucgaagucaauccucccuucggagauucuuacauuaucgugggccggggagacagcagacuuacauaucaguggcacaaagagggcuccagcaucggaaagcuguuuacccagacaaugaaaggcguugagcgccucgcggugaugggggauaccgccugggacuucucuuccgcuggaggcuuuuucacgagcgucgggaaggggauucauacaguguuuggcucugccuuccaagggcuguuuggcggacugaacuggaucaccaagguuauuaugggcgcugugcuuaucugggucgggauuaauacacggaacaugaccauguccaugagcaugauccucgugggagugauuaugauguuccugucccugggcgucggggccgaucagggaugugcgaucaauuuuggcaaaugaggacuaguaauaaggaaacuguaugaaugucugugggcaggaagugaagagauccuucuguaaagguuuuuggaauuaugucugcugaauaauaaacuuuuuugaaauaauaaaucugguagaaaaaugagaucuaaaaaaaaaaaaaaaaaaaaaaaaaaaaaaaaaaaaaaaaaaaaaaaaaaaaaaaaaaaaaaaaugcaucccccccccccccccccccccccccccccccaaaggcucuuuucagagccaccagaauu

SEQ ID NO: 695 - RNA, 2386 nt, Artificial Sequence
  mRNA product Design b-4 comprising derived and/or modified sequence from YFV__NC_002031.1__SSjev-prME (polyprotein: aa122-778) (opt5)
gggagagucccgcagucggcguccagcggcucugcuuguucgugugugugucguugcaggccuuauucaagcuuaccaugggcaagagaagcgccggguccaucauguggcuggcuucucucgccguggucauugcgugcgcuggagccgugacccuggucagaaagaaccgguggcuccugcuuaauguuacaagcgaggaccugggcaaaacguucuccguggggaccggaaacugcacaaccaauauccucgaagccaaguacuggugucccgauucuauggaguauaacugcccuaaucugagcccgcgcgaggaacccgacgauauugacuguuggugcuacggcguggaaaacgucagaguggcuuaugggaaaugugauuccgccggacggucucgcagaagccggcgcgcgaucgaccuuccuacacacgagaaucauggccugaagaccagacaggagaaauggaugacagggcggaugggagaacgccaacuccagaagauugagagaugguuuguucggaaccccuucuuugcugugaccgcccugacgaucgccuaccuggucggcuccaauaugacccagcgcgugguuauugcucuccuggugcuugccgucggcccugcuuauucugcccacugcaucgggaucacagauagagacuucauugaaggagugcauggcgggaccugggugagcgcgacacuggagcaggauaagugugucaccguuauggcccccgacaaaccuucccucgauaucagccuggagacgguggcuauugaccggccggccgaagugcgcaaggucugcuacaacgcugugcuuacacacguuaaaaucaaugauaagugucccucuaccggagaggcccaucuggcggaagagaacgaaggcgacaaugccugcaaaagaacauauuccgaccggggguggggaaacggcuguggccucuuugggaagggaagcauuguggcuugcgccaaguuuaccugcgcuaaaucuaugucccuguucgaggucgaucaaaccaagauccaguacgugauuagagcccagcugcacguuggcgccaaacaggagaauuggaacacagacaucaagacgcucaaauucgaugcucugagcgggucucaagaaguggaguuuaucggauacggcaaggcgacccuugaaugucagguccagacagccguggacuucgggaacuccuauauugcugagauggaaaccgagagcuggaucgucgaucgccagugggcccaagaccugacacucccuuggcaguccggaucuggcggcguguggcgggagaugcaccaucugguugaauuugagcccccucacgccgcuaccauuagagugcuugcccuggggaaucaggaaggaagccucaaaacggcgcugacaggcgcuaugcgcgucaccaaggauaccaacgacaauaaccuguacaagcuccaugggggacacguguccugccggguuaaacugagcgcccuuacacugaagggcaccucuuauaaaaucuguacagauaagauguucuuugugaaaaaucccacggacaccgggcacggcacagucgugaugcaagugaagguuuccaagggagccccgugccgcauuccugucaucguggcugaugaccucaccgccgcuaucaacaaaggcauucuggugacagucaaucccaucgccagcaccaacgacgaugaggugcuuauugaaguuaauccucccuucggggacucuuacaucauugugggaagaggcgauagccggcugacguaucaguggcauaaggagggguccucuaucggaaaacucuucacccagacaaugaagggcgucgagagacuggcggugaugggggacaccgccugggauuuuagcuccgcuggcggauucuuuacaagcguuggcaaagggauccacaccguguucggaucugccuuucagggccuguucgggggacucaacuggauuacgaaggucaucaugggcgcugugcugauuuggguugggaucaauacacgcaacaugaccauguccaugagcaugauucuugugggcgucaucaugauguuucugucucucggagugggcgccugaggacuaguaauaaggaaacuguaugaaugucugugggcaggaagugaagagauccuucuguaaagguuuuuggaauuaugucugcugaauaauaaacuuuuuugaaauaauaaaucugguagaaaaaugagaucuaaaaaaaaaaaaaaaaaaaaaaaaaaaaaaaaaaaaaaaaaaaaaaaaaaaaaaaaaaaaaaaaugcaucccccccccccccccccccccccccccccccaaaggcucuuuucagagccaccagaauu

SEQ ID NO: 696 - RNA, 2434 nt, Artificial Sequence
  mRNA product Design b-4 comprising derived and/or modified sequence from YFV__NC_002031.1__X-SS-prME-XX (polyprotein: aa92-788) (opt6)
gggagagucccgcagucggcguccagcggcucugcuuguucgugugugugucguugcaggccuuauucaagcuuaccaugagaggauuaucaaguagaaaaagaagaucacaugauguacuaaccgugcaauuuuugaucuuagggaugcucuuaaugacaggagguguuacauuaguaagaaagaaucgauggcugcuuuuaaaugugacaucagaggauuuagggaaaacauuuucgguaggaacaggaaauuguacuacaaauauacuugaagcaaaauauuggugcccagacucuauggaauauaauuguccaaauuuaaguccuagagaagaaccugacgauauagauuguugguguuaugguguagaaaauguaagaguagcauacggcaaaugcgauagugcaggacguucuagacguucaaggagagccauagaucugcccacucacgaaaaucacggauugaaaacacgacaagaaaaauggaugacugggcgaaugggagaaagacaacuacagaaaauugaaagaugguucguuagaaauccauucuuugccguaacagcuuuaacaauagccuauuuaguagguaguaauaugacacaaagaguaguaauagcauugcuaguguuagcaguuggaccagcuuauagugcacauugcauaggaauaacagauagagacuuuauagaaggaguacacgggggaacuuggguaagugccacuuuagaacaagauaaauguguuacagugauggcgccagauaaaccaagucuggacauaaguuuggaaacaguagcgauugauagacccgcagaaguaagaaaaguuuguuauaaugcuguucuaacccauguuaaaauaaaugauaaaugcccuagcaccggagaagcccaucuagcagaagaaaaugaaggagauaacgcauguaaacgaacauacucagauagaggauggggcaacggauguggcuuguuuggaaaagguagcauaguagcaugcgcuaaauuuacaugcgcaaagucaaugucauuauuugaaguagaucaaacaaaaauacaauauguaauaagagcucaauuacacgugggugcaaaacaagaaaauuggaauacagacauaaagacacuaaaguucgacgcauuaaguggaucacaagagguagaauuuauaggguacggaaaagcgacuuuagagugucaaguccaaacagcaguagauuucgguaacucauacauagcagaaauggaaacugaaaguuggauaguagauagacaaugggcacaagacuugacacuaccuuggcaaucaggaagcggaggaguauggagagaaaugcaucauuuaguagaauuugaaccaccucaugcagcaacaauaagaguauuagcccuaggaaaccaagaaggaaguuuaaaaacagcacuaacaggagcuaugagaguaacaaaagauacaaaugacaacaaucuauacaaauuacacggaggacauguaagcugccggguaaaguugagcgcacuaacauuaaaaggaacgaguuauaaaauaugcacagauaaaauguucuuuguuaaaaauccuacagauaccggucauggaacaguaguaaugcaaguaaaaguaaguaaaggcgcucccuguagaauaccuguaauagucgcagacgauuuaaccgcagcaauaaauaaaggaauauuagucacgguaaacccaauagcgucaacaaaugaugaugaaguauuaauagaaguuaacccaccuuuuggagacaguuauauaauagucggaaggggugauaguagacuaacauaccaauggcauaaagaaggaagcucaauaggaaaauuauuuacucaaaccaugaaagguguagaaaggcuagcuguuaugggugacacagcaugggauuuuucaagcgcaggaggguucuuuacaucaguagguaaaggaauacauacaguauuuggaagugcauuucaaggauuauuuggugguuuaaauuggauaacaaaaguaauaaugggcgcaguuuuaauauggguagguauaaacacaagaaauaugacaaugucuaugaguaugauauuggucggaguaauaaugauguuuuuaucacuaggagugggugcagaucaagguugcgcuauuaauuuuggaaaaugaggacuaguaauaaggaaacuguaugaaugucugugggcaggaagugaagagauccuucuguaaagguuuuuggaauuaugucugcugaauaauaaacuuuuuugaaauaauaaaucugguagaaaaaugagaucuaaaaaaaaaaaaaaaaaaaaaaaaaaaaaaaaaaaaaaaaaaaaaaaaaaaaaaaaaaaaaaaaugcaucccccccccccccccccccccccccccccccaaaggcucuuuucagagccaccagaauu

SEQ ID NO: 697 - RNA, 2371 nt, Artificial Sequence
  mRNA product Design b-4 comprising derived and/or modified sequence from YFV__NC_002031.1__SS-prME (polyprotein: M,aa104-778) (opt6)
gggagagucccgcagucggcguccagcggcucugcuuguucgugugugugucguugcaggccuuauucaagcuuaccauggauguucuaacaguacaauuuuuaauauuagggauguuauuaaugacaggaggcguaacauuaguacgaaagaaucgauggcuauuacuaaacguuacgucugaagauuuaggaaaaacauuuagcguaggaacaggaaauugcaccacgaauaucuuagaagcaaaauauugguguccagauaguauggaauacaauuguccaaauuuaaguccuagagaggaacccgacgauauagauugcugguguuacggaguggaaaauguaagaguagcauauggaaaaugugacagcgcagguagaaguagaagaucacgacgagcaauugaucuacccacucaugagaaccauggacuaaaaacaagacaagaaaaauggaugacagguagaaugggcgaaagacaauuacagaaaauagaaagaugguuuguacgaaauccuuucuuugcugucacugcauuaacuauagcuuauuuaguaggaaguaacaugacucaaagaguaguaauagcacuauuaguacuagcaguaggaccagcuuacagugcacacuguauagggauaacggauagagauuuuauagaaggaguacauggggguacaugggugucugccacuuuagaacaagacaaauguguuacaguuauggccccagauaaacccucuuuagacauaucauuagaaacuguagcaauagauagaccggcggaagugagaaagguauguuauaaugcaguacuaacccauguaaaaauuaaugacaaaugcccaucaacaggagaggcucaucuagcugaagaaaaugaaggagacaaugcuugcaaacguacauauucagacaggggguggggaaauggauguggauuauuugguaaagggucaauaguagcaugugcaaaauuuacaugcgcaaaaaguaugagcuuauuugaaguagaucaaacaaaaauccaauauguaauuagagcucaacuucacguaggagcaaaacaagagaauuggaacacagauauaaaaacauuaaaauuugacgcuuugucuggaagucaagaagucgaauuuauuggcuauggaaaggcaacauuagaaugccaaguucaaaccgcaguagauuuuggaaauucauacauagcagaaauggagacugaaaguuggauaguagauagacagugggcucaagaccuaacuuuaccauggcaaucaggaaguggugguguauggagagaaaugcaucauuuaguagaauuugaaccaccacaugcagcaacaauuagaguacuagcauuaggaaaucaagaagguaguuuaaagacagcgcuuaccggagcaaugagaguuacaaaagauacuaaugacaauaauuuauauaaacuucauggaggacauguuagcuguagagucaaauuaagugcauuaacacucaaaggaacaucauacaaaauauguacagauaaaauguuuuucgucaagaauccaacagauacaggacauggaacaguuguaaugcaaguaaaaguaucaaaaggagcaccuugcagaauaccaguaauaguagcagaugauuuaacagccgcaauuaauaaagggauauuaguaacaguaaacccuauagcaaguacaaaugaugaugaagucuugauagaaguaaauccaccauuuggagauucguauauaauagucggaagaggagauagucgauuaacauaucaauggcauaaagaagguucaucaauaggaaaauuauuuacacaaaccaugaaaggaguugaaagauuagcuguaaugggggacacagcuugggauuuuucuagcgcaggaggauucuuuacauccguaggaaaagguauacacacaguauuuggcucagcauuccaaggguuauuuggugguuuaaauuggauaacaaaagugauuaugggagcagugcuaaucuggguaggaauaaauacaagaaauaugacaaugaguaugagcaugauucucguaggaguaauaaugauguuccuuaguuugggaguuggcgcuugaggacuaguaauaaggaaacuguaugaaugucugugggcaggaagugaagagauccuucuguaaagguuuuuggaauuaugucugcugaauaauaaacuuuuuugaaauaauaaaucugguagaaaaaugagaucuaaaaaaaaaaaaaaaaaaaaaaaaaaaaaaaaaaaaaaaaaaaaaaaaaaaaaaaaaaaaaaaaugcaucccccccccccccccccccccccccccccccaaaggcucuuuucagagccaccagaauu

SEQ ID NO: 698 - RNA, 2398 nt, Artificial Sequence
  mRNA product Design b-4 comprising derived and/or modified sequence from YFV__NC_002031.1__SSIgE-prME-XX (polyprotein: aa122-788) (opt6)
gggagagucccgcagucggcguccagcggcucugcuuguucgugugugugucguugcaggccuuauucaagcuuaccauggacuggacauggauauuauuuuuaguagcagcagcaacaagaguacauucaguuacauuaguaagaaagaaucgauggcugcuuuuaaaugugacaucagaggauuuagggaaaacauuuucgguaggaacaggaaauuguacuacaaauauacuugaagcaaaauauuggugcccagacucuauggaauauaauuguccaaauuuaaguccuagagaagaaccugacgauauagauuguugguguuaugguguagaaaauguaagaguagcauacggcaaaugcgauagugcaggacguucuagacguucaaggagagccauagaucugcccacucacgaaaaucacggauugaaaacacgacaagaaaaauggaugacugggcgaaugggagaaagacaacuacagaaaauugaaagaugguucguuagaaauccauucuuugccguaacagcuuuaacaauagccuauuuaguagguaguaauaugacacaaagaguaguaauagcauugcuaguguuagcaguuggaccagcuuauagugcacauugcauaggaauaacagauagagacuuuauagaaggaguacacgggggaacuuggguaagugccacuuuagaacaagauaaauguguuacagugauggcgccagauaaaccaagucuggacauaaguuuggaaacaguagcgauugauagacccgcagaaguaagaaaaguuuguuauaaugcuguucuaacccauguuaaaauaaaugauaaaugcccuagcaccggagaagcccaucuagcagaagaaaaugaaggagauaacgcauguaaacgaacauacucagauagaggauggggcaacggauguggcuuguuuggaaaagguagcauaguagcaugcgcuaaauuuacaugcgcaaagucaaugucauuauuugaaguagaucaaacaaaaauacaauauguaauaagagcucaauuacacgugggugcaaaacaagaaaauuggaauacagacauaaagacacuaaaguucgacgcauuaaguggaucacaagagguagaauuuauaggguacggaaaagcgacuuuagagugucaaguccaaacagcaguagauuucgguaacucauacauagcagaaauggaaacugaaaguuggauaguagauagacaaugggcacaagacuugacacuaccuuggcaaucaggaagcggaggaguauggagagaaaugcaucauuuaguagaauuugaaccaccucaugcagcaacaauaagaguauuagcccuaggaaaccaagaaggaaguuuaaaaacagcacuaacaggagcuaugagaguaacaaaagauacaaaugacaacaaucuauacaaauuacacggaggacauguaagcugccggguaaaguugagcgcacuaacauuaaaaggaacgaguuauaaaauaugcacagauaaaauguucuuuguuaaaaauccuacagauaccggucauggaacaguaguaaugcaaguaaaaguaaguaaaggcgcucccuguagaauaccuguaauagucgcagacgauuuaaccgcagcaauaaauaaaggaauauuagucacgguaaacccaauagcgucaacaaaugaugaugaaguauuaauagaaguuaacccaccuuuuggagacaguuauauaauagucggaaggggugauaguagacuaacauaccaauggcauaaagaaggaagcucaauaggaaaauuauuuacucaaaccaugaaagguguagaaaggcuagcuguuaugggugacacagcaugggauuuuucaagcgcaggaggguucuuuacaucaguagguaaaggaauacauacaguauuuggaagugcauuucaaggauuauuuggugguuuaaauuggauaacaaaaguaauaaugggcgcaguuuuaauauggguagguauaaacacaagaaauaugacaaugucuaugaguaugauauuggucggaguaauaaugauguuuuuaucacuaggagugggugcagaucaagguugcgcuauuaauuuuggaaaaugaggacuaguaauaaggaaacuguaugaaugucugugggcaggaagugaagagauccuucuguaaagguuuuuggaauuaugucugcugaauaauaaacuuuuuugaaauaauaaaucugguagaaaaaugagaucuaaaaaaaaaaaaaaaaaaaaaaaaaaaaaaaaaaaaaaaaaaaaaaaaaaaaaaaaaaaaaaaaugcaucccccccccccccccccccccccccccccccaaaggcucuuuucagagccaccagaauu

SEQ ID NO: 699 - RNA, 2368 nt, Artificial Sequence
  mRNA product Design b-4 comprising derived and/or modified sequence from YFV__NC_002031.1__SSIgE-prME (polyprotein: aa122-778) (opt6)
gggagagucccgcagucggcguccagcggcucugcuuguucgugugugugucguugcaggccuuauucaagcuuaccauggacuggacauggauauuauuuuuaguagcagcagcaacaagaguacauucaguaacauuagucagaaagaacagaugguuauuacugaacguaacaagugaagacuuaggaaaaacauuuaguguaggcacaggaaauugcacaacaaauauacuugaagcaaaauauugguguccagauagcauggaauauaauuguccaaauuuaucaccuagagaggaacccgaugauauagauuguugguguuauggaguugaaaacgugcgaguagcauaugguaaaugugauagcgcaggaagaaguagaagaaguagaagggcaauagacuuaccaacucaugaaaaccauggauuaaaaacaagacaggaaaaauggaugacaggaagaaugggagaacgacaauuacagaaaauagaaagaugguucguaagaaauccauucuuugcaguaacagcauuaacaauagcauaucuaguuggaaguaacaugacucaaagaguaguaauagcauuguuaguacuagcaguaggaccggcuuauagcgcacauuguauagggauaacagauagagacuuuauagaaggagugcacgguggaacauggguuucagcaacgcuagagcaagauaaauguguaacgguaauggcgccggauaaaccaagccuugacauaucacuagaaacgguugcaaucgaucgaccagccgaaguaagaaaaguaugcuauaaugcggucuuaacacacguaaaaauaaaugauaaauguccuucaacgggagaagcacauuuagcagaagaaaacgaaggagacaacgcguguaaaagaacauauucagauaggggcuggggaaacggcugcgguuuauuuggaaaaggaaguauaguagcaugcgcaaaauuuacuugcgcaaaaaguaugaguuuauucgaaguugaucaaacaaagauacaauauguaauacgagcacaauuacauguaggugcaaagcaagaaaauuggaauacagacauaaaaacauugaaauuugacgcuuugaguggaucacaagaaguagaauuuauaggauacggaaaagcuacauuagaaugucaaguacaaacugcaguagauuuuggaaauucguauauagcagaaauggaaacugaaucauggauuguagauaggcaaugggcacaagauuuaaccuugccauggcaaagcggaagcggggguguauggcgggaaaugcaucauuuaguagaguucgaacccccacacgcggcuaccauaagaguacuagcauuaggaaaucaagaagggagucucaagacagcacucacaggugcaaugcgaguaacgaaagauacaaaugacaauaaucuauacaaacuacacggaggacauguaucuugcagaguaaaauuaucugcauuaacacuaaaagggacaaguuacaaaauuuguacagauaagauguucuuugucaaaaacccaacagacacgggacacggaacgguagucaugcaaguuaaaguaagcaaaggagcgccaugcagaauaccaguaaucgucgcagaugauuuaacagccgcaauaaauaaagguauauuaguaacgguaaauccaauagcgaguaccaaugaugaugaaguacuaauagaagugaacccaccauuuggugauagcuauauaauaguagggcgaggagauucaagauuaacauaucaauggcauaaagaagguaguaguauaggaaaauuauuuacacaaacuaugaaaggcguagaaagacuagcagucaugggagauacagcaugggauuucucaagugcaggcggauuuuucacaagcgucggaaaaggaauacauacaguguuugguagugcguuucaaggauuauucggaggacuaaauuggauaacgaaaguaauuaugggagcaguucucauaugggucggaauaaauacaaggaacaugacuaugaguaugagcaugauccuaguaggaguaauaaugauguuucuaagccuaggcguuggugcaugaggacuaguaauaaggaaacuguaugaaugucugugggcaggaagugaagagauccuucuguaaagguuuuuggaauuaugucugcugaauaauaaacuuuuuugaaauaauaaaucugguagaaaaaugagaucuaaaaaaaaaaaaaaaaaaaaaaaaaaaaaaaaaaaaaaaaaaaaaaaaaaaaaaaaaaaaaaaaugcaucccccccccccccccccccccccccccccccaaaggcucuuuucagagccaccagaauu

SEQ ID NO: 700 - RNA, 2416 nt, Artificial Sequence
  mRNA product Design b-4 comprising derived and/or modified sequence from YFV__NC_002031.1__SSjev-prME-XX (polyprotein: aa122-788) (opt6)
gggagagucccgcagucggcguccagcggcucugcuuguucgugugugugucguugcaggccuuauucaagcuuaccaugggaaaaagaagugcaggaaguauaaugugguuggcaaguuuagcaguaguaauagcaugugcaggagcaguuacauuaguaagaaagaaucgauggcugcuuuuaaaugugacaucagaggauuuagggaaaacauuuucgguaggaacaggaaauuguacuacaaauauacuugaagcaaaauauuggugcccagacucuauggaauauaauuguccaaauuuaaguccuagagaagaaccugacgauauagauuguugguguuaugguguagaaaauguaagaguagcauacggcaaaugcgauagugcaggacguucuagacguucaaggagagccauagaucugcccacucacgaaaaucacggauugaaaacacgacaagaaaaauggaugacugggcgaaugggagaaagacaacuacagaaaauugaaagaugguucguuagaaauccauucuuugccguaacagcuuuaacaauagccuauuuaguagguaguaauaugacacaaagaguaguaauagcauugcuaguguuagcaguuggaccagcuuauagugcacauugcauaggaauaacagauagagacuuuauagaaggaguacacgggggaacuuggguaagugccacuuuagaacaagauaaauguguuacagugauggcgccagauaaaccaagucuggacauaaguuuggaaacaguagcgauugauagacccgcagaaguaagaaaaguuuguuauaaugcuguucuaacccauguuaaaauaaaugauaaaugcccuagcaccggagaagcccaucuagcagaagaaaaugaaggagauaacgcauguaaacgaacauacucagauagaggauggggcaacggauguggcuuguuuggaaaagguagcauaguagcaugcgcuaaauuuacaugcgcaaagucaaugucauuauuugaaguagaucaaacaaaaauacaauauguaauaagagcucaauuacacgugggugcaaaacaagaaaauuggaauacagacauaaagacacuaaaguucgacgcauuaaguggaucacaagagguagaauuuauaggguacggaaaagcgacuuuagagugucaaguccaaacagcaguagauuucgguaacucauacauagcagaaauggaaacugaaaguuggauaguagauagacaaugggcacaagacuugacacuaccuuggcaaucaggaagcggaggaguauggagagaaaugcaucauuuaguagaauuugaaccaccucaugcagcaacaauaagaguauuagcccuaggaaaccaagaaggaaguuuaaaaacagcacuaacaggagcuaugagaguaacaaaagauacaaaugacaacaaucuauacaaauuacacggaggacauguaagcugccggguaaaguugagcgcacuaacauuaaaaggaacgaguuauaaaauaugcacagauaaaauguucuuuguuaaaaauccuacagauaccggucauggaacaguaguaaugcaaguaaaaguaaguaaaggcgcucccuguagaauaccuguaauagucgcagacgauuuaaccgcagcaauaaauaaaggaauauuagucacgguaaacccaauagcgucaacaaaugaugaugaaguauuaauagaaguuaacccaccuuuuggagacaguuauauaauagucggaaggggugauaguagacuaacauaccaauggcauaaagaaggaagcucaauaggaaaauuauuuacucaaaccaugaaagguguagaaaggcuagcuguuaugggugacacagcaugggauuuuucaagcgcaggaggguucuuuacaucaguagguaaaggaauacauacaguauuuggaagugcauuucaaggauuauuuggugguuuaaauuggauaacaaaaguaauaaugggcgcaguuuuaauauggguagguauaaacacaagaaauaugacaaugucuaugaguaugauauuggucggaguaauaaugauguuuuuaucacuaggagugggugcagaucaagguugcgcuauuaauuuuggaaaaugaggacuaguaauaaggaaacuguaugaaugucugugggcaggaagugaagagauccuucuguaaagguuuuuggaauuaugucugcugaauaauaaacuuuuuugaaauaauaaaucugguagaaaaaugagaucuaaaaaaaaaaaaaaaaaaaaaaaaaaaaaaaaaaaaaaaaaaaaaaaaaaaaaaaaaaaaaaaaugcaucccccccccccccccccccccccccccccccaaaggcucuuuucagagccaccagaauu

SEQ ID NO: 701 - RNA, 2386 nt, Artificial Sequence
  mRNA product Design b-4 comprising derived and/or modified sequence from YFV__NC_002031.1__SSjev-prME (polyprotein: aa122-778) (opt6)
gggagagucccgcagucggcguccagcggcucugcuuguucgugugugugucguugcaggccuuauucaagcuuaccaugggaaaaagaagugcaggaaguauaaugugguuggcaaguuuagcaguaguaauagcaugugcaggagcaguaacauuagucagaaagaacagaugguuauuacugaacguaacaagugaagacuuaggaaaaacauuuaguguaggcacaggaaauugcacaacaaauauacuugaagcaaaauauugguguccagauagcauggaauauaauuguccaaauuuaucaccuagagaggaacccgaugauauagauuguugguguuauggaguugaaaacgugcgaguagcauaugguaaaugugauagcgcaggaagaaguagaagaaguagaagggcaauagacuuaccaacucaugaaaaccauggauuaaaaacaagacaggaaaaauggaugacaggaagaaugggagaacgacaauuacagaaaauagaaagaugguucguaagaaauccauucuuugcaguaacagcauuaacaauagcauaucuaguuggaaguaacaugacucaaagaguaguaauagcauuguuaguacuagcaguaggaccggcuuauagcgcacauuguauagggauaacagauagagacuuuauagaaggagugcacgguggaacauggguuucagcaacgcuagagcaagauaaauguguaacgguaauggcgccggauaaaccaagccuugacauaucacuagaaacgguugcaaucgaucgaccagccgaaguaagaaaaguaugcuauaaugcggucuuaacacacguaaaaauaaaugauaaauguccuucaacgggagaagcacauuuagcagaagaaaacgaaggagacaacgcguguaaaagaacauauucagauaggggcuggggaaacggcugcgguuuauuuggaaaaggaaguauaguagcaugcgcaaaauuuacuugcgcaaaaaguaugaguuuauucgaaguugaucaaacaaagauacaauauguaauacgagcacaauuacauguaggugcaaagcaagaaaauuggaauacagacauaaaaacauugaaauuugacgcuuugaguggaucacaagaaguagaauuuauaggauacggaaaagcuacauuagaaugucaaguacaaacugcaguagauuuuggaaauucguauauagcagaaauggaaacugaaucauggauuguagauaggcaaugggcacaagauuuaaccuugccauggcaaagcggaagcggggguguauggcgggaaaugcaucauuuaguagaguucgaacccccacacgcggcuaccauaagaguacuagcauuaggaaaucaagaagggagucucaagacagcacucacaggugcaaugcgaguaacgaaagauacaaaugacaauaaucuauacaaacuacacggaggacauguaucuugcagaguaaaauuaucugcauuaacacuaaaagggacaaguuacaaaauuuguacagauaagauguucuuugucaaaaacccaacagacacgggacacggaacgguagucaugcaaguuaaaguaagcaaaggagcgccaugcagaauaccaguaaucgucgcagaugauuuaacagccgcaauaaauaaagguauauuaguaacgguaaauccaauagcgaguaccaaugaugaugaaguacuaauagaagugaacccaccauuuggugauagcuauauaauaguagggcgaggagauucaagauuaacauaucaauggcauaaagaagguaguaguauaggaaaauuauuuacacaaacuaugaaaggcguagaaagacuagcagucaugggagauacagcaugggauuucucaagugcaggcggauuuuucacaagcgucggaaaaggaauacauacaguguuugguagugcguuucaaggauuauucggaggacuaaauuggauaacgaaaguaauuaugggagcaguucucauaugggucggaauaaauacaaggaacaugacuaugaguaugagcaugauccuaguaggaguaauaaugauguuucuaagccuaggcguuggugcaugaggacuaguaauaaggaaacuguaugaaugucugugggcaggaagugaagagauccuucuguaaagguuuuuggaauuaugucugcugaauaauaaacuuuuuugaaauaauaaaucugguagaaaaaugagaucuaaaaaaaaaaaaaaaaaaaaaaaaaaaaaaaaaaaaaaaaaaaaaaaaaaaaaaaaaaaaaaaaugcaucccccccccccccccccccccccccccccccaaaggcucuuuucagagccaccagaauu

SEQ ID NO: 702 - RNA, 2434 nt, Artificial Sequence
  mRNA product Design b-4 comprising derived and/or modified sequence from YFV__NC_002031.1__X-SS-prME-XX (polyprotein: aa92-788) (opt11)
gggagagucccgcagucggcguccagcggcucugcuuguucgugugugugucguugcaggccuuauucaagcuuaccaugcggggacuaagcagcagaaaaagacgcagccacgaugugcucaccgugcaauuccucauacuggggaugcuccuaaugaccggaggcgugacccuaguaaggaaaaacagauggcuacuacuaaacguaaccucagaagaucuaggaaagacauuuucagucggcacaggcaacugcacaaccaacauacuagaagcaaaauauuggugcccagacagcauggaauacaacugucccaaccucagcccaagagaggaaccagacgacauagacugcugguguuacggaguagaaaacguaagaguggcauacggcaaaugcgacagcgcaggcaggagccgaagaucccgcagagccaucgacuugcccacgcacgaaaaccacggccucaaaacacgacaagaaaaauggaugacagggcgaaugggagaacgacagcuccagaaaauagaacgaugguucguccggaacccguucuucgcaguaacggcacuaacaaucgcauaccucguaggcagcaacaugacacaaagaguggucaucgcgcuacucguacuagcaguggggcccgcauacagugcacacugcauaggaaucacagaccgugacuucaucgaaggcguacacggaggaacguggguaagcgcgacacuggaacaagacaaaugcgugacaguaauggcaccagacaaaccaagccuagacauaucccuagaaacggucgccaucgaccgucccgcagaaguacgaaagguaugcuauaaugcaguccucacacacgucaaaauaaacgacaaaugccccagcacgggcgaagcacaccucgccgaagaaaacgaaggggauaacgcgugcaaacgcaccuacuccgacaggggauggggcaacggaugcggacuguucggaaaaggauccauagucgcaugcgcaaaauuuaccugcgcaaaaagcaugagcuuguucgagguagaccaaacgaagauccaauacguaauccgagcucaacuacacguuggggccaagcaagagaacuggaauacggacaucaaaacacuaaaauucgacgcacucuccggcucacaagaagucgaguucaucggcuacggcaaagcaacacuagaaugccaaguacaaacagcgguggacuucggcaacagcuacauagcagaaauggaaacagaaagcuggauaguagaccgacaaugggcacaagaccuaacucugccauggcaaagcggcucaggaggaguguggagagagaugcaccaccugguagaguucgaacccccacacgcagcaacaauaaggguacuggcacuaggcaaccaagaaggcagccuaaaaaccgcacucacaggagccaugcgcgugacgaaggacaccaacgacaacaaccucuacaaacuccacggagggcacguauccugccgcguaaaacuaucagcacuaacgcuaaaaggaacaagcuacaaaauaugcacagacaaaauguucuucgucaaaaaccccacagacacaggccacggcacagucguaaugcaagugaaggucagcaagggggcccccugccgaaucccagucauaguggcagacgaccucacggccgccaucaacaaagggauccugguaacagugaacccaauagcaucgaccaacgacgacgaaguccucauagaagugaaucccccguucggcgacagcuacaucaucguaggacgcggcgacucccgacugacguaccaauggcauaaagaaggcagcagcauuggaaaacuauucacccaaaccaugaagggcgucgaaagacucgcggugaugggagacaccgcaugggacuucucgagcgcaggcggcuucuucacaagcguaggaaaagggauucacacaguauucggauccgcauuccaaggccucuucgggggacuaaacuggauaacgaaaguaauaaugggagcaguucucauauggguaggaaucaacacacgaaacaugacaauguccaugucaaugauacucguaggcguaaucaugauguuucugucacucggagugggagcagaccaagguugcgccauaaacuucggcaagugaggacuaguaauaaggaaacuguaugaaugucugugggcaggaagugaagagauccuucuguaaagguuuuuggaauuaugucugcugaauaauaaacuuuuuugaaauaauaaaucugguagaaaaaugagaucuaaaaaaaaaaaaaaaaaaaaaaaaaaaaaaaaaaaaaaaaaaaaaaaaaaaaaaaaaaaaaaaaugcaucccccccccccccccccccccccccccccccaaaggcucuuuucagagccaccagaauu

SEQ ID NO: 703 - RNA, 2371 nt, Artificial Sequence
  mRNA product Design b-4 comprising derived and/or modified sequence from YFV__NC_002031.1__SS-prME (polyprotein: M,aa104-778) (opt11)
gggagagucccgcagucggcguccagcggcucugcuuguucgugugugugucguugcaggccuuauucaagcuuaccauggacguccuuacgguacaauuccuaauacuaggaaugcuucucaugaccgggggcgucacccuaguccggaaaaacagauggcuacugcuaaauguuacaagcgaagaccuuggcaagacauucagcguaggcacgggcaacuguacaaccaacauacuagaagcgaaauacuggugcccagacuccauggaguacaacugccccaaccuaagcccacgggaagaacccgacgacauagacugcugguguuacggggucgaaaacguccgcgucgcauacgggaaaugcgauagcgcaggccgcaguagacgcucccgccgcgccauagaccuaccaacgcacgagaaccacggccucaaaacucgccaagaaaaauggaugacagggcgaaugggugaacgccaacuacagaagaucgaaaggugguucgucaggaacccauucuucgcagugaccgcacuaacgauagccuaccuagugggaucaaacaugacgcaacgagucgugaucgcacuccuaguacuggccguaggaccggccuacuccgcgcacugcaucggcauaacggauagggacuucauugaaggaguacauggcggcacgugggucagcgcgacacucgaacaagacaaaugcguaaccgugauggcacccgacaaaccgagucuugacauaagccuggaaacgguagcgauagaucguccagccgaaguaagaaaaguaugcuacaacgcaguccuaacacacguaaaaauaaacgacaaaugcccaagcacaggggaagcccaccucgcagaagagaacgaaggcgacaacgcaugcaaacgcacauacuccgacaggggaugggggaauggcugcggacuauucgggaaaggaagcaucgucgcgugcgccaaauucacaugcgccaagagcaugagccuguucgaagucgaccaaacaaaaauccaauacguaauacgcgcgcaacugcacguaggagcgaaacaggaaaacuggaacacggacauuaaaacccucaaauucgacgcgcucucaggaucacaagaagucgaguucaucggcuacggcaaggcaacgcucgaaugccaaguacaaacagcaguagacuucggaaacagcuacauugccgagauggaaaccgagagcuggauagucgacagacaaugggcccaagaccuaacccugccauggcaaucaggcuccgggggcgucuggcgagagaugcaccaccuaguagaguucgaaccaccccacgccgccacgaucagaguacuggcccugggcaaccaagaaggcucacucaagacggcgcucacaggagcaaugagggucacgaaagacaccaacgacaacaaccucuacaaacuacacggagggcacgugagcugccggguaaaacugagcgcacucacucugaagggaacaagcuacaagauaugcaccgacaaaauguucuucgugaaaaacccaaccgacacuggacacggcacggucguuaugcaagucaagguaucaaaaggagccccaugcagaaucccaguaauaguagcggacgaccuaacagccgccauaaacaaaggaauccuagucacgguaaauccgauagcaucgaccaacgacgacgaaguacuaauagaagugaacccaccauucggcgacagcuacauaauagucgggagaggcgacucgcgacuaaccuaccaauggcacaaggaagggagcucuaucgggaaacuauucacccaaacgaugaagggcguagaaaggcucgcagucaugggcgacaccgcaugggacuucuccagcgcgggaggcuucuuuacuucagugggaaaagggauacacaccgucuucggcagcgcauuccagggccuauucggcggguuaaacuggaucacgaaagugauaaugggggcaguucucaucugggucggaauaaacacacguaacaugaccaugagcaugagcaugauccuagucggggucauaaugauguucuugagcuugggaguaggugcaugaggacuaguaauaaggaaacuguaugaaugucugugggcaggaagugaagagauccuucuguaaagguuuuuggaauuaugucugcugaauaauaaacuuuuuugaaauaauaaaucugguagaaaaaugagaucuaaaaaaaaaaaaaaaaaaaaaaaaaaaaaaaaaaaaaaaaaaaaaaaaaaaaaaaaaaaaaaaaugcaucccccccccccccccccccccccccccccccaaaggcucuuuucagagccaccagaauu

SEQ ID NO: 704 - RNA, 2398 nt, Artificial Sequence
  mRNA product Design b-4 comprising derived and/or modified sequence from YFV__NC_002031.1__SSIgE-prME-XX (polyprotein: aa122-788) (opt11)
gggagagucccgcagucggcguccagcggcucugcuuguucgugugugugucguugcaggccuuauucaagcuuaccauggauuggacguggauacucuuucucguggccgcggccacgcgcgugcacucggugacccuaguaaggaaaaacagauggcuacuacuaaacguaaccucagaagaucuaggaaagacauuuucagucggcacaggcaacugcacaaccaacauacuagaagcaaaauauuggugcccagacagcauggaauacaacugucccaaccucagcccaagagaggaaccagacgacauagacugcugguguuacggaguagaaaacguaagaguggcauacggcaaaugcgacagcgcaggcaggagccgaagaucccgcagagccaucgacuugcccacgcacgaaaaccacggccucaaaacacgacaagaaaaauggaugacagggcgaaugggagaacgacagcuccagaaaauagaacgaugguucguccggaacccguucuucgcaguaacggcacuaacaaucgcauaccucguaggcagcaacaugacacaaagaguggucaucgcgcuacucguacuagcaguggggcccgcauacagugcacacugcauaggaaucacagaccgugacuucaucgaaggcguacacggaggaacguggguaagcgcgacacuggaacaagacaaaugcgugacaguaauggcaccagacaaaccaagccuagacauaucccuagaaacggucgccaucgaccgucccgcagaaguacgaaagguaugcuauaaugcaguccucacacacgucaaaauaaacgacaaaugccccagcacgggcgaagcacaccucgccgaagaaaacgaaggggauaacgcgugcaaacgcaccuacuccgacaggggauggggcaacggaugcggacuguucggaaaaggauccauagucgcaugcgcaaaauuuaccugcgcaaaaagcaugagcuuguucgagguagaccaaacgaagauccaauacguaauccgagcucaacuacacguuggggccaagcaagagaacuggaauacggacaucaaaacacuaaaauucgacgcacucuccggcucacaagaagucgaguucaucggcuacggcaaagcaacacuagaaugccaaguacaaacagcgguggacuucggcaacagcuacauagcagaaauggaaacagaaagcuggauaguagaccgacaaugggcacaagaccuaacucugccauggcaaagcggcucaggaggaguguggagagagaugcaccaccugguagaguucgaacccccacacgcagcaacaauaaggguacuggcacuaggcaaccaagaaggcagccuaaaaaccgcacucacaggagccaugcgcgugacgaaggacaccaacgacaacaaccucuacaaacuccacggagggcacguauccugccgcguaaaacuaucagcacuaacgcuaaaaggaacaagcuacaaaauaugcacagacaaaauguucuucgucaaaaaccccacagacacaggccacggcacagucguaaugcaagugaaggucagcaagggggcccccugccgaaucccagucauaguggcagacgaccucacggccgccaucaacaaagggauccugguaacagugaacccaauagcaucgaccaacgacgacgaaguccucauagaagugaaucccccguucggcgacagcuacaucaucguaggacgcggcgacucccgacugacguaccaauggcauaaagaaggcagcagcauuggaaaacuauucacccaaaccaugaagggcgucgaaagacucgcggugaugggagacaccgcaugggacuucucgagcgcaggcggcuucuucacaagcguaggaaaagggauucacacaguauucggauccgcauuccaaggccucuucgggggacuaaacuggauaacgaaaguaauaaugggagcaguucucauauggguaggaaucaacacacgaaacaugacaauguccaugucaaugauacucguaggcguaaucaugauguuucugucacucggagugggagcagaccaagguugcgccauaaacuucggcaagugaggacuaguaauaaggaaacuguaugaaugucugugggcaggaagugaagagauccuucuguaaagguuuuuggaauuaugucugcugaauaauaaacuuuuuugaaauaauaaaucugguagaaaaaugagaucuaaaaaaaaaaaaaaaaaaaaaaaaaaaaaaaaaaaaaaaaaaaaaaaaaaaaaaaaaaaaaaaaugcaucccccccccccccccccccccccccccccccaaaggcucuuuucagagccaccagaauu

SEQ ID NO: 705 - RNA, 2368 nt, Artificial Sequence
  mRNA product Design b-4 comprising derived and/or modified sequence from YFV__NC_002031.1__SSIgE-prME (polyprotein: aa122-778) (opt11)
gggagagucccgcagucggcguccagcggcucugcuuguucgugugugugucguugcaggccuuauucaagcuuaccauggauuggacguggauacucuuucucguggccgcggccacgcgcgugcacucggugacccuaguccgcaaaaacagauggcuacuacuaaacguaacaagcgaagaccugggcaaaacauucagcguuggcacaggcaauugcacgacaaacauacucgaagcaaaauacuggugccccgacagcauggaauacaacugcccaaaucuaagcccacgcgaagaaccagacgacaucgacuguuggugcuacggagucgaaaacgugagggucgcauacgguaaaugcgacagcgcuggcagaagcagacgcucccgacgagccauugaccucccuacccacgaaaaccacggccuaaaaacccggcaggaaaaauggaugacaggccggaugggagaacgccaacuacagaaaauagagaggugguuuguaagaaacccauucuucgccguaaccgcgcucaccaucgcuuaccucguaggaucaaacaugacgcaaagaguagugaucgcgcuacucguacuagcgguaggccccgccuacagcgcacacugcaucggcaucacugacagggacuucauagaaggcguccacgggggcacguggguuagcgccacacucgaacaagacaaaugcgucacagugauggcaccagacaaacccucacuagacaucucacuagaaaccgucgcaaucgaccgcccagcagaagucaggaaagugugcuacaacgccgucuuaacccacguaaaaauaaaugauaaaugcccaagcacgggagaggcacaccuagcggaagaaaacgaaggcgacaacgcgugcaaacguaccuacagcgacagaggguggggcaacggaugcggcuuauucggaaaaggaaguaucguagcaugcgcaaaauuuaccugcgccaaaagcaugucccuauucgaaguagaucaaacaaaaauacaauacgucauccgagcccaacuacacgugggggcaaaacaagaaaacuggaacaccgacaucaaaacacucaaauucgaugcccuaagcggcucccaagaaguagaguucaucgguuacggcaaggccacgcucgagugccaaguccaaacagcaguagacuucgggaacucauacaucgccgagauggaaacggaaucauggauugucgacagacaaugggcacaagaccuaacacuaccauggcaaucaggcagcggaggggucuggcgagaaaugcaccaccuaguagaguucgaacccccacacgccgcaacaauccgaguacuagcccucggaaaccaagaaggaucacuaaaaaccgcacucaccggcgcaaugcgcguaacaaaagauacaaacgacaacaaccuauacaaacuacacggcggacacgucagcugccgcgucaaacuauccgcccuaacacuaaaaggaacaagcuacaaaauaugcacagacaaaauguucuucgucaaaaauccgacugacacgggccacggcacagucguaaugcaaguaaaagucucaaaaggcgcaccaugcagaaucccaguaaucgucgccgaugaccuaacagccgcaaucaacaagggcauccucguaacaguaaaccccauagccagcaccaacgacgacgaaguccuaaucgaagucaacccacccuucggagacagcuacauaauaguaggacgaggggacucacgccuaaccuaccaauggcacaaagaaggauccucaaucggcaaacuguucacacaaacgaugaaaggcguagaaagacucgcaguaaugggcgauacggccugggacuucucaagcgcgggcggcuucuucacgagcgucggaaaaggcauccauacaguauucggaagcgcauuccaaggccuauuuggaggccucaacuggauaacaaaagugaucaugggagcaguacugaucugggucggcaucaacacccgcaacaugacgaugagcaugucaaugauccucgugggaguaauaaugauguuccucagccugggcguaggcgcaugaggacuaguaauaaggaaacuguaugaaugucugugggcaggaagugaagagauccuucuguaaagguuuuuggaauuaugucugcugaauaauaaacuuuuuugaaauaauaaaucugguagaaaaaugagaucuaaaaaaaaaaaaaaaaaaaaaaaaaaaaaaaaaaaaaaaaaaaaaaaaaaaaaaaaaaaaaaaaugcaucccccccccccccccccccccccccccccccaaaggcucuuuucagagccaccagaauu

SEQ ID NO: 706 - RNA, 2416 nt, Artificial Sequence
  mRNA product Design b-4 comprising derived and/or modified sequence from YFV__NC_002031.1__SSjev-prME-XX (polyprotein: aa122-788) (opt11)
gggagagucccgcagucggcguccagcggcucugcuuguucgugugugugucguugcaggccuuauucaagcuuaccauggggaaaaggagcgcgggcucgauaaugugguuggccucgcucgcggucgugaucgcgugcgcgggcgcggugacccuaguaaggaaaaacagauggcuacuacuaaacguaaccucagaagaucuaggaaagacauuuucagucggcacaggcaacugcacaaccaacauacuagaagcaaaauauuggugcccagacagcauggaauacaacugucccaaccucagcccaagagaggaaccagacgacauagacugcugguguuacggaguagaaaacguaagaguggcauacggcaaaugcgacagcgcaggcaggagccgaagaucccgcagagccaucgacuugcccacgcacgaaaaccacggccucaaaacacgacaagaaaaauggaugacagggcgaaugggagaacgacagcuccagaaaauagaacgaugguucguccggaacccguucuucgcaguaacggcacuaacaaucgcauaccucguaggcagcaacaugacacaaagaguggucaucgcgcuacucguacuagcaguggggcccgcauacagugcacacugcauaggaaucacagaccgugacuucaucgaaggcguacacggaggaacguggguaagcgcgacacuggaacaagacaaaugcgugacaguaauggcaccagacaaaccaagccuagacauaucccuagaaacggucgccaucgaccgucccgcagaaguacgaaagguaugcuauaaugcaguccucacacacgucaaaauaaacgacaaaugccccagcacgggcgaagcacaccucgccgaagaaaacgaaggggauaacgcgugcaaacgcaccuacuccgacaggggauggggcaacggaugcggacuguucggaaaaggauccauagucgcaugcgcaaaauuuaccugcgcaaaaagcaugagcuuguucgagguagaccaaacgaagauccaauacguaauccgagcucaacuacacguuggggccaagcaagagaacuggaauacggacaucaaaacacuaaaauucgacgcacucuccggcucacaagaagucgaguucaucggcuacggcaaagcaacacuagaaugccaaguacaaacagcgguggacuucggcaacagcuacauagcagaaauggaaacagaaagcuggauaguagaccgacaaugggcacaagaccuaacucugccauggcaaagcggcucaggaggaguguggagagagaugcaccaccugguagaguucgaacccccacacgcagcaacaauaaggguacuggcacuaggcaaccaagaaggcagccuaaaaaccgcacucacaggagccaugcgcgugacgaaggacaccaacgacaacaaccucuacaaacuccacggagggcacguauccugccgcguaaaacuaucagcacuaacgcuaaaaggaacaagcuacaaaauaugcacagacaaaauguucuucgucaaaaaccccacagacacaggccacggcacagucguaaugcaagugaaggucagcaagggggcccccugccgaaucccagucauaguggcagacgaccucacggccgccaucaacaaagggauccugguaacagugaacccaauagcaucgaccaacgacgacgaaguccucauagaagugaaucccccguucggcgacagcuacaucaucguaggacgcggcgacucccgacugacguaccaauggcauaaagaaggcagcagcauuggaaaacuauucacccaaaccaugaagggcgucgaaagacucgcggugaugggagacaccgcaugggacuucucgagcgcaggcggcuucuucacaagcguaggaaaagggauucacacaguauucggauccgcauuccaaggccucuucgggggacuaaacuggauaacgaaaguaauaaugggagcaguucucauauggguaggaaucaacacacgaaacaugacaauguccaugucaaugauacucguaggcguaaucaugauguuucugucacucggagugggagcagaccaagguugcgccauaaacuucggcaagugaggacuaguaauaaggaaacuguaugaaugucugugggcaggaagugaagagauccuucuguaaagguuuuuggaauuaugucugcugaauaauaaacuuuuuugaaauaauaaaucugguagaaaaaugagaucuaaaaaaaaaaaaaaaaaaaaaaaaaaaaaaaaaaaaaaaaaaaaaaaaaaaaaaaaaaaaaaaaugcaucccccccccccccccccccccccccccccccaaaggcucuuuucagagccaccagaauu

SEQ ID NO: 707 - RNA, 2386 nt, Artificial Sequence
  mRNA product Design b-4 comprising derived and/or modified sequence from YFV__NC_002031.1__SSjev-prME (polyprotein: aa122-778) (opt11)
gggagagucccgcagucggcguccagcggcucugcuuguucgugugugugucguugcaggccuuauucaagcuuaccauggggaaaaggagcgcgggcucgauaaugugguuggccucgcucgcggucgugaucgcgugcgcgggcgcggugacccuaguccgcaaaaacagauggcuacuacuaaacguaacaagcgaagaccugggcaaaacauucagcguuggcacaggcaauugcacgacaaacauacucgaagcaaaauacuggugccccgacagcauggaauacaacugcccaaaucuaagcccacgcgaagaaccagacgacaucgacuguuggugcuacggagucgaaaacgugagggucgcauacgguaaaugcgacagcgcuggcagaagcagacgcucccgacgagccauugaccucccuacccacgaaaaccacggccuaaaaacccggcaggaaaaauggaugacaggccggaugggagaacgccaacuacagaaaauagagaggugguuuguaagaaacccauucuucgccguaaccgcgcucaccaucgcuuaccucguaggaucaaacaugacgcaaagaguagugaucgcgcuacucguacuagcgguaggccccgccuacagcgcacacugcaucggcaucacugacagggacuucauagaaggcguccacgggggcacguggguuagcgccacacucgaacaagacaaaugcgucacagugauggcaccagacaaacccucacuagacaucucacuagaaaccgucgcaaucgaccgcccagcagaagucaggaaagugugcuacaacgccgucuuaacccacguaaaaauaaaugauaaaugcccaagcacgggagaggcacaccuagcggaagaaaacgaaggcgacaacgcgugcaaacguaccuacagcgacagaggguggggcaacggaugcggcuuauucggaaaaggaaguaucguagcaugcgcaaaauuuaccugcgccaaaagcaugucccuauucgaaguagaucaaacaaaaauacaauacgucauccgagcccaacuacacgugggggcaaaacaagaaaacuggaacaccgacaucaaaacacucaaauucgaugcccuaagcggcucccaagaaguagaguucaucgguuacggcaaggccacgcucgagugccaaguccaaacagcaguagacuucgggaacucauacaucgccgagauggaaacggaaucauggauugucgacagacaaugggcacaagaccuaacacuaccauggcaaucaggcagcggaggggucuggcgagaaaugcaccaccuaguagaguucgaacccccacacgccgcaacaauccgaguacuagcccucggaaaccaagaaggaucacuaaaaaccgcacucaccggcgcaaugcgcguaacaaaagauacaaacgacaacaaccuauacaaacuacacggcggacacgucagcugccgcgucaaacuauccgcccuaacacuaaaaggaacaagcuacaaaauaugcacagacaaaauguucuucgucaaaaauccgacugacacgggccacggcacagucguaaugcaaguaaaagucucaaaaggcgcaccaugcagaaucccaguaaucgucgccgaugaccuaacagccgcaaucaacaagggcauccucguaacaguaaaccccauagccagcaccaacgacgacgaaguccuaaucgaagucaacccacccuucggagacagcuacauaauaguaggacgaggggacucacgccuaaccuaccaauggcacaaagaaggauccucaaucggcaaacuguucacacaaacgaugaaaggcguagaaagacucgcaguaaugggcgauacggccugggacuucucaagcgcgggcggcuucuucacgagcgucggaaaaggcauccauacaguauucggaagcgcauuccaaggccuauuuggaggccucaacuggauaacaaaagugaucaugggagcaguacugaucugggucggcaucaacacccgcaacaugacgaugagcaugucaaugauccucgugggaguaauaaugauguuccucagccugggcguaggcgcaugaggacuaguaauaaggaaacuguaugaaugucugugggcaggaagugaagagauccuucuguaaagguuuuuggaauuaugucugcugaauaauaaacuuuuuugaaauaauaaaucugguagaaaaaugagaucuaaaaaaaaaaaaaaaaaaaaaaaaaaaaaaaaaaaaaaaaaaaaaaaaaaaaaaaaaaaaaaaaugcaucccccccccccccccccccccccccccccccaaaggcucuuuucagagccaccagaauu

SEQ ID NO: 708 - RNA, 2383 nt, Artificial Sequence
  mRNA product Design c-5 comprising derived and/or modified sequence from YFV__NC_002031.1__X-SS-prME-XX (polyprotein: aa92-788) (wt)
gggagagcggcucggccauuuugucccagucaguccggaggcugcggcugcagaaguaccgccugcggaguaacugcaaagaagcuuaccaugagaggauuguccucaaggaaacgccguucccaugauguucugacugugcaauuccuaauuuugggaaugcuguugaugacggguggagugaccuuggugcggaaaaacagaugguugcuccuaaaugugacaucugaggaccucgggaaaacauucucugugggcacaggcaacugcacaacaaacauuuuggaagccaaguacuggugcccagacucaauggaauacaacugucccaaucucaguccaagagaggagccagaugacauugauugcuggugcuaugggguggaaaacguuagagucgcauaugguaagugugacucagcaggcaggucuaggaggucaagaagggccauugacuugccuacgcaugaaaaccaugguuugaagacccggcaagaaaaauggaugacuggaagaaugggugaaaggcaacuccaaaagauugagagaugguucgugaggaaccccuuuuuugcagugacggcucugaccauugccuaccuugugggaagcaacaugacgcaacgagucgugauugcccuacuggucuuggcuguugguccggccuacucagcucacugcauuggaauuacugacagggauuucauugagggggugcauggaggaacuuggguuucagcuacccuggagcaagacaagugugucacuguuauggccccugacaagccuucauuggacaucucacuagagacaguagccauugauagaccugcugaggugaggaaaguguguuacaaugcaguucucacucaugugaagauuaaugacaagugccccagcacuggagaggcccaccuagcugaagagaacgaaggggacaaugcgugcaagcgcacuuauucugauagaggcuggggcaauggcuguggccuauuugggaaagggagcauuguggcaugcgccaaauucacuugugccaaauccaugaguuuguuugagguugaucagaccaaaauucaguaugucaucagagcacaauugcauguaggggccaagcaggaaaauuggaauaccgacauuaagacucucaaguuugaugcccugucaggcucccaggaagucgaguucauuggguauggaaaagcuacacuggaaugccaggugcaaacugcgguggacuuugguaacaguuacaucgcugagauggaaacagagagcuggauaguggacagacagugggcccaggacuugacccugccauggcagaguggaaguggcgggguguggagagagaugcaucaucuugucgaauuugaaccuccgcaugccgccacuaucagaguacuggcccugggaaaccaggaaggcuccuugaaaacagcucuuacuggcgcaaugaggguuacaaaggacacaaaugacaacaaccuuuacaaacuacaugguggacauguuucuugcagagugaaauugucagcuuugacacucaaggggacauccuacaaaauaugcacugacaaaauguuuuuugucaagaacccaacugacacuggccauggcacuguugugaugcaggugaaagugucaaaaggagcccccugcaggauuccagugauaguagcugaugaucuuacagcggcaaucaauaaaggcauuuugguuacaguuaaccccaucgccucaaccaaugaugaugaagugcugauugaggugaacccaccuuuuggagacagcuacauuaucguugggagaggagauucacgucucacuuaccaguggcacaaagagggaagcucaauaggaaaguuguucacucagaccaugaaaggcguggaacgccuggccgucaugggagacaccgccugggauuucagcuccgcuggaggguucuucacuucgguugggaaaggaauccauacgguguuuggcucugccuuucaggggcuauuuggcggcuugaacuggauaacaaaggucaucaugggggcgguacuuauauggguuggcaucaacacaagaaacaugacaauguccaugagcaugaucuugguaggagugaucaugauguuuuugucucuaggaguuggggcggaucaaggaugcgccaucaacuuuggcaaguaaggacuagucccuguucccagagcccacuuuuuuuucuuuuuuugaaauaaaauagccugucuuucagaucuaaaaaaaaaaaaaaaaaaaaaaaaaaaaaaaaaaaaaaaaaaaaaaaaaaaaaaaaaaaaaaaaugcaucccccccccccccccccccccccccccccccaaaggcucuuuucagagccaccagaauu

SEQ ID NO: 709 - RNA, 2350 nt, Artificial Sequence
  mRNA product Design c-5 comprising derived and/or modified sequence from YFV__NC_002031.1__SS-prME (polyprotein: M,aa104-778) (wt)
gggagagcggcucggccauuuugucccagucaguccggaggcugcggcugcagaaguaccgccugcggaguaacugcaaagaagcuuaccauggauguucugacugugcaauuccuaauuuugggaaugcuguugaugacggguggagugaccuuggugcggaaaaacagaugguugcuccuaaaugugacaucugaggaccucgggaaaacauucucugugggcacaggcaacugcacaacaaacauuuuggaagccaaguacuggugcccagacucaauggaauacaacugucccaaucucaguccaagagaggagccagaugacauugauugcuggugcuaugggguggaaaacguuagagucgcauaugguaagugugacucagcaggcaggucuaggaggucaagaagggccauugacuugccuacgcaugaaaaccaugguuugaagacccggcaagaaaaauggaugacuggaagaaugggugaaaggcaacuccaaaagauugagagaugguucgugaggaaccccuuuuuugcagugacggcucugaccauugccuaccuugugggaagcaacaugacgcaacgagucgugauugcccuacuggucuuggcuguugguccggccuacucagcucacugcauuggaauuacugacagggauuucauugagggggugcauggaggaacuuggguuucagcuacccuggagcaagacaagugugucacuguuauggccccugacaagccuucauuggacaucucacuagagacaguagccauugauagaccugcugaggugaggaaaguguguuacaaugcaguucucacucaugugaagauuaaugacaagugccccagcacuggagaggcccaccuagcugaagagaacgaaggggacaaugcgugcaagcgcacuuauucugauagaggcuggggcaauggcuguggccuauuugggaaagggagcauuguggcaugcgccaaauucacuugugccaaauccaugaguuuguuugagguugaucagaccaaaauucaguaugucaucagagcacaauugcauguaggggccaagcaggaaaauuggaauaccgacauuaagacucucaaguuugaugcccugucaggcucccaggaagucgaguucauuggguauggaaaagcuacacuggaaugccaggugcaaacugcgguggacuuugguaacaguuacaucgcugagauggaaacagagagcuggauaguggacagacagugggcccaggacuugacccugccauggcagaguggaaguggcgggguguggagagagaugcaucaucuugucgaauuugaaccuccgcaugccgccacuaucagaguacuggcccugggaaaccaggaaggcuccuugaaaacagcucuuacuggcgcaaugaggguuacaaaggacacaaaugacaacaaccuuuacaaacuacaugguggacauguuucuugcagagugaaauugucagcuuugacacucaaggggacauccuacaaaauaugcacugacaaaauguuuuuugucaagaacccaacugacacuggccauggcacuguugugaugcaggugaaagugucaaaaggagcccccugcaggauuccagugauaguagcugaugaucuuacagcggcaaucaauaaaggcauuuugguuacaguuaaccccaucgccucaaccaaugaugaugaagugcugauugaggugaacccaccuuuuggagacagcuacauuaucguugggagaggagauucacgucucacuuaccaguggcacaaagagggaagcucaauaggaaaguuguucacucagaccaugaaaggcguggaacgccuggccgucaugggagacaccgccugggauuucagcuccgcuggaggguucuucacuucgguugggaaaggaauccauacgguguuuggcucugccuuucaggggcuauuuggcggcuugaacuggauaacaaaggucaucaugggggcgguacuuauauggguuggcaucaacacaagaaacaugacaauguccaugagcaugaucuugguaggagugaucaugauguuuuugucucuaggaguuggggcggaucaaggaugcgccaucaacuuuggcaaguaaggacuagucccuguucccagagcccacuuuuuuuucuuuuuuugaaauaaaauagccugucuuucagaucuaaaaaaaaaaaaaaaaaaaaaaaaaaaaaaaaaaaaaaaaaaaaaaaaaaaaaaaaaaaaaaaaugcaucccccccccccccccccccccccccccccccaaaggcucuuuucagagccaccagaauu

SEQ ID NO: 710 - RNA, 2347 nt, Artificial Sequence
  mRNA product Design c-5 comprising derived and/or modified sequence from YFV__NC_002031.1__SSIgE-prME-XX (polyprotein: aa122-788) (wt)
gggagagcggcucggccauuuugucccagucaguccggaggcugcggcugcagaaguaccgccugcggaguaacugcaaagaagcuuaccauggacuggaccuggauccuguuccucguggccgccgcgacccgcguccacagcgugaccuuggugcggaaaaacagaugguugcuccuaaaugugacaucugaggaccucgggaaaacauucucugugggcacaggcaacugcacaacaaacauuuuggaagccaaguacuggugcccagacucaauggaauacaacugucccaaucucaguccaagagaggagccagaugacauugauugcuggugcuaugggguggaaaacguuagagucgcauaugguaagugugacucagcaggcaggucuaggaggucaagaagggccauugacuugccuacgcaugaaaaccaugguuugaagacccggcaagaaaaauggaugacuggaagaaugggugaaaggcaacuccaaaagauugagagaugguucgugaggaaccccuuuuuugcagugacggcucugaccauugccuaccuugugggaagcaacaugacgcaacgagucgugauugcccuacuggucuuggcuguugguccggccuacucagcucacugcauuggaauuacugacagggauuucauugagggggugcauggaggaacuuggguuucagcuacccuggagcaagacaagugugucacuguuauggccccugacaagccuucauuggacaucucacuagagacaguagccauugauagaccugcugaggugaggaaaguguguuacaaugcaguucucacucaugugaagauuaaugacaagugccccagcacuggagaggcccaccuagcugaagagaacgaaggggacaaugcgugcaagcgcacuuauucugauagaggcuggggcaauggcuguggccuauuugggaaagggagcauuguggcaugcgccaaauucacuugugccaaauccaugaguuuguuugagguugaucagaccaaaauucaguaugucaucagagcacaauugcauguaggggccaagcaggaaaauuggaauaccgacauuaagacucucaaguuugaugcccugucaggcucccaggaagucgaguucauuggguauggaaaagcuacacuggaaugccaggugcaaacugcgguggacuuugguaacaguuacaucgcugagauggaaacagagagcuggauaguggacagacagugggcccaggacuugacccugccauggcagaguggaaguggcgggguguggagagagaugcaucaucuugucgaauuugaaccuccgcaugccgccacuaucagaguacuggcccugggaaaccaggaaggcuccuugaaaacagcucuuacuggcgcaaugaggguuacaaaggacacaaaugacaacaaccuuuacaaacuacaugguggacauguuucuugcagagugaaauugucagcuuugacacucaaggggacauccuacaaaauaugcacugacaaaauguuuuuugucaagaacccaacugacacuggccauggcacuguugugaugcaggugaaagugucaaaaggagcccccugcaggauuccagugauaguagcugaugaucuuacagcggcaaucaauaaaggcauuuugguuacaguuaaccccaucgccucaaccaaugaugaugaagugcugauugaggugaacccaccuuuuggagacagcuacauuaucguugggagaggagauucacgucucacuuaccaguggcacaaagagggaagcucaauaggaaaguuguucacucagaccaugaaaggcguggaacgccuggccgucaugggagacaccgccugggauuucagcuccgcuggaggguucuucacuucgguugggaaaggaauccauacgguguuuggcucugccuuucaggggcuauuuggcggcuugaacuggauaacaaaggucaucaugggggcgguacuuauauggguuggcaucaacacaagaaacaugacaauguccaugagcaugaucuugguaggagugaucaugauguuuuugucucuaggaguuggggcggaucaaggaugcgccaucaacuuuggcaaguaaggacuagucccuguucccagagcccacuuuuuuuucuuuuuuugaaauaaaauagccugucuuucagaucuaaaaaaaaaaaaaaaaaaaaaaaaaaaaaaaaaaaaaaaaaaaaaaaaaaaaaaaaaaaaaaaaugcaucccccccccccccccccccccccccccccccaaaggcucuuuucagagccaccagaauu

SEQ ID NO: 711 - RNA, 2317 nt, Artificial Sequence
  mRNA product Design c-5 comprising derived and/or modified sequence from YFV__NC_002031.1__SSIgE-prME (polyprotein: aa122-778) (wt)
gggagagcggcucggccauuuugucccagucaguccggaggcugcggcugcagaaguaccgccugcggaguaacugcaaagaagcuuaccauggacuggaccuggauccuguuccucguggccgccgcgacccgcguccacagcgugaccuuggugcggaaaaacagaugguugcuccuaaaugugacaucugaggaccucgggaaaacauucucugugggcacaggcaacugcacaacaaacauuuuggaagccaaguacuggugcccagacucaauggaauacaacugucccaaucucaguccaagagaggagccagaugacauugauugcuggugcuaugggguggaaaacguuagagucgcauaugguaagugugacucagcaggcaggucuaggaggucaagaagggccauugacuugccuacgcaugaaaaccaugguuugaagacccggcaagaaaaauggaugacuggaagaaugggugaaaggcaacuccaaaagauugagagaugguucgugaggaaccccuuuuuugcagugacggcucugaccauugccuaccuugugggaagcaacaugacgcaacgagucgugauugcccuacuggucuuggcuguugguccggccuacucagcucacugcauuggaauuacugacagggauuucauugagggggugcauggaggaacuuggguuucagcuacccuggagcaagacaagugugucacuguuauggccccugacaagccuucauuggacaucucacuagagacaguagccauugauagaccugcugaggugaggaaaguguguuacaaugcaguucucacucaugugaagauuaaugacaagugccccagcacuggagaggcccaccuagcugaagagaacgaaggggacaaugcgugcaagcgcacuuauucugauagaggcuggggcaauggcuguggccuauuugggaaagggagcauuguggcaugcgccaaauucacuugugccaaauccaugaguuuguuugagguugaucagaccaaaauucaguaugucaucagagcacaauugcauguaggggccaagcaggaaaauuggaauaccgacauuaagacucucaaguuugaugcccugucaggcucccaggaagucgaguucauuggguauggaaaagcuacacuggaaugccaggugcaaacugcgguggacuuugguaacaguuacaucgcugagauggaaacagagagcuggauaguggacagacagugggcccaggacuugacccugccauggcagaguggaaguggcgggguguggagagagaugcaucaucuugucgaauuugaaccuccgcaugccgccacuaucagaguacuggcccugggaaaccaggaaggcuccuugaaaacagcucuuacuggcgcaaugaggguuacaaaggacacaaaugacaacaaccuuuacaaacuacaugguggacauguuucuugcagagugaaauugucagcuuugacacucaaggggacauccuacaaaauaugcacugacaaaauguuuuuugucaagaacccaacugacacuggccauggcacuguugugaugcaggugaaagugucaaaaggagcccccugcaggauuccagugauaguagcugaugaucuuacagcggcaaucaauaaaggcauuuugguuacaguuaaccccaucgccucaaccaaugaugaugaagugcugauugaggugaacccaccuuuuggagacagcuacauuaucguugggagaggagauucacgucucacuuaccaguggcacaaagagggaagcucaauaggaaaguuguucacucagaccaugaaaggcguggaacgccuggccgucaugggagacaccgccugggauuucagcuccgcuggaggguucuucacuucgguugggaaaggaauucauacgguguuuggcucugccuuucaggggcuauuuggcggcuugaacuggauaacaaaggucaucaugggggcgguacuuauauggguuggcaucaacacaagaaacaugacaauguccaugagcaugaucuugguaggagugaucaugauguuuuugucucuaggaguuggggcguaaggacuagucccuguucccagagcccacuuuuuuuucuuuuuuugaaauaaaauagccugucuuucagaucuaaaaaaaaaaaaaaaaaaaaaaaaaaaaaaaaaaaaaaaaaaaaaaaaaaaaaaaaaaaaaaaaugcaucccccccccccccccccccccccccccccccaaaggcucuuuucagagccaccagaauu

SEQ ID NO: 712 - RNA, 2365 nt, Artificial Sequence
  mRNA product Design c-5 comprising derived and/or modified sequence from YFV__NC_002031.1__SSjev-prME-XX (polyprotein: aa122-788) (wt)
gggagagcggcucggccauuuugucccagucaguccggaggcugcggcugcagaaguaccgccugcggaguaacugcaaagaagcuuaccauggguaaacggagcgcuggcucaaucauguggcucgcgagcuuggcaguugucauagcuugugcaggagccgugaccuuggugcggaaaaacagaugguugcuccuaaaugugacaucugaggaccucgggaaaacauucucugugggcacaggcaacugcacaacaaacauuuuggaagccaaguacuggugcccagacucaauggaauacaacugucccaaucucaguccaagagaggagccagaugacauugauugcuggugcuaugggguggaaaacguuagagucgcauaugguaagugugacucagcaggcaggucuaggaggucaagaagggccauugacuugccuacgcaugaaaaccaugguuugaagacccggcaagaaaaauggaugacuggaagaaugggugaaaggcaacuccaaaagauugagagaugguucgugaggaaccccuuuuuugcagugacggcucugaccauugccuaccuugugggaagcaacaugacgcaacgagucgugauugcccuacuggucuuggcuguugguccggccuacucagcucacugcauuggaauuacugacagggauuucauugagggggugcauggaggaacuuggguuucagcuacccuggagcaagacaagugugucacuguuauggccccugacaagccuucauuggacaucucacuagagacaguagccauugauagaccugcugaggugaggaaaguguguuacaaugcaguucucacucaugugaagauuaaugacaagugccccagcacuggagaggcccaccuagcugaagagaacgaaggggacaaugcgugcaagcgcacuuauucugauagaggcuggggcaauggcuguggccuauuugggaaagggagcauuguggcaugcgccaaauucacuugugccaaauccaugaguuuguuugagguugaucagaccaaaauucaguaugucaucagagcacaauugcauguaggggccaagcaggaaaauuggaauaccgacauuaagacucucaaguuugaugcccugucaggcucccaggaagucgaguucauuggguauggaaaagcuacacuggaaugccaggugcaaacugcgguggacuuugguaacaguuacaucgcugagauggaaacagagagcuggauaguggacagacagugggcccaggacuugacccugccauggcagaguggaaguggcgggguguggagagagaugcaucaucuugucgaauuugaaccuccgcaugccgccacuaucagaguacuggcccugggaaaccaggaaggcuccuugaaaacagcucuuacuggcgcaaugaggguuacaaaggacacaaaugacaacaaccuuuacaaacuacaugguggacauguuucuugcagagugaaauugucagcuuugacacucaaggggacauccuacaaaauaugcacugacaaaauguuuuuugucaagaacccaacugacacuggccauggcacuguugugaugcaggugaaagugucaaaaggagcccccugcaggauuccagugauaguagcugaugaucuuacagcggcaaucaauaaaggcauuuugguuacaguuaaccccaucgccucaaccaaugaugaugaagugcugauugaggugaacccaccuuuuggagacagcuacauuaucguugggagaggagauucacgucucacuuaccaguggcacaaagagggaagcucaauaggaaaguuguucacucagaccaugaaaggcguggaacgccuggccgucaugggagacaccgccugggauuucagcuccgcuggaggguucuucacuucgguugggaaaggaauccauacgguguuuggcucugccuuucaggggcuauuuggcggcuugaacuggauaacaaaggucaucaugggggcgguacuuauauggguuggcaucaacacaagaaacaugacaauguccaugagcaugaucuugguaggagugaucaugauguuuuugucucuaggaguuggggcggaucaaggaugcgccaucaacuuuggcaaguaaggacuagucccuguucccagagcccacuuuuuuuucuuuuuuugaaauaaaauagccugucuuucagaucuaaaaaaaaaaaaaaaaaaaaaaaaaaaaaaaaaaaaaaaaaaaaaaaaaaaaaaaaaaaaaaaaugcaucccccccccccccccccccccccccccccccaaaggcucuuuucagagccaccagaauu

SEQ ID NO: 713 - RNA, 2335 nt, Artificial Sequence
  mRNA product Design c-5 comprising derived and/or modified sequence from YFV__NC_002031.1__SSjev-prME (polyprotein: aa122-778) (wt)
gggagagcggcucggccauuuugucccagucaguccggaggcugcggcugcagaaguaccgccugcggaguaacugcaaagaagcuuaccauggguaaacggagcgcuggcucaaucauguggcucgcgagcuuggcaguugucauagcuugugcaggagccgugaccuuggugcggaaaaacagaugguugcuccuaaaugugacaucugaggaccucgggaaaacauucucugugggcacaggcaacugcacaacaaacauuuuggaagccaaguacuggugcccagacucaauggaauacaacugucccaaucucaguccaagagaggagccagaugacauugauugcuggugcuaugggguggaaaacguuagagucgcauaugguaagugugacucagcaggcaggucuaggaggucaagaagggccauugacuugccuacgcaugaaaaccaugguuugaagacccggcaagaaaaauggaugacuggaagaaugggugaaaggcaacuccaaaagauugagagaugguucgugaggaaccccuuuuuugcagugacggcucugaccauugccuaccuugugggaagcaacaugacgcaacgagucgugauugcccuacuggucuuggcuguugguccggccuacucagcucacugcauuggaauuacugacagggauuucauugagggggugcauggaggaacuuggguuucagcuacccuggagcaagacaagugugucacuguuauggccccugacaagccuucauuggacaucucacuagagacaguagccauugauagaccugcugaggugaggaaaguguguuacaaugcaguucucacucaugugaagauuaaugacaagugccccagcacuggagaggcccaccuagcugaagagaacgaaggggacaaugcgugcaagcgcacuuauucugauagaggcuggggcaauggcuguggccuauuugggaaagggagcauuguggcaugcgccaaauucacuugugccaaauccaugaguuuguuugagguugaucagaccaaaauucaguaugucaucagagcacaauugcauguaggggccaagcaggaaaauuggaauaccgacauuaagacucucaaguuugaugcccugucaggcucccaggaagucgaguucauuggguauggaaaagcuacacuggaaugccaggugcaaacugcgguggacuuugguaacaguuacaucgcugagauggaaacagagagcuggauaguggacagacagugggcccaggacuugacccugccauggcagaguggaaguggcgggguguggagagagaugcaucaucuugucgaauuugaaccuccgcaugccgccacuaucagaguacuggcccugggaaaccaggaaggcuccuugaaaacagcucuuacuggcgcaaugaggguuacaaaggacacaaaugacaacaaccuuuacaaacuacaugguggacauguuucuugcagagugaaauugucagcuuugacacucaaggggacauccuacaaaauaugcacugacaaaauguuuuuugucaagaacccaacugacacuggccauggcacuguugugaugcaggugaaagugucaaaaggagcccccugcaggauuccagugauaguagcugaugaucuuacagcggcaaucaauaaaggcauuuugguuacaguuaaccccaucgccucaaccaaugaugaugaagugcugauugaggugaacccaccuuuuggagacagcuacauuaucguugggagaggagauucacgucucacuuaccaguggcacaaagagggaagcucaauaggaaaguuguucacucagaccaugaaaggcguggaacgccuggccgucaugggagacaccgccugggauuucagcuccgcuggaggguucuucacuucgguugggaaaggaauucauacgguguuuggcucugccuuucaggggcuauuuggcggcuugaacuggauaacaaaggucaucaugggggcgguacuuauauggguuggcaucaacacaagaaacaugacaauguccaugagcaugaucuugguaggagugaucaugauguuuuugucucuaggaguuggggcguaaggacuagucccuguucccagagcccacuuuuuuuucuuuuuuugaaauaaaauagccugucuuucagaucuaaaaaaaaaaaaaaaaaaaaaaaaaaaaaaaaaaaaaaaaaaaaaaaaaaaaaaaaaaaaaaaaugcaucccccccccccccccccccccccccccccccaaaggcucuuuucagagccaccagaauu

SEQ ID NO: 714 - RNA, 2383 nt, Artificial Sequence
  mRNA product Design c-5 comprising derived and/or modified sequence from YFV__NC_002031.1__X-SS-prME-XX (polyprotein: aa92-788) (opt1) R7231
gggagagcggcucggccauuuugucccagucaguccggaggcugcggcugcagaaguaccgccugcggaguaacugcaaagaagcuuaccaugcggggccugagcucccgcaagcggcgcagccacgacgugcucaccguccaguuccugauccuggggaugcuccugaugaccggcggggugacgcuggugcggaagaaccgcuggcuccugcugaacgucaccuccgaggaccucggcaagaccuucagcguggggaccggcaacugcacgaccaacauccuggaggccaaguacuggugccccgacuccauggaguacaacugcccgaaccugagcccccgggaggagcccgacgacaucgacugcuggugcuacggcguggagaacguccgcguggccuacgggaagugcgacuccgcgggccggagccgccggucccgccgggccaucgaccuccccacccacgagaaccacgggcugaagacccgccaggagaaguggaugacgggccggaugggggagcgccagcugcagaagaucgagcggugguucgugcgcaacccguucuucgccgucaccgcccucaccaucgccuaccuggugggcagcaacaugacccagcggguggucaucgcgcugcucgugcuggccgugggccccgccuacuccgcccacugcaucgggaucacggaccgcgacuucaucgagggcguccacgggggcaccugggugagcgcgacccuggagcaggacaagugcgugaccgucauggcccccgacaagcccucccucgacaucagccuggagacgguggccaucgaccggccggccgaggugcgcaaggucugcuacaacgccgugcugacccacgugaagaucaacgacaagugccccuccaccggcgaggcgcaccucgccgaggagaacgagggggacaacgccugcaagcggaccuacagcgaccggggcugggggaacggcugcgggcuguucggcaagggcuccaucgucgccugcgccaaguucacgugcgcgaagagcaugucccuguucgagguggaccagaccaagauccaguacgucauccgcgcccagcuccacgugggggccaagcaggagaacuggaacaccgacaucaagacccugaaguucgacgcccugagcggcagccaggagguggaguucaucggguacggcaaggccacgcucgagugccagguccagaccgcgguggacuucgggaacuccuacaucgccgagauggagaccgagagcuggaucguggaccggcagugggcccaggaccugacccugcccuggcaguccggcagcggcggggucuggcgcgagaugcaccaccucguggaguucgagcccccgcacgccgccacgauccgggugcuggcgcugggcaaccaggaggggucccucaagaccgcccugaccggcgccaugcgcgucaccaaggacacgaacgacaacaaccuguacaagcuccacgggggccacgugagcugccgggugaagcuguccgcccugacccucaagggcaccagcuacaagaucugcaccgacaagauguucuucgucaagaaccccacggacaccgggcacggcaccguggugaugcaggucaagguguccaagggggcgcccugccgcaucccggugaucgucgccgacgaccugaccgccgccaucaacaagggcauccuggugaccgugaacccgaucgccagcacgaacgacgacgagguccucaucgaggugaacccccccuucggcgacuccuacaucaucguggggcggggcgacagccgccugaccuaccaguggcacaaggagggguccagcaucggcaagcuguucacccagaccaugaagggggucgagcggcuggcggugaugggcgacacggccugggacuucuccagcgccggcggguucuucaccuccgugggcaaggggauccacaccgucuucggcagcgccuuccaggggcucuucggcggccugaacuggaucaccaaggugaucaugggggccgugcugaucugggucggcaucaacacgcgcaacaugaccauguccaugagcaugauccucgugggggugaucaugauguuccugagccugggcgucggggcggaccagggcugcgccaucaacuucggcaagugaggacuagucccuguucccagagcccacuuuuuuuucuuuuuuugaaauaaaauagccugucuuucagaucuaaaaaaaaaaaaaaaaaaaaaaaaaaaaaaaaaaaaaaaaaaaaaaaaaaaaaaaaaaaaaaaaugcaucccccccccccccccccccccccccccccccaaaggcucuuuucagagccaccagaauu

SEQ ID NO: 715 - RNA, 2320 nt, Artificial Sequence
  mRNA product Design c-5 comprising derived and/or modified sequence from YFV__NC_002031.1__SS-prME (polyprotein: M,aa104-778) (opt1)
gggagagcggcucggccauuuugucccagucaguccggaggcugcggcugcagaaguaccgccugcggaguaacugcaaagaagcuuaccauggacgugcugaccguccaguuccucauccugggcaugcugcucaugaccgggggcgugacccugguccggaagaaccgcuggcuccugcugaacgugaccagcgaggaccucggcaagacguucuccguggggaccggcaacugcaccaccaacauccuggaggccaaguacuggugccccgacagcauggaguacaacugccccaaccuguccccgcgggaggagcccgacgacaucgacugcuggugcuacggggucgagaacgugcgcguggccuacggcaagugcgacagcgcggggcggucccgccggagccgccgggccaucgaccugcccacccacgagaaccacggccucaagacccggcaggagaaguggaugacggggcgcaugggcgagcggcagcugcagaagaucgagcgcugguucgugcggaacccguucuucgccgucaccgcgcugaccaucgccuaccucguggggagcaacaugacccagcgcguggucaucgcccugcuggugcucgccgugggccccgccuacuccgcgcacugcaucgggaucacggaccgggacuucaucgagggcguccacggcgggaccugggugagcgccacccuggagcaggacaagugcgugaccgucauggcccccgacaagcccucccuggacaucagccucgagacgguggccaucgaccgcccggcggaggugcggaaggucugcuacaacgccgugcugacccacgugaagaucaacgacaagugccccuccaccggcgaggcccaccuggccgaggagaacgagggggacaacgccugcaagcgcaccuacagcgaccggggcugggggaacggcugcggccucuucgggaagggcuccaucgucgcgugcgccaaguucacgugcgccaagagcaugucccuguucgagguggaccagaccaagauccaguacgugauccgcgcccagcugcacgucggggccaagcaggagaacuggaacaccgacaucaagacccucaaguucgacgcgcugagcggcucccaggagguggaguucaucggcuacgggaaggccacgcuggagugccaggugcagaccgccgucgacuucggcaacagcuacaucgccgagauggagaccgaguccuggaucguggaccggcagugggcccaggaccucacccugcccuggcagagcggguccggcgggguguggcgcgagaugcaccaccuggucgaguucgagcccccgcacgcggccacgauccgggugcucgcccugggcaaccaggagggcagccugaagaccgcccucaccggggccaugcgcgucaccaaggacacgaacgacaacaaccuguacaagcugcacggcgggcacguguccugccgggugaagcucagcgcgcugacccugaagggcaccuccuacaagaucugcaccgacaagauguucuucgucaagaaccccacggacaccgggcacggcaccguggugaugcaggucaaggugagcaagggcgcccccugccgcaucccggugaucgucgccgacgaccucaccgccgcgaucaacaaggggauccuggugacggugaaccccaucgccagcaccaacgacgacgagguccugaucgaggugaacccgcccuucggcgacuccuacaucaucguggggcggggcgacagccgccucaccuaccaguggcacaaggagggguccagcaucggcaagcuguucacccagacgaugaagggcgucgagcggcuggccgugaugggggacaccgccugggacuucuccagcgccggcggguucuucaccuccgugggcaagggcauccacaccgucuucgggagcgcguuccagggccucuucgggggccugaacuggaucaccaaggugaucaugggggccgugcugaucugggucggcaucaacacgcgcaacaugaccauguccaugagcaugauccucgugggcgugaucaugauguuccugucccugggggucggcgccugaggacuagucccuguucccagagcccacuuuuuuuucuuuuuuugaaauaaaauagccugucuuucagaucuaaaaaaaaaaaaaaaaaaaaaaaaaaaaaaaaaaaaaaaaaaaaaaaaaaaaaaaaaaaaaaaaugcaucccccccccccccccccccccccccccccccaaaggcucuuuucagagccaccagaauu

SEQ ID NO: 716 - RNA, 2347 nt, Artificial Sequence
  mRNA product Design c-5 comprising derived and/or modified sequence from YFV__NC_002031.1__SSIgE-prME-XX (polyprotein: aa122-788) (opt1)
gggagagcggcucggccauuuugucccagucaguccggaggcugcggcugcagaaguaccgccugcggaguaacugcaaagaagcuuaccauggacuggaccuggauccuguuccucguggccgccgcgacccgcguccacagcgugacgcuggugcggaagaaccgcuggcuccugcugaacgucaccuccgaggaccucggcaagaccuucagcguggggaccggcaacugcacgaccaacauccuggaggccaaguacuggugccccgacuccauggaguacaacugcccgaaccugagcccccgggaggagcccgacgacaucgacugcuggugcuacggcguggagaacguccgcguggccuacgggaagugcgacuccgcgggccggagccgccggucccgccgggccaucgaccuccccacccacgagaaccacgggcugaagacccgccaggagaaguggaugacgggccggaugggggagcgccagcugcagaagaucgagcggugguucgugcgcaacccguucuucgccgucaccgcccucaccaucgccuaccuggugggcagcaacaugacccagcggguggucaucgcgcugcucgugcuggccgugggccccgccuacuccgcccacugcaucgggaucacggaccgcgacuucaucgagggcguccacgggggcaccugggugagcgcgacccuggagcaggacaagugcgugaccgucauggcccccgacaagcccucccucgacaucagccuggagacgguggccaucgaccggccggccgaggugcgcaaggucugcuacaacgccgugcugacccacgugaagaucaacgacaagugccccuccaccggcgaggcgcaccucgccgaggagaacgagggggacaacgccugcaagcggaccuacagcgaccggggcugggggaacggcugcgggcuguucggcaagggcuccaucgucgccugcgccaaguucacgugcgcgaagagcaugucccuguucgagguggaccagaccaagauccaguacgucauccgcgcccagcuccacgugggggccaagcaggagaacuggaacaccgacaucaagacccugaaguucgacgcccugagcggcagccaggagguggaguucaucggguacggcaaggccacgcucgagugccagguccagaccgcgguggacuucgggaacuccuacaucgccgagauggagaccgagagcuggaucguggaccggcagugggcccaggaccugacccugcccuggcaguccggcagcggcggggucuggcgcgagaugcaccaccucguggaguucgagcccccgcacgccgccacgauccgggugcuggcgcugggcaaccaggaggggucccucaagaccgcccugaccggcgccaugcgcgucaccaaggacacgaacgacaacaaccuguacaagcuccacgggggccacgugagcugccgggugaagcuguccgcccugacccucaagggcaccagcuacaagaucugcaccgacaagauguucuucgucaagaaccccacggacaccgggcacggcaccguggugaugcaggucaagguguccaagggggcgcccugccgcaucccggugaucgucgccgacgaccugaccgccgccaucaacaagggcauccuggugaccgugaacccgaucgccagcacgaacgacgacgagguccucaucgaggugaacccccccuucggcgacuccuacaucaucguggggcggggcgacagccgccugaccuaccaguggcacaaggagggguccagcaucggcaagcuguucacccagaccaugaagggggucgagcggcuggcggugaugggcgacacggccugggacuucuccagcgccggcggguucuucaccuccgugggcaaggggauccacaccgucuucggcagcgccuuccaggggcucuucggcggccugaacuggaucaccaaggugaucaugggggccgugcugaucugggucggcaucaacacgcgcaacaugaccauguccaugagcaugauccucgugggggugaucaugauguuccugagccugggcgucggggcggaccagggcugcgccaucaacuucggcaagugaggacuagucccuguucccagagcccacuuuuuuuucuuuuuuugaaauaaaauagccugucuuucagaucuaaaaaaaaaaaaaaaaaaaaaaaaaaaaaaaaaaaaaaaaaaaaaaaaaaaaaaaaaaaaaaaaugcaucccccccccccccccccccccccccccccccaaaggcucuuuucagagccaccagaauu

SEQ ID NO: 717 - RNA, 2317 nt, Artificial Sequence
  mRNA product Design c-5 comprising derived and/or modified sequence from YFV__NC_002031.1__SSIgE-prME (polyprotein: aa122-778) (opt1)
gggagagcggcucggccauuuugucccagucaguccggaggcugcggcugcagaaguaccgccugcggaguaacugcaaagaagcuuaccauggacuggaccuggauccuguuccucguggccgccgcgacccgcguccacagcgugacccugguccgcaagaaccgguggcuccugcugaacgugaccagcgaggaccucggcaagacguucuccguggggaccggcaacugcaccaccaacauccuggaggccaaguacuggugccccgacagcauggaguacaacugcccgaaccuguccccgcgcgaggagcccgacgacaucgacugcuggugcuacggggucgagaacgugcggguggccuacggcaagugcgacagcgcggggcgcucccggcgcagccggcgcgccaucgaccuccccacgcacgagaaccacggccugaagacccggcaggagaaguggaugaccggccgcaugggggagcggcagcugcagaagaucgagcgcugguucguccggaaccccuucuucgccgugaccgcccucacgaucgccuaccuggugggcuccaacaugacccagcgcgucgugaucgcgcugcucgugcuggccgucgggcccgccuacagcgcccacugcaucggcaucaccgaccgggacuucaucgagggggugcacggcggcaccuggguguccgcgacgcuggagcaggacaagugcgucaccgugauggcccccgacaagcccagccucgacaucucccuggagaccguggccaucgaccgcccggccgagguccggaaggugugcuacaacgccgugcugacccacgucaagaucaacgacaagugccccagcacgggggaggcgcaccucgccgaggagaacgagggcgacaacgccugcaagcgcaccuacuccgaccggggguggggcaacggcugcgggcuguucggcaaggggagcaucguggccugcgccaaguucaccugcgcgaaguccaugagccuguucgagguggaccagaccaagauccaguacgucauccgcgcccagcuccacgugggcgccaagcaggagaacuggaacacggacaucaagacccugaaguucgacgcccuguccgggagccaggaggucgaguucaucggcuacggcaaggccacccucgagugccaggugcagaccgcgguggacuucgggaacuccuacaucgccgagauggagacggagagcuggaucgucgaccggcagugggcccaggaccugacccugcccuggcagagcggcuccgggggcguguggcgcgagaugcaccaccucguggaguucgagcccccgcacgccgccaccauccgcguccuggcgcuggggaaccaggagggcagccucaagaccgcccugacgggcgccaugcgggugaccaaggacaccaacgacaacaaccuguacaagcuccacgggggccacguguccugccgcgucaagcugagcgcccugacccucaaggggacguccuacaagaucugcaccgacaagauguucuucgugaagaaccccaccgacaccggccacgggacgguggucaugcaggugaaggugagcaagggcgcgcccugccggauccccgucaucguggccgacgaccugaccgccgccaucaacaagggcauccuggugaccgucaacccgaucgccuccaccaacgacgacgaggugcucaucgaggugaacccgcccuucggggacagcuacaucaucgucggccgcggggacucccggcugaccuaccaguggcacaaggagggcagcuccaucggcaagcuguucacgcagaccaugaaggggguggagcgccucgcggugaugggcgacaccgccugggacuucagcuccgccgggggcuucuucaccagcgucgggaagggcauccacacgguguucggcuccgccuuccaggggcuguucggcgggcugaacuggaucaccaaggugaucaugggcgccguccucaucuggguggggaucaacacccggaacaugaccaugagcauguccaugauccuggugggcgucaucaugauguuccugagccugggcgugggggcgugaggacuagucccuguucccagagcccacuuuuuuuucuuuuuuugaaauaaaauagccugucuuucagaucuaaaaaaaaaaaaaaaaaaaaaaaaaaaaaaaaaaaaaaaaaaaaaaaaaaaaaaaaaaaaaaaaugcaucccccccccccccccccccccccccccccccaaaggcucuuuucagagccaccagaauu

SEQ ID NO: 718 - RNA, 2365 nt, Artificial Sequence
  mRNA product Design c-5 comprising derived and/or modified sequence from YFV__NC_002031.1__SSjev-prME-XX (polyprotein: aa122-788) (opt1)
gggagagcggcucggccauuuugucccagucaguccggaggcugcggcugcagaaguaccgccugcggaguaacugcaaagaagcuuaccaugggcaagcgcagcgccggguccaucauguggcuggccagccucgcgguggucaucgccugcgccggcgccgugacgcuggugcggaagaaccgcuggcuccugcugaacgucaccuccgaggaccucggcaagaccuucagcguggggaccggcaacugcacgaccaacauccuggaggccaaguacuggugccccgacuccauggaguacaacugcccgaaccugagcccccgggaggagcccgacgacaucgacugcuggugcuacggcguggagaacguccgcguggccuacgggaagugcgacuccgcgggccggagccgccggucccgccgggccaucgaccuccccacccacgagaaccacgggcugaagacccgccaggagaaguggaugacgggccggaugggggagcgccagcugcagaagaucgagcggugguucgugcgcaacccguucuucgccgucaccgcccucaccaucgccuaccuggugggcagcaacaugacccagcggguggucaucgcgcugcucgugcuggccgugggccccgccuacuccgcccacugcaucgggaucacggaccgcgacuucaucgagggcguccacgggggcaccugggugagcgcgacccuggagcaggacaagugcgugaccgucauggcccccgacaagcccucccucgacaucagccuggagacgguggccaucgaccggccggccgaggugcgcaaggucugcuacaacgccgugcugacccacgugaagaucaacgacaagugccccuccaccggcgaggcgcaccucgccgaggagaacgagggggacaacgccugcaagcggaccuacagcgaccggggcugggggaacggcugcgggcuguucggcaagggcuccaucgucgccugcgccaaguucacgugcgcgaagagcaugucccuguucgagguggaccagaccaagauccaguacgucauccgcgcccagcuccacgugggggccaagcaggagaacuggaacaccgacaucaagacccugaaguucgacgcccugagcggcagccaggagguggaguucaucggguacggcaaggccacgcucgagugccagguccagaccgcgguggacuucgggaacuccuacaucgccgagauggagaccgagagcuggaucguggaccggcagugggcccaggaccugacccugcccuggcaguccggcagcggcggggucuggcgcgagaugcaccaccucguggaguucgagcccccgcacgccgccacgauccgggugcuggcgcugggcaaccaggaggggucccucaagaccgcccugaccggcgccaugcgcgucaccaaggacacgaacgacaacaaccuguacaagcuccacgggggccacgugagcugccgggugaagcuguccgcccugacccucaagggcaccagcuacaagaucugcaccgacaagauguucuucgucaagaaccccacggacaccgggcacggcaccguggugaugcaggucaagguguccaagggggcgcccugccgcaucccggugaucgucgccgacgaccugaccgccgccaucaacaagggcauccuggugaccgugaacccgaucgccagcacgaacgacgacgagguccucaucgaggugaacccccccuucggcgacuccuacaucaucguggggcggggcgacagccgccugaccuaccaguggcacaaggagggguccagcaucggcaagcuguucacccagaccaugaagggggucgagcggcuggcggugaugggcgacacggccugggacuucuccagcgccggcggguucuucaccuccgugggcaaggggauccacaccgucuucggcagcgccuuccaggggcucuucggcggccugaacuggaucaccaaggugaucaugggggccgugcugaucugggucggcaucaacacgcgcaacaugaccauguccaugagcaugauccucgugggggugaucaugauguuccugagccugggcgucggggcggaccagggcugcgccaucaacuucggcaagugaggacuagucccuguucccagagcccacuuuuuuuucuuuuuuugaaauaaaauagccugucuuucagaucuaaaaaaaaaaaaaaaaaaaaaaaaaaaaaaaaaaaaaaaaaaaaaaaaaaaaaaaaaaaaaaaaugcaucccccccccccccccccccccccccccccccaaaggcucuuuucagagccaccagaauu

SEQ ID NO: 719 - RNA, 2335 nt, Artificial Sequence
  mRNA product Design c-5 comprising derived and/or modified sequence from YFV__NC_002031.1__SSjev-prME (polyprotein: aa122-778) (opt1)
gggagagcggcucggccauuuugucccagucaguccggaggcugcggcugcagaaguaccgccugcggaguaacugcaaagaagcuuaccaugggcaagcgcagcgccggguccaucauguggcuggccagccucgcgguggucaucgccugcgccggcgccgugacccugguccgcaagaaccgguggcuccugcugaacgugaccagcgaggaccucggcaagacguucuccguggggaccggcaacugcaccaccaacauccuggaggccaaguacuggugccccgacagcauggaguacaacugcccgaaccuguccccgcgcgaggagcccgacgacaucgacugcuggugcuacggggucgagaacgugcggguggccuacggcaagugcgacagcgcggggcgcucccggcgcagccggcgcgccaucgaccuccccacgcacgagaaccacggccugaagacccggcaggagaaguggaugaccggccgcaugggggagcggcagcugcagaagaucgagcgcugguucguccggaaccccuucuucgccgugaccgcccucacgaucgccuaccuggugggcuccaacaugacccagcgcgucgugaucgcgcugcucgugcuggccgucgggcccgccuacagcgcccacugcaucggcaucaccgaccgggacuucaucgagggggugcacggcggcaccuggguguccgcgacgcuggagcaggacaagugcgucaccgugauggcccccgacaagcccagccucgacaucucccuggagaccguggccaucgaccgcccggccgagguccggaaggugugcuacaacgccgugcugacccacgucaagaucaacgacaagugccccagcacgggggaggcgcaccucgccgaggagaacgagggcgacaacgccugcaagcgcaccuacuccgaccggggguggggcaacggcugcgggcuguucggcaaggggagcaucguggccugcgccaaguucaccugcgcgaaguccaugagccuguucgagguggaccagaccaagauccaguacgucauccgcgcccagcuccacgugggcgccaagcaggagaacuggaacacggacaucaagacccugaaguucgacgcccuguccgggagccaggaggucgaguucaucggcuacggcaaggccacccucgagugccaggugcagaccgcgguggacuucgggaacuccuacaucgccgagauggagacggagagcuggaucgucgaccggcagugggcccaggaccugacccugcccuggcagagcggcuccgggggcguguggcgcgagaugcaccaccucguggaguucgagcccccgcacgccgccaccauccgcguccuggcgcuggggaaccaggagggcagccucaagaccgcccugacgggcgccaugcgggugaccaaggacaccaacgacaacaaccuguacaagcuccacgggggccacguguccugccgcgucaagcugagcgcccugacccucaaggggacguccuacaagaucugcaccgacaagauguucuucgugaagaaccccaccgacaccggccacgggacgguggucaugcaggugaaggugagcaagggcgcgcccugccggauccccgucaucguggccgacgaccugaccgccgccaucaacaagggcauccuggugaccgucaacccgaucgccuccaccaacgacgacgaggugcucaucgaggugaacccgcccuucggggacagcuacaucaucgucggccgcggggacucccggcugaccuaccaguggcacaaggagggcagcuccaucggcaagcuguucacgcagaccaugaaggggguggagcgccucgcggugaugggcgacaccgccugggacuucagcuccgccgggggcuucuucaccagcgucgggaagggcauccacacgguguucggcuccgccuuccaggggcuguucggcgggcugaacuggaucaccaaggugaucaugggcgccguccucaucuggguggggaucaacacccggaacaugaccaugagcauguccaugauccuggugggcgucaucaugauguuccugagccugggcgugggggcgugaggacuagucccuguucccagagcccacuuuuuuuucuuuuuuugaaauaaaauagccugucuuucagaucuaaaaaaaaaaaaaaaaaaaaaaaaaaaaaaaaaaaaaaaaaaaaaaaaaaaaaaaaaaaaaaaaugcaucccccccccccccccccccccccccccccccaaaggcucuuuucagagccaccagaauu

SEQ ID NO: 720 - RNA, 2383 nt, Artificial Sequence
  mRNA product Design c-5 comprising derived and/or modified sequence from YFV__NC_002031.1__X-SS-prME-XX (polyprotein: aa92-788) (opt1)
gggagagcggcucggccauuuugucccagucaguccggaggcugcggcugcagaaguaccgccugcggaguaacugcaaagaagcuuaccaugcggggccugagcucccgcaagcggcgcagccacgacgugcucaccguccaguuccugauccuggggaugcuccugaugaccggcggggugacgcuggugcggaagaaccgcuggcuccugcugaacgucaccuccgaggaccucggcaagaccuucagcguggggaccggcaacugcacgaccaacauccuggaggccaaguacuggugccccgacuccauggaguacaacugcccgaaccugagcccccgggaggagcccgacgacaucgacugcuggugcuacggcguggagaacguccgcguggccuacgggaagugcgacuccgcgggccggagccgccggucccgccgggccaucgaccuccccacccacgagaaccacgggcugaagacccgccaggagaaguggaugacgggccggaugggggagcgccagcugcagaagaucgagcggugguucgugcgcaacccguucuucgccgucaccgcccucaccaucgccuaccuggugggcagcaacaugacccagcggguggucaucgcgcugcucgugcuggccgugggccccgccuacuccgcccacugcaucgggaucacggaccgcgacuucaucgagggcguccacgggggcaccugggugagcgcgacccuggagcaggacaagugcgugaccgucauggcccccgacaagcccucccucgacaucagccuggagacgguggccaucgaccggccggccgaggugcgcaaggucugcuacaacgccgugcugacccacgugaagaucaacgacaagugccccuccaccggcgaggcgcaccucgccgaggagaacgagggggacaacgccugcaagcggaccuacagcgaccggggcugggggaacggcugcgggcuguucggcaagggcuccaucgucgccugcgccaaguucacgugcgcgaaguccaugagccuguucgagguggaccagaccaagauccaguacgucauccgcgcccagcuccacgugggggccaagcaggagaacuggaacaccgacaucaagacccugaaguucgacgcccugagcggcagccaggagguggaguucaucggguacggcaaggccacgcucgagugccagguccagaccgcgguggacuucgggaacuccuacaucgccgagauggagaccgagagcuggaucguggaccggcagugggcccaggaccugacccugcccuggcaguccggcagcggcggggucuggcgcgagaugcaccaccucguggaguucgagcccccgcacgccgccacgauccgggugcuggcgcugggcaaccaggaggggucccucaagaccgcccugaccggcgccaugcgcgucaccaaggacacgaacgacaacaaccuguacaagcuccacgggggccacgugagcugccgggugaagcuguccgcccugacccucaagggcaccagcuacaagaucugcaccgacaagauguucuucgucaagaaccccacggacaccgggcacggcaccguggugaugcaggucaagguguccaagggggcgcccugccgcaucccggugaucgucgccgacgaccugaccgccgccaucaacaagggcauccuggugaccgugaacccgaucgccagcacgaacgacgacgagguccucaucgaggugaacccccccuucggcgacuccuacaucaucguggggcggggcgacagccgccugaccuaccaguggcacaaggagggguccagcaucggcaagcuguucacccagaccaugaagggggucgagcggcuggcggugaugggcgacacggccugggacuucuccagcgccggcggguucuucaccuccgugggcaaggggauccacaccgucuucggcagcgccuuccaggggcuguucggcggccucaacuggaucaccaaggugaucaugggggccgugcugaucugggucggcaucaacacgcgcaacaugaccauguccaugagcaugauccucgugggggugaucaugauguuccugagccugggcgucggggcggaccagggcugcgccaucaacuucggcaagugaggacuagucccuguucccagagcccacuuuuuuuucuuuuuuugaaauaaaauagccugucuuucagaucuaaaaaaaaaaaaaaaaaaaaaaaaaaaaaaaaaaaaaaaaaaaaaaaaaaaaaaaaaaaaaaaaugcaucccccccccccccccccccccccccccccccaaaggcucuuuucagagccaccagaauu

SEQ ID NO: 721 - RNA, 2320 nt, Artificial Sequence
  mRNA product Design c-5 comprising derived and/or modified sequence from YFV__NC_002031.1__SS-prME (polyprotein: M,aa104-778) (opt1)
gggagagcggcucggccauuuugucccagucaguccggaggcugcggcugcagaaguaccgccugcggaguaacugcaaagaagcuuaccauggacgugcucaccguccaguuccugauccuggggaugcuccugaugaccggcggggugacgcuggugcggaagaaccgcuggcuccugcugaacgucaccuccgaggaccucggcaagaccuucagcguggggaccggcaacugcacgaccaacauccuggaggccaaguacuggugccccgacuccauggaguacaacugcccgaaccugagcccccgggaggagcccgacgacaucgacugcuggugcuacggcguggagaacguccgcguggccuacgggaagugcgacuccgcgggccggagccgccggucccgccgggccaucgaccuccccacccacgagaaccacgggcugaagacccgccaggagaaguggaugacgggccggaugggggagcgccagcugcagaagaucgagcggugguucgugcgcaacccguucuucgccgucaccgcccucaccaucgccuaccuggugggcagcaacaugacccagcggguggucaucgcgcugcucgugcuggccgugggccccgccuacuccgcccacugcaucgggaucacggaccgcgacuucaucgagggcguccacgggggcaccugggugagcgcgacccuggagcaggacaagugcgugaccgucauggcccccgacaagcccucccucgacaucagccuggagacgguggccaucgaccggccggccgaggugcgcaaggucugcuacaacgccgugcugacccacgugaagaucaacgacaagugccccuccaccggcgaggcgcaccucgccgaggagaacgagggggacaacgccugcaagcggaccuacagcgaccggggcugggggaacggcugcgggcuguucggcaagggcuccaucgucgccugcgccaaguucacgugcgcgaaguccaugagccuguucgagguggaccagaccaagauccaguacgucauccgcgcccagcuccacgugggggccaagcaggagaacuggaacaccgacaucaagacccugaaguucgacgcccugagcggcagccaggagguggaguucaucggguacggcaaggccacgcucgagugccagguccagaccgcgguggacuucgggaacuccuacaucgccgagauggagaccgagagcuggaucguggaccggcagugggcccaggaccugacccugcccuggcaguccggcagcggcggggucuggcgcgagaugcaccaccucguggaguucgagcccccgcacgccgccacgauccgggugcuggcgcugggcaaccaggaggggucccucaagaccgcccugaccggcgccaugcgcgucaccaaggacacgaacgacaacaaccuguacaagcuccacgggggccacgugagcugccgggugaagcuguccgcccugacccucaagggcaccagcuacaagaucugcaccgacaagauguucuucgucaagaaccccacggacaccgggcacggcaccguggugaugcaggucaagguguccaagggggcgcccugccgcaucccggugaucgucgccgacgaccugaccgccgccaucaacaagggcauccuggugaccgugaacccgaucgccagcacgaacgacgacgagguccucaucgaggugaacccccccuucggcgacuccuacaucaucguggggcggggcgacagccgccugaccuaccaguggcacaaggagggguccagcaucggcaagcuguucacccagaccaugaagggggucgagcggcuggcggugaugggcgacacggccugggacuucuccagcgccggcggguucuucaccuccgugggcaaggggauccacaccgucuucggcagcgccuuccaggggcuguucggcggccucaacuggaucaccaaggugaucaugggggccgugcugaucugggucggcaucaacacgcgcaacaugaccauguccaugagcaugauccucgugggggugaucaugauguuccugagccugggcgucggggcgugaggacuagucccuguucccagagcccacuuuuuuuucuuuuuuugaaauaaaauagccugucuuucagaucuaaaaaaaaaaaaaaaaaaaaaaaaaaaaaaaaaaaaaaaaaaaaaaaaaaaaaaaaaaaaaaaaugcaucccccccccccccccccccccccccccccccaaaggcucuuuucagagccaccagaauu

SEQ ID NO: 722 - RNA, 2347 nt, Artificial Sequence
  mRNA product Design c-5 comprising derived and/or modified sequence from YFV__NC_002031.1__SSIgE-prME-XX (polyprotein: aa122-788) (opt1)
gggagagcggcucggccauuuugucccagucaguccggaggcugcggcugcagaaguaccgccugcggaguaacugcaaagaagcuuaccauggacuggaccuggauccuguuccucguggccgccgcgacccgcguccacagcgugacgcuggugcggaagaaccgcuggcuccugcugaacgucaccuccgaggaccucggcaagaccuucagcguggggaccggcaacugcacgaccaacauccuggaggccaaguacuggugccccgacuccauggaguacaacugcccgaaccugagcccccgggaggagcccgacgacaucgacugcuggugcuacggcguggagaacguccgcguggccuacgggaagugcgacuccgcgggccggagccgccggucccgccgggccaucgaccuccccacccacgagaaccacgggcugaagacccgccaggagaaguggaugacgggccggaugggggagcgccagcugcagaagaucgagcggugguucgugcgcaacccguucuucgccgucaccgcccucaccaucgccuaccuggugggcagcaacaugacccagcggguggucaucgcgcugcucgugcuggccgugggccccgccuacuccgcccacugcaucgggaucacggaccgcgacuucaucgagggcguccacgggggcaccugggugagcgcgacccuggagcaggacaagugcgugaccgucauggcccccgacaagcccucccucgacaucagccuggagacgguggccaucgaccggccggccgaggugcgcaaggucugcuacaacgccgugcugacccacgugaagaucaacgacaagugccccuccaccggcgaggcgcaccucgccgaggagaacgagggggacaacgccugcaagcggaccuacagcgaccggggcugggggaacggcugcgggcuguucggcaagggcuccaucgucgccugcgccaaguucacgugcgcgaaguccaugagccuguucgagguggaccagaccaagauccaguacgucauccgcgcccagcuccacgugggggccaagcaggagaacuggaacaccgacaucaagacccugaaguucgacgcccugagcggcagccaggagguggaguucaucggguacggcaaggccacgcucgagugccagguccagaccgcgguggacuucgggaacuccuacaucgccgagauggagaccgagagcuggaucguggaccggcagugggcccaggaccugacccugcccuggcaguccggcagcggcggggucuggcgcgagaugcaccaccucguggaguucgagcccccgcacgccgccacgauccgggugcuggcgcugggcaaccaggaggggucccucaagaccgcccugaccggcgccaugcgcgucaccaaggacacgaacgacaacaaccuguacaagcuccacgggggccacgugagcugccgggugaagcuguccgcccugacccucaagggcaccagcuacaagaucugcaccgacaagauguucuucgucaagaaccccacggacaccgggcacggcaccguggugaugcaggucaagguguccaagggggcgcccugccgcaucccggugaucgucgccgacgaccugaccgccgccaucaacaagggcauccuggugaccgugaacccgaucgccagcacgaacgacgacgagguccucaucgaggugaacccccccuucggcgacuccuacaucaucguggggcggggcgacagccgccugaccuaccaguggcacaaggagggguccagcaucggcaagcuguucacccagaccaugaagggggucgagcggcuggcggugaugggcgacacggccugggacuucuccagcgccggcggguucuucaccuccgugggcaaggggauccacaccgucuucggcagcgccuuccaggggcuguucggcggccucaacuggaucaccaaggugaucaugggggccgugcugaucugggucggcaucaacacgcgcaacaugaccauguccaugagcaugauccucgugggggugaucaugauguuccugagccugggcgucggggcggaccagggcugcgccaucaacuucggcaagugaggacuagucccuguucccagagcccacuuuuuuuucuuuuuuugaaauaaaauagccugucuuucagaucuaaaaaaaaaaaaaaaaaaaaaaaaaaaaaaaaaaaaaaaaaaaaaaaaaaaaaaaaaaaaaaaaugcaucccccccccccccccccccccccccccccccaaaggcucuuuucagagccaccagaauu

SEQ ID NO: 723 - RNA, 2317 nt, Artificial Sequence
  mRNA product Design c-5 comprising derived and/or modified sequence from YFV__NC_002031.1__SSIgE-prME (polyprotein: aa122-778) (opt1)
gggagagcggcucggccauuuugucccagucaguccggaggcugcggcugcagaaguaccgccugcggaguaacugcaaagaagcuuaccauggacuggaccuggauccuguuccucguggccgccgcgacccgcguccacagcgugacgcuggugcggaagaaccgcuggcuccugcugaacgucaccuccgaggaccucggcaagaccuucagcguggggaccggcaacugcacgaccaacauccuggaggccaaguacuggugccccgacuccauggaguacaacugcccgaaccugagcccccgggaggagcccgacgacaucgacugcuggugcuacggcguggagaacguccgcguggccuacgggaagugcgacuccgcgggccggagccgccggucccgccgggccaucgaccuccccacccacgagaaccacgggcugaagacccgccaggagaaguggaugacgggccggaugggggagcgccagcugcagaagaucgagcggugguucgugcgcaacccguucuucgccgucaccgcccucaccaucgccuaccuggugggcagcaacaugacccagcggguggucaucgcgcugcucgugcuggccgugggccccgccuacuccgcccacugcaucgggaucacggaccgcgacuucaucgagggcguccacgggggcaccugggugagcgcgacccuggagcaggacaagugcgugaccgucauggcccccgacaagcccucccucgacaucagccuggagacgguggccaucgaccggccggccgaggugcgcaaggucugcuacaacgccgugcugacccacgugaagaucaacgacaagugccccuccaccggcgaggcgcaccucgccgaggagaacgagggggacaacgccugcaagcggaccuacagcgaccggggcugggggaacggcugcgggcuguucggcaagggcuccaucgucgccugcgccaaguucacgugcgcgaaguccaugagccuguucgagguggaccagaccaagauccaguacgucauccgcgcccagcuccacgugggggccaagcaggagaacuggaacaccgacaucaagacccugaaguucgacgcccugagcggcagccaggagguggaguucaucggguacggcaaggccacgcucgagugccagguccagaccgcgguggacuucgggaacuccuacaucgccgagauggagaccgagagcuggaucguggaccggcagugggcccaggaccugacccugcccuggcaguccggcagcggcggggucuggcgcgagaugcaccaccucguggaguucgagcccccgcacgccgccacgauccgggugcuggcgcugggcaaccaggaggggucccucaagaccgcccugaccggcgccaugcgcgucaccaaggacacgaacgacaacaaccuguacaagcuccacgggggccacgugagcugccgggugaagcuguccgcccugacccucaagggcaccagcuacaagaucugcaccgacaagauguucuucgucaagaaccccacggacaccgggcacggcaccguggugaugcaggucaagguguccaagggggcgcccugccgcaucccggugaucgucgccgacgaccugaccgccgccaucaacaagggcauccuggugaccgugaacccgaucgccagcacgaacgacgacgagguccucaucgaggugaacccccccuucggcgacuccuacaucaucguggggcggggcgacagccgccugaccuaccaguggcacaaggagggguccagcaucggcaagcuguucacccagaccaugaagggggucgagcggcuggcggugaugggcgacacggccugggacuucuccagcgccggcggguucuucaccuccgugggcaaggggauccacaccgucuucggcagcgccuuccaggggcuguucggcggccucaacuggaucaccaaggugaucaugggggccgugcugaucugggucggcaucaacacgcgcaacaugaccauguccaugagcaugauccucgugggggugaucaugauguuccugagccugggcgucggggcgugaggacuagucccuguucccagagcccacuuuuuuuucuuuuuuugaaauaaaauagccugucuuucagaucuaaaaaaaaaaaaaaaaaaaaaaaaaaaaaaaaaaaaaaaaaaaaaaaaaaaaaaaaaaaaaaaaugcaucccccccccccccccccccccccccccccccaaaggcucuuuucagagccaccagaauu

SEQ ID NO: 724 - RNA, 2365 nt, Artificial Sequence
  mRNA product Design c-5 comprising derived and/or modified sequence from YFV__NC_002031.1__SSjev-prME-XX (polyprotein: aa122-788) (opt1)
gggagagcggcucggccauuuugucccagucaguccggaggcugcggcugcagaaguaccgccugcggaguaacugcaaagaagcuuaccaugggcaagcgcagcgccggguccaucauguggcuggccagccucgcgguggucaucgccugcgccggcgccgugacgcuggugcggaagaaccgcuggcuccugcugaacgucaccuccgaggaccucggcaagaccuucagcguggggaccggcaacugcacgaccaacauccuggaggccaaguacuggugccccgacuccauggaguacaacugcccgaaccugagcccccgggaggagcccgacgacaucgacugcuggugcuacggcguggagaacguccgcguggccuacgggaagugcgacuccgcgggccggagccgccggucccgccgggccaucgaccuccccacccacgagaaccacgggcugaagacccgccaggagaaguggaugacgggccggaugggggagcgccagcugcagaagaucgagcggugguucgugcgcaacccguucuucgccgucaccgcccucaccaucgccuaccuggugggcagcaacaugacccagcggguggucaucgcgcugcucgugcuggccgugggccccgccuacuccgcccacugcaucgggaucacggaccgcgacuucaucgagggcguccacgggggcaccugggugagcgcgacccuggagcaggacaagugcgugaccgucauggcccccgacaagcccucccucgacaucagccuggagacgguggccaucgaccggccggccgaggugcgcaaggucugcuacaacgccgugcugacccacgugaagaucaacgacaagugccccuccaccggcgaggcgcaccucgccgaggagaacgagggggacaacgccugcaagcggaccuacagcgaccggggcugggggaacggcugcgggcuguucggcaagggcuccaucgucgccugcgccaaguucacgugcgcgaaguccaugagccuguucgagguggaccagaccaagauccaguacgucauccgcgcccagcuccacgugggggccaagcaggagaacuggaacaccgacaucaagacccugaaguucgacgcccugagcggcagccaggagguggaguucaucggguacggcaaggccacgcucgagugccagguccagaccgcgguggacuucgggaacuccuacaucgccgagauggagaccgagagcuggaucguggaccggcagugggcccaggaccugacccugcccuggcaguccggcagcggcggggucuggcgcgagaugcaccaccucguggaguucgagcccccgcacgccgccacgauccgggugcuggcgcugggcaaccaggaggggucccucaagaccgcccugaccggcgccaugcgcgucaccaaggacacgaacgacaacaaccuguacaagcuccacgggggccacgugagcugccgggugaagcuguccgcccugacccucaagggcaccagcuacaagaucugcaccgacaagauguucuucgucaagaaccccacggacaccgggcacggcaccguggugaugcaggucaagguguccaagggggcgcccugccgcaucccggugaucgucgccgacgaccugaccgccgccaucaacaagggcauccuggugaccgugaacccgaucgccagcacgaacgacgacgagguccucaucgaggugaacccccccuucggcgacuccuacaucaucguggggcggggcgacagccgccugaccuaccaguggcacaaggagggguccagcaucggcaagcuguucacccagaccaugaagggggucgagcggcuggcggugaugggcgacacggccugggacuucuccagcgccggcggguucuucaccuccgugggcaaggggauccacaccgucuucggcagcgccuuccaggggcuguucggcggccucaacuggaucaccaaggugaucaugggggccgugcugaucugggucggcaucaacacgcgcaacaugaccauguccaugagcaugauccucgugggggugaucaugauguuccugagccugggcgucggggcggaccagggcugcgccaucaacuucggcaagugaggacuagucccuguucccagagcccacuuuuuuuucuuuuuuugaaauaaaauagccugucuuucagaucuaaaaaaaaaaaaaaaaaaaaaaaaaaaaaaaaaaaaaaaaaaaaaaaaaaaaaaaaaaaaaaaaugcaucccccccccccccccccccccccccccccccaaaggcucuuuucagagccaccagaauu

SEQ ID NO: 725 - RNA, 2335 nt, Artificial Sequence
  mRNA product Design c-5 comprising derived and/or modified sequence from YFV__NC_002031.1__SSjev-prME (polyprotein: aa122-778) (opt1)
gggagagcggcucggccauuuugucccagucaguccggaggcugcggcugcagaaguaccgccugcggaguaacugcaaagaagcuuaccaugggcaagcgcagcgccggguccaucauguggcuggccagccucgcgguggucaucgccugcgccggcgccgugacgcuggugcggaagaaccgcuggcuccugcugaacgucaccuccgaggaccucggcaagaccuucagcguggggaccggcaacugcacgaccaacauccuggaggccaaguacuggugccccgacuccauggaguacaacugcccgaaccugagcccccgggaggagcccgacgacaucgacugcuggugcuacggcguggagaacguccgcguggccuacgggaagugcgacuccgcgggccggagccgccggucccgccgggccaucgaccuccccacccacgagaaccacgggcugaagacccgccaggagaaguggaugacgggccggaugggggagcgccagcugcagaagaucgagcggugguucgugcgcaacccguucuucgccgucaccgcccucaccaucgccuaccuggugggcagcaacaugacccagcggguggucaucgcgcugcucgugcuggccgugggccccgccuacuccgcccacugcaucgggaucacggaccgcgacuucaucgagggcguccacgggggcaccugggugagcgcgacccuggagcaggacaagugcgugaccgucauggcccccgacaagcccucccucgacaucagccuggagacgguggccaucgaccggccggccgaggugcgcaaggucugcuacaacgccgugcugacccacgugaagaucaacgacaagugccccuccaccggcgaggcgcaccucgccgaggagaacgagggggacaacgccugcaagcggaccuacagcgaccggggcugggggaacggcugcgggcuguucggcaagggcuccaucgucgccugcgccaaguucacgugcgcgaaguccaugagccuguucgagguggaccagaccaagauccaguacgucauccgcgcccagcuccacgugggggccaagcaggagaacuggaacaccgacaucaagacccugaaguucgacgcccugagcggcagccaggagguggaguucaucggguacggcaaggccacgcucgagugccagguccagaccgcgguggacuucgggaacuccuacaucgccgagauggagaccgagagcuggaucguggaccggcagugggcccaggaccugacccugcccuggcaguccggcagcggcggggucuggcgcgagaugcaccaccucguggaguucgagcccccgcacgccgccacgauccgggugcuggcgcugggcaaccaggaggggucccucaagaccgcccugaccggcgccaugcgcgucaccaaggacacgaacgacaacaaccuguacaagcuccacgggggccacgugagcugccgggugaagcuguccgcccugacccucaagggcaccagcuacaagaucugcaccgacaagauguucuucgucaagaaccccacggacaccgggcacggcaccguggugaugcaggucaagguguccaagggggcgcccugccgcaucccggugaucgucgccgacgaccugaccgccgccaucaacaagggcauccuggugaccgugaacccgaucgccagcacgaacgacgacgagguccucaucgaggugaacccccccuucggcgacuccuacaucaucguggggcggggcgacagccgccugaccuaccaguggcacaaggagggguccagcaucggcaagcuguucacccagaccaugaagggggucgagcggcuggcggugaugggcgacacggccugggacuucuccagcgccggcggguucuucaccuccgugggcaaggggauccacaccgucuucggcagcgccuuccaggggcuguucggcggccucaacuggaucaccaaggugaucaugggggccgugcugaucugggucggcaucaacacgcgcaacaugaccauguccaugagcaugauccucgugggggugaucaugauguuccugagccugggcgucggggcgugaggacuagucccuguucccagagcccacuuuuuuuucuuuuuuugaaauaaaauagccugucuuucagaucuaaaaaaaaaaaaaaaaaaaaaaaaaaaaaaaaaaaaaaaaaaaaaaaaaaaaaaaaaaaaaaaaugcaucccccccccccccccccccccccccccccccaaaggcucuuuucagagccaccagaauu

SEQ ID NO: 726 - RNA, 2383 nt, Artificial Sequence
  mRNA product Design c-5 comprising derived and/or modified sequence from YFV__NC_002031.1__X-SS-prME-XX (polyprotein: aa92-788) (opt1)
gggagagcggcucggccauuuugucccagucaguccggaggcugcggcugcagaaguaccgccugcggaguaacugcaaagaagcuuaccaugcgcggccugagcucccggaagcgccggagccacgacgugcucaccguccaguuccugauccuggggaugcuccugaugaccggcggggugacgcuggugcgcaagaaccgguggcuccugcugaacgucaccuccgaggaccucggcaagaccuucagcguggggaccggcaacugcacgaccaacauccuggaggccaaguacuggugccccgacuccauggaguacaacugccccaaccugagcccccgcgaggagcccgacgacaucgacugcuggugcuacggcguggagaacguccggguggccuacgggaagugcgacuccgcgggccgcagccggcgcucccggcgcgccaucgaccuccccacccacgagaaccacgggcugaagacccggcaggagaaguggaugacgggccgcaugggggagcggcagcugcagaagaucgagcgcugguucgugcggaacccguucuucgccgucaccgcccucaccaucgccuaccuggugggcagcaacaugacccagcgcguggucaucgcgcugcucgugcuggccgugggccccgccuacuccgcccacugcaucgggaucacggaccgggacuucaucgagggcguccacgggggcaccugggugagcgcgacccuggagcaggacaagugcgugaccgucauggcccccgacaagcccucccucgacaucagccuggagacgguggccaucgaccgcccggccgaggugcggaaggucugcuacaacgccgugcugacccacgugaagaucaacgacaagugccccuccaccggcgaggcgcaccucgccgaggagaacgagggggacaacgccugcaagcgcaccuacagcgaccgcggcugggggaacggcugcgggcuguucggcaagggcuccaucgucgccugcgccaaguucacgugcgccaagagcaugucccuguucgagguggaccagaccaagauccaguacgucauccgggcgcagcuccacgugggggccaagcaggagaacuggaacaccgacaucaagacccugaaguucgacgcccugagcggcagccaggagguggaguucaucggguacggcaaggccacgcucgagugccagguccagaccgcgguggacuucgggaacuccuacaucgccgagauggagaccgagagcuggaucguggaccgccagugggcccaggaccugacccugcccuggcaguccggcagcggcggggucuggcgggagaugcaccaccucguggaguucgagcccccgcacgccgccacgauccgcgugcuggcgcugggcaaccaggaggggucccucaagaccgcccugaccggcgccaugcgggucaccaaggacacgaacgacaacaaccuguacaagcuccacgggggccacgugagcugccgcgugaagcuguccgcccugacccucaagggcaccagcuacaagaucugcaccgacaagauguucuucgucaagaaccccacggacaccgggcacggcaccguggugaugcaggucaagguguccaagggggcgcccugccggauccccgugaucgucgccgacgaccugaccgccgccaucaacaagggcauccuggugaccgugaacccgaucgccagcacgaacgacgacgagguccucaucgaggugaacccgcccuucggcgacuccuacaucaucguggggcgcggcgacagccggcugaccuaccaguggcacaaggagggguccagcaucggcaagcuguucacccagaccaugaagggggucgagcgccucgcggugaugggcgacacggccugggacuucuccagcgccggcggguucuucaccuccgugggcaaggggauccacaccgucuucggcagcgccuuccaggggcuguucggcggccugaacuggaucaccaaggugaucaugggggccgugcugaucugggucggcaucaacacgcggaacaugaccauguccaugagcaugauccucgugggggugaucaugauguuccugagccugggcgucggggcggaccagggcugcgccaucaacuucggcaagugaggacuagucccuguucccagagcccacuuuuuuuucuuuuuuugaaauaaaauagccugucuuucagaucuaaaaaaaaaaaaaaaaaaaaaaaaaaaaaaaaaaaaaaaaaaaaaaaaaaaaaaaaaaaaaaaaugcaucccccccccccccccccccccccccccccccaaaggcucuuuucagagccaccagaauu

SEQ ID NO: 727 - RNA, 2320 nt, Artificial Sequence
  mRNA product Design c-5 comprising derived and/or modified sequence from YFV__NC_002031.1__SS-prME (polyprotein: M,aa104-778) (opt1)
gggagagcggcucggccauuuugucccagucaguccggaggcugcggcugcagaaguaccgccugcggaguaacugcaaagaagcuuaccauggacgugcugaccguccaguuccucauccugggcaugcugcucaugaccgggggcgugacgcuggugcgcaagaaccgguggcugcuccugaacgucaccagcgaggaccuggggaagaccuucuccgugggcaccgggaacugcacgaccaacauccucgaggccaaguacuggugccccgacagcauggaguacaacugccccaaccugagcccccgcgaggagcccgacgacaucgacugcuggugcuacggcguggagaacguccggguggccuacggcaagugcgacuccgcggggcgcucccggcgcagccggcgcgccaucgaccugcccacccacgagaaccacggccucaagacccggcaggagaaguggaugacggggcgcaugggcgagcggcagcugcagaagaucgagcgcugguucgugcggaacccguucuucgccgucaccgcccugaccaucgccuaccucgugggguccaacaugacccagcgcguggucaucgcgcugcuggugcucgccgugggccccgccuacagcgcccacugcaucggcaucacggaccgggacuucaucgaggggguccacggcgggaccuggguguccgcgacccuggagcaggacaagugcgugaccgucauggcccccgacaagcccagccuggacaucucccucgagacgguggccaucgaccgcccggccgaggugcggaaggucugcuacaacgccgugcugacccacgugaagaucaacgacaagugccccagcaccggcgaggcgcaccuggccgaggagaacgagggcgacaacgccugcaagcgcaccuacuccgaccggggguggggcaacgggugcggccucuucgggaagggcagcaucgucgccugcgccaaguucacgugcgcgaaguccaugagccuguucgagguggaccagaccaagauccaguacgucauccgcgcccagcugcacgugggcgccaagcaggagaacuggaacaccgacaucaagacccucaaguucgacgcccuguccgggagccaggagguggaguucaucggcuacgggaaggccacgcuggagugccagguccagaccgcgguggacuucggcaacuccuacaucgccgagauggagaccgagagcuggaucguggaccggcagugggcccaggaccucacccugcccuggcagagcggguccggcggcgucuggcgcgagaugcaccaccugguggaguucgagcccccgcacgccgccacgauccgcgugcucgcgcuggggaaccaggagggcagccugaagaccgcccucaccggggccaugcgggucaccaaggacacgaacgacaacaaccuguacaagcugcacggcgggcacguguccugccgcgugaagcucagcgcccugacccugaagggcaccuccuacaagaucugcaccgacaagauguucuucgucaagaaccccacggacaccggccacgggaccguggugaugcaggucaaggugagcaagggcgcgcccugccggauccccgugaucgucgccgacgaccucaccgccgccaucaacaaggggauccuggugaccgugaacccgaucgccuccacgaacgacgacgagguccugaucgaggugaacccgcccuucggcgacagcuacaucaucgugggccgcggggacucccggcucaccuaccaguggcacaaggagggcagcuccaucgggaagcuguucacccagaccaugaagggcgucgagcgccuggcggugaugggggacacggccugggacuucagcuccgccggcggcuucuucaccagcguggggaagggcauccacaccgucuucggguccgccuuccagggccucuucgggggccugaacuggaucaccaaggugaucaugggcgccgugcugaucugggucgggaucaacacgcggaacaugaccaugagcauguccaugauccuggugggcgugaucaugauguuccucagccugggggucggcgcgugaggacuagucccuguucccagagcccacuuuuuuuucuuuuuuugaaauaaaauagccugucuuucagaucuaaaaaaaaaaaaaaaaaaaaaaaaaaaaaaaaaaaaaaaaaaaaaaaaaaaaaaaaaaaaaaaaugcaucccccccccccccccccccccccccccccccaaaggcucuuuucagagccaccagaauu

SEQ ID NO: 728 - RNA, 2347 nt, Artificial Sequence
  mRNA product Design c-5 comprising derived and/or modified sequence from YFV__NC_002031.1__SSIgE-prME-XX (polyprotein: aa122-788) (opt1)
gggagagcggcucggccauuuugucccagucaguccggaggcugcggcugcagaaguaccgccugcggaguaacugcaaagaagcuuaccauggacuggaccuggauccuguuccucguggccgccgcgacccgcguccacagcgugacgcuggugcggaagaaccgcuggcugcuccugaacgucaccuccgaggaccugggcaagaccuucagcguggggaccggcaacugcacgaccaacauccucgaggccaaguacuggugccccgacuccauggaguacaacugccccaaccugagcccccgggaggagcccgacgacaucgacugcuggugcuacgggguggagaacguccgcguggccuacggcaagugcgacuccgccgggcggagccgccggucccgccgggccaucgaccugcccacccacgagaaccacggccucaagacccgccaggagaaguggaugacgggccggaugggggagcgccagcugcagaagaucgagcggugguucgugcgcaacccguucuucgcggucaccgcccugaccaucgccuaccucgugggcagcaacaugacccagcggguggucaucgcccugcuggugcucgcgguggggcccgccuacuccgcccacugcaucggcaucacggaccgcgacuucaucgaggggguccacggcggcaccugggugagcgccacccuggagcaggacaagugcgugaccgucauggcccccgacaagcccucccuggacaucagccucgagacgguggcgaucgaccggccggccgaggugcgcaaggucugcuacaacgccgugcugacccacgugaagaucaacgacaagugccccuccaccggggaggcccaccuggccgaggagaacgagggcgacaacgcgugcaagcggaccuacagcgaccgcggguggggcaacggcugcggccucuucgggaagggguccaucgucgccugcgccaaguucacgugcgccaagagcaugucccuguucgagguggaccagaccaagauccaguacgucauccgggcccagcugcacgugggcgcgaagcaggagaacuggaacaccgacaucaagacccucaaguucgacgcccugagcgggucccaggagguggaguucaucggcuacggcaaggccacgcuggagugccagguccagaccgccguggacuucgggaacagcuacaucgccgagauggagaccgagagcuggaucguggaccgccagugggcgcaggaccucacccugcccuggcaguccggcagcgggggcgucuggcgcgagaugcaccaccugguggaguucgagcccccgcacgccgccacgauccgggugcucgcccuggggaaccaggagggcucccugaagaccgcgcucaccggcgccaugcgcgucaccaaggacacgaacgacaacaaccuguacaagcugcacgggggccacgugagcugccgggugaagcucuccgcccugacccugaaggggaccagcuacaagaucugcaccgacaagauguucuucgucaagaaccccacggacaccggccacgggaccguggugaugcaggucaagguguccaagggcgcccccugccgcauccccgugaucgucgccgacgaccucaccgcggccaucaacaagggcauccuggugaccgugaacccgaucgccagcacgaacgacgacgagguccugaucgaggugaacccgcccuucggggacuccuacaucaucgugggccgcggggacagccggcucaccuaccaguggcacaaggagggcuccagcaucggcaagcuguucacccagaccaugaagggggucgagcggcuggccgugaugggcgacacggccugggacuucuccagcgccgggggcuucuucaccuccguggggaagggcauccacaccgucuucggcagcgcguuccaggggcuguucggcgggcucaacuggaucaccaaggugaucaugggcgccgugcugaucugggucgggaucaacacgcgcaacaugaccauguccaugagcaugauccucgugggcgugaucaugauguuccugucccugggcgucggggccgaccagggcugcgccaucaacuucgggaagugaggacuagucccuguucccagagcccacuuuuuuuucuuuuuuugaaauaaaauagccugucuuucagaucuaaaaaaaaaaaaaaaaaaaaaaaaaaaaaaaaaaaaaaaaaaaaaaaaaaaaaaaaaaaaaaaaugcaucccccccccccccccccccccccccccccccaaaggcucuuuucagagccaccagaauu

SEQ ID NO: 729 - RNA, 2317 nt, Artificial Sequence
  mRNA product Design c-5 comprising derived and/or modified sequence from YFV__NC_002031.1__SSIgE-prME (polyprotein: aa122-778) (opt1)
gggagagcggcucggccauuuugucccagucaguccggaggcugcggcugcagaaguaccgccugcggaguaacugcaaagaagcuuaccauggacuggaccuggauccuguuccucguggccgccgcgacccgcguccacagcgugacgcuggugcggaagaaccgcuggcugcuccugaacgucaccuccgaggaccugggcaagaccuucagcguggggaccggcaacugcacgaccaacauccucgaggccaaguacuggugccccgacuccauggaguacaacugccccaaccugagcccccgggaggagcccgacgacaucgacugcuggugcuacgggguggagaacguccgcguggccuacggcaagugcgacuccgccgggcggagccgccggucccgccgggccaucgaccugcccacccacgagaaccacggccucaagacccgccaggagaaguggaugacgggccggaugggggagcgccagcugcagaagaucgagcggugguucgugcgcaacccguucuucgcggucaccgcccugaccaucgccuaccucgugggcagcaacaugacccagcggguggucaucgcccugcuggugcucgcgguggggcccgccuacuccgcccacugcaucggcaucacggaccgcgacuucaucgaggggguccacggcggcaccugggugagcgccacccuggagcaggacaagugcgugaccgucauggcccccgacaagcccucccuggacaucagccucgagacgguggcgaucgaccggccggccgaggugcgcaaggucugcuacaacgccgugcugacccacgugaagaucaacgacaagugccccuccaccggggaggcccaccuggccgaggagaacgagggcgacaacgcgugcaagcggaccuacagcgaccgcggguggggcaacggcugcggccucuucgggaagggguccaucgucgccugcgccaaguucacgugcgccaagagcaugucccuguucgagguggaccagaccaagauccaguacgucauccgggcccagcugcacgugggcgcgaagcaggagaacuggaacaccgacaucaagacccucaaguucgacgcccugagcgggucccaggagguggaguucaucggcuacggcaaggccacgcuggagugccagguccagaccgccguggacuucgggaacagcuacaucgccgagauggagaccgagagcuggaucguggaccgccagugggcgcaggaccucacccugcccuggcaguccggcagcgggggcgucuggcgcgagaugcaccaccugguggaguucgagcccccgcacgccgccacgauccgggugcucgcccuggggaaccaggagggcucccugaagaccgcgcucaccggcgccaugcgcgucaccaaggacacgaacgacaacaaccuguacaagcugcacgggggccacgugagcugccgggugaagcucuccgcccugacccugaaggggaccagcuacaagaucugcaccgacaagauguucuucgucaagaaccccacggacaccggccacgggaccguggugaugcaggucaagguguccaagggcgcccccugccgcauccccgugaucgucgccgacgaccucaccgcggccaucaacaagggcauccuggugaccgugaacccgaucgccagcacgaacgacgacgagguccugaucgaggugaacccgcccuucggggacuccuacaucaucgugggccgcggggacagccggcucaccuaccaguggcacaaggagggcuccagcaucggcaagcuguucacccagaccaugaagggggucgagcggcuggccgugaugggcgacacggccugggacuucuccagcgccgggggcuucuucaccuccguggggaagggcauccacaccgucuucggcagcgcguuccaggggcuguucggcgggcucaacuggaucaccaaggugaucaugggcgccgugcugaucugggucgggaucaacacgcgcaacaugaccauguccaugagcaugauccucgugggcgugaucaugauguuccugucccugggcgucggggccugaggacuagucccuguucccagagcccacuuuuuuuucuuuuuuugaaauaaaauagccugucuuucagaucuaaaaaaaaaaaaaaaaaaaaaaaaaaaaaaaaaaaaaaaaaaaaaaaaaaaaaaaaaaaaaaaaugcaucccccccccccccccccccccccccccccccaaaggcucuuuucagagccaccagaauu

SEQ ID NO: 730 - RNA, 2365 nt, Artificial Sequence
  mRNA product Design c-5 comprising derived and/or modified sequence from YFV__NC_002031.1__SSjev-prME-XX (polyprotein: aa122-788) (opt1)
gggagagcggcucggccauuuugucccagucaguccggaggcugcggcugcagaaguaccgccugcggaguaacugcaaagaagcuuaccaugggcaagcgcagcgccggguccaucauguggcuggccagccucgcgguggucaucgccugcgccggcgccgugacccuggugcggaagaaccgcuggcugcuccugaacgucaccuccgaggaccuggggaagacguucagcgugggcaccgggaacugcaccaccaacauccucgaggccaaguacuggugccccgacuccauggaguacaacugccccaaccugagcccccgggaggagcccgacgacaucgacugcuggugcuacggcguggagaacguccgcguggcguacggcaagugcgacuccgccgggcggagccgccggucccgccgggccaucgaccugcccacgcacgagaaccacggccucaagacccgccaggagaaguggaugaccgggcggaugggcgagcgccagcugcagaagaucgagcggugguucgugcgcaacccguucuucgccgucaccgcgcugacgaucgccuaccucguggggagcaacaugacccagcggguggucaucgcccugcuggugcucgccgugggccccgccuacuccgcgcacugcaucggcaucaccgaccgcgacuucaucgaggggguccacggcgggaccugggugagcgccacgcuggagcaggacaagugcgugaccgucauggcccccgacaagcccucccuggacaucagccucgagaccguggccaucgaccggccggccgaggugcgcaaggucugcuacaacgcggugcugacccacgugaagaucaacgacaagugccccuccacgggcgaggcccaccuggccgaggagaacgagggcgacaacgccugcaagcggaccuacagcgaccgcggguggggcaacgggugcggccucuucgggaagggcuccaucgucgccugcgcgaaguucacgugcgccaagagcaugucccuguucgagguggaccagaccaagauccaguacgucauccgggcccagcugcacgugggcgccaagcaggagaacuggaacaccgacaucaagacccucaaguucgacgcccugagcgggagccaggagguggaguucaucggcuacgggaaggcgacccuggagugccagguccagaccgccguggacuucggcaacuccuacaucgccgagauggagacggagagcuggaucguggaccgccagugggcccaggaccucacccugcccuggcaguccgggagcggcggcgucuggcgcgagaugcaccaccugguggaguucgagcccccgcacgcggccaccauccgggugcucgcccuggggaaccaggagggcucccugaagaccgcccucacgggggccaugcgcgucaccaaggacaccaacgacaacaaccuguacaagcugcacggcgggcacgugagcugccgggugaagcucuccgcgcugacccugaagggcacgagcuacaagaucugcaccgacaagauguucuucgucaagaaccccaccgacaccggccacgggacgguggugaugcaggucaagguguccaagggcgcccccugccgcauccccgugaucgucgccgacgaccucaccgccgccaucaacaaggggauccuggugaccgugaacccgaucgcgagcaccaacgacgacgagguccugaucgaggugaacccgcccuucggcgacuccuacaucaucgugggccgcggggacagccggcucaccuaccaguggcacaaggagggcuccagcaucgggaagcuguucacgcagaccaugaagggcgucgagcggcuggccgugaugggggacaccgccugggacuucuccagcgccggcggcuucuucaccuccguggggaagggcauccacacggucuucgggagcgccuuccagggccucuucgggggccugaacuggaucaccaaggugaucaugggcgcggugcugaucugggucgggaucaacacccgcaacaugaccauguccaugagcaugauccucgugggcgugaucaugauguuccugagccugggggucggcgccgaccaggggugcgccaucaacuucggcaagugaggacuagucccuguucccagagcccacuuuuuuuucuuuuuuugaaauaaaauagccugucuuucagaucuaaaaaaaaaaaaaaaaaaaaaaaaaaaaaaaaaaaaaaaaaaaaaaaaaaaaaaaaaaaaaaaaugcaucccccccccccccccccccccccccccccccaaaggcucuuuucagagccaccagaauu

SEQ ID NO: 731 - RNA, 2335 nt, Artificial Sequence
  mRNA product Design c-5 comprising derived and/or modified sequence from YFV__NC_002031.1__SSjev-prME (polyprotein: aa122-778) (opt1)
gggagagcggcucggccauuuugucccagucaguccggaggcugcggcugcagaaguaccgccugcggaguaacugcaaagaagcuuaccaugggcaagcgcagcgccggguccaucauguggcuggccagccucgcgguggucaucgccugcgccggcgccgugacccuggugcggaagaaccgcuggcugcuccugaacgucaccuccgaggaccuggggaagacguucagcgugggcaccgggaacugcaccaccaacauccucgaggccaaguacuggugccccgacuccauggaguacaacugccccaaccugagcccccgggaggagcccgacgacaucgacugcuggugcuacggcguggagaacguccgcguggcguacggcaagugcgacuccgccgggcggagccgccggucccgccgggccaucgaccugcccacgcacgagaaccacggccucaagacccgccaggagaaguggaugaccgggcggaugggcgagcgccagcugcagaagaucgagcggugguucgugcgcaacccguucuucgccgucaccgcgcugacgaucgccuaccucguggggagcaacaugacccagcggguggucaucgcccugcuggugcucgccgugggccccgccuacuccgcgcacugcaucggcaucaccgaccgcgacuucaucgaggggguccacggcgggaccugggugagcgccacgcuggagcaggacaagugcgugaccgucauggcccccgacaagcccucccuggacaucagccucgagaccguggccaucgaccggccggccgaggugcgcaaggucugcuacaacgcggugcugacccacgugaagaucaacgacaagugccccuccacgggcgaggcccaccuggccgaggagaacgagggcgacaacgccugcaagcggaccuacagcgaccgcggguggggcaacgggugcggccucuucgggaagggcuccaucgucgccugcgcgaaguucacgugcgccaagagcaugucccuguucgagguggaccagaccaagauccaguacgucauccgggcccagcugcacgugggcgccaagcaggagaacuggaacaccgacaucaagacccucaaguucgacgcccugagcgggagccaggagguggaguucaucggcuacgggaaggcgacccuggagugccagguccagaccgccguggacuucggcaacuccuacaucgccgagauggagacggagagcuggaucguggaccgccagugggcccaggaccucacccugcccuggcaguccgggagcggcggcgucuggcgcgagaugcaccaccugguggaguucgagcccccgcacgcggccaccauccgggugcucgcccuggggaaccaggagggcucccugaagaccgcccucacgggggccaugcgcgucaccaaggacaccaacgacaacaaccuguacaagcugcacggcgggcacgugagcugccgggugaagcucuccgcgcugacccugaagggcacgagcuacaagaucugcaccgacaagauguucuucgucaagaaccccaccgacaccggccacgggacgguggugaugcaggucaagguguccaagggcgcccccugccgcauccccgugaucgucgccgacgaccucaccgccgccaucaacaaggggauccuggugaccgugaacccgaucgcgagcaccaacgacgacgagguccugaucgaggugaacccgcccuucggcgacuccuacaucaucgugggccgcggggacagccggcucaccuaccaguggcacaaggagggcuccagcaucgggaagcuguucacgcagaccaugaagggcgucgagcggcuggccgugaugggggacaccgccugggacuucuccagcgccggcggcuucuucaccuccguggggaagggcauccacacggucuucgggagcgccuuccagggccucuucgggggccugaacuggaucaccaaggugaucaugggcgcggugcugaucugggucgggaucaacacccgcaacaugaccauguccaugagcaugauccucgugggcgugaucaugauguuccugagccugggggucggcgccugaggacuagucccuguucccagagcccacuuuuuuuucuuuuuuugaaauaaaauagccugucuuucagaucuaaaaaaaaaaaaaaaaaaaaaaaaaaaaaaaaaaaaaaaaaaaaaaaaaaaaaaaaaaaaaaaaugcaucccccccccccccccccccccccccccccccaaaggcucuuuucagagccaccagaauu

SEQ ID NO: 732 - RNA, 2383 nt, Artificial Sequence
  mRNA product Design c-5 comprising derived and/or modified sequence from YFV__NC_002031.1__X-SS-prME-XX (polyprotein: aa92-788) (opt2)
gggagagcggcucggccauuuugucccagucaguccggaggcugcggcugcagaaguaccgccugcggaguaacugcaaagaagcuuaccaugcgcggccucuccucccgcaagcgccgcucccacgacguccucaccguccaguuccucauccucggcaugcuccucaugaccggcggcgucacccucguccgcaagaaccgcuggcuccuccucaacgucaccuccgaggaccucggcaagaccuucuccgucggcaccggcaacugcaccaccaacauccucgaggccaaguacuggugccccgacuccauggaguacaacugccccaaccucuccccccgcgaggagcccgacgacaucgacugcuggugcuacggcgucgagaacguccgcgucgccuacggcaagugcgacuccgccggccgcucccgccgcucccgccgcgccaucgaccuccccacccacgagaaccacggccucaagacccgccaggagaaguggaugaccggccgcaugggcgagcgccagcuccagaagaucgagcgcugguucguccgcaaccccuucuucgccgucaccgcccucaccaucgccuaccucgucggcuccaacaugacccagcgcgucgucaucgcccuccucguccucgccgucggccccgccuacuccgcccacugcaucggcaucaccgaccgcgacuucaucgagggcguccacggcggcaccugggucuccgccacccucgagcaggacaagugcgucaccgucauggcccccgacaagcccucccucgacaucucccucgagaccgucgccaucgaccgccccgccgagguccgcaaggucugcuacaacgccguccucacccacgucaagaucaacgacaagugccccuccaccggcgaggcccaccucgccgaggagaacgagggcgacaacgccugcaagcgcaccuacuccgaccgcggcuggggcaacggcugcggccucuucggcaagggcuccaucgucgccugcgccaaguucaccugcgccaaguccaugucccucuucgaggucgaccagaccaagauccaguacgucauccgcgcccagcuccacgucggcgccaagcaggagaacuggaacaccgacaucaagacccucaaguucgacgcccucuccggcucccaggaggucgaguucaucggcuacggcaaggccacccucgagugccagguccagaccgccgucgacuucggcaacuccuacaucgccgagauggagaccgaguccuggaucgucgaccgccagugggcccaggaccucacccuccccuggcaguccggcuccggcggcgucuggcgcgagaugcaccaccucgucgaguucgagcccccccacgccgccaccauccgcguccucgcccucggcaaccaggagggcucccucaagaccgcccucaccggcgccaugcgcgucaccaaggacaccaacgacaacaaccucuacaagcuccacggcggccacgucuccugccgcgucaagcucuccgcccucacccucaagggcaccuccuacaagaucugcaccgacaagauguucuucgucaagaaccccaccgacaccggccacggcaccgucgucaugcaggucaaggucuccaagggcgcccccugccgcauccccgucaucgucgccgacgaccucaccgccgccaucaacaagggcauccucgucaccgucaaccccaucgccuccaccaacgacgacgagguccucaucgaggucaacccccccuucggcgacuccuacaucaucgucggccgcggcgacucccgccucaccuaccaguggcacaaggagggcuccuccaucggcaagcucuucacccagaccaugaagggcgucgagcgccucgccgucaugggcgacaccgccugggacuucuccuccgccggcggcuucuucaccuccgucggcaagggcauccacaccgucuucggcuccgccuuccagggccucuucggcggccucaacuggaucaccaaggucaucaugggcgccguccucaucugggucggcaucaacacccgcaacaugaccauguccauguccaugauccucgucggcgucaucaugauguuccucucccucggcgucggcgccgaccagggcugcgccaucaacuucggcaagugaggacuagucccuguucccagagcccacuuuuuuuucuuuuuuugaaauaaaauagccugucuuucagaucuaaaaaaaaaaaaaaaaaaaaaaaaaaaaaaaaaaaaaaaaaaaaaaaaaaaaaaaaaaaaaaaaugcaucccccccccccccccccccccccccccccccaaaggcucuuuucagagccaccagaauu

SEQ ID NO: 733 - RNA, 2320 nt, Artificial Sequence
  mRNA product Design c-5 comprising derived and/or modified sequence from YFV__NC_002031.1__SS-prME (polyprotein: M,aa104-778) (opt2)
gggagagcggcucggccauuuugucccagucaguccggaggcugcggcugcagaaguaccgccugcggaguaacugcaaagaagcuuaccauggacguccucaccguccaguuccucauccucggcaugcuccucaugaccggcggcgucacccucguccgcaagaaccgcuggcuccuccucaacgucaccuccgaggaccucggcaagaccuucuccgucggcaccggcaacugcaccaccaacauccucgaggccaaguacuggugccccgacuccauggaguacaacugccccaaccucuccccccgcgaggagcccgacgacaucgacugcuggugcuacggcgucgagaacguccgcgucgccuacggcaagugcgacuccgccggccgcucccgccgcucccgccgcgccaucgaccuccccacccacgagaaccacggccucaagacccgccaggagaaguggaugaccggccgcaugggcgagcgccagcuccagaagaucgagcgcugguucguccgcaaccccuucuucgccgucaccgcccucaccaucgccuaccucgucggcuccaacaugacccagcgcgucgucaucgcccuccucguccucgccgucggccccgccuacuccgcccacugcaucggcaucaccgaccgcgacuucaucgagggcguccacggcggcaccugggucuccgccacccucgagcaggacaagugcgucaccgucauggcccccgacaagcccucccucgacaucucccucgagaccgucgccaucgaccgccccgccgagguccgcaaggucugcuacaacgccguccucacccacgucaagaucaacgacaagugccccuccaccggcgaggcccaccucgccgaggagaacgagggcgacaacgccugcaagcgcaccuacuccgaccgcggcuggggcaacggcugcggccucuucggcaagggcuccaucgucgccugcgccaaguucaccugcgccaaguccaugucccucuucgaggucgaccagaccaagauccaguacgucauccgcgcccagcuccacgucggcgccaagcaggagaacuggaacaccgacaucaagacccucaaguucgacgcccucuccggcucccaggaggucgaguucaucggcuacggcaaggccacccucgagugccagguccagaccgccgucgacuucggcaacuccuacaucgccgagauggagaccgaguccuggaucgucgaccgccagugggcccaggaccucacccuccccuggcaguccggcuccggcggcgucuggcgcgagaugcaccaccucgucgaguucgagcccccccacgccgccaccauccgcguccucgcccucggcaaccaggagggcucccucaagaccgcccucaccggcgccaugcgcgucaccaaggacaccaacgacaacaaccucuacaagcuccacggcggccacgucuccugccgcgucaagcucuccgcccucacccucaagggcaccuccuacaagaucugcaccgacaagauguucuucgucaagaaccccaccgacaccggccacggcaccgucgucaugcaggucaaggucuccaagggcgcccccugccgcauccccgucaucgucgccgacgaccucaccgccgccaucaacaagggcauccucgucaccgucaaccccaucgccuccaccaacgacgacgagguccucaucgaggucaacccccccuucggcgacuccuacaucaucgucggccgcggcgacucccgccucaccuaccaguggcacaaggagggcuccuccaucggcaagcucuucacccagaccaugaagggcgucgagcgccucgccgucaugggcgacaccgccugggacuucuccuccgccggcggcuucuucaccuccgucggcaagggcauccacaccgucuucggcuccgccuuccagggccucuucggcggccucaacuggaucaccaaggucaucaugggcgccguccucaucugggucggcaucaacacccgcaacaugaccauguccauguccaugauccucgucggcgucaucaugauguuccucucccucggcgucggcgccugaggacuagucccuguucccagagcccacuuuuuuuucuuuuuuugaaauaaaauagccugucuuucagaucuaaaaaaaaaaaaaaaaaaaaaaaaaaaaaaaaaaaaaaaaaaaaaaaaaaaaaaaaaaaaaaaaugcaucccccccccccccccccccccccccccccccaaaggcucuuuucagagccaccagaauu

SEQ ID NO: 734 - RNA, 2347 nt, Artificial Sequence
  mRNA product Design c-5 comprising derived and/or modified sequence from YFV__NC_002031.1__SSIgE-prME-XX (polyprotein: aa122-788) (opt2)
gggagagcggcucggccauuuugucccagucaguccggaggcugcggcugcagaaguaccgccugcggaguaacugcaaagaagcuuaccauggacuggaccuggauccucuuccucgucgccgccgccacccgcguccacuccgucacccucguccgcaagaaccgcuggcuccuccucaacgucaccuccgaggaccucggcaagaccuucuccgucggcaccggcaacugcaccaccaacauccucgaggccaaguacuggugccccgacuccauggaguacaacugccccaaccucuccccccgcgaggagcccgacgacaucgacugcuggugcuacggcgucgagaacguccgcgucgccuacggcaagugcgacuccgccggccgcucccgccgcucccgccgcgccaucgaccuccccacccacgagaaccacggccucaagacccgccaggagaaguggaugaccggccgcaugggcgagcgccagcuccagaagaucgagcgcugguucguccgcaaccccuucuucgccgucaccgcccucaccaucgccuaccucgucggcuccaacaugacccagcgcgucgucaucgcccuccucguccucgccgucggccccgccuacuccgcccacugcaucggcaucaccgaccgcgacuucaucgagggcguccacggcggcaccugggucuccgccacccucgagcaggacaagugcgucaccgucauggcccccgacaagcccucccucgacaucucccucgagaccgucgccaucgaccgccccgccgagguccgcaaggucugcuacaacgccguccucacccacgucaagaucaacgacaagugccccuccaccggcgaggcccaccucgccgaggagaacgagggcgacaacgccugcaagcgcaccuacuccgaccgcggcuggggcaacggcugcggccucuucggcaagggcuccaucgucgccugcgccaaguucaccugcgccaaguccaugucccucuucgaggucgaccagaccaagauccaguacgucauccgcgcccagcuccacgucggcgccaagcaggagaacuggaacaccgacaucaagacccucaaguucgacgcccucuccggcucccaggaggucgaguucaucggcuacggcaaggccacccucgagugccagguccagaccgccgucgacuucggcaacuccuacaucgccgagauggagaccgaguccuggaucgucgaccgccagugggcccaggaccucacccuccccuggcaguccggcuccggcggcgucuggcgcgagaugcaccaccucgucgaguucgagcccccccacgccgccaccauccgcguccucgcccucggcaaccaggagggcucccucaagaccgcccucaccggcgccaugcgcgucaccaaggacaccaacgacaacaaccucuacaagcuccacggcggccacgucuccugccgcgucaagcucuccgcccucacccucaagggcaccuccuacaagaucugcaccgacaagauguucuucgucaagaaccccaccgacaccggccacggcaccgucgucaugcaggucaaggucuccaagggcgcccccugccgcauccccgucaucgucgccgacgaccucaccgccgccaucaacaagggcauccucgucaccgucaaccccaucgccuccaccaacgacgacgagguccucaucgaggucaacccccccuucggcgacuccuacaucaucgucggccgcggcgacucccgccucaccuaccaguggcacaaggagggcuccuccaucggcaagcucuucacccagaccaugaagggcgucgagcgccucgccgucaugggcgacaccgccugggacuucuccuccgccggcggcuucuucaccuccgucggcaagggcauccacaccgucuucggcuccgccuuccagggccucuucggcggccucaacuggaucaccaaggucaucaugggcgccguccucaucugggucggcaucaacacccgcaacaugaccauguccauguccaugauccucgucggcgucaucaugauguuccucucccucggcgucggcgccgaccagggcugcgccaucaacuucggcaagugaggacuagucccuguucccagagcccacuuuuuuuucuuuuuuugaaauaaaauagccugucuuucagaucuaaaaaaaaaaaaaaaaaaaaaaaaaaaaaaaaaaaaaaaaaaaaaaaaaaaaaaaaaaaaaaaaugcaucccccccccccccccccccccccccccccccaaaggcucuuuucagagccaccagaauu

SEQ ID NO: 735 - RNA, 2317 nt, Artificial Sequence
  mRNA product Design c-5 comprising derived and/or modified sequence from YFV__NC_002031.1__SSIgE-prME (polyprotein: aa122-778) (opt2)
gggagagcggcucggccauuuugucccagucaguccggaggcugcggcugcagaaguaccgccugcggaguaacugcaaagaagcuuaccauggacuggaccuggauccucuuccucgucgccgccgccacccgcguccacuccgucacccucguccgcaagaaccgcuggcuccuccucaacgucaccuccgaggaccucggcaagaccuucuccgucggcaccggcaacugcaccaccaacauccucgaggccaaguacuggugccccgacuccauggaguacaacugccccaaccucuccccccgcgaggagcccgacgacaucgacugcuggugcuacggcgucgagaacguccgcgucgccuacggcaagugcgacuccgccggccgcucccgccgcucccgccgcgccaucgaccuccccacccacgagaaccacggccucaagacccgccaggagaaguggaugaccggccgcaugggcgagcgccagcuccagaagaucgagcgcugguucguccgcaaccccuucuucgccgucaccgcccucaccaucgccuaccucgucggcuccaacaugacccagcgcgucgucaucgcccuccucguccucgccgucggccccgccuacuccgcccacugcaucggcaucaccgaccgcgacuucaucgagggcguccacggcggcaccugggucuccgccacccucgagcaggacaagugcgucaccgucauggcccccgacaagcccucccucgacaucucccucgagaccgucgccaucgaccgccccgccgagguccgcaaggucugcuacaacgccguccucacccacgucaagaucaacgacaagugccccuccaccggcgaggcccaccucgccgaggagaacgagggcgacaacgccugcaagcgcaccuacuccgaccgcggcuggggcaacggcugcggccucuucggcaagggcuccaucgucgccugcgccaaguucaccugcgccaaguccaugucccucuucgaggucgaccagaccaagauccaguacgucauccgcgcccagcuccacgucggcgccaagcaggagaacuggaacaccgacaucaagacccucaaguucgacgcccucuccggcucccaggaggucgaguucaucggcuacggcaaggccacccucgagugccagguccagaccgccgucgacuucggcaacuccuacaucgccgagauggagaccgaguccuggaucgucgaccgccagugggcccaggaccucacccuccccuggcaguccggcuccggcggcgucuggcgcgagaugcaccaccucgucgaguucgagcccccccacgccgccaccauccgcguccucgcccucggcaaccaggagggcucccucaagaccgcccucaccggcgccaugcgcgucaccaaggacaccaacgacaacaaccucuacaagcuccacggcggccacgucuccugccgcgucaagcucuccgcccucacccucaagggcaccuccuacaagaucugcaccgacaagauguucuucgucaagaaccccaccgacaccggccacggcaccgucgucaugcaggucaaggucuccaagggcgcccccugccgcauccccgucaucgucgccgacgaccucaccgccgccaucaacaagggcauccucgucaccgucaaccccaucgccuccaccaacgacgacgagguccucaucgaggucaacccccccuucggcgacuccuacaucaucgucggccgcggcgacucccgccucaccuaccaguggcacaaggagggcuccuccaucggcaagcucuucacccagaccaugaagggcgucgagcgccucgccgucaugggcgacaccgccugggacuucuccuccgccggcggcuucuucaccuccgucggcaagggcauccacaccgucuucggcuccgccuuccagggccucuucggcggccucaacuggaucaccaaggucaucaugggcgccguccucaucugggucggcaucaacacccgcaacaugaccauguccauguccaugauccucgucggcgucaucaugauguuccucucccucggcgucggcgccugaggacuagucccuguucccagagcccacuuuuuuuucuuuuuuugaaauaaaauagccugucuuucagaucuaaaaaaaaaaaaaaaaaaaaaaaaaaaaaaaaaaaaaaaaaaaaaaaaaaaaaaaaaaaaaaaaugcaucccccccccccccccccccccccccccccccaaaggcucuuuucagagccaccagaauu

SEQ ID NO: 736 - RNA, 2365 nt, Artificial Sequence
  mRNA product Design c-5 comprising derived and/or modified sequence from YFV__NC_002031.1__SSjev-prME-XX (polyprotein: aa122-788) (opt2)
gggagagcggcucggccauuuugucccagucaguccggaggcugcggcugcagaaguaccgccugcggaguaacugcaaagaagcuuaccaugggcaagcgcuccgccggcuccaucauguggcucgccucccucgccgucgucaucgccugcgccggcgccgucacccucguccgcaagaaccgcuggcuccuccucaacgucaccuccgaggaccucggcaagaccuucuccgucggcaccggcaacugcaccaccaacauccucgaggccaaguacuggugccccgacuccauggaguacaacugccccaaccucuccccccgcgaggagcccgacgacaucgacugcuggugcuacggcgucgagaacguccgcgucgccuacggcaagugcgacuccgccggccgcucccgccgcucccgccgcgccaucgaccuccccacccacgagaaccacggccucaagacccgccaggagaaguggaugaccggccgcaugggcgagcgccagcuccagaagaucgagcgcugguucguccgcaaccccuucuucgccgucaccgcccucaccaucgccuaccucgucggcuccaacaugacccagcgcgucgucaucgcccuccucguccucgccgucggccccgccuacuccgcccacugcaucggcaucaccgaccgcgacuucaucgagggcguccacggcggcaccugggucuccgccacccucgagcaggacaagugcgucaccgucauggcccccgacaagcccucccucgacaucucccucgagaccgucgccaucgaccgccccgccgagguccgcaaggucugcuacaacgccguccucacccacgucaagaucaacgacaagugccccuccaccggcgaggcccaccucgccgaggagaacgagggcgacaacgccugcaagcgcaccuacuccgaccgcggcuggggcaacggcugcggccucuucggcaagggcuccaucgucgccugcgccaaguucaccugcgccaaguccaugucccucuucgaggucgaccagaccaagauccaguacgucauccgcgcccagcuccacgucggcgccaagcaggagaacuggaacaccgacaucaagacccucaaguucgacgcccucuccggcucccaggaggucgaguucaucggcuacggcaaggccacccucgagugccagguccagaccgccgucgacuucggcaacuccuacaucgccgagauggagaccgaguccuggaucgucgaccgccagugggcccaggaccucacccuccccuggcaguccggcuccggcggcgucuggcgcgagaugcaccaccucgucgaguucgagcccccccacgccgccaccauccgcguccucgcccucggcaaccaggagggcucccucaagaccgcccucaccggcgccaugcgcgucaccaaggacaccaacgacaacaaccucuacaagcuccacggcggccacgucuccugccgcgucaagcucuccgcccucacccucaagggcaccuccuacaagaucugcaccgacaagauguucuucgucaagaaccccaccgacaccggccacggcaccgucgucaugcaggucaaggucuccaagggcgcccccugccgcauccccgucaucgucgccgacgaccucaccgccgccaucaacaagggcauccucgucaccgucaaccccaucgccuccaccaacgacgacgagguccucaucgaggucaacccccccuucggcgacuccuacaucaucgucggccgcggcgacucccgccucaccuaccaguggcacaaggagggcuccuccaucggcaagcucuucacccagaccaugaagggcgucgagcgccucgccgucaugggcgacaccgccugggacuucuccuccgccggcggcuucuucaccuccgucggcaagggcauccacaccgucuucggcuccgccuuccagggccucuucggcggccucaacuggaucaccaaggucaucaugggcgccguccucaucugggucggcaucaacacccgcaacaugaccauguccauguccaugauccucgucggcgucaucaugauguuccucucccucggcgucggcgccgaccagggcugcgccaucaacuucggcaagugaggacuagucccuguucccagagcccacuuuuuuuucuuuuuuugaaauaaaauagccugucuuucagaucuaaaaaaaaaaaaaaaaaaaaaaaaaaaaaaaaaaaaaaaaaaaaaaaaaaaaaaaaaaaaaaaaugcaucccccccccccccccccccccccccccccccaaaggcucuuuucagagccaccagaauu

SEQ ID NO: 737 - RNA, 2335 nt, Artificial Sequence
  mRNA product Design c-5 comprising derived and/or modified sequence from YFV__NC_002031.1__SSjev-prME (polyprotein: aa122-778) (opt2)
gggagagcggcucggccauuuugucccagucaguccggaggcugcggcugcagaaguaccgccugcggaguaacugcaaagaagcuuaccaugggcaagcgcuccgccggcuccaucauguggcucgccucccucgccgucgucaucgccugcgccggcgccgucacccucguccgcaagaaccgcuggcuccuccucaacgucaccuccgaggaccucggcaagaccuucuccgucggcaccggcaacugcaccaccaacauccucgaggccaaguacuggugccccgacuccauggaguacaacugccccaaccucuccccccgcgaggagcccgacgacaucgacugcuggugcuacggcgucgagaacguccgcgucgccuacggcaagugcgacuccgccggccgcucccgccgcucccgccgcgccaucgaccuccccacccacgagaaccacggccucaagacccgccaggagaaguggaugaccggccgcaugggcgagcgccagcuccagaagaucgagcgcugguucguccgcaaccccuucuucgccgucaccgcccucaccaucgccuaccucgucggcuccaacaugacccagcgcgucgucaucgcccuccucguccucgccgucggccccgccuacuccgcccacugcaucggcaucaccgaccgcgacuucaucgagggcguccacggcggcaccugggucuccgccacccucgagcaggacaagugcgucaccgucauggcccccgacaagcccucccucgacaucucccucgagaccgucgccaucgaccgccccgccgagguccgcaaggucugcuacaacgccguccucacccacgucaagaucaacgacaagugccccuccaccggcgaggcccaccucgccgaggagaacgagggcgacaacgccugcaagcgcaccuacuccgaccgcggcuggggcaacggcugcggccucuucggcaagggcuccaucgucgccugcgccaaguucaccugcgccaaguccaugucccucuucgaggucgaccagaccaagauccaguacgucauccgcgcccagcuccacgucggcgccaagcaggagaacuggaacaccgacaucaagacccucaaguucgacgcccucuccggcucccaggaggucgaguucaucggcuacggcaaggccacccucgagugccagguccagaccgccgucgacuucggcaacuccuacaucgccgagauggagaccgaguccuggaucgucgaccgccagugggcccaggaccucacccuccccuggcaguccggcuccggcggcgucuggcgcgagaugcaccaccucgucgaguucgagcccccccacgccgccaccauccgcguccucgcccucggcaaccaggagggcucccucaagaccgcccucaccggcgccaugcgcgucaccaaggacaccaacgacaacaaccucuacaagcuccacggcggccacgucuccugccgcgucaagcucuccgcccucacccucaagggcaccuccuacaagaucugcaccgacaagauguucuucgucaagaaccccaccgacaccggccacggcaccgucgucaugcaggucaaggucuccaagggcgcccccugccgcauccccgucaucgucgccgacgaccucaccgccgccaucaacaagggcauccucgucaccgucaaccccaucgccuccaccaacgacgacgagguccucaucgaggucaacccccccuucggcgacuccuacaucaucgucggccgcggcgacucccgccucaccuaccaguggcacaaggagggcuccuccaucggcaagcucuucacccagaccaugaagggcgucgagcgccucgccgucaugggcgacaccgccugggacuucuccuccgccggcggcuucuucaccuccgucggcaagggcauccacaccgucuucggcuccgccuuccagggccucuucggcggccucaacuggaucaccaaggucaucaugggcgccguccucaucugggucggcaucaacacccgcaacaugaccauguccauguccaugauccucgucggcgucaucaugauguuccucucccucggcgucggcgccugaggacuagucccuguucccagagcccacuuuuuuuucuuuuuuugaaauaaaauagccugucuuucagaucuaaaaaaaaaaaaaaaaaaaaaaaaaaaaaaaaaaaaaaaaaaaaaaaaaaaaaaaaaaaaaaaaugcaucccccccccccccccccccccccccccccccaaaggcucuuuucagagccaccagaauu

SEQ ID NO: 738 - RNA, 2383 nt, Artificial Sequence
  mRNA product Design c-5 comprising derived and/or modified sequence from YFV__NC_002031.1__X-SS-prME-XX (polyprotein: aa92-788) (opt3)
gggagagcggcucggccauuuugucccagucaguccggaggcugcggcugcagaaguaccgccugcggaguaacugcaaagaagcuuaccaugagaggccugagcuccaggaagcggcgcucucacgacgugcucaccguccaguuccuuauccuggggauguuguuaaugacaggagguguuacucuggugcguaaaaaccgauggcuacuccugaauguaacgucagaggaucuuggcaagaccuuuaguguggggacaggaaacugcacuaccaauauucuggaagccaaauacuggugucccgacagcauggaguauaacugcccuaauuuguccccaagagaggaaccggaugacauagauuguuggugcuacggcgucgaaaacgugaggguugcuuaugguaagugugacucugcagggcggucgcgcagaucaaggcgggccaucgaucuccccacacaugagaaucacggacugaaaacccgccaagagaaguggaugacuggccgaaugggcgaaagacagcugcagaagauugagaggugguucgugcggaacccuuucuucgcggucacagcucucaccaucgccuacuuaguggggagcaauaugacgcagcguguaguuauugcacugcuuguguuggccgucggaccagcuuauagugcacauugcaucgguauaacugaccgcgauuuuaucgaaggcgugcacgggggaaccuggguguccgccacacuggagcaagacaaaugugucacuguuauggcucccgauaagccuucucuagacauuagccucgagaccguggccaucgauagaccagcggaaguaaggaaagugugcuacaacgcaguccugacacaugugaagauuaaugacaaaugucccuccaccggcgaggcccaccuugcugaagagaacgaaggugacaaugccugcaagcggacguauucagaucgaggguggggaaacggcuguggccuguucgggaagggaaguaucguugcaugcgcuaaauuuacuugcgccaagagcaugucuuuguucgagguggaccagacaaaaauacaguacgucauucgcgcgcagcuccacgugggugccaagcaagagaauuggaacaccgauaucaaaacucugaaguuugacgcauuauccggcucacaggaaguagaguucauuggguacggaaaagcuacacuggaaugucagguucagaccgccguggauuuuggcaacagcuauaucgcugagauggaaacggagaguuggaucgucgacagacaaugggcccaggaucucacccuuccuuggcagucugguuccgggggcguguggagggagaugcaucaccuggucgaauuugagccaccgcaugcagccacaauucggguguuggcucuaggaaaucaagaaggcagccugaagacugcgcucaccggggcaaugcgcguuacaaaggacacuaacgauaauaaccuguacaaacuucacggaggucacgugucgugcagaguaaagcugucugccuugacccucaaaggcacauccuauaagauauguaccgacaaaauguuuuucgucaagaaucccacugauacggggcauggaacagugguuaugcaagugaaggucucaaaaggcgcuccuugcaggaucccagugauuguagccgacgaccugaccgcagccaucaacaaggguauauuagugacuguuaaucccauugcuaguaccaacgaugacgagguccugaucgaagugaauccuccauucggggauagcuacaucauugugggccguggagacucccggcuaacauaucaguggcacaaagagggcucuagcaucgggaagcucuuuacccagacuaugaaaggagucgagcgacuggccguuaugggugauacagcaugggacuucucaagugcgggcggguuuuucacguccgugggaaagggcauucauaccguguuugguagcgcuuuccaggggcuuuuuggcggauugaacuggauaacuaagguaaucaugggcgccguccugauuuggguggggaucaauacaagaaacaugaccaugucuaugucaaugauccucguuggagugauuaugauguuccugagucuuggcgucggugcagaucaggggugugccauaaauuuuggaaaaugaggacuagucccuguucccagagcccacuuuuuuuucuuuuuuugaaauaaaauagccugucuuucagaucuaaaaaaaaaaaaaaaaaaaaaaaaaaaaaaaaaaaaaaaaaaaaaaaaaaaaaaaaaaaaaaaaugcaucccccccccccccccccccccccccccccccaaaggcucuuuucagagccaccagaauu

SEQ ID NO: 739 - RNA, 2320 nt, Artificial Sequence
  mRNA product Design c-5 comprising derived and/or modified sequence from YFV__NC_002031.1__SS-prME (polyprotein: M,aa104-778) (opt3)
gggagagcggcucggccauuuugucccagucaguccggaggcugcggcugcagaaguaccgccugcggaguaacugcaaagaagcuuaccauggacgugcugaccguccaguuccucauccuuggcaugcuguugaugacagggggaguuacuuuagugagaaagaacagguggcugcuacucaauguaacgagcgaggaucuggguaaaaccuuuuccgugggcacagggaacugcacuaccaauauucuugaagccaaguacuggugucccgacucuauggaguauaacugcccuaaucugucaccacgggaggaaccggaugacauagauuguuggugcuacggagucgaaaacgugcgcguugcuuauggcaaaugugacagugcaggucgaagccguagauccaggcgggccaucgauuugcccacacacgagaaucaugggcucaagacccgccaagagaaauggaugacuggaagaaugggcgaaaggcagcugcagaagauugagcggugguucgugcgcaacccuuucuucgcggucacagcucugaccaucgccuaccucgugggcucuaauaugacgcagcgaguaguuauugcauuacuggugcuugccgucgggccagcuuauucggcacacugcaucggaauaacugacagagauuuuaucgaaggugugcauggcgggaccugggugucagccacauuggagcaagacaagugugucacuguuauggcucccgauaaaccuagccuggacauuagucuagagaccguggccaucgauaggccagcggaaguacggaaggugugcuacaacgcaguccucacacacgugaaaauuaaugacaagugucccuccaccggagaggcccaucuggcugaagagaacgaaggcgacaaugccugcaaacguacguauucugaucgcgguugggggaacggauguggccuuuucggcaaggggagcaucguugcaugcgcuaaguuuacuugcgccaaauccaugucacuguucgagguggaccagacaaagauacaguacgucauuagagcgcaguugcacgugggagccaaacaagagaauuggaacaccgauaucaagacucucaaauuugacgcacugagugguagccaggaaguagaguucauuggcuacgggaaggcuacauuagaaugucagguucagaccgccguggauuuuggaaacucuuauaucgcugagauggaaacggaguccuggaucgucgacaggcaaugggcccaggaucugacccucccuuggcagucaggcagcggugggguguggcgggagaugcaccaucuugucgaauuugagccaccgcacgcagccacaauucgagugcuggcuuugggcaaucaagaaggaagucuaaaaacugcgcugaccggcgcaaugcgcguuacaaaggacacuaacgauaauaaccucuacaagcugcaugggggacacgugucuugcagaguaaaacuuuccgcccugaccuugaaggguacaagcuauaaaauauguaccgacaagauguuuuucgucaaaaaucccacugauacgggccacgggacagugguuaugcaagugaaggucucgaagggagcuccuugcaggaucccagugauuguagccgacgaccucaccgcagccaucaacaaaggcauacuggugacuguuaaucccauugcuucuaccaacgaugacgaggucuuaaucgaagugaauccuccauucggugauuccuacaucauuguggggcggggcgacucacgccugacauaucaguggcauaaggagggaaguagcaucggcaaacuauuuacccagacuaugaagggggucgagagacucgccguuaugggagauacagcaugggacuucuccucugcggguggcuuuuucacgagcguggggaaaggcauucacaccguguuuggaucagcuuuccagggucuguuugggggccuuaacuggauaacuaagguaaucaugggagccgucuugauuugggugggcaucaauacaaggaacaugaccaugaguauguccaugauccugguuggggugauuaugauguuccucagccugggagucggcgcaugaggacuagucccuguucccagagcccacuuuuuuuucuuuuuuugaaauaaaauagccugucuuucagaucuaaaaaaaaaaaaaaaaaaaaaaaaaaaaaaaaaaaaaaaaaaaaaaaaaaaaaaaaaaaaaaaaugcaucccccccccccccccccccccccccccccccaaaggcucuuuucagagccaccagaauu

SEQ ID NO: 740 - RNA, 2347 nt, Artificial Sequence
  mRNA product Design c-5 comprising derived and/or modified sequence from YFV__NC_002031.1__SSIgE-prME-XX (polyprotein: aa122-788) (opt3)
gggagagcggcucggccauuuugucccagucaguccggaggcugcggcugcagaaguaccgccugcggaguaacugcaaagaagcuuaccauggacuggaccuggauccuguuccucguggccgcugcaacaagaguccacagcguuacucuggugcguaaaaaccgauggcuacuccugaauguaacgucagaggaucuuggcaagaccuuuaguguggggacaggaaacugcacuaccaauauucuggaagccaaauacuggugucccgacagcauggaguauaacugcccuaauuuguccccaagagaggaaccggaugacauagauuguuggugcuacggcgucgaaaacgugaggguugcuuaugguaagugugacucugcagggcggucgcgcagaucaaggcgggccaucgaucuccccacacaugagaaucacggacugaaaacccgccaagagaaguggaugacuggccgaaugggcgaaagacagcugcagaagauugagaggugguucgugcggaacccuuucuucgcggucacagcucucaccaucgccuacuuaguggggagcaauaugacgcagcguguaguuauugcacugcuuguguuggccgucggaccagcuuauagugcacauugcaucgguauaacugaccgcgauuuuaucgaaggcgugcacgggggaaccuggguguccgccacacuggagcaagacaaaugugucacuguuauggcucccgauaagccuucucuagacauuagccucgagaccguggccaucgauagaccagcggaaguaaggaaagugugcuacaacgcaguccugacacaugugaagauuaaugacaaaugucccuccaccggcgaggcccaccuugcugaagagaacgaaggugacaaugccugcaagcggacguauucagaucgaggguggggaaacggcuguggccuguucgggaagggaaguaucguugcaugcgcuaaauuuacuugcgccaagagcaugucuuuguucgagguggaccagacaaaaauacaguacgucauucgcgcgcagcuccacgugggugccaagcaagagaauuggaacaccgauaucaaaacucugaaguuugacgcauuauccggcucacaggaaguagaguucauuggguacggaaaagcuacacuggaaugucagguucagaccgccguggauuuuggcaacagcuauaucgcugagauggaaacggagaguuggaucgucgacagacaaugggcccaggaucucacccuuccuuggcagucugguuccgggggcguguggagggagaugcaucaccuggucgaauuugagccaccgcaugcagccacaauucggguguuggcucuaggaaaucaagaaggcagccugaagacugcgcucaccggggcaaugcgcguuacaaaggacacuaacgauaauaaccuguacaaacuucacggaggucacgugucgugcagaguaaagcugucugccuugacccucaaaggcacauccuauaagauauguaccgacaaaauguuuuucgucaagaaucccacugauacggggcauggaacagugguuaugcaagugaaggucucaaaaggcgcuccuugcaggaucccagugauuguagccgacgaccugaccgcagccaucaacaaggguauauuagugacuguuaaucccauugcuaguaccaacgaugacgagguccugaucgaagugaauccuccauucggggauagcuacaucauugugggccguggagacucccggcuaacauaucaguggcacaaagagggcucuagcaucgggaagcucuuuacccagacuaugaaaggagucgagcgacuggccguuaugggugauacagcaugggacuucucaagugcgggcggguuuuucacguccgugggaaagggcauucauaccguguuugguagcgcuuuccaggggcuuuuuggcggauugaacuggauaacuaagguaaucaugggcgccguccugauuuggguggggaucaauacaagaaacaugaccaugucuaugucaaugauccucguuggagugauuaugauguuccugagucuuggcgucggugcagaucaggggugugccauaaauuuuggaaaaugaggacuagucccuguucccagagcccacuuuuuuuucuuuuuuugaaauaaaauagccugucuuucagaucuaaaaaaaaaaaaaaaaaaaaaaaaaaaaaaaaaaaaaaaaaaaaaaaaaaaaaaaaaaaaaaaaugcaucccccccccccccccccccccccccccccccaaaggcucuuuucagagccaccagaauu

SEQ ID NO: 741 - RNA, 2317 nt, Artificial Sequence
  mRNA product Design c-5 comprising derived and/or modified sequence from YFV__NC_002031.1__SSIgE-prME (polyprotein: aa122-778) (opt3)
gggagagcggcucggccauuuugucccagucaguccggaggcugcggcugcagaaguaccgccugcggaguaacugcaaagaagcuuaccauggacuggaccuggauccuguuccucguggccgcugcaacaagaguccacagcgugacccuggucagaaagaacagguggcuccuucugaauguuacaagcgaggacuugggcaaaacuuucuccguggggacgggaaacugcaccacaaauaucuuagaagccaaguacuggugucccgauucuauggaguauaacugcccuaaucugucaccacgggaggaaccggacgauauugacuguuggugcuacgguguagaaaacgugcgcgucgcuuauggcaaaugugauagugcagggcgaagccguagauccaggcgggccauagaccuacccacucacgagaaucauggacucaagacccgccaggagaaauggaugacaggcagaaugggugaaaggcaacugcagaagaucgagcggugguuugugcgcaacccuuucuuugcgguuaccgcucuuacuauugccuaccugguggggucuaauaugacacagcgagucgugaucgcauugcucguacuggccguuggaccagcuuauucggcacacugcauuggcaucaccgauagagacuucauagaaggcgugcaugggggaacgugggucucagccacucuggagcaggauaagugugugaccgugauggcucccgacaaaccuagccucgauaucaguuuagagacagucgccauugacaggccagcggaaguucggaaggugugcuacaacgcaguacugacucacgugaaaaucaaugauaagugucccuccaccggugaggcccaucuugcugaagagaacgaaggcgacaaugccugcaaacguacauauucugaccgcggguggggaaacggcugugguuuguuugggaagggaagcauugucgcaugcgcuaaguuuaccugcgccaaauccaugucacuguucgagguggaucaaacgaagauccaguacguuauaagagcgcagcuacacgugggcgccaaacaggagaauuggaacacugacauuaagacacucaaauucgaugcacugaguggcagccaagaagucgaguuuaucggguacggaaaggcuacccuugaaugucaggugcagacugccguagacuucgguaacucuuauauugcugagauggaaacagaguccuggaucguugauaggcagugggcccaagaccugaccuugccuuggcagucaggcagcgggggaguguggcgggagaugcaccaucucgucgaauuugagccaccgcacgcagccacgauccgagugcuggcuuuaggcaaucaggaagguagucugaaaaccgcgcucacaggggcaaugcgcgucacuaaggauaccaacgacaauaaccuuuacaagcugcauggcggacacgugucuugcagaguuaaauuguccgcccuaacacugaagggcacuagcuauaaaauuuguaccgauaagauguucuuugugaaaaaucccacagacaccgggcacggaacuguagucaugcaagugaagguuucgaagggugcuccuugcaggauaccagugaucgucgccgaugaccucacggcagccauuaacaaaggcauccuggugacaguaaaucccauagcuucuaccaacgacgaugaggugcuuauugaaguuaauccuccauucggggacuccuacaucaucgucggacggggcgauucacgccugacuuaucaguggcauaaggaggguaguagcauugggaaauuguucacccagacaaugaagggcguggagagacucgccgugaugggagacaccgcaugggauuuuuccucugcgggcggguucuuuacuagcgucggaaaagguauccacacaguuuucggcucagcuuuucaggggcuguucggaggcuuaaacuggauuacgaaggugauaaugggugccgugcugaucuggguagggauuaauaccaggaacaugacuaugaguauguccaugauccuagucggcgugaucaugauguuucucagccugggaguuggcgcaugaggacuagucccuguucccagagcccacuuuuuuuucuuuuuuugaaauaaaauagccugucuuucagaucuaaaaaaaaaaaaaaaaaaaaaaaaaaaaaaaaaaaaaaaaaaaaaaaaaaaaaaaaaaaaaaaaugcaucccccccccccccccccccccccccccccccaaaggcucuuuucagagccaccagaauu

SEQ ID NO: 742 - RNA, 2365 nt, Artificial Sequence
  mRNA product Design c-5 comprising derived and/or modified sequence from YFV__NC_002031.1__SSjev-prME-XX (polyprotein: aa122-788) (opt3)
gggagagcggcucggccauuuugucccagucaguccggaggcugcggcugcagaaguaccgccugcggaguaacugcaaagaagcuuaccaugggcaagagaagcgccggguccaucauguggcuggcuucucucgcaguggucauugccugcgcgggagcuguuacucuggugcguaaaaaccgauggcuacuccugaauguaacgucagaggaucuuggcaagaccuuuaguguggggacaggaaacugcacuaccaauauucuggaagccaaauacuggugucccgacagcauggaguauaacugcccuaauuuguccccaagagaggaaccggaugacauagauuguuggugcuacggcgucgaaaacgugaggguugcuuaugguaagugugacucugcagggcggucgcgcagaucaaggcgggccaucgaucuccccacacaugagaaucacggacugaaaacccgccaagagaaguggaugacuggccgaaugggcgaaagacagcugcagaagauugagaggugguucgugcggaacccuuucuucgcggucacagcucucaccaucgccuacuuaguggggagcaauaugacgcagcguguaguuauugcacugcuuguguuggccgucggaccagcuuauagugcacauugcaucgguauaacugaccgcgauuuuaucgaaggcgugcacgggggaaccuggguguccgccacacuggagcaagacaaaugugucacuguuauggcucccgauaagccuucucuagacauuagccucgagaccguggccaucgauagaccagcggaaguaaggaaagugugcuacaacgcaguccugacacaugugaagauuaaugacaaaugucccuccaccggcgaggcccaccuugcugaagagaacgaaggugacaaugccugcaagcggacguauucagaucgaggguggggaaacggcuguggccuguucgggaagggaaguaucguugcaugcgcuaaauuuacuugcgccaagagcaugucuuuguucgagguggaccagacaaaaauacaguacgucauucgcgcgcagcuccacgugggugccaagcaagagaauuggaacaccgauaucaaaacucugaaguuugacgcauuauccggcucacaggaaguagaguucauuggguacggaaaagcuacacuggaaugucagguucagaccgccguggauuuuggcaacagcuauaucgcugagauggaaacggagaguuggaucgucgacagacaaugggcccaggaucucacccuuccuuggcagucugguuccgggggcguguggagggagaugcaucaccuggucgaauuugagccaccgcaugcagccacaauucggguguuggcucuaggaaaucaagaaggcagccugaagacugcgcucaccggggcaaugcgcguuacaaaggacacuaacgauaauaaccuguacaaacuucacggaggucacgugucgugcagaguaaagcugucugccuugacccucaaaggcacauccuauaagauauguaccgacaaaauguuuuucgucaagaaucccacugauacggggcauggaacagugguuaugcaagugaaggucucaaaaggcgcuccuugcaggaucccagugauuguagccgacgaccugaccgcagccaucaacaaggguauauuagugacuguuaaucccauugcuaguaccaacgaugacgagguccugaucgaagugaauccuccauucggggauagcuacaucauugugggccguggagacucccggcuaacauaucaguggcacaaagagggcucuagcaucgggaagcucuuuacccagacuaugaaaggagucgagcgacuggccguuaugggugauacagcaugggacuucucaagugcgggcggguuuuucacguccgugggaaagggcauucauaccguguuugguagcgcuuuccaggggcuuuuuggcggauugaacuggauaacuaagguaaucaugggcgccguccugauuuggguggggaucaauacaagaaacaugaccaugucuaugucaaugauccucguuggagugauuaugauguuccugagucuuggcgucggugcagaucaggggugugccauaaauuuuggaaaaugaggacuagucccuguucccagagcccacuuuuuuuucuuuuuuugaaauaaaauagccugucuuucagaucuaaaaaaaaaaaaaaaaaaaaaaaaaaaaaaaaaaaaaaaaaaaaaaaaaaaaaaaaaaaaaaaaugcaucccccccccccccccccccccccccccccccaaaggcucuuuucagagccaccagaauu

SEQ ID NO: 743 - RNA, 2335 nt, Artificial Sequence
  mRNA product Design c-5 comprising derived and/or modified sequence from YFV__NC_002031.1__SSjev-prME (polyprotein: aa122-778) (opt3)
gggagagcggcucggccauuuugucccagucaguccggaggcugcggcugcagaaguaccgccugcggaguaacugcaaagaagcuuaccaugggcaagagaagcgccggguccaucauguggcuggcuucucucgcaguggucauugccugcgcgggagcugugacccuggucagaaagaacagguggcuccuucugaauguuacaagcgaggacuugggcaaaacuuucuccguggggacgggaaacugcaccacaaauaucuuagaagccaaguacuggugucccgauucuauggaguauaacugcccuaaucugucaccacgggaggaaccggacgauauugacuguuggugcuacgguguagaaaacgugcgcgucgcuuauggcaaaugugauagugcagggcgaagccguagauccaggcgggccauagaccuacccacucacgagaaucauggacucaagacccgccaggagaaauggaugacaggcagaaugggugaaaggcaacugcagaagaucgagcggugguuugugcgcaacccuuucuuugcgguuaccgcucuuacuauugccuaccugguggggucuaauaugacacagcgagucgugaucgcauugcucguacuggccguuggaccagcuuauucggcacacugcauuggcaucaccgauagagacuucauagaaggcgugcaugggggaacgugggucucagccacucuggagcaggauaagugugugaccgugauggcucccgacaaaccuagccucgauaucaguuuagagacagucgccauugacaggccagcggaaguucggaaggugugcuacaacgcaguacugacucacgugaaaaucaaugauaagugucccuccaccggugaggcccaucuugcugaagagaacgaaggcgacaaugccugcaaacguacauauucugaccgcggguggggaaacggcugugguuuguuugggaagggaagcauugucgcaugcgcuaaguuuaccugcgccaaauccaugucacuguucgagguggaucaaacgaagauccaguacguuauaagagcgcagcuacacgugggcgccaaacaggagaauuggaacacugacauuaagacacucaaauucgaugcacugaguggcagccaagaagucgaguuuaucggguacggaaaggcuacccuugaaugucaggugcagacugccguagacuucgguaacucuuauauugcugagauggaaacagaguccuggaucguugauaggcagugggcccaagaccugaccuugccuuggcagucaggcagcgggggaguguggcgggagaugcaccaucucgucgaauuugagccaccgcacgcagccacgauccgagugcuggcuuuaggcaaucaggaagguagucugaaaaccgcgcucacaggggcaaugcgcgucacuaaggauaccaacgacaauaaccuuuacaagcugcauggcggacacgugucuugcagaguuaaauuguccgcccuaacacugaagggcacuagcuauaaaauuuguaccgauaagauguucuuugugaaaaaucccacagacaccgggcacggaacuguagucaugcaagugaagguuucgaagggugcuccuugcaggauaccagugaucgucgccgaugaccucacggcagccauuaacaaaggcauccuggugacaguaaaucccauagcuucuaccaacgacgaugaggugcuuauugaaguuaauccuccauucggggacuccuacaucaucgucggacggggcgauucacgccugacuuaucaguggcauaaggaggguaguagcauugggaaauuguucacccagacaaugaagggcguggagagacucgccgugaugggagacaccgcaugggauuuuuccucugcgggcggguucuuuacuagcgucggaaaagguauccacacaguuuucggcucagcuuuucaggggcuguucggaggcuuaaacuggauuacgaaggugauaaugggugccgugcugaucuggguagggauuaauaccaggaacaugacuaugaguauguccaugauccuagucggcgugaucaugauguuucucagccugggaguuggcgcaugaggacuagucccuguucccagagcccacuuuuuuuucuuuuuuugaaauaaaauagccugucuuucagaucuaaaaaaaaaaaaaaaaaaaaaaaaaaaaaaaaaaaaaaaaaaaaaaaaaaaaaaaaaaaaaaaaugcaucccccccccccccccccccccccccccccccaaaggcucuuuucagagccaccagaauu

SEQ ID NO: 744 - RNA, 2383 nt, Artificial Sequence
  mRNA product Design c-5 comprising derived and/or modified sequence from YFV__NC_002031.1__X-SS-prME-XX (polyprotein: aa92-788) (opt4)
gggagagcggcucggccauuuugucccagucaguccggaggcugcggcugcagaaguaccgccugcggaguaacugcaaagaagcuuaccaugagaggccugagcagcagaaagagaagaagccacgacgugcugaccgugcaguuccugauccugggcaugcugcugaugaccggcggcgugacccuggugagaaagaacagauggcugcugcugaacgugaccagcgaggaccugggcaagaccuucagcgugggcaccggcaacugcaccaccaacauccuggaggccaaguacuggugccccgacagcauggaguacaacugccccaaccugagccccagagaggagcccgacgacaucgacugcuggugcuacggcguggagaacgugagaguggccuacggcaagugcgacagcgccggcagaagcagaagaagcagaagagccaucgaccugcccacccacgagaaccacggccugaagaccagacaggagaaguggaugaccggcagaaugggcgagagacagcugcagaagaucgagagaugguucgugagaaaccccuucuucgccgugaccgcccugaccaucgccuaccuggugggcagcaacaugacccagagaguggugaucgcccugcuggugcuggccgugggccccgccuacagcgcccacugcaucggcaucaccgacagagacuucaucgagggcgugcacggcggcaccugggugagcgccacccuggagcaggacaagugcgugaccgugauggcccccgacaagcccagccuggacaucagccuggagaccguggccaucgacagacccgccgaggugagaaaggugugcuacaacgccgugcugacccacgugaagaucaacgacaagugccccagcaccggcgaggcccaccuggccgaggagaacgagggcgacaacgccugcaagagaaccuacagcgacagaggcuggggcaacggcugcggccuguucggcaagggcagcaucguggccugcgccaaguucaccugcgccaagagcaugagccuguucgagguggaccagaccaagauccaguacgugaucagagcccagcugcacgugggcgccaagcaggagaacuggaacaccgacaucaagacccugaaguucgacgcccugagcggcagccaggagguggaguucaucggcuacggcaaggccacccuggagugccaggugcagaccgccguggacuucggcaacagcuacaucgccgagauggagaccgagagcuggaucguggacagacagugggcccaggaccugacccugcccuggcagagcggcagcggcggcguguggagagagaugcaccaccugguggaguucgagcccccccacgccgccaccaucagagugcuggcccugggcaaccaggagggcagccugaagaccgcccugaccggcgccaugagagugaccaaggacaccaacgacaacaaccuguacaagcugcacggcggccacgugagcugcagagugaagcugagcgcccugacccugaagggcaccagcuacaagaucugcaccgacaagauguucuucgugaagaaccccaccgacaccggccacggcaccguggugaugcaggugaaggugagcaagggcgcccccugcagaauccccgugaucguggccgacgaccugaccgccgccaucaacaagggcauccuggugaccgugaaccccaucgccagcaccaacgacgacgaggugcugaucgaggugaacccccccuucggcgacagcuacaucaucgugggcagaggcgacagcagacugaccuaccaguggcacaaggagggcagcagcaucggcaagcuguucacccagaccaugaagggcguggagagacuggccgugaugggcgacaccgccugggacuucagcagcgccggcggcuucuucaccagcgugggcaagggcauccacaccguguucggcagcgccuuccagggccuguucggcggccugaacuggaucaccaaggugaucaugggcgccgugcugaucugggugggcaucaacaccagaaacaugaccaugagcaugagcaugauccuggugggcgugaucaugauguuccugagccugggcgugggcgccgaccagggcugcgccaucaacuucggcaagugaggacuagucccuguucccagagcccacuuuuuuuucuuuuuuugaaauaaaauagccugucuuucagaucuaaaaaaaaaaaaaaaaaaaaaaaaaaaaaaaaaaaaaaaaaaaaaaaaaaaaaaaaaaaaaaaaugcaucccccccccccccccccccccccccccccccaaaggcucuuuucagagccaccagaauu

SEQ ID NO: 745 - RNA, 2320 nt, Artificial Sequence
  mRNA product Design c-5 comprising derived and/or modified sequence from YFV__NC_002031.1__SS-prME (polyprotein: M,aa104-778) (opt4)
gggagagcggcucggccauuuugucccagucaguccggaggcugcggcugcagaaguaccgccugcggaguaacugcaaagaagcuuaccauggacgugcugaccgugcaguuccugauccugggcaugcugcugaugaccggcggcgugacccuggugagaaagaacagauggcugcugcugaacgugaccagcgaggaccugggcaagaccuucagcgugggcaccggcaacugcaccaccaacauccuggaggccaaguacuggugccccgacagcauggaguacaacugccccaaccugagccccagagaggagcccgacgacaucgacugcuggugcuacggcguggagaacgugagaguggccuacggcaagugcgacagcgccggcagaagcagaagaagcagaagagccaucgaccugcccacccacgagaaccacggccugaagaccagacaggagaaguggaugaccggcagaaugggcgagagacagcugcagaagaucgagagaugguucgugagaaaccccuucuucgccgugaccgcccugaccaucgccuaccuggugggcagcaacaugacccagagaguggugaucgcccugcuggugcuggccgugggccccgccuacagcgcccacugcaucggcaucaccgacagagacuucaucgagggcgugcacggcggcaccugggugagcgccacccuggagcaggacaagugcgugaccgugauggcccccgacaagcccagccuggacaucagccuggagaccguggccaucgacagacccgccgaggugagaaaggugugcuacaacgccgugcugacccacgugaagaucaacgacaagugccccagcaccggcgaggcccaccuggccgaggagaacgagggcgacaacgccugcaagagaaccuacagcgacagaggcuggggcaacggcugcggccuguucggcaagggcagcaucguggccugcgccaaguucaccugcgccaagagcaugagccuguucgagguggaccagaccaagauccaguacgugaucagagcccagcugcacgugggcgccaagcaggagaacuggaacaccgacaucaagacccugaaguucgacgcccugagcggcagccaggagguggaguucaucggcuacggcaaggccacccuggagugccaggugcagaccgccguggacuucggcaacagcuacaucgccgagauggagaccgagagcuggaucguggacagacagugggcccaggaccugacccugcccuggcagagcggcagcggcggcguguggagagagaugcaccaccugguggaguucgagcccccccacgccgccaccaucagagugcuggcccugggcaaccaggagggcagccugaagaccgcccugaccggcgccaugagagugaccaaggacaccaacgacaacaaccuguacaagcugcacggcggccacgugagcugcagagugaagcugagcgcccugacccugaagggcaccagcuacaagaucugcaccgacaagauguucuucgugaagaaccccaccgacaccggccacggcaccguggugaugcaggugaaggugagcaagggcgcccccugcagaauccccgugaucguggccgacgaccugaccgccgccaucaacaagggcauccuggugaccgugaaccccaucgccagcaccaacgacgacgaggugcugaucgaggugaacccccccuucggcgacagcuacaucaucgugggcagaggcgacagcagacugaccuaccaguggcacaaggagggcagcagcaucggcaagcuguucacccagaccaugaagggcguggagagacuggccgugaugggcgacaccgccugggacuucagcagcgccggcggcuucuucaccagcgugggcaagggcauccacaccguguucggcagcgccuuccagggccuguucggcggccugaacuggaucaccaaggugaucaugggcgccgugcugaucugggugggcaucaacaccagaaacaugaccaugagcaugagcaugauccuggugggcgugaucaugauguuccugagccugggcgugggcgccugaggacuagucccuguucccagagcccacuuuuuuuucuuuuuuugaaauaaaauagccugucuuucagaucuaaaaaaaaaaaaaaaaaaaaaaaaaaaaaaaaaaaaaaaaaaaaaaaaaaaaaaaaaaaaaaaaugcaucccccccccccccccccccccccccccccccaaaggcucuuuucagagccaccagaauu

SEQ ID NO: 746 - RNA, 2347 nt, Artificial Sequence
  mRNA product Design c-5 comprising derived and/or modified sequence from YFV__NC_002031.1__SSIgE-prME-XX (polyprotein: aa122-788) (opt4)
gggagagcggcucggccauuuugucccagucaguccggaggcugcggcugcagaaguaccgccugcggaguaacugcaaagaagcuuaccauggacuggaccuggauccuguuccugguggccgccgccaccagagugcacagcgugacccuggugagaaagaacagauggcugcugcugaacgugaccagcgaggaccugggcaagaccuucagcgugggcaccggcaacugcaccaccaacauccuggaggccaaguacuggugccccgacagcauggaguacaacugccccaaccugagccccagagaggagcccgacgacaucgacugcuggugcuacggcguggagaacgugagaguggccuacggcaagugcgacagcgccggcagaagcagaagaagcagaagagccaucgaccugcccacccacgagaaccacggccugaagaccagacaggagaaguggaugaccggcagaaugggcgagagacagcugcagaagaucgagagaugguucgugagaaaccccuucuucgccgugaccgcccugaccaucgccuaccuggugggcagcaacaugacccagagaguggugaucgcccugcuggugcuggccgugggccccgccuacagcgcccacugcaucggcaucaccgacagagacuucaucgagggcgugcacggcggcaccugggugagcgccacccuggagcaggacaagugcgugaccgugauggcccccgacaagcccagccuggacaucagccuggagaccguggccaucgacagacccgccgaggugagaaaggugugcuacaacgccgugcugacccacgugaagaucaacgacaagugccccagcaccggcgaggcccaccuggccgaggagaacgagggcgacaacgccugcaagagaaccuacagcgacagaggcuggggcaacggcugcggccuguucggcaagggcagcaucguggccugcgccaaguucaccugcgccaagagcaugagccuguucgagguggaccagaccaagauccaguacgugaucagagcccagcugcacgugggcgccaagcaggagaacuggaacaccgacaucaagacccugaaguucgacgcccugagcggcagccaggagguggaguucaucggcuacggcaaggccacccuggagugccaggugcagaccgccguggacuucggcaacagcuacaucgccgagauggagaccgagagcuggaucguggacagacagugggcccaggaccugacccugcccuggcagagcggcagcggcggcguguggagagagaugcaccaccugguggaguucgagcccccccacgccgccaccaucagagugcuggcccugggcaaccaggagggcagccugaagaccgcccugaccggcgccaugagagugaccaaggacaccaacgacaacaaccuguacaagcugcacggcggccacgugagcugcagagugaagcugagcgcccugacccugaagggcaccagcuacaagaucugcaccgacaagauguucuucgugaagaaccccaccgacaccggccacggcaccguggugaugcaggugaaggugagcaagggcgcccccugcagaauccccgugaucguggccgacgaccugaccgccgccaucaacaagggcauccuggugaccgugaaccccaucgccagcaccaacgacgacgaggugcugaucgaggugaacccccccuucggcgacagcuacaucaucgugggcagaggcgacagcagacugaccuaccaguggcacaaggagggcagcagcaucggcaagcuguucacccagaccaugaagggcguggagagacuggccgugaugggcgacaccgccugggacuucagcagcgccggcggcuucuucaccagcgugggcaagggcauccacaccguguucggcagcgccuuccagggccuguucggcggccugaacuggaucaccaaggugaucaugggcgccgugcugaucugggugggcaucaacaccagaaacaugaccaugagcaugagcaugauccuggugggcgugaucaugauguuccugagccugggcgugggcgccgaccagggcugcgccaucaacuucggcaagugaggacuagucccuguucccagagcccacuuuuuuuucuuuuuuugaaauaaaauagccugucuuucagaucuaaaaaaaaaaaaaaaaaaaaaaaaaaaaaaaaaaaaaaaaaaaaaaaaaaaaaaaaaaaaaaaaugcaucccccccccccccccccccccccccccccccaaaggcucuuuucagagccaccagaauu

SEQ ID NO: 747 - RNA, 2317 nt, Artificial Sequence
  mRNA product Design c-5 comprising derived and/or modified sequence from YFV__NC_002031.1__SSIgE-prME (polyprotein: aa122-778) (opt4)
gggagagcggcucggccauuuugucccagucaguccggaggcugcggcugcagaaguaccgccugcggaguaacugcaaagaagcuuaccauggacuggaccuggauccuguuccugguggccgccgccaccagagugcacagcgugacccuggugagaaagaacagauggcugcugcugaacgugaccagcgaggaccugggcaagaccuucagcgugggcaccggcaacugcaccaccaacauccuggaggccaaguacuggugccccgacagcauggaguacaacugccccaaccugagccccagagaggagcccgacgacaucgacugcuggugcuacggcguggagaacgugagaguggccuacggcaagugcgacagcgccggcagaagcagaagaagcagaagagccaucgaccugcccacccacgagaaccacggccugaagaccagacaggagaaguggaugaccggcagaaugggcgagagacagcugcagaagaucgagagaugguucgugagaaaccccuucuucgccgugaccgcccugaccaucgccuaccuggugggcagcaacaugacccagagaguggugaucgcccugcuggugcuggccgugggccccgccuacagcgcccacugcaucggcaucaccgacagagacuucaucgagggcgugcacggcggcaccugggugagcgccacccuggagcaggacaagugcgugaccgugauggcccccgacaagcccagccuggacaucagccuggagaccguggccaucgacagacccgccgaggugagaaaggugugcuacaacgccgugcugacccacgugaagaucaacgacaagugccccagcaccggcgaggcccaccuggccgaggagaacgagggcgacaacgccugcaagagaaccuacagcgacagaggcuggggcaacggcugcggccuguucggcaagggcagcaucguggccugcgccaaguucaccugcgccaagagcaugagccuguucgagguggaccagaccaagauccaguacgugaucagagcccagcugcacgugggcgccaagcaggagaacuggaacaccgacaucaagacccugaaguucgacgcccugagcggcagccaggagguggaguucaucggcuacggcaaggccacccuggagugccaggugcagaccgccguggacuucggcaacagcuacaucgccgagauggagaccgagagcuggaucguggacagacagugggcccaggaccugacccugcccuggcagagcggcagcggcggcguguggagagagaugcaccaccugguggaguucgagcccccccacgccgccaccaucagagugcuggcccugggcaaccaggagggcagccugaagaccgcccugaccggcgccaugagagugaccaaggacaccaacgacaacaaccuguacaagcugcacggcggccacgugagcugcagagugaagcugagcgcccugacccugaagggcaccagcuacaagaucugcaccgacaagauguucuucgugaagaaccccaccgacaccggccacggcaccguggugaugcaggugaaggugagcaagggcgcccccugcagaauccccgugaucguggccgacgaccugaccgccgccaucaacaagggcauccuggugaccgugaaccccaucgccagcaccaacgacgacgaggugcugaucgaggugaacccccccuucggcgacagcuacaucaucgugggcagaggcgacagcagacugaccuaccaguggcacaaggagggcagcagcaucggcaagcuguucacccagaccaugaagggcguggagagacuggccgugaugggcgacaccgccugggacuucagcagcgccggcggcuucuucaccagcgugggcaagggcauccacaccguguucggcagcgccuuccagggccuguucggcggccugaacuggaucaccaaggugaucaugggcgccgugcugaucugggugggcaucaacaccagaaacaugaccaugagcaugagcaugauccuggugggcgugaucaugauguuccugagccugggcgugggcgccugaggacuagucccuguucccagagcccacuuuuuuuucuuuuuuugaaauaaaauagccugucuuucagaucuaaaaaaaaaaaaaaaaaaaaaaaaaaaaaaaaaaaaaaaaaaaaaaaaaaaaaaaaaaaaaaaaugcaucccccccccccccccccccccccccccccccaaaggcucuuuucagagccaccagaauu

SEQ ID NO: 748 - RNA, 2365 nt, Artificial Sequence
  mRNA product Design c-5 comprising derived and/or modified sequence from YFV__NC_002031.1__SSjev-prME-XX (polyprotein: aa122-788) (opt4)
gggagagcggcucggccauuuugucccagucaguccggaggcugcggcugcagaaguaccgccugcggaguaacugcaaagaagcuuaccaugggcaagagaagcgccggcagcaucauguggcuggccagccuggccguggugaucgccugcgccggcgccgugacccuggugagaaagaacagauggcugcugcugaacgugaccagcgaggaccugggcaagaccuucagcgugggcaccggcaacugcaccaccaacauccuggaggccaaguacuggugccccgacagcauggaguacaacugccccaaccugagccccagagaggagcccgacgacaucgacugcuggugcuacggcguggagaacgugagaguggccuacggcaagugcgacagcgccggcagaagcagaagaagcagaagagccaucgaccugcccacccacgagaaccacggccugaagaccagacaggagaaguggaugaccggcagaaugggcgagagacagcugcagaagaucgagagaugguucgugagaaaccccuucuucgccgugaccgcccugaccaucgccuaccuggugggcagcaacaugacccagagaguggugaucgcccugcuggugcuggccgugggccccgccuacagcgcccacugcaucggcaucaccgacagagacuucaucgagggcgugcacggcggcaccugggugagcgccacccuggagcaggacaagugcgugaccgugauggcccccgacaagcccagccuggacaucagccuggagaccguggccaucgacagacccgccgaggugagaaaggugugcuacaacgccgugcugacccacgugaagaucaacgacaagugccccagcaccggcgaggcccaccuggccgaggagaacgagggcgacaacgccugcaagagaaccuacagcgacagaggcuggggcaacggcugcggccuguucggcaagggcagcaucguggccugcgccaaguucaccugcgccaagagcaugagccuguucgagguggaccagaccaagauccaguacgugaucagagcccagcugcacgugggcgccaagcaggagaacuggaacaccgacaucaagacccugaaguucgacgcccugagcggcagccaggagguggaguucaucggcuacggcaaggccacccuggagugccaggugcagaccgccguggacuucggcaacagcuacaucgccgagauggagaccgagagcuggaucguggacagacagugggcccaggaccugacccugcccuggcagagcggcagcggcggcguguggagagagaugcaccaccugguggaguucgagcccccccacgccgccaccaucagagugcuggcccugggcaaccaggagggcagccugaagaccgcccugaccggcgccaugagagugaccaaggacaccaacgacaacaaccuguacaagcugcacggcggccacgugagcugcagagugaagcugagcgcccugacccugaagggcaccagcuacaagaucugcaccgacaagauguucuucgugaagaaccccaccgacaccggccacggcaccguggugaugcaggugaaggugagcaagggcgcccccugcagaauccccgugaucguggccgacgaccugaccgccgccaucaacaagggcauccuggugaccgugaaccccaucgccagcaccaacgacgacgaggugcugaucgaggugaacccccccuucggcgacagcuacaucaucgugggcagaggcgacagcagacugaccuaccaguggcacaaggagggcagcagcaucggcaagcuguucacccagaccaugaagggcguggagagacuggccgugaugggcgacaccgccugggacuucagcagcgccggcggcuucuucaccagcgugggcaagggcauccacaccguguucggcagcgccuuccagggccuguucggcggccugaacuggaucaccaaggugaucaugggcgccgugcugaucugggugggcaucaacaccagaaacaugaccaugagcaugagcaugauccuggugggcgugaucaugauguuccugagccugggcgugggcgccgaccagggcugcgccaucaacuucggcaagugaggacuagucccuguucccagagcccacuuuuuuuucuuuuuuugaaauaaaauagccugucuuucagaucuaaaaaaaaaaaaaaaaaaaaaaaaaaaaaaaaaaaaaaaaaaaaaaaaaaaaaaaaaaaaaaaaugcaucccccccccccccccccccccccccccccccaaaggcucuuuucagagccaccagaauu

SEQ ID NO: 749 - RNA, 2335 nt, Artificial Sequence
  mRNA product Design c-5 comprising derived and/or modified sequence from YFV__NC_002031.1__SSjev-prME (polyprotein: aa122-778) (opt4)
gggagagcggcucggccauuuugucccagucaguccggaggcugcggcugcagaaguaccgccugcggaguaacugcaaagaagcuuaccaugggcaagagaagcgccggcagcaucauguggcuggccagccuggccguggugaucgccugcgccggcgccgugacccuggugagaaagaacagauggcugcugcugaacgugaccagcgaggaccugggcaagaccuucagcgugggcaccggcaacugcaccaccaacauccuggaggccaaguacuggugccccgacagcauggaguacaacugccccaaccugagccccagagaggagcccgacgacaucgacugcuggugcuacggcguggagaacgugagaguggccuacggcaagugcgacagcgccggcagaagcagaagaagcagaagagccaucgaccugcccacccacgagaaccacggccugaagaccagacaggagaaguggaugaccggcagaaugggcgagagacagcugcagaagaucgagagaugguucgugagaaaccccuucuucgccgugaccgcccugaccaucgccuaccuggugggcagcaacaugacccagagaguggugaucgcccugcuggugcuggccgugggccccgccuacagcgcccacugcaucggcaucaccgacagagacuucaucgagggcgugcacggcggcaccugggugagcgccacccuggagcaggacaagugcgugaccgugauggcccccgacaagcccagccuggacaucagccuggagaccguggccaucgacagacccgccgaggugagaaaggugugcuacaacgccgugcugacccacgugaagaucaacgacaagugccccagcaccggcgaggcccaccuggccgaggagaacgagggcgacaacgccugcaagagaaccuacagcgacagaggcuggggcaacggcugcggccuguucggcaagggcagcaucguggccugcgccaaguucaccugcgccaagagcaugagccuguucgagguggaccagaccaagauccaguacgugaucagagcccagcugcacgugggcgccaagcaggagaacuggaacaccgacaucaagacccugaaguucgacgcccugagcggcagccaggagguggaguucaucggcuacggcaaggccacccuggagugccaggugcagaccgccguggacuucggcaacagcuacaucgccgagauggagaccgagagcuggaucguggacagacagugggcccaggaccugacccugcccuggcagagcggcagcggcggcguguggagagagaugcaccaccugguggaguucgagcccccccacgccgccaccaucagagugcuggcccugggcaaccaggagggcagccugaagaccgcccugaccggcgccaugagagugaccaaggacaccaacgacaacaaccuguacaagcugcacggcggccacgugagcugcagagugaagcugagcgcccugacccugaagggcaccagcuacaagaucugcaccgacaagauguucuucgugaagaaccccaccgacaccggccacggcaccguggugaugcaggugaaggugagcaagggcgcccccugcagaauccccgugaucguggccgacgaccugaccgccgccaucaacaagggcauccuggugaccgugaaccccaucgccagcaccaacgacgacgaggugcugaucgaggugaacccccccuucggcgacagcuacaucaucgugggcagaggcgacagcagacugaccuaccaguggcacaaggagggcagcagcaucggcaagcuguucacccagaccaugaagggcguggagagacuggccgugaugggcgacaccgccugggacuucagcagcgccggcggcuucuucaccagcgugggcaagggcauccacaccguguucggcagcgccuuccagggccuguucggcggccugaacuggaucaccaaggugaucaugggcgccgugcugaucugggugggcaucaacaccagaaacaugaccaugagcaugagcaugauccuggugggcgugaucaugauguuccugagccugggcgugggcgccugaggacuagucccuguucccagagcccacuuuuuuuucuuuuuuugaaauaaaauagccugucuuucagaucuaaaaaaaaaaaaaaaaaaaaaaaaaaaaaaaaaaaaaaaaaaaaaaaaaaaaaaaaaaaaaaaaugcaucccccccccccccccccccccccccccccccaaaggcucuuuucagagccaccagaauu

SEQ ID NO: 750 - RNA, 2383 nt, Artificial Sequence
  mRNA product Design c-5 comprising derived and/or modified sequence from YFV__NC_002031.1__X-SS-prME-XX (polyprotein: aa92-788) (opt5)
gggagagcggcucggccauuuugucccagucaguccggaggcugcggcugcagaaguaccgccugcggaguaacugcaaagaagcuuaccaugagaggccugagcucccggaagcgcagaucucacgacgugcucaccguccaguuccugauccuugggaugcugcucaugacaggaggcguuacgcuggugcggaaaaaccgcuggcuucugcucaaugugaccagcgaggaucuggggaagacauuuuccgucggaaccggcaacugcacaaccaauauucuggaagccaaauacuggugucccgacucuauggaguauaacugcccuaaucucagcccgagagaagaacccgaugacaucgauuguuggugcuacgggguggaaaacguucggguggcuuauggaaagugugacuccgccggccgcucuagacggagccgcagagcgauugaucugccuacacaugagaaucacggccuuaaaacccggcaagagaaguggaugacggggcgcaugggagaaagacagcugcagaagaucgagcggugguucguccgcaaccccuuuuucgcugugaccgcccucacaauugccuaccugguuggcuccaauaugacccagagaguggucaucgcccuucuggugcucgcuguggggccugcuuauagcgcccauugcaucggaauuacagaccgggauuuuaucgaaggcguccacgggggaaccuggguuucugcgacgcuggagcaagacaaaugugugacagugauggcccccgauaagccuucccuggacauuagccucgagaccgucgcuaucgauagaccggccgaagugcgcaaaguuugcuacaacgcugugcugacacaugucaagauuaaugacaaaugucccucuaccggcgaggcccaccuugcggaagagaacgaaggcgacaaugccugcaagcggaccuauuccgauagaggguggggaaacggcugugggcuguucggaaagggcagcaucguggcuugcgccaaauuuacaugcgcuaagucuaugucccucuucgagguugaccagacgaaaauucaguacgugauccgcgcccagcugcacgucggggccaagcaagagaauuggaacaccgauaucaaaacacuuaaguuugacgcucugagcggaucccaggaaguggaguucauuggcuacggcaaagcgacccucgaaugucagguccagacagccguggauuuugggaacucuuauaucgcugagauggaaaccgagagcuggauuguugaccggcaaugggcccaggaucugacgcugccuuggcaguccggaagcggcgggguguggagagagaugcaucaccucgucgaguucgagcccccucaugccgcuacaauccgcgugcuggcccuuggaaaucaagaaggcucucugaagaccgcgcucaccggggcuaugcggguuacaaaggacaccaacgauaauaaccuguacaaacuucacggcggacacguguccugcagagucaagcugagcgcccucacacugaaaggcacgucuuauaagauuuguaccgacaaaauguuuuucgugaagaaucccacagauaccgggcauggaacagugguuaugcaggucaaggugagcaaaggcgccccgugccgcaucccugugaucgucgcugacgaccugaccgccgcuauuaacaaggggauccucgugacgguuaaucccauugccuccaccaacgaugacgaggugcugaucgaagucaauccucccuucggagauucuuacauuaucgugggccggggagacagcagacuuacauaucaguggcacaaagagggcuccagcaucggaaagcuguuuacccagacaaugaaaggcguugagcgccucgcggugaugggggauaccgccugggacuucucuuccgcuggaggcuuuuucacgagcgucgggaaggggauucauacaguguuuggcucugccuuccaagggcuguuuggcggacugaacuggaucaccaagguuauuaugggcgcugugcuuaucugggucgggauuaauacacggaacaugaccauguccaugagcaugauccucgugggagugauuaugauguuccugucccugggcgucggggccgaucagggaugugcgaucaauuuuggcaaaugaggacuagucccuguucccagagcccacuuuuuuuucuuuuuuugaaauaaaauagccugucuuucagaucuaaaaaaaaaaaaaaaaaaaaaaaaaaaaaaaaaaaaaaaaaaaaaaaaaaaaaaaaaaaaaaaaugcaucccccccccccccccccccccccccccccccaaaggcucuuuucagagccaccagaauu

SEQ ID NO: 751 - RNA, 2320 nt, Artificial Sequence
  mRNA product Design c-5 comprising derived and/or modified sequence from YFV__NC_002031.1__SS-prME (polyprotein: M,aa104-778) (opt5)
gggagagcggcucggccauuuugucccagucaguccggaggcugcggcugcagaaguaccgccugcggaguaacugcaaagaagcuuaccauggacgugcugaccguccaguuccucauccugggcaugcuucugaugacagggggaguuacgcucgugagaaagaaccgguggcugcuucugaaugugaccagcgaggaucucggcaaaacauuuuccgucgggaccggaaacugcacaaccaauauucuggaagccaaguacuggugucccgacucuauggaguauaacugcccuaaucugagcccgcgcgaagaacccgaugacaucgauuguuggugcuacggcguggaaaacguuagaguggcuuaugggaaaugugacuccgccggacggucucgcagaagccggcgcgcgauugaucucccuacacacgagaaucauggccugaagaccagacaagagaaauggaugacgggccggaugggggaacgccagcuucagaagaucgagagaugguucguccggaaccccuuuuucgcugugaccgcccugacaauugccuaccucguuggauccaauaugacccagcgcguggucaucgcucugcuugugcuggccgugggcccugcuuauucugcccacugcaucgggauuacagacagagauuuuaucgaaggaguccauggcgggaccuggguuagcgcgacgcucgagcaagacaagugugugacagugauggcccccgauaaaccuucccuggacauuagccuggagaccgucgcuaucgaucggccggccgaagugcgcaagguuugcuacaacgcugugcucacacacgucaaaauuaaugacaagugucccucuaccggagaggcccaucuggcggaagagaacgaaggcgacaaugccugcaaaagaaccuauuccgaucggggcugggggaacggauguggccuuuucgggaagggaagcaucguggcuugcgccaaguuuacaugcgcuaaaucuaugucccuguucgagguugaccagacgaagauucaguacgugaucagagcccagcuccacgucggcgccaaacaagagaauuggaacaccgauaucaagacacugaaauuugacgcucuuagcgggucucaggaaguggaguucauuggauacggcaaggcgacccuggaaugucagguccagacagccguggauuuuggcaacuccuauaucgcugagauggaaaccgagagcuggauuguugaccgccaaugggcccaggaucucacgcugccuuggcaguccgggucuggaggcguguggcgggagaugcaccaucuggucgaguucgagcccccucacgccgcuacaaucagagugcucgcccuggggaaucaagaaggaagccuuaaaaccgcgcugaccggcgcuaugcgcguuacaaaggacaccaacgauaauaaccucuacaagcugcaugggggccacguguccugccgggucaaacuuagcgcccugacacucaagggaacgucuuauaaaauuuguaccgacaagauguuuuucgugaaaaaucccacagauaccggccacgggacagugguuaugcaggucaagguguccaagggagccccgugcagaaucccugugaucgucgcugacgaccugaccgccgcuauuaacaaaggcauccuggugacgguuaaucccauugccagcaccaacgaugacgaggugcucaucgaagucaauccucccuucggggauucuuacauuaucgugggacgcggcgacagccggcugacauaucaguggcauaaggagggguccucuaucggcaaacuuuuuacccagacaaugaagggaguugagagacuggcggugaugggcgauaccgccugggacuucagcuccgcugggggauuuuucacgagcgucggcaaagggauucacacaguguuuggaucugccuuccaaggccucuuugggggccugaacuggaucaccaagguuauuaugggagcugugcugaucugggucggcauuaauacacgcaacaugaccauguccaugagcaugauccuugugggggugauuaugauguuccucucucugggagucggcgccugaggacuagucccuguucccagagcccacuuuuuuuucuuuuuuugaaauaaaauagccugucuuucagaucuaaaaaaaaaaaaaaaaaaaaaaaaaaaaaaaaaaaaaaaaaaaaaaaaaaaaaaaaaaaaaaaaugcaucccccccccccccccccccccccccccccccaaaggcucuuuucagagccaccagaauu

SEQ ID NO: 752 - RNA, 2347 nt, Artificial Sequence
  mRNA product Design c-5 comprising derived and/or modified sequence from YFV__NC_002031.1__SSIgE-prME-XX (polyprotein: aa122-788) (opt5)
gggagagcggcucggccauuuugucccagucaguccggaggcugcggcugcagaaguaccgccugcggaguaacugcaaagaagcuuaccauggacuggaccuggauccuguuccucguggccgcugccacaagaguccacagcguuacgcuggugcggaaaaaccgcuggcuucugcucaaugugaccagcgaggaucuggggaagacauuuuccgucggaaccggcaacugcacaaccaauauucuggaagccaaauacuggugucccgacucuauggaguauaacugcccuaaucucagcccgagagaagaacccgaugacaucgauuguuggugcuacgggguggaaaacguucggguggcuuauggaaagugugacuccgccggccgcucuagacggagccgcagagcgauugaucugccuacacaugagaaucacggccuuaaaacccggcaagagaaguggaugacggggcgcaugggagaaagacagcugcagaagaucgagcggugguucguccgcaaccccuuuuucgcugugaccgcccucacaauugccuaccugguuggcuccaauaugacccagagaguggucaucgcccuucuggugcucgcuguggggccugcuuauagcgcccauugcaucggaauuacagaccgggauuuuaucgaaggcguccacgggggaaccuggguuucugcgacgcuggagcaagacaaaugugugacagugauggcccccgauaagccuucccuggacauuagccucgagaccgucgcuaucgauagaccggccgaagugcgcaaaguuugcuacaacgcugugcugacacaugucaagauuaaugacaaaugucccucuaccggcgaggcccaccuugcggaagagaacgaaggcgacaaugccugcaagcggaccuauuccgauagaggguggggaaacggcugugggcuguucggaaagggcagcaucguggcuugcgccaaauuuacaugcgcuaagucuaugucccucuucgagguugaccagacgaaaauucaguacgugauccgcgcccagcugcacgucggggccaagcaagagaauuggaacaccgauaucaaaacacuuaaguuugacgcucugagcggaucccaggaaguggaguucauuggcuacggcaaagcgacccucgaaugucagguccagacagccguggauuuugggaacucuuauaucgcugagauggaaaccgagagcuggauuguugaccggcaaugggcccaggaucugacgcugccuuggcaguccggaagcggcgggguguggagagagaugcaucaccucgucgaguucgagcccccucaugccgcuacaauccgcgugcuggcccuuggaaaucaagaaggcucucugaagaccgcgcucaccggggcuaugcggguuacaaaggacaccaacgauaauaaccuguacaaacuucacggcggacacguguccugcagagucaagcugagcgcccucacacugaaaggcacgucuuauaagauuuguaccgacaaaauguuuuucgugaagaaucccacagauaccgggcauggaacagugguuaugcaggucaaggugagcaaaggcgccccgugccgcaucccugugaucgucgcugacgaccugaccgccgcuauuaacaaggggauccucgugacgguuaaucccauugccuccaccaacgaugacgaggugcugaucgaagucaauccucccuucggagauucuuacauuaucgugggccggggagacagcagacuuacauaucaguggcacaaagagggcuccagcaucggaaagcuguuuacccagacaaugaaaggcguugagcgccucgcggugaugggggauaccgccugggacuucucuuccgcuggaggcuuuuucacgagcgucgggaaggggauucauacaguguuuggcucugccuuccaagggcuguuuggcggacugaacuggaucaccaagguuauuaugggcgcugugcuuaucugggucgggauuaauacacggaacaugaccauguccaugagcaugauccucgugggagugauuaugauguuccugucccugggcgucggggccgaucagggaugugcgaucaauuuuggcaaaugaggacuagucccuguucccagagcccacuuuuuuuucuuuuuuugaaauaaaauagccugucuuucagaucuaaaaaaaaaaaaaaaaaaaaaaaaaaaaaaaaaaaaaaaaaaaaaaaaaaaaaaaaaaaaaaaaugcaucccccccccccccccccccccccccccccccaaaggcucuuuucagagccaccagaauu

SEQ ID NO: 753 - RNA, 2317 nt, Artificial Sequence
  mRNA product Design c-5 comprising derived and/or modified sequence from YFV__NC_002031.1__SSIgE-prME (polyprotein: aa122-778) (opt5)
gggagagcggcucggccauuuugucccagucaguccggaggcugcggcugcagaaguaccgccugcggaguaacugcaaagaagcuuaccauggacuggaccuggauccuguuccucguggccgcugccacaagaguccacagcgugacccuggucagaaagaaccgguggcuccugcuuaauguuacaagcgaggaccugggcaaaacguucuccguggggaccggaaacugcacaaccaauauccucgaagccaaguacuggugucccgauucuauggaguauaacugcccuaaucugagcccgcgcgaggaacccgacgauauugacuguuggugcuacggcguggaaaacgucagaguggcuuaugggaaaugugauuccgccggacggucucgcagaagccggcgcgcgaucgaccuuccuacacacgagaaucauggccugaagaccagacaggagaaauggaugacagggcggaugggagaacgccaacuccagaagauugagagaugguuuguucggaaccccuucuuugcugugaccgcccugacgaucgccuaccuggucggcuccaauaugacccagcgcgugguuauugcucuccuggugcuugccgucggcccugcuuauucugcccacugcaucgggaucacagauagagacuucauugaaggagugcauggcgggaccugggugagcgcgacacuggagcaggauaagugugucaccguuauggcccccgacaaaccuucccucgauaucagccuggagacgguggcuauugaccggccggccgaagugcgcaaggucugcuacaacgcugugcuuacacacguuaaaaucaaugauaagugucccucuaccggagaggcccaucuggcggaagagaacgaaggcgacaaugccugcaaaagaacauauuccgaccggggguggggaaacggcuguggccucuuugggaagggaagcauuguggcuugcgccaaguuuaccugcgcuaaaucuaugucccuguucgaggucgaucaaaccaagauccaguacgugauuagagcccagcugcacguuggcgccaaacaggagaauuggaacacagacaucaagacgcucaaauucgaugcucugagcgggucucaagaaguggaguuuaucggauacggcaaggcgacccuugaaugucagguccagacagccguggacuucgggaacuccuauauugcugagauggaaaccgagagcuggaucgucgaucgccagugggcccaagaccugacacucccuuggcaguccggaucuggcggcguguggcgggagaugcaccaucugguugaauuugagcccccucacgccgcuaccauuagagugcuugcccuggggaaucaggaaggaagccucaaaacggcgcugacaggcgcuaugcgcgucaccaaggauaccaacgacaauaaccuguacaagcuccaugggggacacguguccugccggguuaaacugagcgcccuuacacugaagggcaccucuuauaaaaucuguacagauaagauguucuuugugaaaaaucccacggacaccgggcacggcacagucgugaugcaagugaagguuuccaagggagccccgugccgcauuccugucaucguggcugaugaccucaccgccgcuaucaacaaaggcauucuggugacagucaaucccaucgccagcaccaacgacgaugaggugcuuauugaaguuaauccucccuucggggacucuuacaucauugugggaagaggcgauagccggcugacguaucaguggcauaaggagggguccucuaucggaaaacucuucacccagacaaugaagggcgucgagagacuggcggugaugggggacaccgccugggauuuuagcuccgcuggcggauucuuuacaagcguuggcaaagggauccacaccguguucggaucugccuuucagggccuguucgggggacucaacuggauuacgaaggucaucaugggcgcugugcugauuuggguugggaucaauacacgcaacaugaccauguccaugagcaugauucuugugggcgucaucaugauguuucugucucucggagugggcgccugaggacuagucccuguucccagagcccacuuuuuuuucuuuuuuugaaauaaaauagccugucuuucagaucuaaaaaaaaaaaaaaaaaaaaaaaaaaaaaaaaaaaaaaaaaaaaaaaaaaaaaaaaaaaaaaaaugcaucccccccccccccccccccccccccccccccaaaggcucuuuucagagccaccagaauu

SEQ ID NO: 754 - RNA, 2365 nt, Artificial Sequence
  mRNA product Design c-5 comprising derived and/or modified sequence from YFV__NC_002031.1__SSjev-prME-XX (polyprotein: aa122-788) (opt5)
gggagagcggcucggccauuuugucccagucaguccggaggcugcggcugcagaaguaccgccugcggaguaacugcaaagaagcuuaccaugggcaagagaagcgccggguccaucauguggcuggcuucucucgccguggucauugcgugcgcuggagccguuacgcuggugcggaaaaaccgcuggcuucugcucaaugugaccagcgaggaucuggggaagacauuuuccgucggaaccggcaacugcacaaccaauauucuggaagccaaauacuggugucccgacucuauggaguauaacugcccuaaucucagcccgagagaagaacccgaugacaucgauuguuggugcuacgggguggaaaacguucggguggcuuauggaaagugugacuccgccggccgcucuagacggagccgcagagcgauugaucugccuacacaugagaaucacggccuuaaaacccggcaagagaaguggaugacggggcgcaugggagaaagacagcugcagaagaucgagcggugguucguccgcaaccccuuuuucgcugugaccgcccucacaauugccuaccugguuggcuccaauaugacccagagaguggucaucgcccuucuggugcucgcuguggggccugcuuauagcgcccauugcaucggaauuacagaccgggauuuuaucgaaggcguccacgggggaaccuggguuucugcgacgcuggagcaagacaaaugugugacagugauggcccccgauaagccuucccuggacauuagccucgagaccgucgcuaucgauagaccggccgaagugcgcaaaguuugcuacaacgcugugcugacacaugucaagauuaaugacaaaugucccucuaccggcgaggcccaccuugcggaagagaacgaaggcgacaaugccugcaagcggaccuauuccgauagaggguggggaaacggcugugggcuguucggaaagggcagcaucguggcuugcgccaaauuuacaugcgcuaagucuaugucccucuucgagguugaccagacgaaaauucaguacgugauccgcgcccagcugcacgucggggccaagcaagagaauuggaacaccgauaucaaaacacuuaaguuugacgcucugagcggaucccaggaaguggaguucauuggcuacggcaaagcgacccucgaaugucagguccagacagccguggauuuugggaacucuuauaucgcugagauggaaaccgagagcuggauuguugaccggcaaugggcccaggaucugacgcugccuuggcaguccggaagcggcgggguguggagagagaugcaucaccucgucgaguucgagcccccucaugccgcuacaauccgcgugcuggcccuuggaaaucaagaaggcucucugaagaccgcgcucaccggggcuaugcggguuacaaaggacaccaacgauaauaaccuguacaaacuucacggcggacacguguccugcagagucaagcugagcgcccucacacugaaaggcacgucuuauaagauuuguaccgacaaaauguuuuucgugaagaaucccacagauaccgggcauggaacagugguuaugcaggucaaggugagcaaaggcgccccgugccgcaucccugugaucgucgcugacgaccugaccgccgcuauuaacaaggggauccucgugacgguuaaucccauugccuccaccaacgaugacgaggugcugaucgaagucaauccucccuucggagauucuuacauuaucgugggccggggagacagcagacuuacauaucaguggcacaaagagggcuccagcaucggaaagcuguuuacccagacaaugaaaggcguugagcgccucgcggugaugggggauaccgccugggacuucucuuccgcuggaggcuuuuucacgagcgucgggaaggggauucauacaguguuuggcucugccuuccaagggcuguuuggcggacugaacuggaucaccaagguuauuaugggcgcugugcuuaucugggucgggauuaauacacggaacaugaccauguccaugagcaugauccucgugggagugauuaugauguuccugucccugggcgucggggccgaucagggaugugcgaucaauuuuggcaaaugaggacuagucccuguucccagagcccacuuuuuuuucuuuuuuugaaauaaaauagccugucuuucagaucuaaaaaaaaaaaaaaaaaaaaaaaaaaaaaaaaaaaaaaaaaaaaaaaaaaaaaaaaaaaaaaaaugcaucccccccccccccccccccccccccccccccaaaggcucuuuucagagccaccagaauu

SEQ ID NO: 755 - RNA, 2335 nt, Artificial Sequence
  mRNA product Design c-5 comprising derived and/or modified sequence from YFV__NC_002031.1__SSjev-prME (polyprotein: aa122-778) (opt5)
gggagagcggcucggccauuuugucccagucaguccggaggcugcggcugcagaaguaccgccugcggaguaacugcaaagaagcuuaccaugggcaagagaagcgccggguccaucauguggcuggcuucucucgccguggucauugcgugcgcuggagccgugacccuggucagaaagaaccgguggcuccugcuuaauguuacaagcgaggaccugggcaaaacguucuccguggggaccggaaacugcacaaccaauauccucgaagccaaguacuggugucccgauucuauggaguauaacugcccuaaucugagcccgcgcgaggaacccgacgauauugacuguuggugcuacggcguggaaaacgucagaguggcuuaugggaaaugugauuccgccggacggucucgcagaagccggcgcgcgaucgaccuuccuacacacgagaaucauggccugaagaccagacaggagaaauggaugacagggcggaugggagaacgccaacuccagaagauugagagaugguuuguucggaaccccuucuuugcugugaccgcccugacgaucgccuaccuggucggcuccaauaugacccagcgcgugguuauugcucuccuggugcuugccgucggcccugcuuauucugcccacugcaucgggaucacagauagagacuucauugaaggagugcauggcgggaccugggugagcgcgacacuggagcaggauaagugugucaccguuauggcccccgacaaaccuucccucgauaucagccuggagacgguggcuauugaccggccggccgaagugcgcaaggucugcuacaacgcugugcuuacacacguuaaaaucaaugauaagugucccucuaccggagaggcccaucuggcggaagagaacgaaggcgacaaugccugcaaaagaacauauuccgaccggggguggggaaacggcuguggccucuuugggaagggaagcauuguggcuugcgccaaguuuaccugcgcuaaaucuaugucccuguucgaggucgaucaaaccaagauccaguacgugauuagagcccagcugcacguuggcgccaaacaggagaauuggaacacagacaucaagacgcucaaauucgaugcucugagcgggucucaagaaguggaguuuaucggauacggcaaggcgacccuugaaugucagguccagacagccguggacuucgggaacuccuauauugcugagauggaaaccgagagcuggaucgucgaucgccagugggcccaagaccugacacucccuuggcaguccggaucuggcggcguguggcgggagaugcaccaucugguugaauuugagcccccucacgccgcuaccauuagagugcuugcccuggggaaucaggaaggaagccucaaaacggcgcugacaggcgcuaugcgcgucaccaaggauaccaacgacaauaaccuguacaagcuccaugggggacacguguccugccggguuaaacugagcgcccuuacacugaagggcaccucuuauaaaaucuguacagauaagauguucuuugugaaaaaucccacggacaccgggcacggcacagucgugaugcaagugaagguuuccaagggagccccgugccgcauuccugucaucguggcugaugaccucaccgccgcuaucaacaaaggcauucuggugacagucaaucccaucgccagcaccaacgacgaugaggugcuuauugaaguuaauccucccuucggggacucuuacaucauugugggaagaggcgauagccggcugacguaucaguggcauaaggagggguccucuaucggaaaacucuucacccagacaaugaagggcgucgagagacuggcggugaugggggacaccgccugggauuuuagcuccgcuggcggauucuuuacaagcguuggcaaagggauccacaccguguucggaucugccuuucagggccuguucgggggacucaacuggauuacgaaggucaucaugggcgcugugcugauuuggguugggaucaauacacgcaacaugaccauguccaugagcaugauucuugugggcgucaucaugauguuucugucucucggagugggcgccugaggacuagucccuguucccagagcccacuuuuuuuucuuuuuuugaaauaaaauagccugucuuucagaucuaaaaaaaaaaaaaaaaaaaaaaaaaaaaaaaaaaaaaaaaaaaaaaaaaaaaaaaaaaaaaaaaugcaucccccccccccccccccccccccccccccccaaaggcucuuuucagagccaccagaauu

SEQ ID NO: 756 - RNA, 2383 nt, Artificial Sequence
  mRNA product Design c-5 comprising derived and/or modified sequence from YFV__NC_002031.1__X-SS-prME-XX (polyprotein: aa92-788) (opt6)
gggagagcggcucggccauuuugucccagucaguccggaggcugcggcugcagaaguaccgccugcggaguaacugcaaagaagcuuaccaugagaggauuaucaaguagaaaaagaagaucacaugauguacuaaccgugcaauuuuugaucuuagggaugcucuuaaugacaggagguguuacauuaguaagaaagaaucgauggcugcuuuuaaaugugacaucagaggauuuagggaaaacauuuucgguaggaacaggaaauuguacuacaaauauacuugaagcaaaauauuggugcccagacucuauggaauauaauuguccaaauuuaaguccuagagaagaaccugacgauauagauuguugguguuaugguguagaaaauguaagaguagcauacggcaaaugcgauagugcaggacguucuagacguucaaggagagccauagaucugcccacucacgaaaaucacggauugaaaacacgacaagaaaaauggaugacugggcgaaugggagaaagacaacuacagaaaauugaaagaugguucguuagaaauccauucuuugccguaacagcuuuaacaauagccuauuuaguagguaguaauaugacacaaagaguaguaauagcauugcuaguguuagcaguuggaccagcuuauagugcacauugcauaggaauaacagauagagacuuuauagaaggaguacacgggggaacuuggguaagugccacuuuagaacaagauaaauguguuacagugauggcgccagauaaaccaagucuggacauaaguuuggaaacaguagcgauugauagacccgcagaaguaagaaaaguuuguuauaaugcuguucuaacccauguuaaaauaaaugauaaaugcccuagcaccggagaagcccaucuagcagaagaaaaugaaggagauaacgcauguaaacgaacauacucagauagaggauggggcaacggauguggcuuguuuggaaaagguagcauaguagcaugcgcuaaauuuacaugcgcaaagucaaugucauuauuugaaguagaucaaacaaaaauacaauauguaauaagagcucaauuacacgugggugcaaaacaagaaaauuggaauacagacauaaagacacuaaaguucgacgcauuaaguggaucacaagagguagaauuuauaggguacggaaaagcgacuuuagagugucaaguccaaacagcaguagauuucgguaacucauacauagcagaaauggaaacugaaaguuggauaguagauagacaaugggcacaagacuugacacuaccuuggcaaucaggaagcggaggaguauggagagaaaugcaucauuuaguagaauuugaaccaccucaugcagcaacaauaagaguauuagcccuaggaaaccaagaaggaaguuuaaaaacagcacuaacaggagcuaugagaguaacaaaagauacaaaugacaacaaucuauacaaauuacacggaggacauguaagcugccggguaaaguugagcgcacuaacauuaaaaggaacgaguuauaaaauaugcacagauaaaauguucuuuguuaaaaauccuacagauaccggucauggaacaguaguaaugcaaguaaaaguaaguaaaggcgcucccuguagaauaccuguaauagucgcagacgauuuaaccgcagcaauaaauaaaggaauauuagucacgguaaacccaauagcgucaacaaaugaugaugaaguauuaauagaaguuaacccaccuuuuggagacaguuauauaauagucggaaggggugauaguagacuaacauaccaauggcauaaagaaggaagcucaauaggaaaauuauuuacucaaaccaugaaagguguagaaaggcuagcuguuaugggugacacagcaugggauuuuucaagcgcaggaggguucuuuacaucaguagguaaaggaauacauacaguauuuggaagugcauuucaaggauuauuuggugguuuaaauuggauaacaaaaguaauaaugggcgcaguuuuaauauggguagguauaaacacaagaaauaugacaaugucuaugaguaugauauuggucggaguaauaaugauguuuuuaucacuaggagugggugcagaucaagguugcgcuauuaauuuuggaaaaugaggacuagucccuguucccagagcccacuuuuuuuucuuuuuuugaaauaaaauagccugucuuucagaucuaaaaaaaaaaaaaaaaaaaaaaaaaaaaaaaaaaaaaaaaaaaaaaaaaaaaaaaaaaaaaaaaugcaucccccccccccccccccccccccccccccccaaaggcucuuuucagagccaccagaauu

SEQ ID NO: 757 - RNA, 2320 nt, Artificial Sequence
  mRNA product Design c-5 comprising derived and/or modified sequence from YFV__NC_002031.1__SS-prME (polyprotein: M,aa104-778) (opt6)
gggagagcggcucggccauuuugucccagucaguccggaggcugcggcugcagaaguaccgccugcggaguaacugcaaagaagcuuaccauggauguucuaacaguacaauuuuuaauauuagggauguuauuaaugacaggaggcguaacauuaguacgaaagaaucgauggcuauuacuaaacguuacgucugaagauuuaggaaaaacauuuagcguaggaacaggaaauugcaccacgaauaucuuagaagcaaaauauugguguccagauaguauggaauacaauuguccaaauuuaaguccuagagaggaacccgacgauauagauugcugguguuacggaguggaaaauguaagaguagcauauggaaaaugugacagcgcagguagaaguagaagaucacgacgagcaauugaucuacccacucaugagaaccauggacuaaaaacaagacaagaaaaauggaugacagguagaaugggcgaaagacaauuacagaaaauagaaagaugguuuguacgaaauccuuucuuugcugucacugcauuaacuauagcuuauuuaguaggaaguaacaugacucaaagaguaguaauagcacuauuaguacuagcaguaggaccagcuuacagugcacacuguauagggauaacggauagagauuuuauagaaggaguacauggggguacaugggugucugccacuuuagaacaagacaaauguguuacaguuauggccccagauaaacccucuuuagacauaucauuagaaacuguagcaauagauagaccggcggaagugagaaagguauguuauaaugcaguacuaacccauguaaaaauuaaugacaaaugcccaucaacaggagaggcucaucuagcugaagaaaaugaaggagacaaugcuugcaaacguacauauucagacaggggguggggaaauggauguggauuauuugguaaagggucaauaguagcaugugcaaaauuuacaugcgcaaaaaguaugagcuuauuugaaguagaucaaacaaaaauccaauauguaauuagagcucaacuucacguaggagcaaaacaagagaauuggaacacagauauaaaaacauuaaaauuugacgcuuugucuggaagucaagaagucgaauuuauuggcuauggaaaggcaacauuagaaugccaaguucaaaccgcaguagauuuuggaaauucauacauagcagaaauggagacugaaaguuggauaguagauagacagugggcucaagaccuaacuuuaccauggcaaucaggaaguggugguguauggagagaaaugcaucauuuaguagaauuugaaccaccacaugcagcaacaauuagaguacuagcauuaggaaaucaagaagguaguuuaaagacagcgcuuaccggagcaaugagaguuacaaaagauacuaaugacaauaauuuauauaaacuucauggaggacauguuagcuguagagucaaauuaagugcauuaacacucaaaggaacaucauacaaaauauguacagauaaaauguuuuucgucaagaauccaacagauacaggacauggaacaguuguaaugcaaguaaaaguaucaaaaggagcaccuugcagaauaccaguaauaguagcagaugauuuaacagccgcaauuaauaaagggauauuaguaacaguaaacccuauagcaaguacaaaugaugaugaagucuugauagaaguaaauccaccauuuggagauucguauauaauagucggaagaggagauagucgauuaacauaucaauggcauaaagaagguucaucaauaggaaaauuauuuacacaaaccaugaaaggaguugaaagauuagcuguaaugggggacacagcuugggauuuuucuagcgcaggaggauucuuuacauccguaggaaaagguauacacacaguauuuggcucagcauuccaaggguuauuuggugguuuaaauuggauaacaaaagugauuaugggagcagugcuaaucuggguaggaauaaauacaagaaauaugacaaugaguaugagcaugauucucguaggaguaauaaugauguuccuuaguuugggaguuggcgcuugaggacuagucccuguucccagagcccacuuuuuuuucuuuuuuugaaauaaaauagccugucuuucagaucuaaaaaaaaaaaaaaaaaaaaaaaaaaaaaaaaaaaaaaaaaaaaaaaaaaaaaaaaaaaaaaaaugcaucccccccccccccccccccccccccccccccaaaggcucuuuucagagccaccagaauu

SEQ ID NO: 758 - RNA, 2347 nt, Artificial Sequence
  mRNA product Design c-5 comprising derived and/or modified sequence from YFV__NC_002031.1__SSIgE-prME-XX (polyprotein: aa122-788) (opt6)
gggagagcggcucggccauuuugucccagucaguccggaggcugcggcugcagaaguaccgccugcggaguaacugcaaagaagcuuaccauggacuggacauggauauuauuuuuaguagcagcagcaacaagaguacauucaguuacauuaguaagaaagaaucgauggcugcuuuuaaaugugacaucagaggauuuagggaaaacauuuucgguaggaacaggaaauuguacuacaaauauacuugaagcaaaauauuggugcccagacucuauggaauauaauuguccaaauuuaaguccuagagaagaaccugacgauauagauuguugguguuaugguguagaaaauguaagaguagcauacggcaaaugcgauagugcaggacguucuagacguucaaggagagccauagaucugcccacucacgaaaaucacggauugaaaacacgacaagaaaaauggaugacugggcgaaugggagaaagacaacuacagaaaauugaaagaugguucguuagaaauccauucuuugccguaacagcuuuaacaauagccuauuuaguagguaguaauaugacacaaagaguaguaauagcauugcuaguguuagcaguuggaccagcuuauagugcacauugcauaggaauaacagauagagacuuuauagaaggaguacacgggggaacuuggguaagugccacuuuagaacaagauaaauguguuacagugauggcgccagauaaaccaagucuggacauaaguuuggaaacaguagcgauugauagacccgcagaaguaagaaaaguuuguuauaaugcuguucuaacccauguuaaaauaaaugauaaaugcccuagcaccggagaagcccaucuagcagaagaaaaugaaggagauaacgcauguaaacgaacauacucagauagaggauggggcaacggauguggcuuguuuggaaaagguagcauaguagcaugcgcuaaauuuacaugcgcaaagucaaugucauuauuugaaguagaucaaacaaaaauacaauauguaauaagagcucaauuacacgugggugcaaaacaagaaaauuggaauacagacauaaagacacuaaaguucgacgcauuaaguggaucacaagagguagaauuuauaggguacggaaaagcgacuuuagagugucaaguccaaacagcaguagauuucgguaacucauacauagcagaaauggaaacugaaaguuggauaguagauagacaaugggcacaagacuugacacuaccuuggcaaucaggaagcggaggaguauggagagaaaugcaucauuuaguagaauuugaaccaccucaugcagcaacaauaagaguauuagcccuaggaaaccaagaaggaaguuuaaaaacagcacuaacaggagcuaugagaguaacaaaagauacaaaugacaacaaucuauacaaauuacacggaggacauguaagcugccggguaaaguugagcgcacuaacauuaaaaggaacgaguuauaaaauaugcacagauaaaauguucuuuguuaaaaauccuacagauaccggucauggaacaguaguaaugcaaguaaaaguaaguaaaggcgcucccuguagaauaccuguaauagucgcagacgauuuaaccgcagcaauaaauaaaggaauauuagucacgguaaacccaauagcgucaacaaaugaugaugaaguauuaauagaaguuaacccaccuuuuggagacaguuauauaauagucggaaggggugauaguagacuaacauaccaauggcauaaagaaggaagcucaauaggaaaauuauuuacucaaaccaugaaagguguagaaaggcuagcuguuaugggugacacagcaugggauuuuucaagcgcaggaggguucuuuacaucaguagguaaaggaauacauacaguauuuggaagugcauuucaaggauuauuuggugguuuaaauuggauaacaaaaguaauaaugggcgcaguuuuaauauggguagguauaaacacaagaaauaugacaaugucuaugaguaugauauuggucggaguaauaaugauguuuuuaucacuaggagugggugcagaucaagguugcgcuauuaauuuuggaaaaugaggacuagucccuguucccagagcccacuuuuuuuucuuuuuuugaaauaaaauagccugucuuucagaucuaaaaaaaaaaaaaaaaaaaaaaaaaaaaaaaaaaaaaaaaaaaaaaaaaaaaaaaaaaaaaaaaugcaucccccccccccccccccccccccccccccccaaaggcucuuuucagagccaccagaauu

SEQ ID NO: 759 - RNA, 2317 nt, Artificial Sequence
  mRNA product Design c-5 comprising derived and/or modified sequence from YFV__NC_002031.1__SSIgE-prME (polyprotein: aa122-778) (opt6)
gggagagcggcucggccauuuugucccagucaguccggaggcugcggcugcagaaguaccgccugcggaguaacugcaaagaagcuuaccauggacuggacauggauauuauuuuuaguagcagcagcaacaagaguacauucaguaacauuagucagaaagaacagaugguuauuacugaacguaacaagugaagacuuaggaaaaacauuuaguguaggcacaggaaauugcacaacaaauauacuugaagcaaaauauugguguccagauagcauggaauauaauuguccaaauuuaucaccuagagaggaacccgaugauauagauuguugguguuauggaguugaaaacgugcgaguagcauaugguaaaugugauagcgcaggaagaaguagaagaaguagaagggcaauagacuuaccaacucaugaaaaccauggauuaaaaacaagacaggaaaaauggaugacaggaagaaugggagaacgacaauuacagaaaauagaaagaugguucguaagaaauccauucuuugcaguaacagcauuaacaauagcauaucuaguuggaaguaacaugacucaaagaguaguaauagcauuguuaguacuagcaguaggaccggcuuauagcgcacauuguauagggauaacagauagagacuuuauagaaggagugcacgguggaacauggguuucagcaacgcuagagcaagauaaauguguaacgguaauggcgccggauaaaccaagccuugacauaucacuagaaacgguugcaaucgaucgaccagccgaaguaagaaaaguaugcuauaaugcggucuuaacacacguaaaaauaaaugauaaauguccuucaacgggagaagcacauuuagcagaagaaaacgaaggagacaacgcguguaaaagaacauauucagauaggggcuggggaaacggcugcgguuuauuuggaaaaggaaguauaguagcaugcgcaaaauuuacuugcgcaaaaaguaugaguuuauucgaaguugaucaaacaaagauacaauauguaauacgagcacaauuacauguaggugcaaagcaagaaaauuggaauacagacauaaaaacauugaaauuugacgcuuugaguggaucacaagaaguagaauuuauaggauacggaaaagcuacauuagaaugucaaguacaaacugcaguagauuuuggaaauucguauauagcagaaauggaaacugaaucauggauuguagauaggcaaugggcacaagauuuaaccuugccauggcaaagcggaagcggggguguauggcgggaaaugcaucauuuaguagaguucgaacccccacacgcggcuaccauaagaguacuagcauuaggaaaucaagaagggagucucaagacagcacucacaggugcaaugcgaguaacgaaagauacaaaugacaauaaucuauacaaacuacacggaggacauguaucuugcagaguaaaauuaucugcauuaacacuaaaagggacaaguuacaaaauuuguacagauaagauguucuuugucaaaaacccaacagacacgggacacggaacgguagucaugcaaguuaaaguaagcaaaggagcgccaugcagaauaccaguaaucgucgcagaugauuuaacagccgcaauaaauaaagguauauuaguaacgguaaauccaauagcgaguaccaaugaugaugaaguacuaauagaagugaacccaccauuuggugauagcuauauaauaguagggcgaggagauucaagauuaacauaucaauggcauaaagaagguaguaguauaggaaaauuauuuacacaaacuaugaaaggcguagaaagacuagcagucaugggagauacagcaugggauuucucaagugcaggcggauuuuucacaagcgucggaaaaggaauacauacaguguuugguagugcguuucaaggauuauucggaggacuaaauuggauaacgaaaguaauuaugggagcaguucucauaugggucggaauaaauacaaggaacaugacuaugaguaugagcaugauccuaguaggaguaauaaugauguuucuaagccuaggcguuggugcaugaggacuagucccuguucccagagcccacuuuuuuuucuuuuuuugaaauaaaauagccugucuuucagaucuaaaaaaaaaaaaaaaaaaaaaaaaaaaaaaaaaaaaaaaaaaaaaaaaaaaaaaaaaaaaaaaaugcaucccccccccccccccccccccccccccccccaaaggcucuuuucagagccaccagaauu

SEQ ID NO: 760 - RNA, 2365 nt, Artificial Sequence
  mRNA product Design c-5 comprising derived and/or modified sequence from YFV__NC_002031.1__SSjev-prME-XX (polyprotein: aa122-788) (opt6)
gggagagcggcucggccauuuugucccagucaguccggaggcugcggcugcagaaguaccgccugcggaguaacugcaaagaagcuuaccaugggaaaaagaagugcaggaaguauaaugugguuggcaaguuuagcaguaguaauagcaugugcaggagcaguuacauuaguaagaaagaaucgauggcugcuuuuaaaugugacaucagaggauuuagggaaaacauuuucgguaggaacaggaaauuguacuacaaauauacuugaagcaaaauauuggugcccagacucuauggaauauaauuguccaaauuuaaguccuagagaagaaccugacgauauagauuguugguguuaugguguagaaaauguaagaguagcauacggcaaaugcgauagugcaggacguucuagacguucaaggagagccauagaucugcccacucacgaaaaucacggauugaaaacacgacaagaaaaauggaugacugggcgaaugggagaaagacaacuacagaaaauugaaagaugguucguuagaaauccauucuuugccguaacagcuuuaacaauagccuauuuaguagguaguaauaugacacaaagaguaguaauagcauugcuaguguuagcaguuggaccagcuuauagugcacauugcauaggaauaacagauagagacuuuauagaaggaguacacgggggaacuuggguaagugccacuuuagaacaagauaaauguguuacagugauggcgccagauaaaccaagucuggacauaaguuuggaaacaguagcgauugauagacccgcagaaguaagaaaaguuuguuauaaugcuguucuaacccauguuaaaauaaaugauaaaugcccuagcaccggagaagcccaucuagcagaagaaaaugaaggagauaacgcauguaaacgaacauacucagauagaggauggggcaacggauguggcuuguuuggaaaagguagcauaguagcaugcgcuaaauuuacaugcgcaaagucaaugucauuauuugaaguagaucaaacaaaaauacaauauguaauaagagcucaauuacacgugggugcaaaacaagaaaauuggaauacagacauaaagacacuaaaguucgacgcauuaaguggaucacaagagguagaauuuauaggguacggaaaagcgacuuuagagugucaaguccaaacagcaguagauuucgguaacucauacauagcagaaauggaaacugaaaguuggauaguagauagacaaugggcacaagacuugacacuaccuuggcaaucaggaagcggaggaguauggagagaaaugcaucauuuaguagaauuugaaccaccucaugcagcaacaauaagaguauuagcccuaggaaaccaagaaggaaguuuaaaaacagcacuaacaggagcuaugagaguaacaaaagauacaaaugacaacaaucuauacaaauuacacggaggacauguaagcugccggguaaaguugagcgcacuaacauuaaaaggaacgaguuauaaaauaugcacagauaaaauguucuuuguuaaaaauccuacagauaccggucauggaacaguaguaaugcaaguaaaaguaaguaaaggcgcucccuguagaauaccuguaauagucgcagacgauuuaaccgcagcaauaaauaaaggaauauuagucacgguaaacccaauagcgucaacaaaugaugaugaaguauuaauagaaguuaacccaccuuuuggagacaguuauauaauagucggaaggggugauaguagacuaacauaccaauggcauaaagaaggaagcucaauaggaaaauuauuuacucaaaccaugaaagguguagaaaggcuagcuguuaugggugacacagcaugggauuuuucaagcgcaggaggguucuuuacaucaguagguaaaggaauacauacaguauuuggaagugcauuucaaggauuauuuggugguuuaaauuggauaacaaaaguaauaaugggcgcaguuuuaauauggguagguauaaacacaagaaauaugacaaugucuaugaguaugauauuggucggaguaauaaugauguuuuuaucacuaggagugggugcagaucaagguugcgcuauuaauuuuggaaaaugaggacuagucccuguucccagagcccacuuuuuuuucuuuuuuugaaauaaaauagccugucuuucagaucuaaaaaaaaaaaaaaaaaaaaaaaaaaaaaaaaaaaaaaaaaaaaaaaaaaaaaaaaaaaaaaaaugcaucccccccccccccccccccccccccccccccaaaggcucuuuucagagccaccagaauu

SEQ ID NO: 761 - RNA, 2335 nt, Artificial Sequence
  mRNA product Design c-5 comprising derived and/or modified sequence from YFV__NC_002031.1__SSjev-prME (polyprotein: aa122-778) (opt6)
gggagagcggcucggccauuuugucccagucaguccggaggcugcggcugcagaaguaccgccugcggaguaacugcaaagaagcuuaccaugggaaaaagaagugcaggaaguauaaugugguuggcaaguuuagcaguaguaauagcaugugcaggagcaguaacauuagucagaaagaacagaugguuauuacugaacguaacaagugaagacuuaggaaaaacauuuaguguaggcacaggaaauugcacaacaaauauacuugaagcaaaauauugguguccagauagcauggaauauaauuguccaaauuuaucaccuagagaggaacccgaugauauagauuguugguguuauggaguugaaaacgugcgaguagcauaugguaaaugugauagcgcaggaagaaguagaagaaguagaagggcaauagacuuaccaacucaugaaaaccauggauuaaaaacaagacaggaaaaauggaugacaggaagaaugggagaacgacaauuacagaaaauagaaagaugguucguaagaaauccauucuuugcaguaacagcauuaacaauagcauaucuaguuggaaguaacaugacucaaagaguaguaauagcauuguuaguacuagcaguaggaccggcuuauagcgcacauuguauagggauaacagauagagacuuuauagaaggagugcacgguggaacauggguuucagcaacgcuagagcaagauaaauguguaacgguaauggcgccggauaaaccaagccuugacauaucacuagaaacgguugcaaucgaucgaccagccgaaguaagaaaaguaugcuauaaugcggucuuaacacacguaaaaauaaaugauaaauguccuucaacgggagaagcacauuuagcagaagaaaacgaaggagacaacgcguguaaaagaacauauucagauaggggcuggggaaacggcugcgguuuauuuggaaaaggaaguauaguagcaugcgcaaaauuuacuugcgcaaaaaguaugaguuuauucgaaguugaucaaacaaagauacaauauguaauacgagcacaauuacauguaggugcaaagcaagaaaauuggaauacagacauaaaaacauugaaauuugacgcuuugaguggaucacaagaaguagaauuuauaggauacggaaaagcuacauuagaaugucaaguacaaacugcaguagauuuuggaaauucguauauagcagaaauggaaacugaaucauggauuguagauaggcaaugggcacaagauuuaaccuugccauggcaaagcggaagcggggguguauggcgggaaaugcaucauuuaguagaguucgaacccccacacgcggcuaccauaagaguacuagcauuaggaaaucaagaagggagucucaagacagcacucacaggugcaaugcgaguaacgaaagauacaaaugacaauaaucuauacaaacuacacggaggacauguaucuugcagaguaaaauuaucugcauuaacacuaaaagggacaaguuacaaaauuuguacagauaagauguucuuugucaaaaacccaacagacacgggacacggaacgguagucaugcaaguuaaaguaagcaaaggagcgccaugcagaauaccaguaaucgucgcagaugauuuaacagccgcaauaaauaaagguauauuaguaacgguaaauccaauagcgaguaccaaugaugaugaaguacuaauagaagugaacccaccauuuggugauagcuauauaauaguagggcgaggagauucaagauuaacauaucaauggcauaaagaagguaguaguauaggaaaauuauuuacacaaacuaugaaaggcguagaaagacuagcagucaugggagauacagcaugggauuucucaagugcaggcggauuuuucacaagcgucggaaaaggaauacauacaguguuugguagugcguuucaaggauuauucggaggacuaaauuggauaacgaaaguaauuaugggagcaguucucauaugggucggaauaaauacaaggaacaugacuaugaguaugagcaugauccuaguaggaguaauaaugauguuucuaagccuaggcguuggugcaugaggacuagucccuguucccagagcccacuuuuuuuucuuuuuuugaaauaaaauagccugucuuucagaucuaaaaaaaaaaaaaaaaaaaaaaaaaaaaaaaaaaaaaaaaaaaaaaaaaaaaaaaaaaaaaaaaugcaucccccccccccccccccccccccccccccccaaaggcucuuuucagagccaccagaauu

SEQ ID NO: 762 - RNA, 2383 nt, Artificial Sequence
  mRNA product Design c-5 comprising derived and/or modified sequence from YFV__NC_002031.1__X-SS-prME-XX (polyprotein: aa92-788) (opt11)
gggagagcggcucggccauuuugucccagucaguccggaggcugcggcugcagaaguaccgccugcggaguaacugcaaagaagcuuaccaugcggggacuaagcagcagaaaaagacgcagccacgaugugcucaccgugcaauuccucauacuggggaugcuccuaaugaccggaggcgugacccuaguaaggaaaaacagauggcuacuacuaaacguaaccucagaagaucuaggaaagacauuuucagucggcacaggcaacugcacaaccaacauacuagaagcaaaauauuggugcccagacagcauggaauacaacugucccaaccucagcccaagagaggaaccagacgacauagacugcugguguuacggaguagaaaacguaagaguggcauacggcaaaugcgacagcgcaggcaggagccgaagaucccgcagagccaucgacuugcccacgcacgaaaaccacggccucaaaacacgacaagaaaaauggaugacagggcgaaugggagaacgacagcuccagaaaauagaacgaugguucguccggaacccguucuucgcaguaacggcacuaacaaucgcauaccucguaggcagcaacaugacacaaagaguggucaucgcgcuacucguacuagcaguggggcccgcauacagugcacacugcauaggaaucacagaccgugacuucaucgaaggcguacacggaggaacguggguaagcgcgacacuggaacaagacaaaugcgugacaguaauggcaccagacaaaccaagccuagacauaucccuagaaacggucgccaucgaccgucccgcagaaguacgaaagguaugcuauaaugcaguccucacacacgucaaaauaaacgacaaaugccccagcacgggcgaagcacaccucgccgaagaaaacgaaggggauaacgcgugcaaacgcaccuacuccgacaggggauggggcaacggaugcggacuguucggaaaaggauccauagucgcaugcgcaaaauuuaccugcgcaaaaagcaugagcuuguucgagguagaccaaacgaagauccaauacguaauccgagcucaacuacacguuggggccaagcaagagaacuggaauacggacaucaaaacacuaaaauucgacgcacucuccggcucacaagaagucgaguucaucggcuacggcaaagcaacacuagaaugccaaguacaaacagcgguggacuucggcaacagcuacauagcagaaauggaaacagaaagcuggauaguagaccgacaaugggcacaagaccuaacucugccauggcaaagcggcucaggaggaguguggagagagaugcaccaccugguagaguucgaacccccacacgcagcaacaauaaggguacuggcacuaggcaaccaagaaggcagccuaaaaaccgcacucacaggagccaugcgcgugacgaaggacaccaacgacaacaaccucuacaaacuccacggagggcacguauccugccgcguaaaacuaucagcacuaacgcuaaaaggaacaagcuacaaaauaugcacagacaaaauguucuucgucaaaaaccccacagacacaggccacggcacagucguaaugcaagugaaggucagcaagggggcccccugccgaaucccagucauaguggcagacgaccucacggccgccaucaacaaagggauccugguaacagugaacccaauagcaucgaccaacgacgacgaaguccucauagaagugaaucccccguucggcgacagcuacaucaucguaggacgcggcgacucccgacugacguaccaauggcauaaagaaggcagcagcauuggaaaacuauucacccaaaccaugaagggcgucgaaagacucgcggugaugggagacaccgcaugggacuucucgagcgcaggcggcuucuucacaagcguaggaaaagggauucacacaguauucggauccgcauuccaaggccucuucgggggacuaaacuggauaacgaaaguaauaaugggagcaguucucauauggguaggaaucaacacacgaaacaugacaauguccaugucaaugauacucguaggcguaaucaugauguuucugucacucggagugggagcagaccaagguugcgccauaaacuucggcaagugaggacuagucccuguucccagagcccacuuuuuuuucuuuuuuugaaauaaaauagccugucuuucagaucuaaaaaaaaaaaaaaaaaaaaaaaaaaaaaaaaaaaaaaaaaaaaaaaaaaaaaaaaaaaaaaaaugcaucccccccccccccccccccccccccccccccaaaggcucuuuucagagccaccagaauu

SEQ ID NO: 763 - RNA, 2320 nt, Artificial Sequence
  mRNA product Design c-5 comprising derived and/or modified sequence from YFV__NC_002031.1__SS-prME (polyprotein: M,aa104-778) (opt11)
gggagagcggcucggccauuuugucccagucaguccggaggcugcggcugcagaaguaccgccugcggaguaacugcaaagaagcuuaccauggacguccuuacgguacaauuccuaauacuaggaaugcuucucaugaccgggggcgucacccuaguccggaaaaacagauggcuacugcuaaauguuacaagcgaagaccuuggcaagacauucagcguaggcacgggcaacuguacaaccaacauacuagaagcgaaauacuggugcccagacuccauggaguacaacugccccaaccuaagcccacgggaagaacccgacgacauagacugcugguguuacggggucgaaaacguccgcgucgcauacgggaaaugcgauagcgcaggccgcaguagacgcucccgccgcgccauagaccuaccaacgcacgagaaccacggccucaaaacucgccaagaaaaauggaugacagggcgaaugggugaacgccaacuacagaagaucgaaaggugguucgucaggaacccauucuucgcagugaccgcacuaacgauagccuaccuagugggaucaaacaugacgcaacgagucgugaucgcacuccuaguacuggccguaggaccggccuacuccgcgcacugcaucggcauaacggauagggacuucauugaaggaguacauggcggcacgugggucagcgcgacacucgaacaagacaaaugcguaaccgugauggcacccgacaaaccgagucuugacauaagccuggaaacgguagcgauagaucguccagccgaaguaagaaaaguaugcuacaacgcaguccuaacacacguaaaaauaaacgacaaaugcccaagcacaggggaagcccaccucgcagaagagaacgaaggcgacaacgcaugcaaacgcacauacuccgacaggggaugggggaauggcugcggacuauucgggaaaggaagcaucgucgcgugcgccaaauucacaugcgccaagagcaugagccuguucgaagucgaccaaacaaaaauccaauacguaauacgcgcgcaacugcacguaggagcgaaacaggaaaacuggaacacggacauuaaaacccucaaauucgacgcgcucucaggaucacaagaagucgaguucaucggcuacggcaaggcaacgcucgaaugccaaguacaaacagcaguagacuucggaaacagcuacauugccgagauggaaaccgagagcuggauagucgacagacaaugggcccaagaccuaacccugccauggcaaucaggcuccgggggcgucuggcgagagaugcaccaccuaguagaguucgaaccaccccacgccgccacgaucagaguacuggcccugggcaaccaagaaggcucacucaagacggcgcucacaggagcaaugagggucacgaaagacaccaacgacaacaaccucuacaaacuacacggagggcacgugagcugccggguaaaacugagcgcacucacucugaagggaacaagcuacaagauaugcaccgacaaaauguucuucgugaaaaacccaaccgacacuggacacggcacggucguuaugcaagucaagguaucaaaaggagccccaugcagaaucccaguaauaguagcggacgaccuaacagccgccauaaacaaaggaauccuagucacgguaaauccgauagcaucgaccaacgacgacgaaguacuaauagaagugaacccaccauucggcgacagcuacauaauagucgggagaggcgacucgcgacuaaccuaccaauggcacaaggaagggagcucuaucgggaaacuauucacccaaacgaugaagggcguagaaaggcucgcagucaugggcgacaccgcaugggacuucuccagcgcgggaggcuucuuuacuucagugggaaaagggauacacaccgucuucggcagcgcauuccagggccuauucggcggguuaaacuggaucacgaaagugauaaugggggcaguucucaucugggucggaauaaacacacguaacaugaccaugagcaugagcaugauccuagucggggucauaaugauguucuugagcuugggaguaggugcaugaggacuagucccuguucccagagcccacuuuuuuuucuuuuuuugaaauaaaauagccugucuuucagaucuaaaaaaaaaaaaaaaaaaaaaaaaaaaaaaaaaaaaaaaaaaaaaaaaaaaaaaaaaaaaaaaaugcaucccccccccccccccccccccccccccccccaaaggcucuuuucagagccaccagaauu

SEQ ID NO: 764 - RNA, 2347 nt, Artificial Sequence
  mRNA product Design c-5 comprising derived and/or modified sequence from YFV__NC_002031.1__SSIgE-prME-XX (polyprotein: aa122-788) (opt11)
gggagagcggcucggccauuuugucccagucaguccggaggcugcggcugcagaaguaccgccugcggaguaacugcaaagaagcuuaccauggauuggacguggauacucuuucucguggccgcggccacgcgcgugcacucggugacccuaguaaggaaaaacagauggcuacuacuaaacguaaccucagaagaucuaggaaagacauuuucagucggcacaggcaacugcacaaccaacauacuagaagcaaaauauuggugcccagacagcauggaauacaacugucccaaccucagcccaagagaggaaccagacgacauagacugcugguguuacggaguagaaaacguaagaguggcauacggcaaaugcgacagcgcaggcaggagccgaagaucccgcagagccaucgacuugcccacgcacgaaaaccacggccucaaaacacgacaagaaaaauggaugacagggcgaaugggagaacgacagcuccagaaaauagaacgaugguucguccggaacccguucuucgcaguaacggcacuaacaaucgcauaccucguaggcagcaacaugacacaaagaguggucaucgcgcuacucguacuagcaguggggcccgcauacagugcacacugcauaggaaucacagaccgugacuucaucgaaggcguacacggaggaacguggguaagcgcgacacuggaacaagacaaaugcgugacaguaauggcaccagacaaaccaagccuagacauaucccuagaaacggucgccaucgaccgucccgcagaaguacgaaagguaugcuauaaugcaguccucacacacgucaaaauaaacgacaaaugccccagcacgggcgaagcacaccucgccgaagaaaacgaaggggauaacgcgugcaaacgcaccuacuccgacaggggauggggcaacggaugcggacuguucggaaaaggauccauagucgcaugcgcaaaauuuaccugcgcaaaaagcaugagcuuguucgagguagaccaaacgaagauccaauacguaauccgagcucaacuacacguuggggccaagcaagagaacuggaauacggacaucaaaacacuaaaauucgacgcacucuccggcucacaagaagucgaguucaucggcuacggcaaagcaacacuagaaugccaaguacaaacagcgguggacuucggcaacagcuacauagcagaaauggaaacagaaagcuggauaguagaccgacaaugggcacaagaccuaacucugccauggcaaagcggcucaggaggaguguggagagagaugcaccaccugguagaguucgaacccccacacgcagcaacaauaaggguacuggcacuaggcaaccaagaaggcagccuaaaaaccgcacucacaggagccaugcgcgugacgaaggacaccaacgacaacaaccucuacaaacuccacggagggcacguauccugccgcguaaaacuaucagcacuaacgcuaaaaggaacaagcuacaaaauaugcacagacaaaauguucuucgucaaaaaccccacagacacaggccacggcacagucguaaugcaagugaaggucagcaagggggcccccugccgaaucccagucauaguggcagacgaccucacggccgccaucaacaaagggauccugguaacagugaacccaauagcaucgaccaacgacgacgaaguccucauagaagugaaucccccguucggcgacagcuacaucaucguaggacgcggcgacucccgacugacguaccaauggcauaaagaaggcagcagcauuggaaaacuauucacccaaaccaugaagggcgucgaaagacucgcggugaugggagacaccgcaugggacuucucgagcgcaggcggcuucuucacaagcguaggaaaagggauucacacaguauucggauccgcauuccaaggccucuucgggggacuaaacuggauaacgaaaguaauaaugggagcaguucucauauggguaggaaucaacacacgaaacaugacaauguccaugucaaugauacucguaggcguaaucaugauguuucugucacucggagugggagcagaccaagguugcgccauaaacuucggcaagugaggacuagucccuguucccagagcccacuuuuuuuucuuuuuuugaaauaaaauagccugucuuucagaucuaaaaaaaaaaaaaaaaaaaaaaaaaaaaaaaaaaaaaaaaaaaaaaaaaaaaaaaaaaaaaaaaugcaucccccccccccccccccccccccccccccccaaaggcucuuuucagagccaccagaauu

SEQ ID NO: 765 - RNA, 2317 nt, Artificial Sequence
  mRNA product Design c-5 comprising derived and/or modified sequence from YFV__NC_002031.1__SSIgE-prME (polyprotein: aa122-778) (opt11)
gggagagcggcucggccauuuugucccagucaguccggaggcugcggcugcagaaguaccgccugcggaguaacugcaaagaagcuuaccauggauuggacguggauacucuuucucguggccgcggccacgcgcgugcacucggugacccuaguccgcaaaaacagauggcuacuacuaaacguaacaagcgaagaccugggcaaaacauucagcguuggcacaggcaauugcacgacaaacauacucgaagcaaaauacuggugccccgacagcauggaauacaacugcccaaaucuaagcccacgcgaagaaccagacgacaucgacuguuggugcuacggagucgaaaacgugagggucgcauacgguaaaugcgacagcgcuggcagaagcagacgcucccgacgagccauugaccucccuacccacgaaaaccacggccuaaaaacccggcaggaaaaauggaugacaggccggaugggagaacgccaacuacagaaaauagagaggugguuuguaagaaacccauucuucgccguaaccgcgcucaccaucgcuuaccucguaggaucaaacaugacgcaaagaguagugaucgcgcuacucguacuagcgguaggccccgccuacagcgcacacugcaucggcaucacugacagggacuucauagaaggcguccacgggggcacguggguuagcgccacacucgaacaagacaaaugcgucacagugauggcaccagacaaacccucacuagacaucucacuagaaaccgucgcaaucgaccgcccagcagaagucaggaaagugugcuacaacgccgucuuaacccacguaaaaauaaaugauaaaugcccaagcacgggagaggcacaccuagcggaagaaaacgaaggcgacaacgcgugcaaacguaccuacagcgacagaggguggggcaacggaugcggcuuauucggaaaaggaaguaucguagcaugcgcaaaauuuaccugcgccaaaagcaugucccuauucgaaguagaucaaacaaaaauacaauacgucauccgagcccaacuacacgugggggcaaaacaagaaaacuggaacaccgacaucaaaacacucaaauucgaugcccuaagcggcucccaagaaguagaguucaucgguuacggcaaggccacgcucgagugccaaguccaaacagcaguagacuucgggaacucauacaucgccgagauggaaacggaaucauggauugucgacagacaaugggcacaagaccuaacacuaccauggcaaucaggcagcggaggggucuggcgagaaaugcaccaccuaguagaguucgaacccccacacgccgcaacaauccgaguacuagcccucggaaaccaagaaggaucacuaaaaaccgcacucaccggcgcaaugcgcguaacaaaagauacaaacgacaacaaccuauacaaacuacacggcggacacgucagcugccgcgucaaacuauccgcccuaacacuaaaaggaacaagcuacaaaauaugcacagacaaaauguucuucgucaaaaauccgacugacacgggccacggcacagucguaaugcaaguaaaagucucaaaaggcgcaccaugcagaaucccaguaaucgucgccgaugaccuaacagccgcaaucaacaagggcauccucguaacaguaaaccccauagccagcaccaacgacgacgaaguccuaaucgaagucaacccacccuucggagacagcuacauaauaguaggacgaggggacucacgccuaaccuaccaauggcacaaagaaggauccucaaucggcaaacuguucacacaaacgaugaaaggcguagaaagacucgcaguaaugggcgauacggccugggacuucucaagcgcgggcggcuucuucacgagcgucggaaaaggcauccauacaguauucggaagcgcauuccaaggccuauuuggaggccucaacuggauaacaaaagugaucaugggagcaguacugaucugggucggcaucaacacccgcaacaugacgaugagcaugucaaugauccucgugggaguaauaaugauguuccucagccugggcguaggcgcaugaggacuagucccuguucccagagcccacuuuuuuuucuuuuuuugaaauaaaauagccugucuuucagaucuaaaaaaaaaaaaaaaaaaaaaaaaaaaaaaaaaaaaaaaaaaaaaaaaaaaaaaaaaaaaaaaaugcaucccccccccccccccccccccccccccccccaaaggcucuuuucagagccaccagaauu

SEQ ID NO: 766 - RNA, 2365 nt, Artificial Sequence
  mRNA product Design c-5 comprising derived and/or modified sequence from YFV__NC_002031.1__SSjev-prME-XX (polyprotein: aa122-788) (opt11)
gggagagcggcucggccauuuugucccagucaguccggaggcugcggcugcagaaguaccgccugcggaguaacugcaaagaagcuuaccauggggaaaaggagcgcgggcucgauaaugugguuggccucgcucgcggucgugaucgcgugcgcgggcgcggugacccuaguaaggaaaaacagauggcuacuacuaaacguaaccucagaagaucuaggaaagacauuuucagucggcacaggcaacugcacaaccaacauacuagaagcaaaauauuggugcccagacagcauggaauacaacugucccaaccucagcccaagagaggaaccagacgacauagacugcugguguuacggaguagaaaacguaagaguggcauacggcaaaugcgacagcgcaggcaggagccgaagaucccgcagagccaucgacuugcccacgcacgaaaaccacggccucaaaacacgacaagaaaaauggaugacagggcgaaugggagaacgacagcuccagaaaauagaacgaugguucguccggaacccguucuucgcaguaacggcacuaacaaucgcauaccucguaggcagcaacaugacacaaagaguggucaucgcgcuacucguacuagcaguggggcccgcauacagugcacacugcauaggaaucacagaccgugacuucaucgaaggcguacacggaggaacguggguaagcgcgacacuggaacaagacaaaugcgugacaguaauggcaccagacaaaccaagccuagacauaucccuagaaacggucgccaucgaccgucccgcagaaguacgaaagguaugcuauaaugcaguccucacacacgucaaaauaaacgacaaaugccccagcacgggcgaagcacaccucgccgaagaaaacgaaggggauaacgcgugcaaacgcaccuacuccgacaggggauggggcaacggaugcggacuguucggaaaaggauccauagucgcaugcgcaaaauuuaccugcgcaaaaagcaugagcuuguucgagguagaccaaacgaagauccaauacguaauccgagcucaacuacacguuggggccaagcaagagaacuggaauacggacaucaaaacacuaaaauucgacgcacucuccggcucacaagaagucgaguucaucggcuacggcaaagcaacacuagaaugccaaguacaaacagcgguggacuucggcaacagcuacauagcagaaauggaaacagaaagcuggauaguagaccgacaaugggcacaagaccuaacucugccauggcaaagcggcucaggaggaguguggagagagaugcaccaccugguagaguucgaacccccacacgcagcaacaauaaggguacuggcacuaggcaaccaagaaggcagccuaaaaaccgcacucacaggagccaugcgcgugacgaaggacaccaacgacaacaaccucuacaaacuccacggagggcacguauccugccgcguaaaacuaucagcacuaacgcuaaaaggaacaagcuacaaaauaugcacagacaaaauguucuucgucaaaaaccccacagacacaggccacggcacagucguaaugcaagugaaggucagcaagggggcccccugccgaaucccagucauaguggcagacgaccucacggccgccaucaacaaagggauccugguaacagugaacccaauagcaucgaccaacgacgacgaaguccucauagaagugaaucccccguucggcgacagcuacaucaucguaggacgcggcgacucccgacugacguaccaauggcauaaagaaggcagcagcauuggaaaacuauucacccaaaccaugaagggcgucgaaagacucgcggugaugggagacaccgcaugggacuucucgagcgcaggcggcuucuucacaagcguaggaaaagggauucacacaguauucggauccgcauuccaaggccucuucgggggacuaaacuggauaacgaaaguaauaaugggagcaguucucauauggguaggaaucaacacacgaaacaugacaauguccaugucaaugauacucguaggcguaaucaugauguuucugucacucggagugggagcagaccaagguugcgccauaaacuucggcaagugaggacuagucccuguucccagagcccacuuuuuuuucuuuuuuugaaauaaaauagccugucuuucagaucuaaaaaaaaaaaaaaaaaaaaaaaaaaaaaaaaaaaaaaaaaaaaaaaaaaaaaaaaaaaaaaaaugcaucccccccccccccccccccccccccccccccaaaggcucuuuucagagccaccagaauu

SEQ ID NO: 767 - RNA, 2335 nt, Artificial Sequence
  mRNA product Design c-5 comprising derived and/or modified sequence from YFV__NC_002031.1__SSjev-prME (polyprotein: aa122-778) (opt11)
gggagagcggcucggccauuuugucccagucaguccggaggcugcggcugcagaaguaccgccugcggaguaacugcaaagaagcuuaccauggggaaaaggagcgcgggcucgauaaugugguuggccucgcucgcggucgugaucgcgugcgcgggcgcggugacccuaguccgcaaaaacagauggcuacuacuaaacguaacaagcgaagaccugggcaaaacauucagcguuggcacaggcaauugcacgacaaacauacucgaagcaaaauacuggugccccgacagcauggaauacaacugcccaaaucuaagcccacgcgaagaaccagacgacaucgacuguuggugcuacggagucgaaaacgugagggucgcauacgguaaaugcgacagcgcuggcagaagcagacgcucccgacgagccauugaccucccuacccacgaaaaccacggccuaaaaacccggcaggaaaaauggaugacaggccggaugggagaacgccaacuacagaaaauagagaggugguuuguaagaaacccauucuucgccguaaccgcgcucaccaucgcuuaccucguaggaucaaacaugacgcaaagaguagugaucgcgcuacucguacuagcgguaggccccgccuacagcgcacacugcaucggcaucacugacagggacuucauagaaggcguccacgggggcacguggguuagcgccacacucgaacaagacaaaugcgucacagugauggcaccagacaaacccucacuagacaucucacuagaaaccgucgcaaucgaccgcccagcagaagucaggaaagugugcuacaacgccgucuuaacccacguaaaaauaaaugauaaaugcccaagcacgggagaggcacaccuagcggaagaaaacgaaggcgacaacgcgugcaaacguaccuacagcgacagaggguggggcaacggaugcggcuuauucggaaaaggaaguaucguagcaugcgcaaaauuuaccugcgccaaaagcaugucccuauucgaaguagaucaaacaaaaauacaauacgucauccgagcccaacuacacgugggggcaaaacaagaaaacuggaacaccgacaucaaaacacucaaauucgaugcccuaagcggcucccaagaaguagaguucaucgguuacggcaaggccacgcucgagugccaaguccaaacagcaguagacuucgggaacucauacaucgccgagauggaaacggaaucauggauugucgacagacaaugggcacaagaccuaacacuaccauggcaaucaggcagcggaggggucuggcgagaaaugcaccaccuaguagaguucgaacccccacacgccgcaacaauccgaguacuagcccucggaaaccaagaaggaucacuaaaaaccgcacucaccggcgcaaugcgcguaacaaaagauacaaacgacaacaaccuauacaaacuacacggcggacacgucagcugccgcgucaaacuauccgcccuaacacuaaaaggaacaagcuacaaaauaugcacagacaaaauguucuucgucaaaaauccgacugacacgggccacggcacagucguaaugcaaguaaaagucucaaaaggcgcaccaugcagaaucccaguaaucgucgccgaugaccuaacagccgcaaucaacaagggcauccucguaacaguaaaccccauagccagcaccaacgacgacgaaguccuaaucgaagucaacccacccuucggagacagcuacauaauaguaggacgaggggacucacgccuaaccuaccaauggcacaaagaaggauccucaaucggcaaacuguucacacaaacgaugaaaggcguagaaagacucgcaguaaugggcgauacggccugggacuucucaagcgcgggcggcuucuucacgagcgucggaaaaggcauccauacaguauucggaagcgcauuccaaggccuauuuggaggccucaacuggauaacaaaagugaucaugggagcaguacugaucugggucggcaucaacacccgcaacaugacgaugagcaugucaaugauccucgugggaguaauaaugauguuccucagccugggcguaggcgcaugaggacuagucccuguucccagagcccacuuuuuuuucuuuuuuugaaauaaaauagccugucuuucagaucuaaaaaaaaaaaaaaaaaaaaaaaaaaaaaaaaaaaaaaaaaaaaaaaaaaaaaaaaaaaaaaaaugcaucccccccccccccccccccccccccccccccaaaggcucuuuucagagccaccagaauu

SEQ ID NO: 768 - RNA, 2392 nt, Artificial Sequence
  mRNA product Design d-1 comprising derived and/or modified sequence from YFV__NC_002031.1__X-SS-prME-XX (polyprotein: aa92-788) (wt)
gggagacccgugacccggaaguuguacggcuacgcgacuuucccucccacaaacccucgcgcccuuccuuuccuacuugggcccggcagaaagcuuaccaugagaggauuguccucaaggaaacgccguucccaugauguucugacugugcaauuccuaauuuugggaaugcuguugaugacggguggagugaccuuggugcggaaaaacagaugguugcuccuaaaugugacaucugaggaccucgggaaaacauucucugugggcacaggcaacugcacaacaaacauuuuggaagccaaguacuggugcccagacucaauggaauacaacugucccaaucucaguccaagagaggagccagaugacauugauugcuggugcuaugggguggaaaacguuagagucgcauaugguaagugugacucagcaggcaggucuaggaggucaagaagggccauugacuugccuacgcaugaaaaccaugguuugaagacccggcaagaaaaauggaugacuggaagaaugggugaaaggcaacuccaaaagauugagagaugguucgugaggaaccccuuuuuugcagugacggcucugaccauugccuaccuugugggaagcaacaugacgcaacgagucgugauugcccuacuggucuuggcuguugguccggccuacucagcucacugcauuggaauuacugacagggauuucauugagggggugcauggaggaacuuggguuucagcuacccuggagcaagacaagugugucacuguuauggccccugacaagccuucauuggacaucucacuagagacaguagccauugauagaccugcugaggugaggaaaguguguuacaaugcaguucucacucaugugaagauuaaugacaagugccccagcacuggagaggcccaccuagcugaagagaacgaaggggacaaugcgugcaagcgcacuuauucugauagaggcuggggcaauggcuguggccuauuugggaaagggagcauuguggcaugcgccaaauucacuugugccaaauccaugaguuuguuugagguugaucagaccaaaauucaguaugucaucagagcacaauugcauguaggggccaagcaggaaaauuggaauaccgacauuaagacucucaaguuugaugcccugucaggcucccaggaagucgaguucauuggguauggaaaagcuacacuggaaugccaggugcaaacugcgguggacuuugguaacaguuacaucgcugagauggaaacagagagcuggauaguggacagacagugggcccaggacuugacccugccauggcagaguggaaguggcgggguguggagagagaugcaucaucuugucgaauuugaaccuccgcaugccgccacuaucagaguacuggcccugggaaaccaggaaggcuccuugaaaacagcucuuacuggcgcaaugaggguuacaaaggacacaaaugacaacaaccuuuacaaacuacaugguggacauguuucuugcagagugaaauugucagcuuugacacucaaggggacauccuacaaaauaugcacugacaaaauguuuuuugucaagaacccaacugacacuggccauggcacuguugugaugcaggugaaagugucaaaaggagcccccugcaggauuccagugauaguagcugaugaucuuacagcggcaaucaauaaaggcauuuugguuacaguuaaccccaucgccucaaccaaugaugaugaagugcugauugaggugaacccaccuuuuggagacagcuacauuaucguugggagaggagauucacgucucacuuaccaguggcacaaagagggaagcucaauaggaaaguuguucacucagaccaugaaaggcguggaacgccuggccgucaugggagacaccgccugggauuucagcuccgcuggaggguucuucacuucgguugggaaaggaauccauacgguguuuggcucugccuuucaggggcuauuuggcggcuugaacuggauaacaaaggucaucaugggggcgguacuuauauggguuggcaucaacacaagaaacaugacaauguccaugagcaugaucuugguaggagugaucaugauguuuuugucucuaggaguuggggcggaucaaggaugcgccaucaacuuuggcaaguaaggacuagucccuguucccagagcccacuuuuuuuucuuuuuuugaaauaaaauagccugucuuucagaucuaaaaaaaaaaaaaaaaaaaaaaaaaaaaaaaaaaaaaaaaaaaaaaaaaaaaaaaaaaaaaaaaugcaucccccccccccccccccccccccccccccccaaaggcucuuuucagagccaccagaauu

SEQ ID NO: 769 - RNA, 2359 nt, Artificial Sequence
  mRNA product Design d-1 comprising derived and/or modified sequence from YFV__NC_002031.1__SS-prME (polyprotein: M,aa104-778) (wt)
gggagacccgugacccggaaguuguacggcuacgcgacuuucccucccacaaacccucgcgcccuuccuuuccuacuugggcccggcagaaagcuuaccauggauguucugacugugcaauuccuaauuuugggaaugcuguugaugacggguggagugaccuuggugcggaaaaacagaugguugcuccuaaaugugacaucugaggaccucgggaaaacauucucugugggcacaggcaacugcacaacaaacauuuuggaagccaaguacuggugcccagacucaauggaauacaacugucccaaucucaguccaagagaggagccagaugacauugauugcuggugcuaugggguggaaaacguuagagucgcauaugguaagugugacucagcaggcaggucuaggaggucaagaagggccauugacuugccuacgcaugaaaaccaugguuugaagacccggcaagaaaaauggaugacuggaagaaugggugaaaggcaacuccaaaagauugagagaugguucgugaggaaccccuuuuuugcagugacggcucugaccauugccuaccuugugggaagcaacaugacgcaacgagucgugauugcccuacuggucuuggcuguugguccggccuacucagcucacugcauuggaauuacugacagggauuucauugagggggugcauggaggaacuuggguuucagcuacccuggagcaagacaagugugucacuguuauggccccugacaagccuucauuggacaucucacuagagacaguagccauugauagaccugcugaggugaggaaaguguguuacaaugcaguucucacucaugugaagauuaaugacaagugccccagcacuggagaggcccaccuagcugaagagaacgaaggggacaaugcgugcaagcgcacuuauucugauagaggcuggggcaauggcuguggccuauuugggaaagggagcauuguggcaugcgccaaauucacuugugccaaauccaugaguuuguuugagguugaucagaccaaaauucaguaugucaucagagcacaauugcauguaggggccaagcaggaaaauuggaauaccgacauuaagacucucaaguuugaugcccugucaggcucccaggaagucgaguucauuggguauggaaaagcuacacuggaaugccaggugcaaacugcgguggacuuugguaacaguuacaucgcugagauggaaacagagagcuggauaguggacagacagugggcccaggacuugacccugccauggcagaguggaaguggcgggguguggagagagaugcaucaucuugucgaauuugaaccuccgcaugccgccacuaucagaguacuggcccugggaaaccaggaaggcuccuugaaaacagcucuuacuggcgcaaugaggguuacaaaggacacaaaugacaacaaccuuuacaaacuacaugguggacauguuucuugcagagugaaauugucagcuuugacacucaaggggacauccuacaaaauaugcacugacaaaauguuuuuugucaagaacccaacugacacuggccauggcacuguugugaugcaggugaaagugucaaaaggagcccccugcaggauuccagugauaguagcugaugaucuuacagcggcaaucaauaaaggcauuuugguuacaguuaaccccaucgccucaaccaaugaugaugaagugcugauugaggugaacccaccuuuuggagacagcuacauuaucguugggagaggagauucacgucucacuuaccaguggcacaaagagggaagcucaauaggaaaguuguucacucagaccaugaaaggcguggaacgccuggccgucaugggagacaccgccugggauuucagcuccgcuggaggguucuucacuucgguugggaaaggaauccauacgguguuuggcucugccuuucaggggcuauuuggcggcuugaacuggauaacaaaggucaucaugggggcgguacuuauauggguuggcaucaacacaagaaacaugacaauguccaugagcaugaucuugguaggagugaucaugauguuuuugucucuaggaguuggggcggaucaaggaugcgccaucaacuuuggcaaguaaggacuagucccuguucccagagcccacuuuuuuuucuuuuuuugaaauaaaauagccugucuuucagaucuaaaaaaaaaaaaaaaaaaaaaaaaaaaaaaaaaaaaaaaaaaaaaaaaaaaaaaaaaaaaaaaaugcaucccccccccccccccccccccccccccccccaaaggcucuuuucagagccaccagaauu

SEQ ID NO: 770 - RNA, 2356 nt, Artificial Sequence
  mRNA product Design d-1 comprising derived and/or modified sequence from YFV__NC_002031.1__SSIgE-prME-XX (polyprotein: aa122-788) (wt)
gggagacccgugacccggaaguuguacggcuacgcgacuuucccucccacaaacccucgcgcccuuccuuuccuacuugggcccggcagaaagcuuaccauggacuggaccuggauccuguuccucguggccgccgcgacccgcguccacagcgugaccuuggugcggaaaaacagaugguugcuccuaaaugugacaucugaggaccucgggaaaacauucucugugggcacaggcaacugcacaacaaacauuuuggaagccaaguacuggugcccagacucaauggaauacaacugucccaaucucaguccaagagaggagccagaugacauugauugcuggugcuaugggguggaaaacguuagagucgcauaugguaagugugacucagcaggcaggucuaggaggucaagaagggccauugacuugccuacgcaugaaaaccaugguuugaagacccggcaagaaaaauggaugacuggaagaaugggugaaaggcaacuccaaaagauugagagaugguucgugaggaaccccuuuuuugcagugacggcucugaccauugccuaccuugugggaagcaacaugacgcaacgagucgugauugcccuacuggucuuggcuguugguccggccuacucagcucacugcauuggaauuacugacagggauuucauugagggggugcauggaggaacuuggguuucagcuacccuggagcaagacaagugugucacuguuauggccccugacaagccuucauuggacaucucacuagagacaguagccauugauagaccugcugaggugaggaaaguguguuacaaugcaguucucacucaugugaagauuaaugacaagugccccagcacuggagaggcccaccuagcugaagagaacgaaggggacaaugcgugcaagcgcacuuauucugauagaggcuggggcaauggcuguggccuauuugggaaagggagcauuguggcaugcgccaaauucacuugugccaaauccaugaguuuguuugagguugaucagaccaaaauucaguaugucaucagagcacaauugcauguaggggccaagcaggaaaauuggaauaccgacauuaagacucucaaguuugaugcccugucaggcucccaggaagucgaguucauuggguauggaaaagcuacacuggaaugccaggugcaaacugcgguggacuuugguaacaguuacaucgcugagauggaaacagagagcuggauaguggacagacagugggcccaggacuugacccugccauggcagaguggaaguggcgggguguggagagagaugcaucaucuugucgaauuugaaccuccgcaugccgccacuaucagaguacuggcccugggaaaccaggaaggcuccuugaaaacagcucuuacuggcgcaaugaggguuacaaaggacacaaaugacaacaaccuuuacaaacuacaugguggacauguuucuugcagagugaaauugucagcuuugacacucaaggggacauccuacaaaauaugcacugacaaaauguuuuuugucaagaacccaacugacacuggccauggcacuguugugaugcaggugaaagugucaaaaggagcccccugcaggauuccagugauaguagcugaugaucuuacagcggcaaucaauaaaggcauuuugguuacaguuaaccccaucgccucaaccaaugaugaugaagugcugauugaggugaacccaccuuuuggagacagcuacauuaucguugggagaggagauucacgucucacuuaccaguggcacaaagagggaagcucaauaggaaaguuguucacucagaccaugaaaggcguggaacgccuggccgucaugggagacaccgccugggauuucagcuccgcuggaggguucuucacuucgguugggaaaggaauccauacgguguuuggcucugccuuucaggggcuauuuggcggcuugaacuggauaacaaaggucaucaugggggcgguacuuauauggguuggcaucaacacaagaaacaugacaauguccaugagcaugaucuugguaggagugaucaugauguuuuugucucuaggaguuggggcggaucaaggaugcgccaucaacuuuggcaaguaaggacuagucccuguucccagagcccacuuuuuuuucuuuuuuugaaauaaaauagccugucuuucagaucuaaaaaaaaaaaaaaaaaaaaaaaaaaaaaaaaaaaaaaaaaaaaaaaaaaaaaaaaaaaaaaaaugcaucccccccccccccccccccccccccccccccaaaggcucuuuucagagccaccagaauu

SEQ ID NO: 771 - RNA, 2326 nt, Artificial Sequence
  mRNA product Design d-1 comprising derived and/or modified sequence from YFV__NC_002031.1__SSIgE-prME (polyprotein: aa122-778) (wt)
gggagacccgugacccggaaguuguacggcuacgcgacuuucccucccacaaacccucgcgcccuuccuuuccuacuugggcccggcagaaagcuuaccauggacuggaccuggauccuguuccucguggccgccgcgacccgcguccacagcgugaccuuggugcggaaaaacagaugguugcuccuaaaugugacaucugaggaccucgggaaaacauucucugugggcacaggcaacugcacaacaaacauuuuggaagccaaguacuggugcccagacucaauggaauacaacugucccaaucucaguccaagagaggagccagaugacauugauugcuggugcuaugggguggaaaacguuagagucgcauaugguaagugugacucagcaggcaggucuaggaggucaagaagggccauugacuugccuacgcaugaaaaccaugguuugaagacccggcaagaaaaauggaugacuggaagaaugggugaaaggcaacuccaaaagauugagagaugguucgugaggaaccccuuuuuugcagugacggcucugaccauugccuaccuugugggaagcaacaugacgcaacgagucgugauugcccuacuggucuuggcuguugguccggccuacucagcucacugcauuggaauuacugacagggauuucauugagggggugcauggaggaacuuggguuucagcuacccuggagcaagacaagugugucacuguuauggccccugacaagccuucauuggacaucucacuagagacaguagccauugauagaccugcugaggugaggaaaguguguuacaaugcaguucucacucaugugaagauuaaugacaagugccccagcacuggagaggcccaccuagcugaagagaacgaaggggacaaugcgugcaagcgcacuuauucugauagaggcuggggcaauggcuguggccuauuugggaaagggagcauuguggcaugcgccaaauucacuugugccaaauccaugaguuuguuugagguugaucagaccaaaauucaguaugucaucagagcacaauugcauguaggggccaagcaggaaaauuggaauaccgacauuaagacucucaaguuugaugcccugucaggcucccaggaagucgaguucauuggguauggaaaagcuacacuggaaugccaggugcaaacugcgguggacuuugguaacaguuacaucgcugagauggaaacagagagcuggauaguggacagacagugggcccaggacuugacccugccauggcagaguggaaguggcgggguguggagagagaugcaucaucuugucgaauuugaaccuccgcaugccgccacuaucagaguacuggcccugggaaaccaggaaggcuccuugaaaacagcucuuacuggcgcaaugaggguuacaaaggacacaaaugacaacaaccuuuacaaacuacaugguggacauguuucuugcagagugaaauugucagcuuugacacucaaggggacauccuacaaaauaugcacugacaaaauguuuuuugucaagaacccaacugacacuggccauggcacuguugugaugcaggugaaagugucaaaaggagcccccugcaggauuccagugauaguagcugaugaucuuacagcggcaaucaauaaaggcauuuugguuacaguuaaccccaucgccucaaccaaugaugaugaagugcugauugaggugaacccaccuuuuggagacagcuacauuaucguugggagaggagauucacgucucacuuaccaguggcacaaagagggaagcucaauaggaaaguuguucacucagaccaugaaaggcguggaacgccuggccgucaugggagacaccgccugggauuucagcuccgcuggaggguucuucacuucgguugggaaaggaauucauacgguguuuggcucugccuuucaggggcuauuuggcggcuugaacuggauaacaaaggucaucaugggggcgguacuuauauggguuggcaucaacacaagaaacaugacaauguccaugagcaugaucuugguaggagugaucaugauguuuuugucucuaggaguuggggcguaaggacuagucccuguucccagagcccacuuuuuuuucuuuuuuugaaauaaaauagccugucuuucagaucuaaaaaaaaaaaaaaaaaaaaaaaaaaaaaaaaaaaaaaaaaaaaaaaaaaaaaaaaaaaaaaaaugcaucccccccccccccccccccccccccccccccaaaggcucuuuucagagccaccagaauu

SEQ ID NO: 772 - RNA, 2374 nt, Artificial Sequence
  mRNA product Design d-1 comprising derived and/or modified sequence from YFV__NC_002031.1__SSjev-prME-XX (polyprotein: aa122-788) (wt)
gggagacccgugacccggaaguuguacggcuacgcgacuuucccucccacaaacccucgcgcccuuccuuuccuacuugggcccggcagaaagcuuaccauggguaaacggagcgcuggcucaaucauguggcucgcgagcuuggcaguugucauagcuugugcaggagccgugaccuuggugcggaaaaacagaugguugcuccuaaaugugacaucugaggaccucgggaaaacauucucugugggcacaggcaacugcacaacaaacauuuuggaagccaaguacuggugcccagacucaauggaauacaacugucccaaucucaguccaagagaggagccagaugacauugauugcuggugcuaugggguggaaaacguuagagucgcauaugguaagugugacucagcaggcaggucuaggaggucaagaagggccauugacuugccuacgcaugaaaaccaugguuugaagacccggcaagaaaaauggaugacuggaagaaugggugaaaggcaacuccaaaagauugagagaugguucgugaggaaccccuuuuuugcagugacggcucugaccauugccuaccuugugggaagcaacaugacgcaacgagucgugauugcccuacuggucuuggcuguugguccggccuacucagcucacugcauuggaauuacugacagggauuucauugagggggugcauggaggaacuuggguuucagcuacccuggagcaagacaagugugucacuguuauggccccugacaagccuucauuggacaucucacuagagacaguagccauugauagaccugcugaggugaggaaaguguguuacaaugcaguucucacucaugugaagauuaaugacaagugccccagcacuggagaggcccaccuagcugaagagaacgaaggggacaaugcgugcaagcgcacuuauucugauagaggcuggggcaauggcuguggccuauuugggaaagggagcauuguggcaugcgccaaauucacuugugccaaauccaugaguuuguuugagguugaucagaccaaaauucaguaugucaucagagcacaauugcauguaggggccaagcaggaaaauuggaauaccgacauuaagacucucaaguuugaugcccugucaggcucccaggaagucgaguucauuggguauggaaaagcuacacuggaaugccaggugcaaacugcgguggacuuugguaacaguuacaucgcugagauggaaacagagagcuggauaguggacagacagugggcccaggacuugacccugccauggcagaguggaaguggcgggguguggagagagaugcaucaucuugucgaauuugaaccuccgcaugccgccacuaucagaguacuggcccugggaaaccaggaaggcuccuugaaaacagcucuuacuggcgcaaugaggguuacaaaggacacaaaugacaacaaccuuuacaaacuacaugguggacauguuucuugcagagugaaauugucagcuuugacacucaaggggacauccuacaaaauaugcacugacaaaauguuuuuugucaagaacccaacugacacuggccauggcacuguugugaugcaggugaaagugucaaaaggagcccccugcaggauuccagugauaguagcugaugaucuuacagcggcaaucaauaaaggcauuuugguuacaguuaaccccaucgccucaaccaaugaugaugaagugcugauugaggugaacccaccuuuuggagacagcuacauuaucguugggagaggagauucacgucucacuuaccaguggcacaaagagggaagcucaauaggaaaguuguucacucagaccaugaaaggcguggaacgccuggccgucaugggagacaccgccugggauuucagcuccgcuggaggguucuucacuucgguugggaaaggaauccauacgguguuuggcucugccuuucaggggcuauuuggcggcuugaacuggauaacaaaggucaucaugggggcgguacuuauauggguuggcaucaacacaagaaacaugacaauguccaugagcaugaucuugguaggagugaucaugauguuuuugucucuaggaguuggggcggaucaaggaugcgccaucaacuuuggcaaguaaggacuagucccuguucccagagcccacuuuuuuuucuuuuuuugaaauaaaauagccugucuuucagaucuaaaaaaaaaaaaaaaaaaaaaaaaaaaaaaaaaaaaaaaaaaaaaaaaaaaaaaaaaaaaaaaaugcaucccccccccccccccccccccccccccccccaaaggcucuuuucagagccaccagaauu

SEQ ID NO: 773 - RNA, 2344 nt, Artificial Sequence
  mRNA product Design d-1 comprising derived and/or modified sequence from YFV__NC_002031.1__SSjev-prME (polyprotein: aa122-778) (wt)
gggagacccgugacccggaaguuguacggcuacgcgacuuucccucccacaaacccucgcgcccuuccuuuccuacuugggcccggcagaaagcuuaccauggguaaacggagcgcuggcucaaucauguggcucgcgagcuuggcaguugucauagcuugugcaggagccgugaccuuggugcggaaaaacagaugguugcuccuaaaugugacaucugaggaccucgggaaaacauucucugugggcacaggcaacugcacaacaaacauuuuggaagccaaguacuggugcccagacucaauggaauacaacugucccaaucucaguccaagagaggagccagaugacauugauugcuggugcuaugggguggaaaacguuagagucgcauaugguaagugugacucagcaggcaggucuaggaggucaagaagggccauugacuugccuacgcaugaaaaccaugguuugaagacccggcaagaaaaauggaugacuggaagaaugggugaaaggcaacuccaaaagauugagagaugguucgugaggaaccccuuuuuugcagugacggcucugaccauugccuaccuugugggaagcaacaugacgcaacgagucgugauugcccuacuggucuuggcuguugguccggccuacucagcucacugcauuggaauuacugacagggauuucauugagggggugcauggaggaacuuggguuucagcuacccuggagcaagacaagugugucacuguuauggccccugacaagccuucauuggacaucucacuagagacaguagccauugauagaccugcugaggugaggaaaguguguuacaaugcaguucucacucaugugaagauuaaugacaagugccccagcacuggagaggcccaccuagcugaagagaacgaaggggacaaugcgugcaagcgcacuuauucugauagaggcuggggcaauggcuguggccuauuugggaaagggagcauuguggcaugcgccaaauucacuugugccaaauccaugaguuuguuugagguugaucagaccaaaauucaguaugucaucagagcacaauugcauguaggggccaagcaggaaaauuggaauaccgacauuaagacucucaaguuugaugcccugucaggcucccaggaagucgaguucauuggguauggaaaagcuacacuggaaugccaggugcaaacugcgguggacuuugguaacaguuacaucgcugagauggaaacagagagcuggauaguggacagacagugggcccaggacuugacccugccauggcagaguggaaguggcgggguguggagagagaugcaucaucuugucgaauuugaaccuccgcaugccgccacuaucagaguacuggcccugggaaaccaggaaggcuccuugaaaacagcucuuacuggcgcaaugaggguuacaaaggacacaaaugacaacaaccuuuacaaacuacaugguggacauguuucuugcagagugaaauugucagcuuugacacucaaggggacauccuacaaaauaugcacugacaaaauguuuuuugucaagaacccaacugacacuggccauggcacuguugugaugcaggugaaagugucaaaaggagcccccugcaggauuccagugauaguagcugaugaucuuacagcggcaaucaauaaaggcauuuugguuacaguuaaccccaucgccucaaccaaugaugaugaagugcugauugaggugaacccaccuuuuggagacagcuacauuaucguugggagaggagauucacgucucacuuaccaguggcacaaagagggaagcucaauaggaaaguuguucacucagaccaugaaaggcguggaacgccuggccgucaugggagacaccgccugggauuucagcuccgcuggaggguucuucacuucgguugggaaaggaauucauacgguguuuggcucugccuuucaggggcuauuuggcggcuugaacuggauaacaaaggucaucaugggggcgguacuuauauggguuggcaucaacacaagaaacaugacaauguccaugagcaugaucuugguaggagugaucaugauguuuuugucucuaggaguuggggcguaaggacuagucccuguucccagagcccacuuuuuuuucuuuuuuugaaauaaaauagccugucuuucagaucuaaaaaaaaaaaaaaaaaaaaaaaaaaaaaaaaaaaaaaaaaaaaaaaaaaaaaaaaaaaaaaaaugcaucccccccccccccccccccccccccccccccaaaggcucuuuucagagccaccagaauu

SEQ ID NO: 774 - RNA, 2392 nt, Artificial Sequence
  mRNA product Design d-1 comprising derived and/or modified sequence from YFV__NC_002031.1__X-SS-prME-XX (polyprotein: aa92-788) (opt1)
gggagacccgugacccggaaguuguacggcuacgcgacuuucccucccacaaacccucgcgcccuuccuuuccuacuugggcccggcagaaagcuuaccaugcggggccugagcucccgcaagcggcgcagccacgacgugcucaccguccaguuccugauccuggggaugcuccugaugaccggcggggugacgcuggugcggaagaaccgcuggcuccugcugaacgucaccuccgaggaccucggcaagaccuucagcguggggaccggcaacugcacgaccaacauccuggaggccaaguacuggugccccgacuccauggaguacaacugcccgaaccugagcccccgggaggagcccgacgacaucgacugcuggugcuacggcguggagaacguccgcguggccuacgggaagugcgacuccgcgggccggagccgccggucccgccgggccaucgaccuccccacccacgagaaccacgggcugaagacccgccaggagaaguggaugacgggccggaugggggagcgccagcugcagaagaucgagcggugguucgugcgcaacccguucuucgccgucaccgcccucaccaucgccuaccuggugggcagcaacaugacccagcggguggucaucgcgcugcucgugcuggccgugggccccgccuacuccgcccacugcaucgggaucacggaccgcgacuucaucgagggcguccacgggggcaccugggugagcgcgacccuggagcaggacaagugcgugaccgucauggcccccgacaagcccucccucgacaucagccuggagacgguggccaucgaccggccggccgaggugcgcaaggucugcuacaacgccgugcugacccacgugaagaucaacgacaagugccccuccaccggcgaggcgcaccucgccgaggagaacgagggggacaacgccugcaagcggaccuacagcgaccggggcugggggaacggcugcgggcuguucggcaagggcuccaucgucgccugcgccaaguucacgugcgcgaagagcaugucccuguucgagguggaccagaccaagauccaguacgucauccgcgcccagcuccacgugggggccaagcaggagaacuggaacaccgacaucaagacccugaaguucgacgcccugagcggcagccaggagguggaguucaucggguacggcaaggccacgcucgagugccagguccagaccgcgguggacuucgggaacuccuacaucgccgagauggagaccgagagcuggaucguggaccggcagugggcccaggaccugacccugcccuggcaguccggcagcggcggggucuggcgcgagaugcaccaccucguggaguucgagcccccgcacgccgccacgauccgggugcuggcgcugggcaaccaggaggggucccucaagaccgcccugaccggcgccaugcgcgucaccaaggacacgaacgacaacaaccuguacaagcuccacgggggccacgugagcugccgggugaagcuguccgcccugacccucaagggcaccagcuacaagaucugcaccgacaagauguucuucgucaagaaccccacggacaccgggcacggcaccguggugaugcaggucaagguguccaagggggcgcccugccgcaucccggugaucgucgccgacgaccugaccgccgccaucaacaagggcauccuggugaccgugaacccgaucgccagcacgaacgacgacgagguccucaucgaggugaacccccccuucggcgacuccuacaucaucguggggcggggcgacagccgccugaccuaccaguggcacaaggagggguccagcaucggcaagcuguucacccagaccaugaagggggucgagcggcuggcggugaugggcgacacggccugggacuucuccagcgccggcggguucuucaccuccgugggcaaggggauccacaccgucuucggcagcgccuuccaggggcucuucggcggccugaacuggaucaccaaggugaucaugggggccgugcugaucugggucggcaucaacacgcgcaacaugaccauguccaugagcaugauccucgugggggugaucaugauguuccugagccugggcgucggggcggaccagggcugcgccaucaacuucggcaagugaggacuagucccuguucccagagcccacuuuuuuuucuuuuuuugaaauaaaauagccugucuuucagaucuaaaaaaaaaaaaaaaaaaaaaaaaaaaaaaaaaaaaaaaaaaaaaaaaaaaaaaaaaaaaaaaaugcaucccccccccccccccccccccccccccccccaaaggcucuuuucagagccaccagaauu

SEQ ID NO: 775 - RNA, 2329 nt, Artificial Sequence
  mRNA product Design d-1 comprising derived and/or modified sequence from YFV__NC_002031.1__SS-prME (polyprotein: M,aa104-778) (opt1)
gggagacccgugacccggaaguuguacggcuacgcgacuuucccucccacaaacccucgcgcccuuccuuuccuacuugggcccggcagaaagcuuaccauggacgugcugaccguccaguuccucauccugggcaugcugcucaugaccgggggcgugacccugguccggaagaaccgcuggcuccugcugaacgugaccagcgaggaccucggcaagacguucuccguggggaccggcaacugcaccaccaacauccuggaggccaaguacuggugccccgacagcauggaguacaacugccccaaccuguccccgcgggaggagcccgacgacaucgacugcuggugcuacggggucgagaacgugcgcguggccuacggcaagugcgacagcgcggggcggucccgccggagccgccgggccaucgaccugcccacccacgagaaccacggccucaagacccggcaggagaaguggaugacggggcgcaugggcgagcggcagcugcagaagaucgagcgcugguucgugcggaacccguucuucgccgucaccgcgcugaccaucgccuaccucguggggagcaacaugacccagcgcguggucaucgcccugcuggugcucgccgugggccccgccuacuccgcgcacugcaucgggaucacggaccgggacuucaucgagggcguccacggcgggaccugggugagcgccacccuggagcaggacaagugcgugaccgucauggcccccgacaagcccucccuggacaucagccucgagacgguggccaucgaccgcccggcggaggugcggaaggucugcuacaacgccgugcugacccacgugaagaucaacgacaagugccccuccaccggcgaggcccaccuggccgaggagaacgagggggacaacgccugcaagcgcaccuacagcgaccggggcugggggaacggcugcggccucuucgggaagggcuccaucgucgcgugcgccaaguucacgugcgccaagagcaugucccuguucgagguggaccagaccaagauccaguacgugauccgcgcccagcugcacgucggggccaagcaggagaacuggaacaccgacaucaagacccucaaguucgacgcgcugagcggcucccaggagguggaguucaucggcuacgggaaggccacgcuggagugccaggugcagaccgccgucgacuucggcaacagcuacaucgccgagauggagaccgaguccuggaucguggaccggcagugggcccaggaccucacccugcccuggcagagcggguccggcgggguguggcgcgagaugcaccaccuggucgaguucgagcccccgcacgcggccacgauccgggugcucgcccugggcaaccaggagggcagccugaagaccgcccucaccggggccaugcgcgucaccaaggacacgaacgacaacaaccuguacaagcugcacggcgggcacguguccugccgggugaagcucagcgcgcugacccugaagggcaccuccuacaagaucugcaccgacaagauguucuucgucaagaaccccacggacaccgggcacggcaccguggugaugcaggucaaggugagcaagggcgcccccugccgcaucccggugaucgucgccgacgaccucaccgccgcgaucaacaaggggauccuggugacggugaaccccaucgccagcaccaacgacgacgagguccugaucgaggugaacccgcccuucggcgacuccuacaucaucguggggcggggcgacagccgccucaccuaccaguggcacaaggagggguccagcaucggcaagcuguucacccagacgaugaagggcgucgagcggcuggccgugaugggggacaccgccugggacuucuccagcgccggcggguucuucaccuccgugggcaagggcauccacaccgucuucgggagcgcguuccagggccucuucgggggccugaacuggaucaccaaggugaucaugggggccgugcugaucugggucggcaucaacacgcgcaacaugaccauguccaugagcaugauccucgugggcgugaucaugauguuccugucccugggggucggcgccugaggacuagucccuguucccagagcccacuuuuuuuucuuuuuuugaaauaaaauagccugucuuucagaucuaaaaaaaaaaaaaaaaaaaaaaaaaaaaaaaaaaaaaaaaaaaaaaaaaaaaaaaaaaaaaaaaugcaucccccccccccccccccccccccccccccccaaaggcucuuuucagagccaccagaauu

SEQ ID NO: 776 - RNA, 2356 nt, Artificial Sequence
  mRNA product Design d-1 comprising derived and/or modified sequence from YFV__NC_002031.1__SSIgE-prME-XX (polyprotein: aa122-788) (opt1)
gggagacccgugacccggaaguuguacggcuacgcgacuuucccucccacaaacccucgcgcccuuccuuuccuacuugggcccggcagaaagcuuaccauggacuggaccuggauccuguuccucguggccgccgcgacccgcguccacagcgugacgcuggugcggaagaaccgcuggcuccugcugaacgucaccuccgaggaccucggcaagaccuucagcguggggaccggcaacugcacgaccaacauccuggaggccaaguacuggugccccgacuccauggaguacaacugcccgaaccugagcccccgggaggagcccgacgacaucgacugcuggugcuacggcguggagaacguccgcguggccuacgggaagugcgacuccgcgggccggagccgccggucccgccgggccaucgaccuccccacccacgagaaccacgggcugaagacccgccaggagaaguggaugacgggccggaugggggagcgccagcugcagaagaucgagcggugguucgugcgcaacccguucuucgccgucaccgcccucaccaucgccuaccuggugggcagcaacaugacccagcggguggucaucgcgcugcucgugcuggccgugggccccgccuacuccgcccacugcaucgggaucacggaccgcgacuucaucgagggcguccacgggggcaccugggugagcgcgacccuggagcaggacaagugcgugaccgucauggcccccgacaagcccucccucgacaucagccuggagacgguggccaucgaccggccggccgaggugcgcaaggucugcuacaacgccgugcugacccacgugaagaucaacgacaagugccccuccaccggcgaggcgcaccucgccgaggagaacgagggggacaacgccugcaagcggaccuacagcgaccggggcugggggaacggcugcgggcuguucggcaagggcuccaucgucgccugcgccaaguucacgugcgcgaagagcaugucccuguucgagguggaccagaccaagauccaguacgucauccgcgcccagcuccacgugggggccaagcaggagaacuggaacaccgacaucaagacccugaaguucgacgcccugagcggcagccaggagguggaguucaucggguacggcaaggccacgcucgagugccagguccagaccgcgguggacuucgggaacuccuacaucgccgagauggagaccgagagcuggaucguggaccggcagugggcccaggaccugacccugcccuggcaguccggcagcggcggggucuggcgcgagaugcaccaccucguggaguucgagcccccgcacgccgccacgauccgggugcuggcgcugggcaaccaggaggggucccucaagaccgcccugaccggcgccaugcgcgucaccaaggacacgaacgacaacaaccuguacaagcuccacgggggccacgugagcugccgggugaagcuguccgcccugacccucaagggcaccagcuacaagaucugcaccgacaagauguucuucgucaagaaccccacggacaccgggcacggcaccguggugaugcaggucaagguguccaagggggcgcccugccgcaucccggugaucgucgccgacgaccugaccgccgccaucaacaagggcauccuggugaccgugaacccgaucgccagcacgaacgacgacgagguccucaucgaggugaacccccccuucggcgacuccuacaucaucguggggcggggcgacagccgccugaccuaccaguggcacaaggagggguccagcaucggcaagcuguucacccagaccaugaagggggucgagcggcuggcggugaugggcgacacggccugggacuucuccagcgccggcggguucuucaccuccgugggcaaggggauccacaccgucuucggcagcgccuuccaggggcucuucggcggccugaacuggaucaccaaggugaucaugggggccgugcugaucugggucggcaucaacacgcgcaacaugaccauguccaugagcaugauccucgugggggugaucaugauguuccugagccugggcgucggggcggaccagggcugcgccaucaacuucggcaagugaggacuagucccuguucccagagcccacuuuuuuuucuuuuuuugaaauaaaauagccugucuuucagaucuaaaaaaaaaaaaaaaaaaaaaaaaaaaaaaaaaaaaaaaaaaaaaaaaaaaaaaaaaaaaaaaaugcaucccccccccccccccccccccccccccccccaaaggcucuuuucagagccaccagaauu

SEQ ID NO: 777 - RNA, 2326 nt, Artificial Sequence
  mRNA product Design d-1 comprising derived and/or modified sequence from YFV__NC_002031.1__SSIgE-prME (polyprotein: aa122-778) (opt1)
gggagacccgugacccggaaguuguacggcuacgcgacuuucccucccacaaacccucgcgcccuuccuuuccuacuugggcccggcagaaagcuuaccauggacuggaccuggauccuguuccucguggccgccgcgacccgcguccacagcgugacccugguccgcaagaaccgguggcuccugcugaacgugaccagcgaggaccucggcaagacguucuccguggggaccggcaacugcaccaccaacauccuggaggccaaguacuggugccccgacagcauggaguacaacugcccgaaccuguccccgcgcgaggagcccgacgacaucgacugcuggugcuacggggucgagaacgugcggguggccuacggcaagugcgacagcgcggggcgcucccggcgcagccggcgcgccaucgaccuccccacgcacgagaaccacggccugaagacccggcaggagaaguggaugaccggccgcaugggggagcggcagcugcagaagaucgagcgcugguucguccggaaccccuucuucgccgugaccgcccucacgaucgccuaccuggugggcuccaacaugacccagcgcgucgugaucgcgcugcucgugcuggccgucgggcccgccuacagcgcccacugcaucggcaucaccgaccgggacuucaucgagggggugcacggcggcaccuggguguccgcgacgcuggagcaggacaagugcgucaccgugauggcccccgacaagcccagccucgacaucucccuggagaccguggccaucgaccgcccggccgagguccggaaggugugcuacaacgccgugcugacccacgucaagaucaacgacaagugccccagcacgggggaggcgcaccucgccgaggagaacgagggcgacaacgccugcaagcgcaccuacuccgaccggggguggggcaacggcugcgggcuguucggcaaggggagcaucguggccugcgccaaguucaccugcgcgaaguccaugagccuguucgagguggaccagaccaagauccaguacgucauccgcgcccagcuccacgugggcgccaagcaggagaacuggaacacggacaucaagacccugaaguucgacgcccuguccgggagccaggaggucgaguucaucggcuacggcaaggccacccucgagugccaggugcagaccgcgguggacuucgggaacuccuacaucgccgagauggagacggagagcuggaucgucgaccggcagugggcccaggaccugacccugcccuggcagagcggcuccgggggcguguggcgcgagaugcaccaccucguggaguucgagcccccgcacgccgccaccauccgcguccuggcgcuggggaaccaggagggcagccucaagaccgcccugacgggcgccaugcgggugaccaaggacaccaacgacaacaaccuguacaagcuccacgggggccacguguccugccgcgucaagcugagcgcccugacccucaaggggacguccuacaagaucugcaccgacaagauguucuucgugaagaaccccaccgacaccggccacgggacgguggucaugcaggugaaggugagcaagggcgcgcccugccggauccccgucaucguggccgacgaccugaccgccgccaucaacaagggcauccuggugaccgucaacccgaucgccuccaccaacgacgacgaggugcucaucgaggugaacccgcccuucggggacagcuacaucaucgucggccgcggggacucccggcugaccuaccaguggcacaaggagggcagcuccaucggcaagcuguucacgcagaccaugaaggggguggagcgccucgcggugaugggcgacaccgccugggacuucagcuccgccgggggcuucuucaccagcgucgggaagggcauccacacgguguucggcuccgccuuccaggggcuguucggcgggcugaacuggaucaccaaggugaucaugggcgccguccucaucuggguggggaucaacacccggaacaugaccaugagcauguccaugauccuggugggcgucaucaugauguuccugagccugggcgugggggcgugaggacuagucccuguucccagagcccacuuuuuuuucuuuuuuugaaauaaaauagccugucuuucagaucuaaaaaaaaaaaaaaaaaaaaaaaaaaaaaaaaaaaaaaaaaaaaaaaaaaaaaaaaaaaaaaaaugcaucccccccccccccccccccccccccccccccaaaggcucuuuucagagccaccagaauu

SEQ ID NO: 778 - RNA, 2374 nt, Artificial Sequence
  mRNA product Design d-1 comprising derived and/or modified sequence from YFV__NC_002031.1__SSjev-prME-XX (polyprotein: aa122-788) (opt1)
gggagacccgugacccggaaguuguacggcuacgcgacuuucccucccacaaacccucgcgcccuuccuuuccuacuugggcccggcagaaagcuuaccaugggcaagcgcagcgccggguccaucauguggcuggccagccucgcgguggucaucgccugcgccggcgccgugacgcuggugcggaagaaccgcuggcuccugcugaacgucaccuccgaggaccucggcaagaccuucagcguggggaccggcaacugcacgaccaacauccuggaggccaaguacuggugccccgacuccauggaguacaacugcccgaaccugagcccccgggaggagcccgacgacaucgacugcuggugcuacggcguggagaacguccgcguggccuacgggaagugcgacuccgcgggccggagccgccggucccgccgggccaucgaccuccccacccacgagaaccacgggcugaagacccgccaggagaaguggaugacgggccggaugggggagcgccagcugcagaagaucgagcggugguucgugcgcaacccguucuucgccgucaccgcccucaccaucgccuaccuggugggcagcaacaugacccagcggguggucaucgcgcugcucgugcuggccgugggccccgccuacuccgcccacugcaucgggaucacggaccgcgacuucaucgagggcguccacgggggcaccugggugagcgcgacccuggagcaggacaagugcgugaccgucauggcccccgacaagcccucccucgacaucagccuggagacgguggccaucgaccggccggccgaggugcgcaaggucugcuacaacgccgugcugacccacgugaagaucaacgacaagugccccuccaccggcgaggcgcaccucgccgaggagaacgagggggacaacgccugcaagcggaccuacagcgaccggggcugggggaacggcugcgggcuguucggcaagggcuccaucgucgccugcgccaaguucacgugcgcgaagagcaugucccuguucgagguggaccagaccaagauccaguacgucauccgcgcccagcuccacgugggggccaagcaggagaacuggaacaccgacaucaagacccugaaguucgacgcccugagcggcagccaggagguggaguucaucggguacggcaaggccacgcucgagugccagguccagaccgcgguggacuucgggaacuccuacaucgccgagauggagaccgagagcuggaucguggaccggcagugggcccaggaccugacccugcccuggcaguccggcagcggcggggucuggcgcgagaugcaccaccucguggaguucgagcccccgcacgccgccacgauccgggugcuggcgcugggcaaccaggaggggucccucaagaccgcccugaccggcgccaugcgcgucaccaaggacacgaacgacaacaaccuguacaagcuccacgggggccacgugagcugccgggugaagcuguccgcccugacccucaagggcaccagcuacaagaucugcaccgacaagauguucuucgucaagaaccccacggacaccgggcacggcaccguggugaugcaggucaagguguccaagggggcgcccugccgcaucccggugaucgucgccgacgaccugaccgccgccaucaacaagggcauccuggugaccgugaacccgaucgccagcacgaacgacgacgagguccucaucgaggugaacccccccuucggcgacuccuacaucaucguggggcggggcgacagccgccugaccuaccaguggcacaaggagggguccagcaucggcaagcuguucacccagaccaugaagggggucgagcggcuggcggugaugggcgacacggccugggacuucuccagcgccggcggguucuucaccuccgugggcaaggggauccacaccgucuucggcagcgccuuccaggggcucuucggcggccugaacuggaucaccaaggugaucaugggggccgugcugaucugggucggcaucaacacgcgcaacaugaccauguccaugagcaugauccucgugggggugaucaugauguuccugagccugggcgucggggcggaccagggcugcgccaucaacuucggcaagugaggacuagucccuguucccagagcccacuuuuuuuucuuuuuuugaaauaaaauagccugucuuucagaucuaaaaaaaaaaaaaaaaaaaaaaaaaaaaaaaaaaaaaaaaaaaaaaaaaaaaaaaaaaaaaaaaugcaucccccccccccccccccccccccccccccccaaaggcucuuuucagagccaccagaauu

SEQ ID NO: 779 - RNA, 2344 nt, Artificial Sequence
  mRNA product Design d-1 comprising derived and/or modified sequence from YFV__NC_002031.1__SSjev-prME (polyprotein: aa122-778) (opt1)
gggagacccgugacccggaaguuguacggcuacgcgacuuucccucccacaaacccucgcgcccuuccuuuccuacuugggcccggcagaaagcuuaccaugggcaagcgcagcgccggguccaucauguggcuggccagccucgcgguggucaucgccugcgccggcgccgugacccugguccgcaagaaccgguggcuccugcugaacgugaccagcgaggaccucggcaagacguucuccguggggaccggcaacugcaccaccaacauccuggaggccaaguacuggugccccgacagcauggaguacaacugcccgaaccuguccccgcgcgaggagcccgacgacaucgacugcuggugcuacggggucgagaacgugcggguggccuacggcaagugcgacagcgcggggcgcucccggcgcagccggcgcgccaucgaccuccccacgcacgagaaccacggccugaagacccggcaggagaaguggaugaccggccgcaugggggagcggcagcugcagaagaucgagcgcugguucguccggaaccccuucuucgccgugaccgcccucacgaucgccuaccuggugggcuccaacaugacccagcgcgucgugaucgcgcugcucgugcuggccgucgggcccgccuacagcgcccacugcaucggcaucaccgaccgggacuucaucgagggggugcacggcggcaccuggguguccgcgacgcuggagcaggacaagugcgucaccgugauggcccccgacaagcccagccucgacaucucccuggagaccguggccaucgaccgcccggccgagguccggaaggugugcuacaacgccgugcugacccacgucaagaucaacgacaagugccccagcacgggggaggcgcaccucgccgaggagaacgagggcgacaacgccugcaagcgcaccuacuccgaccggggguggggcaacggcugcgggcuguucggcaaggggagcaucguggccugcgccaaguucaccugcgcgaaguccaugagccuguucgagguggaccagaccaagauccaguacgucauccgcgcccagcuccacgugggcgccaagcaggagaacuggaacacggacaucaagacccugaaguucgacgcccuguccgggagccaggaggucgaguucaucggcuacggcaaggccacccucgagugccaggugcagaccgcgguggacuucgggaacuccuacaucgccgagauggagacggagagcuggaucgucgaccggcagugggcccaggaccugacccugcccuggcagagcggcuccgggggcguguggcgcgagaugcaccaccucguggaguucgagcccccgcacgccgccaccauccgcguccuggcgcuggggaaccaggagggcagccucaagaccgcccugacgggcgccaugcgggugaccaaggacaccaacgacaacaaccuguacaagcuccacgggggccacguguccugccgcgucaagcugagcgcccugacccucaaggggacguccuacaagaucugcaccgacaagauguucuucgugaagaaccccaccgacaccggccacgggacgguggucaugcaggugaaggugagcaagggcgcgcccugccggauccccgucaucguggccgacgaccugaccgccgccaucaacaagggcauccuggugaccgucaacccgaucgccuccaccaacgacgacgaggugcucaucgaggugaacccgcccuucggggacagcuacaucaucgucggccgcggggacucccggcugaccuaccaguggcacaaggagggcagcuccaucggcaagcuguucacgcagaccaugaaggggguggagcgccucgcggugaugggcgacaccgccugggacuucagcuccgccgggggcuucuucaccagcgucgggaagggcauccacacgguguucggcuccgccuuccaggggcuguucggcgggcugaacuggaucaccaaggugaucaugggcgccguccucaucuggguggggaucaacacccggaacaugaccaugagcauguccaugauccuggugggcgucaucaugauguuccugagccugggcgugggggcgugaggacuagucccuguucccagagcccacuuuuuuuucuuuuuuugaaauaaaauagccugucuuucagaucuaaaaaaaaaaaaaaaaaaaaaaaaaaaaaaaaaaaaaaaaaaaaaaaaaaaaaaaaaaaaaaaaugcaucccccccccccccccccccccccccccccccaaaggcucuuuucagagccaccagaauu

SEQ ID NO: 780 - RNA, 2392 nt, Artificial Sequence
  mRNA product Design d-1 comprising derived and/or modified sequence from YFV__NC_002031.1__X-SS-prME-XX (polyprotein: aa92-788) (opt1)
gggagacccgugacccggaaguuguacggcuacgcgacuuucccucccacaaacccucgcgcccuuccuuuccuacuugggcccggcagaaagcuuaccaugcggggccugagcucccgcaagcggcgcagccacgacgugcucaccguccaguuccugauccuggggaugcuccugaugaccggcggggugacgcuggugcggaagaaccgcuggcuccugcugaacgucaccuccgaggaccucggcaagaccuucagcguggggaccggcaacugcacgaccaacauccuggaggccaaguacuggugccccgacuccauggaguacaacugcccgaaccugagcccccgggaggagcccgacgacaucgacugcuggugcuacggcguggagaacguccgcguggccuacgggaagugcgacuccgcgggccggagccgccggucccgccgggccaucgaccuccccacccacgagaaccacgggcugaagacccgccaggagaaguggaugacgggccggaugggggagcgccagcugcagaagaucgagcggugguucgugcgcaacccguucuucgccgucaccgcccucaccaucgccuaccuggugggcagcaacaugacccagcggguggucaucgcgcugcucgugcuggccgugggccccgccuacuccgcccacugcaucgggaucacggaccgcgacuucaucgagggcguccacgggggcaccugggugagcgcgacccuggagcaggacaagugcgugaccgucauggcccccgacaagcccucccucgacaucagccuggagacgguggccaucgaccggccggccgaggugcgcaaggucugcuacaacgccgugcugacccacgugaagaucaacgacaagugccccuccaccggcgaggcgcaccucgccgaggagaacgagggggacaacgccugcaagcggaccuacagcgaccggggcugggggaacggcugcgggcuguucggcaagggcuccaucgucgccugcgccaaguucacgugcgcgaaguccaugagccuguucgagguggaccagaccaagauccaguacgucauccgcgcccagcuccacgugggggccaagcaggagaacuggaacaccgacaucaagacccugaaguucgacgcccugagcggcagccaggagguggaguucaucggguacggcaaggccacgcucgagugccagguccagaccgcgguggacuucgggaacuccuacaucgccgagauggagaccgagagcuggaucguggaccggcagugggcccaggaccugacccugcccuggcaguccggcagcggcggggucuggcgcgagaugcaccaccucguggaguucgagcccccgcacgccgccacgauccgggugcuggcgcugggcaaccaggaggggucccucaagaccgcccugaccggcgccaugcgcgucaccaaggacacgaacgacaacaaccuguacaagcuccacgggggccacgugagcugccgggugaagcuguccgcccugacccucaagggcaccagcuacaagaucugcaccgacaagauguucuucgucaagaaccccacggacaccgggcacggcaccguggugaugcaggucaagguguccaagggggcgcccugccgcaucccggugaucgucgccgacgaccugaccgccgccaucaacaagggcauccuggugaccgugaacccgaucgccagcacgaacgacgacgagguccucaucgaggugaacccccccuucggcgacuccuacaucaucguggggcggggcgacagccgccugaccuaccaguggcacaaggagggguccagcaucggcaagcuguucacccagaccaugaagggggucgagcggcuggcggugaugggcgacacggccugggacuucuccagcgccggcggguucuucaccuccgugggcaaggggauccacaccgucuucggcagcgccuuccaggggcuguucggcggccucaacuggaucaccaaggugaucaugggggccgugcugaucugggucggcaucaacacgcgcaacaugaccauguccaugagcaugauccucgugggggugaucaugauguuccugagccugggcgucggggcggaccagggcugcgccaucaacuucggcaagugaggacuagucccuguucccagagcccacuuuuuuuucuuuuuuugaaauaaaauagccugucuuucagaucuaaaaaaaaaaaaaaaaaaaaaaaaaaaaaaaaaaaaaaaaaaaaaaaaaaaaaaaaaaaaaaaaugcaucccccccccccccccccccccccccccccccaaaggcucuuuucagagccaccagaauu

SEQ ID NO: 781 - RNA, 2329 nt, Artificial Sequence
  mRNA product Design d-1 comprising derived and/or modified sequence from YFV__NC_002031.1__SS-prME (polyprotein: M,aa104-778) (opt1)
gggagacccgugacccggaaguuguacggcuacgcgacuuucccucccacaaacccucgcgcccuuccuuuccuacuugggcccggcagaaagcuuaccauggacgugcucaccguccaguuccugauccuggggaugcuccugaugaccggcggggugacgcuggugcggaagaaccgcuggcuccugcugaacgucaccuccgaggaccucggcaagaccuucagcguggggaccggcaacugcacgaccaacauccuggaggccaaguacuggugccccgacuccauggaguacaacugcccgaaccugagcccccgggaggagcccgacgacaucgacugcuggugcuacggcguggagaacguccgcguggccuacgggaagugcgacuccgcgggccggagccgccggucccgccgggccaucgaccuccccacccacgagaaccacgggcugaagacccgccaggagaaguggaugacgggccggaugggggagcgccagcugcagaagaucgagcggugguucgugcgcaacccguucuucgccgucaccgcccucaccaucgccuaccuggugggcagcaacaugacccagcggguggucaucgcgcugcucgugcuggccgugggccccgccuacuccgcccacugcaucgggaucacggaccgcgacuucaucgagggcguccacgggggcaccugggugagcgcgacccuggagcaggacaagugcgugaccgucauggcccccgacaagcccucccucgacaucagccuggagacgguggccaucgaccggccggccgaggugcgcaaggucugcuacaacgccgugcugacccacgugaagaucaacgacaagugccccuccaccggcgaggcgcaccucgccgaggagaacgagggggacaacgccugcaagcggaccuacagcgaccggggcugggggaacggcugcgggcuguucggcaagggcuccaucgucgccugcgccaaguucacgugcgcgaaguccaugagccuguucgagguggaccagaccaagauccaguacgucauccgcgcccagcuccacgugggggccaagcaggagaacuggaacaccgacaucaagacccugaaguucgacgcccugagcggcagccaggagguggaguucaucggguacggcaaggccacgcucgagugccagguccagaccgcgguggacuucgggaacuccuacaucgccgagauggagaccgagagcuggaucguggaccggcagugggcccaggaccugacccugcccuggcaguccggcagcggcggggucuggcgcgagaugcaccaccucguggaguucgagcccccgcacgccgccacgauccgggugcuggcgcugggcaaccaggaggggucccucaagaccgcccugaccggcgccaugcgcgucaccaaggacacgaacgacaacaaccuguacaagcuccacgggggccacgugagcugccgggugaagcuguccgcccugacccucaagggcaccagcuacaagaucugcaccgacaagauguucuucgucaagaaccccacggacaccgggcacggcaccguggugaugcaggucaagguguccaagggggcgcccugccgcaucccggugaucgucgccgacgaccugaccgccgccaucaacaagggcauccuggugaccgugaacccgaucgccagcacgaacgacgacgagguccucaucgaggugaacccccccuucggcgacuccuacaucaucguggggcggggcgacagccgccugaccuaccaguggcacaaggagggguccagcaucggcaagcuguucacccagaccaugaagggggucgagcggcuggcggugaugggcgacacggccugggacuucuccagcgccggcggguucuucaccuccgugggcaaggggauccacaccgucuucggcagcgccuuccaggggcuguucggcggccucaacuggaucaccaaggugaucaugggggccgugcugaucugggucggcaucaacacgcgcaacaugaccauguccaugagcaugauccucgugggggugaucaugauguuccugagccugggcgucggggcgugaggacuagucccuguucccagagcccacuuuuuuuucuuuuuuugaaauaaaauagccugucuuucagaucuaaaaaaaaaaaaaaaaaaaaaaaaaaaaaaaaaaaaaaaaaaaaaaaaaaaaaaaaaaaaaaaaugcaucccccccccccccccccccccccccccccccaaaggcucuuuucagagccaccagaauu

SEQ ID NO: 782 - RNA, 2356 nt, Artificial Sequence
  mRNA product Design d-1 comprising derived and/or modified sequence from YFV__NC_002031.1__SSIgE-prME-XX (polyprotein: aa122-788) (opt1)
gggagacccgugacccggaaguuguacggcuacgcgacuuucccucccacaaacccucgcgcccuuccuuuccuacuugggcccggcagaaagcuuaccauggacuggaccuggauccuguuccucguggccgccgcgacccgcguccacagcgugacgcuggugcggaagaaccgcuggcuccugcugaacgucaccuccgaggaccucggcaagaccuucagcguggggaccggcaacugcacgaccaacauccuggaggccaaguacuggugccccgacuccauggaguacaacugcccgaaccugagcccccgggaggagcccgacgacaucgacugcuggugcuacggcguggagaacguccgcguggccuacgggaagugcgacuccgcgggccggagccgccggucccgccgggccaucgaccuccccacccacgagaaccacgggcugaagacccgccaggagaaguggaugacgggccggaugggggagcgccagcugcagaagaucgagcggugguucgugcgcaacccguucuucgccgucaccgcccucaccaucgccuaccuggugggcagcaacaugacccagcggguggucaucgcgcugcucgugcuggccgugggccccgccuacuccgcccacugcaucgggaucacggaccgcgacuucaucgagggcguccacgggggcaccugggugagcgcgacccuggagcaggacaagugcgugaccgucauggcccccgacaagcccucccucgacaucagccuggagacgguggccaucgaccggccggccgaggugcgcaaggucugcuacaacgccgugcugacccacgugaagaucaacgacaagugccccuccaccggcgaggcgcaccucgccgaggagaacgagggggacaacgccugcaagcggaccuacagcgaccggggcugggggaacggcugcgggcuguucggcaagggcuccaucgucgccugcgccaaguucacgugcgcgaaguccaugagccuguucgagguggaccagaccaagauccaguacgucauccgcgcccagcuccacgugggggccaagcaggagaacuggaacaccgacaucaagacccugaaguucgacgcccugagcggcagccaggagguggaguucaucggguacggcaaggccacgcucgagugccagguccagaccgcgguggacuucgggaacuccuacaucgccgagauggagaccgagagcuggaucguggaccggcagugggcccaggaccugacccugcccuggcaguccggcagcggcggggucuggcgcgagaugcaccaccucguggaguucgagcccccgcacgccgccacgauccgggugcuggcgcugggcaaccaggaggggucccucaagaccgcccugaccggcgccaugcgcgucaccaaggacacgaacgacaacaaccuguacaagcuccacgggggccacgugagcugccgggugaagcuguccgcccugacccucaagggcaccagcuacaagaucugcaccgacaagauguucuucgucaagaaccccacggacaccgggcacggcaccguggugaugcaggucaagguguccaagggggcgcccugccgcaucccggugaucgucgccgacgaccugaccgccgccaucaacaagggcauccuggugaccgugaacccgaucgccagcacgaacgacgacgagguccucaucgaggugaacccccccuucggcgacuccuacaucaucguggggcggggcgacagccgccugaccuaccaguggcacaaggagggguccagcaucggcaagcuguucacccagaccaugaagggggucgagcggcuggcggugaugggcgacacggccugggacuucuccagcgccggcggguucuucaccuccgugggcaaggggauccacaccgucuucggcagcgccuuccaggggcuguucggcggccucaacuggaucaccaaggugaucaugggggccgugcugaucugggucggcaucaacacgcgcaacaugaccauguccaugagcaugauccucgugggggugaucaugauguuccugagccugggcgucggggcggaccagggcugcgccaucaacuucggcaagugaggacuagucccuguucccagagcccacuuuuuuuucuuuuuuugaaauaaaauagccugucuuucagaucuaaaaaaaaaaaaaaaaaaaaaaaaaaaaaaaaaaaaaaaaaaaaaaaaaaaaaaaaaaaaaaaaugcaucccccccccccccccccccccccccccccccaaaggcucuuuucagagccaccagaauu

SEQ ID NO: 783 - RNA, 2326 nt, Artificial Sequence
  mRNA product Design d-1 comprising derived and/or modified sequence from YFV__NC_002031.1__SSIgE-prME (polyprotein: aa122-778) (opt1)
gggagacccgugacccggaaguuguacggcuacgcgacuuucccucccacaaacccucgcgcccuuccuuuccuacuugggcccggcagaaagcuuaccauggacuggaccuggauccuguuccucguggccgccgcgacccgcguccacagcgugacgcuggugcggaagaaccgcuggcuccugcugaacgucaccuccgaggaccucggcaagaccuucagcguggggaccggcaacugcacgaccaacauccuggaggccaaguacuggugccccgacuccauggaguacaacugcccgaaccugagcccccgggaggagcccgacgacaucgacugcuggugcuacggcguggagaacguccgcguggccuacgggaagugcgacuccgcgggccggagccgccggucccgccgggccaucgaccuccccacccacgagaaccacgggcugaagacccgccaggagaaguggaugacgggccggaugggggagcgccagcugcagaagaucgagcggugguucgugcgcaacccguucuucgccgucaccgcccucaccaucgccuaccuggugggcagcaacaugacccagcggguggucaucgcgcugcucgugcuggccgugggccccgccuacuccgcccacugcaucgggaucacggaccgcgacuucaucgagggcguccacgggggcaccugggugagcgcgacccuggagcaggacaagugcgugaccgucauggcccccgacaagcccucccucgacaucagccuggagacgguggccaucgaccggccggccgaggugcgcaaggucugcuacaacgccgugcugacccacgugaagaucaacgacaagugccccuccaccggcgaggcgcaccucgccgaggagaacgagggggacaacgccugcaagcggaccuacagcgaccggggcugggggaacggcugcgggcuguucggcaagggcuccaucgucgccugcgccaaguucacgugcgcgaaguccaugagccuguucgagguggaccagaccaagauccaguacgucauccgcgcccagcuccacgugggggccaagcaggagaacuggaacaccgacaucaagacccugaaguucgacgcccugagcggcagccaggagguggaguucaucggguacggcaaggccacgcucgagugccagguccagaccgcgguggacuucgggaacuccuacaucgccgagauggagaccgagagcuggaucguggaccggcagugggcccaggaccugacccugcccuggcaguccggcagcggcggggucuggcgcgagaugcaccaccucguggaguucgagcccccgcacgccgccacgauccgggugcuggcgcugggcaaccaggaggggucccucaagaccgcccugaccggcgccaugcgcgucaccaaggacacgaacgacaacaaccuguacaagcuccacgggggccacgugagcugccgggugaagcuguccgcccugacccucaagggcaccagcuacaagaucugcaccgacaagauguucuucgucaagaaccccacggacaccgggcacggcaccguggugaugcaggucaagguguccaagggggcgcccugccgcaucccggugaucgucgccgacgaccugaccgccgccaucaacaagggcauccuggugaccgugaacccgaucgccagcacgaacgacgacgagguccucaucgaggugaacccccccuucggcgacuccuacaucaucguggggcggggcgacagccgccugaccuaccaguggcacaaggagggguccagcaucggcaagcuguucacccagaccaugaagggggucgagcggcuggcggugaugggcgacacggccugggacuucuccagcgccggcggguucuucaccuccgugggcaaggggauccacaccgucuucggcagcgccuuccaggggcuguucggcggccucaacuggaucaccaaggugaucaugggggccgugcugaucugggucggcaucaacacgcgcaacaugaccauguccaugagcaugauccucgugggggugaucaugauguuccugagccugggcgucggggcgugaggacuagucccuguucccagagcccacuuuuuuuucuuuuuuugaaauaaaauagccugucuuucagaucuaaaaaaaaaaaaaaaaaaaaaaaaaaaaaaaaaaaaaaaaaaaaaaaaaaaaaaaaaaaaaaaaugcaucccccccccccccccccccccccccccccccaaaggcucuuuucagagccaccagaauu

SEQ ID NO: 784 - RNA, 2374 nt, Artificial Sequence
  mRNA product Design d-1 comprising derived and/or modified sequence from YFV__NC_002031.1__SSjev-prME-XX (polyprotein: aa122-788) (opt1)
gggagacccgugacccggaaguuguacggcuacgcgacuuucccucccacaaacccucgcgcccuuccuuuccuacuugggcccggcagaaagcuuaccaugggcaagcgcagcgccggguccaucauguggcuggccagccucgcgguggucaucgccugcgccggcgccgugacgcuggugcggaagaaccgcuggcuccugcugaacgucaccuccgaggaccucggcaagaccuucagcguggggaccggcaacugcacgaccaacauccuggaggccaaguacuggugccccgacuccauggaguacaacugcccgaaccugagcccccgggaggagcccgacgacaucgacugcuggugcuacggcguggagaacguccgcguggccuacgggaagugcgacuccgcgggccggagccgccggucccgccgggccaucgaccuccccacccacgagaaccacgggcugaagacccgccaggagaaguggaugacgggccggaugggggagcgccagcugcagaagaucgagcggugguucgugcgcaacccguucuucgccgucaccgcccucaccaucgccuaccuggugggcagcaacaugacccagcggguggucaucgcgcugcucgugcuggccgugggccccgccuacuccgcccacugcaucgggaucacggaccgcgacuucaucgagggcguccacgggggcaccugggugagcgcgacccuggagcaggacaagugcgugaccgucauggcccccgacaagcccucccucgacaucagccuggagacgguggccaucgaccggccggccgaggugcgcaaggucugcuacaacgccgugcugacccacgugaagaucaacgacaagugccccuccaccggcgaggcgcaccucgccgaggagaacgagggggacaacgccugcaagcggaccuacagcgaccggggcugggggaacggcugcgggcuguucggcaagggcuccaucgucgccugcgccaaguucacgugcgcgaaguccaugagccuguucgagguggaccagaccaagauccaguacgucauccgcgcccagcuccacgugggggccaagcaggagaacuggaacaccgacaucaagacccugaaguucgacgcccugagcggcagccaggagguggaguucaucggguacggcaaggccacgcucgagugccagguccagaccgcgguggacuucgggaacuccuacaucgccgagauggagaccgagagcuggaucguggaccggcagugggcccaggaccugacccugcccuggcaguccggcagcggcggggucuggcgcgagaugcaccaccucguggaguucgagcccccgcacgccgccacgauccgggugcuggcgcugggcaaccaggaggggucccucaagaccgcccugaccggcgccaugcgcgucaccaaggacacgaacgacaacaaccuguacaagcuccacgggggccacgugagcugccgggugaagcuguccgcccugacccucaagggcaccagcuacaagaucugcaccgacaagauguucuucgucaagaaccccacggacaccgggcacggcaccguggugaugcaggucaagguguccaagggggcgcccugccgcaucccggugaucgucgccgacgaccugaccgccgccaucaacaagggcauccuggugaccgugaacccgaucgccagcacgaacgacgacgagguccucaucgaggugaacccccccuucggcgacuccuacaucaucguggggcggggcgacagccgccugaccuaccaguggcacaaggagggguccagcaucggcaagcuguucacccagaccaugaagggggucgagcggcuggcggugaugggcgacacggccugggacuucuccagcgccggcggguucuucaccuccgugggcaaggggauccacaccgucuucggcagcgccuuccaggggcuguucggcggccucaacuggaucaccaaggugaucaugggggccgugcugaucugggucggcaucaacacgcgcaacaugaccauguccaugagcaugauccucgugggggugaucaugauguuccugagccugggcgucggggcggaccagggcugcgccaucaacuucggcaagugaggacuagucccuguucccagagcccacuuuuuuuucuuuuuuugaaauaaaauagccugucuuucagaucuaaaaaaaaaaaaaaaaaaaaaaaaaaaaaaaaaaaaaaaaaaaaaaaaaaaaaaaaaaaaaaaaugcaucccccccccccccccccccccccccccccccaaaggcucuuuucagagccaccagaauu

SEQ ID NO: 785 - RNA, 2344 nt, Artificial Sequence
  mRNA product Design d-1 comprising derived and/or modified sequence from YFV__NC_002031.1__SSjev-prME (polyprotein: aa122-778) (opt1)
gggagacccgugacccggaaguuguacggcuacgcgacuuucccucccacaaacccucgcgcccuuccuuuccuacuugggcccggcagaaagcuuaccaugggcaagcgcagcgccggguccaucauguggcuggccagccucgcgguggucaucgccugcgccggcgccgugacgcuggugcggaagaaccgcuggcuccugcugaacgucaccuccgaggaccucggcaagaccuucagcguggggaccggcaacugcacgaccaacauccuggaggccaaguacuggugccccgacuccauggaguacaacugcccgaaccugagcccccgggaggagcccgacgacaucgacugcuggugcuacggcguggagaacguccgcguggccuacgggaagugcgacuccgcgggccggagccgccggucccgccgggccaucgaccuccccacccacgagaaccacgggcugaagacccgccaggagaaguggaugacgggccggaugggggagcgccagcugcagaagaucgagcggugguucgugcgcaacccguucuucgccgucaccgcccucaccaucgccuaccuggugggcagcaacaugacccagcggguggucaucgcgcugcucgugcuggccgugggccccgccuacuccgcccacugcaucgggaucacggaccgcgacuucaucgagggcguccacgggggcaccugggugagcgcgacccuggagcaggacaagugcgugaccgucauggcccccgacaagcccucccucgacaucagccuggagacgguggccaucgaccggccggccgaggugcgcaaggucugcuacaacgccgugcugacccacgugaagaucaacgacaagugccccuccaccggcgaggcgcaccucgccgaggagaacgagggggacaacgccugcaagcggaccuacagcgaccggggcugggggaacggcugcgggcuguucggcaagggcuccaucgucgccugcgccaaguucacgugcgcgaaguccaugagccuguucgagguggaccagaccaagauccaguacgucauccgcgcccagcuccacgugggggccaagcaggagaacuggaacaccgacaucaagacccugaaguucgacgcccugagcggcagccaggagguggaguucaucggguacggcaaggccacgcucgagugccagguccagaccgcgguggacuucgggaacuccuacaucgccgagauggagaccgagagcuggaucguggaccggcagugggcccaggaccugacccugcccuggcaguccggcagcggcggggucuggcgcgagaugcaccaccucguggaguucgagcccccgcacgccgccacgauccgggugcuggcgcugggcaaccaggaggggucccucaagaccgcccugaccggcgccaugcgcgucaccaaggacacgaacgacaacaaccuguacaagcuccacgggggccacgugagcugccgggugaagcuguccgcccugacccucaagggcaccagcuacaagaucugcaccgacaagauguucuucgucaagaaccccacggacaccgggcacggcaccguggugaugcaggucaagguguccaagggggcgcccugccgcaucccggugaucgucgccgacgaccugaccgccgccaucaacaagggcauccuggugaccgugaacccgaucgccagcacgaacgacgacgagguccucaucgaggugaacccccccuucggcgacuccuacaucaucguggggcggggcgacagccgccugaccuaccaguggcacaaggagggguccagcaucggcaagcuguucacccagaccaugaagggggucgagcggcuggcggugaugggcgacacggccugggacuucuccagcgccggcggguucuucaccuccgugggcaaggggauccacaccgucuucggcagcgccuuccaggggcuguucggcggccucaacuggaucaccaaggugaucaugggggccgugcugaucugggucggcaucaacacgcgcaacaugaccauguccaugagcaugauccucgugggggugaucaugauguuccugagccugggcgucggggcgugaggacuagucccuguucccagagcccacuuuuuuuucuuuuuuugaaauaaaauagccugucuuucagaucuaaaaaaaaaaaaaaaaaaaaaaaaaaaaaaaaaaaaaaaaaaaaaaaaaaaaaaaaaaaaaaaaugcaucccccccccccccccccccccccccccccccaaaggcucuuuucagagccaccagaauu

SEQ ID NO: 786 - RNA, 2392 nt, Artificial Sequence
  mRNA product Design d-1 comprising derived and/or modified sequence from YFV__NC_002031.1__X-SS-prME-XX (polyprotein: aa92-788) (opt1)
gggagacccgugacccggaaguuguacggcuacgcgacuuucccucccacaaacccucgcgcccuuccuuuccuacuugggcccggcagaaagcuuaccaugcgcggccugagcucccggaagcgccggagccacgacgugcucaccguccaguuccugauccuggggaugcuccugaugaccggcggggugacgcuggugcgcaagaaccgguggcuccugcugaacgucaccuccgaggaccucggcaagaccuucagcguggggaccggcaacugcacgaccaacauccuggaggccaaguacuggugccccgacuccauggaguacaacugccccaaccugagcccccgcgaggagcccgacgacaucgacugcuggugcuacggcguggagaacguccggguggccuacgggaagugcgacuccgcgggccgcagccggcgcucccggcgcgccaucgaccuccccacccacgagaaccacgggcugaagacccggcaggagaaguggaugacgggccgcaugggggagcggcagcugcagaagaucgagcgcugguucgugcggaacccguucuucgccgucaccgcccucaccaucgccuaccuggugggcagcaacaugacccagcgcguggucaucgcgcugcucgugcuggccgugggccccgccuacuccgcccacugcaucgggaucacggaccgggacuucaucgagggcguccacgggggcaccugggugagcgcgacccuggagcaggacaagugcgugaccgucauggcccccgacaagcccucccucgacaucagccuggagacgguggccaucgaccgcccggccgaggugcggaaggucugcuacaacgccgugcugacccacgugaagaucaacgacaagugccccuccaccggcgaggcgcaccucgccgaggagaacgagggggacaacgccugcaagcgcaccuacagcgaccgcggcugggggaacggcugcgggcuguucggcaagggcuccaucgucgccugcgccaaguucacgugcgccaagagcaugucccuguucgagguggaccagaccaagauccaguacgucauccgggcgcagcuccacgugggggccaagcaggagaacuggaacaccgacaucaagacccugaaguucgacgcccugagcggcagccaggagguggaguucaucggguacggcaaggccacgcucgagugccagguccagaccgcgguggacuucgggaacuccuacaucgccgagauggagaccgagagcuggaucguggaccgccagugggcccaggaccugacccugcccuggcaguccggcagcggcggggucuggcgggagaugcaccaccucguggaguucgagcccccgcacgccgccacgauccgcgugcuggcgcugggcaaccaggaggggucccucaagaccgcccugaccggcgccaugcgggucaccaaggacacgaacgacaacaaccuguacaagcuccacgggggccacgugagcugccgcgugaagcuguccgcccugacccucaagggcaccagcuacaagaucugcaccgacaagauguucuucgucaagaaccccacggacaccgggcacggcaccguggugaugcaggucaagguguccaagggggcgcccugccggauccccgugaucgucgccgacgaccugaccgccgccaucaacaagggcauccuggugaccgugaacccgaucgccagcacgaacgacgacgagguccucaucgaggugaacccgcccuucggcgacuccuacaucaucguggggcgcggcgacagccggcugaccuaccaguggcacaaggagggguccagcaucggcaagcuguucacccagaccaugaagggggucgagcgccucgcggugaugggcgacacggccugggacuucuccagcgccggcggguucuucaccuccgugggcaaggggauccacaccgucuucggcagcgccuuccaggggcuguucggcggccugaacuggaucaccaaggugaucaugggggccgugcugaucugggucggcaucaacacgcggaacaugaccauguccaugagcaugauccucgugggggugaucaugauguuccugagccugggcgucggggcggaccagggcugcgccaucaacuucggcaagugaggacuagucccuguucccagagcccacuuuuuuuucuuuuuuugaaauaaaauagccugucuuucagaucuaaaaaaaaaaaaaaaaaaaaaaaaaaaaaaaaaaaaaaaaaaaaaaaaaaaaaaaaaaaaaaaaugcaucccccccccccccccccccccccccccccccaaaggcucuuuucagagccaccagaauu

SEQ ID NO: 787 - RNA, 2329 nt, Artificial Sequence
  mRNA product Design d-1 comprising derived and/or modified sequence from YFV__NC_002031.1__SS-prME (polyprotein: M,aa104-778) (opt1)
gggagacccgugacccggaaguuguacggcuacgcgacuuucccucccacaaacccucgcgcccuuccuuuccuacuugggcccggcagaaagcuuaccauggacgugcugaccguccaguuccucauccugggcaugcugcucaugaccgggggcgugacgcuggugcgcaagaaccgguggcugcuccugaacgucaccagcgaggaccuggggaagaccuucuccgugggcaccgggaacugcacgaccaacauccucgaggccaaguacuggugccccgacagcauggaguacaacugccccaaccugagcccccgcgaggagcccgacgacaucgacugcuggugcuacggcguggagaacguccggguggccuacggcaagugcgacuccgcggggcgcucccggcgcagccggcgcgccaucgaccugcccacccacgagaaccacggccucaagacccggcaggagaaguggaugacggggcgcaugggcgagcggcagcugcagaagaucgagcgcugguucgugcggaacccguucuucgccgucaccgcccugaccaucgccuaccucgugggguccaacaugacccagcgcguggucaucgcgcugcuggugcucgccgugggccccgccuacagcgcccacugcaucggcaucacggaccgggacuucaucgaggggguccacggcgggaccuggguguccgcgacccuggagcaggacaagugcgugaccgucauggcccccgacaagcccagccuggacaucucccucgagacgguggccaucgaccgcccggccgaggugcggaaggucugcuacaacgccgugcugacccacgugaagaucaacgacaagugccccagcaccggcgaggcgcaccuggccgaggagaacgagggcgacaacgccugcaagcgcaccuacuccgaccggggguggggcaacgggugcggccucuucgggaagggcagcaucgucgccugcgccaaguucacgugcgcgaaguccaugagccuguucgagguggaccagaccaagauccaguacgucauccgcgcccagcugcacgugggcgccaagcaggagaacuggaacaccgacaucaagacccucaaguucgacgcccuguccgggagccaggagguggaguucaucggcuacgggaaggccacgcuggagugccagguccagaccgcgguggacuucggcaacuccuacaucgccgagauggagaccgagagcuggaucguggaccggcagugggcccaggaccucacccugcccuggcagagcggguccggcggcgucuggcgcgagaugcaccaccugguggaguucgagcccccgcacgccgccacgauccgcgugcucgcgcuggggaaccaggagggcagccugaagaccgcccucaccggggccaugcgggucaccaaggacacgaacgacaacaaccuguacaagcugcacggcgggcacguguccugccgcgugaagcucagcgcccugacccugaagggcaccuccuacaagaucugcaccgacaagauguucuucgucaagaaccccacggacaccggccacgggaccguggugaugcaggucaaggugagcaagggcgcgcccugccggauccccgugaucgucgccgacgaccucaccgccgccaucaacaaggggauccuggugaccgugaacccgaucgccuccacgaacgacgacgagguccugaucgaggugaacccgcccuucggcgacagcuacaucaucgugggccgcggggacucccggcucaccuaccaguggcacaaggagggcagcuccaucgggaagcuguucacccagaccaugaagggcgucgagcgccuggcggugaugggggacacggccugggacuucagcuccgccggcggcuucuucaccagcguggggaagggcauccacaccgucuucggguccgccuuccagggccucuucgggggccugaacuggaucaccaaggugaucaugggcgccgugcugaucugggucgggaucaacacgcggaacaugaccaugagcauguccaugauccuggugggcgugaucaugauguuccucagccugggggucggcgcgugaggacuagucccuguucccagagcccacuuuuuuuucuuuuuuugaaauaaaauagccugucuuucagaucuaaaaaaaaaaaaaaaaaaaaaaaaaaaaaaaaaaaaaaaaaaaaaaaaaaaaaaaaaaaaaaaaugcaucccccccccccccccccccccccccccccccaaaggcucuuuucagagccaccagaauu

SEQ ID NO: 788 - RNA, 2356 nt, Artificial Sequence
  mRNA product Design d-1 comprising derived and/or modified sequence from YFV__NC_002031.1__SSIgE-prME-XX (polyprotein: aa122-788) (opt1)
gggagacccgugacccggaaguuguacggcuacgcgacuuucccucccacaaacccucgcgcccuuccuuuccuacuugggcccggcagaaagcuuaccauggacuggaccuggauccuguuccucguggccgccgcgacccgcguccacagcgugacgcuggugcggaagaaccgcuggcugcuccugaacgucaccuccgaggaccugggcaagaccuucagcguggggaccggcaacugcacgaccaacauccucgaggccaaguacuggugccccgacuccauggaguacaacugccccaaccugagcccccgggaggagcccgacgacaucgacugcuggugcuacgggguggagaacguccgcguggccuacggcaagugcgacuccgccgggcggagccgccggucccgccgggccaucgaccugcccacccacgagaaccacggccucaagacccgccaggagaaguggaugacgggccggaugggggagcgccagcugcagaagaucgagcggugguucgugcgcaacccguucuucgcggucaccgcccugaccaucgccuaccucgugggcagcaacaugacccagcggguggucaucgcccugcuggugcucgcgguggggcccgccuacuccgcccacugcaucggcaucacggaccgcgacuucaucgaggggguccacggcggcaccugggugagcgccacccuggagcaggacaagugcgugaccgucauggcccccgacaagcccucccuggacaucagccucgagacgguggcgaucgaccggccggccgaggugcgcaaggucugcuacaacgccgugcugacccacgugaagaucaacgacaagugccccuccaccggggaggcccaccuggccgaggagaacgagggcgacaacgcgugcaagcggaccuacagcgaccgcggguggggcaacggcugcggccucuucgggaagggguccaucgucgccugcgccaaguucacgugcgccaagagcaugucccuguucgagguggaccagaccaagauccaguacgucauccgggcccagcugcacgugggcgcgaagcaggagaacuggaacaccgacaucaagacccucaaguucgacgcccugagcgggucccaggagguggaguucaucggcuacggcaaggccacgcuggagugccagguccagaccgccguggacuucgggaacagcuacaucgccgagauggagaccgagagcuggaucguggaccgccagugggcgcaggaccucacccugcccuggcaguccggcagcgggggcgucuggcgcgagaugcaccaccugguggaguucgagcccccgcacgccgccacgauccgggugcucgcccuggggaaccaggagggcucccugaagaccgcgcucaccggcgccaugcgcgucaccaaggacacgaacgacaacaaccuguacaagcugcacgggggccacgugagcugccgggugaagcucuccgcccugacccugaaggggaccagcuacaagaucugcaccgacaagauguucuucgucaagaaccccacggacaccggccacgggaccguggugaugcaggucaagguguccaagggcgcccccugccgcauccccgugaucgucgccgacgaccucaccgcggccaucaacaagggcauccuggugaccgugaacccgaucgccagcacgaacgacgacgagguccugaucgaggugaacccgcccuucggggacuccuacaucaucgugggccgcggggacagccggcucaccuaccaguggcacaaggagggcuccagcaucggcaagcuguucacccagaccaugaagggggucgagcggcuggccgugaugggcgacacggccugggacuucuccagcgccgggggcuucuucaccuccguggggaagggcauccacaccgucuucggcagcgcguuccaggggcuguucggcgggcucaacuggaucaccaaggugaucaugggcgccgugcugaucugggucgggaucaacacgcgcaacaugaccauguccaugagcaugauccucgugggcgugaucaugauguuccugucccugggcgucggggccgaccagggcugcgccaucaacuucgggaagugaggacuagucccuguucccagagcccacuuuuuuuucuuuuuuugaaauaaaauagccugucuuucagaucuaaaaaaaaaaaaaaaaaaaaaaaaaaaaaaaaaaaaaaaaaaaaaaaaaaaaaaaaaaaaaaaaugcaucccccccccccccccccccccccccccccccaaaggcucuuuucagagccaccagaauu

SEQ ID NO: 789 - RNA, 2326 nt, Artificial Sequence
  mRNA product Design d-1 comprising derived and/or modified sequence from YFV__NC_002031.1__SSIgE-prME (polyprotein: aa122-778) (opt1)
gggagacccgugacccggaaguuguacggcuacgcgacuuucccucccacaaacccucgcgcccuuccuuuccuacuugggcccggcagaaagcuuaccauggacuggaccuggauccuguuccucguggccgccgcgacccgcguccacagcgugacgcuggugcggaagaaccgcuggcugcuccugaacgucaccuccgaggaccugggcaagaccuucagcguggggaccggcaacugcacgaccaacauccucgaggccaaguacuggugccccgacuccauggaguacaacugccccaaccugagcccccgggaggagcccgacgacaucgacugcuggugcuacgggguggagaacguccgcguggccuacggcaagugcgacuccgccgggcggagccgccggucccgccgggccaucgaccugcccacccacgagaaccacggccucaagacccgccaggagaaguggaugacgggccggaugggggagcgccagcugcagaagaucgagcggugguucgugcgcaacccguucuucgcggucaccgcccugaccaucgccuaccucgugggcagcaacaugacccagcggguggucaucgcccugcuggugcucgcgguggggcccgccuacuccgcccacugcaucggcaucacggaccgcgacuucaucgaggggguccacggcggcaccugggugagcgccacccuggagcaggacaagugcgugaccgucauggcccccgacaagcccucccuggacaucagccucgagacgguggcgaucgaccggccggccgaggugcgcaaggucugcuacaacgccgugcugacccacgugaagaucaacgacaagugccccuccaccggggaggcccaccuggccgaggagaacgagggcgacaacgcgugcaagcggaccuacagcgaccgcggguggggcaacggcugcggccucuucgggaagggguccaucgucgccugcgccaaguucacgugcgccaagagcaugucccuguucgagguggaccagaccaagauccaguacgucauccgggcccagcugcacgugggcgcgaagcaggagaacuggaacaccgacaucaagacccucaaguucgacgcccugagcgggucccaggagguggaguucaucggcuacggcaaggccacgcuggagugccagguccagaccgccguggacuucgggaacagcuacaucgccgagauggagaccgagagcuggaucguggaccgccagugggcgcaggaccucacccugcccuggcaguccggcagcgggggcgucuggcgcgagaugcaccaccugguggaguucgagcccccgcacgccgccacgauccgggugcucgcccuggggaaccaggagggcucccugaagaccgcgcucaccggcgccaugcgcgucaccaaggacacgaacgacaacaaccuguacaagcugcacgggggccacgugagcugccgggugaagcucuccgcccugacccugaaggggaccagcuacaagaucugcaccgacaagauguucuucgucaagaaccccacggacaccggccacgggaccguggugaugcaggucaagguguccaagggcgcccccugccgcauccccgugaucgucgccgacgaccucaccgcggccaucaacaagggcauccuggugaccgugaacccgaucgccagcacgaacgacgacgagguccugaucgaggugaacccgcccuucggggacuccuacaucaucgugggccgcggggacagccggcucaccuaccaguggcacaaggagggcuccagcaucggcaagcuguucacccagaccaugaagggggucgagcggcuggccgugaugggcgacacggccugggacuucuccagcgccgggggcuucuucaccuccguggggaagggcauccacaccgucuucggcagcgcguuccaggggcuguucggcgggcucaacuggaucaccaaggugaucaugggcgccgugcugaucugggucgggaucaacacgcgcaacaugaccauguccaugagcaugauccucgugggcgugaucaugauguuccugucccugggcgucggggccugaggacuagucccuguucccagagcccacuuuuuuuucuuuuuuugaaauaaaauagccugucuuucagaucuaaaaaaaaaaaaaaaaaaaaaaaaaaaaaaaaaaaaaaaaaaaaaaaaaaaaaaaaaaaaaaaaugcaucccccccccccccccccccccccccccccccaaaggcucuuuucagagccaccagaauu

SEQ ID NO: 790 - RNA, 2374 nt, Artificial Sequence
  mRNA product Design d-1 comprising derived and/or modified sequence from YFV__NC_002031.1__SSjev-prME-XX (polyprotein: aa122-788) (opt1)
gggagacccgugacccggaaguuguacggcuacgcgacuuucccucccacaaacccucgcgcccuuccuuuccuacuugggcccggcagaaagcuuaccaugggcaagcgcagcgccggguccaucauguggcuggccagccucgcgguggucaucgccugcgccggcgccgugacccuggugcggaagaaccgcuggcugcuccugaacgucaccuccgaggaccuggggaagacguucagcgugggcaccgggaacugcaccaccaacauccucgaggccaaguacuggugccccgacuccauggaguacaacugccccaaccugagcccccgggaggagcccgacgacaucgacugcuggugcuacggcguggagaacguccgcguggcguacggcaagugcgacuccgccgggcggagccgccggucccgccgggccaucgaccugcccacgcacgagaaccacggccucaagacccgccaggagaaguggaugaccgggcggaugggcgagcgccagcugcagaagaucgagcggugguucgugcgcaacccguucuucgccgucaccgcgcugacgaucgccuaccucguggggagcaacaugacccagcggguggucaucgcccugcuggugcucgccgugggccccgccuacuccgcgcacugcaucggcaucaccgaccgcgacuucaucgaggggguccacggcgggaccugggugagcgccacgcuggagcaggacaagugcgugaccgucauggcccccgacaagcccucccuggacaucagccucgagaccguggccaucgaccggccggccgaggugcgcaaggucugcuacaacgcggugcugacccacgugaagaucaacgacaagugccccuccacgggcgaggcccaccuggccgaggagaacgagggcgacaacgccugcaagcggaccuacagcgaccgcggguggggcaacgggugcggccucuucgggaagggcuccaucgucgccugcgcgaaguucacgugcgccaagagcaugucccuguucgagguggaccagaccaagauccaguacgucauccgggcccagcugcacgugggcgccaagcaggagaacuggaacaccgacaucaagacccucaaguucgacgcccugagcgggagccaggagguggaguucaucggcuacgggaaggcgacccuggagugccagguccagaccgccguggacuucggcaacuccuacaucgccgagauggagacggagagcuggaucguggaccgccagugggcccaggaccucacccugcccuggcaguccgggagcggcggcgucuggcgcgagaugcaccaccugguggaguucgagcccccgcacgcggccaccauccgggugcucgcccuggggaaccaggagggcucccugaagaccgcccucacgggggccaugcgcgucaccaaggacaccaacgacaacaaccuguacaagcugcacggcgggcacgugagcugccgggugaagcucuccgcgcugacccugaagggcacgagcuacaagaucugcaccgacaagauguucuucgucaagaaccccaccgacaccggccacgggacgguggugaugcaggucaagguguccaagggcgcccccugccgcauccccgugaucgucgccgacgaccucaccgccgccaucaacaaggggauccuggugaccgugaacccgaucgcgagcaccaacgacgacgagguccugaucgaggugaacccgcccuucggcgacuccuacaucaucgugggccgcggggacagccggcucaccuaccaguggcacaaggagggcuccagcaucgggaagcuguucacgcagaccaugaagggcgucgagcggcuggccgugaugggggacaccgccugggacuucuccagcgccggcggcuucuucaccuccguggggaagggcauccacacggucuucgggagcgccuuccagggccucuucgggggccugaacuggaucaccaaggugaucaugggcgcggugcugaucugggucgggaucaacacccgcaacaugaccauguccaugagcaugauccucgugggcgugaucaugauguuccugagccugggggucggcgccgaccaggggugcgccaucaacuucggcaagugaggacuagucccuguucccagagcccacuuuuuuuucuuuuuuugaaauaaaauagccugucuuucagaucuaaaaaaaaaaaaaaaaaaaaaaaaaaaaaaaaaaaaaaaaaaaaaaaaaaaaaaaaaaaaaaaaugcaucccccccccccccccccccccccccccccccaaaggcucuuuucagagccaccagaauu

SEQ ID NO: 791 - RNA, 2344 nt, Artificial Sequence
  mRNA product Design d-1 comprising derived and/or modified sequence from YFV__NC_002031.1__SSjev-prME (polyprotein: aa122-778) (opt1)
gggagacccgugacccggaaguuguacggcuacgcgacuuucccucccacaaacccucgcgcccuuccuuuccuacuugggcccggcagaaagcuuaccaugggcaagcgcagcgccggguccaucauguggcuggccagccucgcgguggucaucgccugcgccggcgccgugacccuggugcggaagaaccgcuggcugcuccugaacgucaccuccgaggaccuggggaagacguucagcgugggcaccgggaacugcaccaccaacauccucgaggccaaguacuggugccccgacuccauggaguacaacugccccaaccugagcccccgggaggagcccgacgacaucgacugcuggugcuacggcguggagaacguccgcguggcguacggcaagugcgacuccgccgggcggagccgccggucccgccgggccaucgaccugcccacgcacgagaaccacggccucaagacccgccaggagaaguggaugaccgggcggaugggcgagcgccagcugcagaagaucgagcggugguucgugcgcaacccguucuucgccgucaccgcgcugacgaucgccuaccucguggggagcaacaugacccagcggguggucaucgcccugcuggugcucgccgugggccccgccuacuccgcgcacugcaucggcaucaccgaccgcgacuucaucgaggggguccacggcgggaccugggugagcgccacgcuggagcaggacaagugcgugaccgucauggcccccgacaagcccucccuggacaucagccucgagaccguggccaucgaccggccggccgaggugcgcaaggucugcuacaacgcggugcugacccacgugaagaucaacgacaagugccccuccacgggcgaggcccaccuggccgaggagaacgagggcgacaacgccugcaagcggaccuacagcgaccgcggguggggcaacgggugcggccucuucgggaagggcuccaucgucgccugcgcgaaguucacgugcgccaagagcaugucccuguucgagguggaccagaccaagauccaguacgucauccgggcccagcugcacgugggcgccaagcaggagaacuggaacaccgacaucaagacccucaaguucgacgcccugagcgggagccaggagguggaguucaucggcuacgggaaggcgacccuggagugccagguccagaccgccguggacuucggcaacuccuacaucgccgagauggagacggagagcuggaucguggaccgccagugggcccaggaccucacccugcccuggcaguccgggagcggcggcgucuggcgcgagaugcaccaccugguggaguucgagcccccgcacgcggccaccauccgggugcucgcccuggggaaccaggagggcucccugaagaccgcccucacgggggccaugcgcgucaccaaggacaccaacgacaacaaccuguacaagcugcacggcgggcacgugagcugccgggugaagcucuccgcgcugacccugaagggcacgagcuacaagaucugcaccgacaagauguucuucgucaagaaccccaccgacaccggccacgggacgguggugaugcaggucaagguguccaagggcgcccccugccgcauccccgugaucgucgccgacgaccucaccgccgccaucaacaaggggauccuggugaccgugaacccgaucgcgagcaccaacgacgacgagguccugaucgaggugaacccgcccuucggcgacuccuacaucaucgugggccgcggggacagccggcucaccuaccaguggcacaaggagggcuccagcaucgggaagcuguucacgcagaccaugaagggcgucgagcggcuggccgugaugggggacaccgccugggacuucuccagcgccggcggcuucuucaccuccguggggaagggcauccacacggucuucgggagcgccuuccagggccucuucgggggccugaacuggaucaccaaggugaucaugggcgcggugcugaucugggucgggaucaacacccgcaacaugaccauguccaugagcaugauccucgugggcgugaucaugauguuccugagccugggggucggcgccugaggacuagucccuguucccagagcccacuuuuuuuucuuuuuuugaaauaaaauagccugucuuucagaucuaaaaaaaaaaaaaaaaaaaaaaaaaaaaaaaaaaaaaaaaaaaaaaaaaaaaaaaaaaaaaaaaugcaucccccccccccccccccccccccccccccccaaaggcucuuuucagagccaccagaauu

SEQ ID NO: 792 - RNA, 2392 nt, Artificial Sequence
  mRNA product Design d-1 comprising derived and/or modified sequence from YFV__NC_002031.1__X-SS-prME-XX (polyprotein: aa92-788) (opt2)
gggagacccgugacccggaaguuguacggcuacgcgacuuucccucccacaaacccucgcgcccuuccuuuccuacuugggcccggcagaaagcuuaccaugcgcggccucuccucccgcaagcgccgcucccacgacguccucaccguccaguuccucauccucggcaugcuccucaugaccggcggcgucacccucguccgcaagaaccgcuggcuccuccucaacgucaccuccgaggaccucggcaagaccuucuccgucggcaccggcaacugcaccaccaacauccucgaggccaaguacuggugccccgacuccauggaguacaacugccccaaccucuccccccgcgaggagcccgacgacaucgacugcuggugcuacggcgucgagaacguccgcgucgccuacggcaagugcgacuccgccggccgcucccgccgcucccgccgcgccaucgaccuccccacccacgagaaccacggccucaagacccgccaggagaaguggaugaccggccgcaugggcgagcgccagcuccagaagaucgagcgcugguucguccgcaaccccuucuucgccgucaccgcccucaccaucgccuaccucgucggcuccaacaugacccagcgcgucgucaucgcccuccucguccucgccgucggccccgccuacuccgcccacugcaucggcaucaccgaccgcgacuucaucgagggcguccacggcggcaccugggucuccgccacccucgagcaggacaagugcgucaccgucauggcccccgacaagcccucccucgacaucucccucgagaccgucgccaucgaccgccccgccgagguccgcaaggucugcuacaacgccguccucacccacgucaagaucaacgacaagugccccuccaccggcgaggcccaccucgccgaggagaacgagggcgacaacgccugcaagcgcaccuacuccgaccgcggcuggggcaacggcugcggccucuucggcaagggcuccaucgucgccugcgccaaguucaccugcgccaaguccaugucccucuucgaggucgaccagaccaagauccaguacgucauccgcgcccagcuccacgucggcgccaagcaggagaacuggaacaccgacaucaagacccucaaguucgacgcccucuccggcucccaggaggucgaguucaucggcuacggcaaggccacccucgagugccagguccagaccgccgucgacuucggcaacuccuacaucgccgagauggagaccgaguccuggaucgucgaccgccagugggcccaggaccucacccuccccuggcaguccggcuccggcggcgucuggcgcgagaugcaccaccucgucgaguucgagcccccccacgccgccaccauccgcguccucgcccucggcaaccaggagggcucccucaagaccgcccucaccggcgccaugcgcgucaccaaggacaccaacgacaacaaccucuacaagcuccacggcggccacgucuccugccgcgucaagcucuccgcccucacccucaagggcaccuccuacaagaucugcaccgacaagauguucuucgucaagaaccccaccgacaccggccacggcaccgucgucaugcaggucaaggucuccaagggcgcccccugccgcauccccgucaucgucgccgacgaccucaccgccgccaucaacaagggcauccucgucaccgucaaccccaucgccuccaccaacgacgacgagguccucaucgaggucaacccccccuucggcgacuccuacaucaucgucggccgcggcgacucccgccucaccuaccaguggcacaaggagggcuccuccaucggcaagcucuucacccagaccaugaagggcgucgagcgccucgccgucaugggcgacaccgccugggacuucuccuccgccggcggcuucuucaccuccgucggcaagggcauccacaccgucuucggcuccgccuuccagggccucuucggcggccucaacuggaucaccaaggucaucaugggcgccguccucaucugggucggcaucaacacccgcaacaugaccauguccauguccaugauccucgucggcgucaucaugauguuccucucccucggcgucggcgccgaccagggcugcgccaucaacuucggcaagugaggacuagucccuguucccagagcccacuuuuuuuucuuuuuuugaaauaaaauagccugucuuucagaucuaaaaaaaaaaaaaaaaaaaaaaaaaaaaaaaaaaaaaaaaaaaaaaaaaaaaaaaaaaaaaaaaugcaucccccccccccccccccccccccccccccccaaaggcucuuuucagagccaccagaauu

SEQ ID NO: 793 - RNA, 2329 nt, Artificial Sequence
  mRNA product Design d-1 comprising derived and/or modified sequence from YFV__NC_002031.1__SS-prME (polyprotein: M,aa104-778) (opt2)
gggagacccgugacccggaaguuguacggcuacgcgacuuucccucccacaaacccucgcgcccuuccuuuccuacuugggcccggcagaaagcuuaccauggacguccucaccguccaguuccucauccucggcaugcuccucaugaccggcggcgucacccucguccgcaagaaccgcuggcuccuccucaacgucaccuccgaggaccucggcaagaccuucuccgucggcaccggcaacugcaccaccaacauccucgaggccaaguacuggugccccgacuccauggaguacaacugccccaaccucuccccccgcgaggagcccgacgacaucgacugcuggugcuacggcgucgagaacguccgcgucgccuacggcaagugcgacuccgccggccgcucccgccgcucccgccgcgccaucgaccuccccacccacgagaaccacggccucaagacccgccaggagaaguggaugaccggccgcaugggcgagcgccagcuccagaagaucgagcgcugguucguccgcaaccccuucuucgccgucaccgcccucaccaucgccuaccucgucggcuccaacaugacccagcgcgucgucaucgcccuccucguccucgccgucggccccgccuacuccgcccacugcaucggcaucaccgaccgcgacuucaucgagggcguccacggcggcaccugggucuccgccacccucgagcaggacaagugcgucaccgucauggcccccgacaagcccucccucgacaucucccucgagaccgucgccaucgaccgccccgccgagguccgcaaggucugcuacaacgccguccucacccacgucaagaucaacgacaagugccccuccaccggcgaggcccaccucgccgaggagaacgagggcgacaacgccugcaagcgcaccuacuccgaccgcggcuggggcaacggcugcggccucuucggcaagggcuccaucgucgccugcgccaaguucaccugcgccaaguccaugucccucuucgaggucgaccagaccaagauccaguacgucauccgcgcccagcuccacgucggcgccaagcaggagaacuggaacaccgacaucaagacccucaaguucgacgcccucuccggcucccaggaggucgaguucaucggcuacggcaaggccacccucgagugccagguccagaccgccgucgacuucggcaacuccuacaucgccgagauggagaccgaguccuggaucgucgaccgccagugggcccaggaccucacccuccccuggcaguccggcuccggcggcgucuggcgcgagaugcaccaccucgucgaguucgagcccccccacgccgccaccauccgcguccucgcccucggcaaccaggagggcucccucaagaccgcccucaccggcgccaugcgcgucaccaaggacaccaacgacaacaaccucuacaagcuccacggcggccacgucuccugccgcgucaagcucuccgcccucacccucaagggcaccuccuacaagaucugcaccgacaagauguucuucgucaagaaccccaccgacaccggccacggcaccgucgucaugcaggucaaggucuccaagggcgcccccugccgcauccccgucaucgucgccgacgaccucaccgccgccaucaacaagggcauccucgucaccgucaaccccaucgccuccaccaacgacgacgagguccucaucgaggucaacccccccuucggcgacuccuacaucaucgucggccgcggcgacucccgccucaccuaccaguggcacaaggagggcuccuccaucggcaagcucuucacccagaccaugaagggcgucgagcgccucgccgucaugggcgacaccgccugggacuucuccuccgccggcggcuucuucaccuccgucggcaagggcauccacaccgucuucggcuccgccuuccagggccucuucggcggccucaacuggaucaccaaggucaucaugggcgccguccucaucugggucggcaucaacacccgcaacaugaccauguccauguccaugauccucgucggcgucaucaugauguuccucucccucggcgucggcgccugaggacuagucccuguucccagagcccacuuuuuuuucuuuuuuugaaauaaaauagccugucuuucagaucuaaaaaaaaaaaaaaaaaaaaaaaaaaaaaaaaaaaaaaaaaaaaaaaaaaaaaaaaaaaaaaaaugcaucccccccccccccccccccccccccccccccaaaggcucuuuucagagccaccagaauu

SEQ ID NO: 794 - RNA, 2356 nt, Artificial Sequence
  mRNA product Design d-1 comprising derived and/or modified sequence from YFV__NC_002031.1__SSIgE-prME-XX (polyprotein: aa122-788) (opt2)
gggagacccgugacccggaaguuguacggcuacgcgacuuucccucccacaaacccucgcgcccuuccuuuccuacuugggcccggcagaaagcuuaccauggacuggaccuggauccucuuccucgucgccgccgccacccgcguccacuccgucacccucguccgcaagaaccgcuggcuccuccucaacgucaccuccgaggaccucggcaagaccuucuccgucggcaccggcaacugcaccaccaacauccucgaggccaaguacuggugccccgacuccauggaguacaacugccccaaccucuccccccgcgaggagcccgacgacaucgacugcuggugcuacggcgucgagaacguccgcgucgccuacggcaagugcgacuccgccggccgcucccgccgcucccgccgcgccaucgaccuccccacccacgagaaccacggccucaagacccgccaggagaaguggaugaccggccgcaugggcgagcgccagcuccagaagaucgagcgcugguucguccgcaaccccuucuucgccgucaccgcccucaccaucgccuaccucgucggcuccaacaugacccagcgcgucgucaucgcccuccucguccucgccgucggccccgccuacuccgcccacugcaucggcaucaccgaccgcgacuucaucgagggcguccacggcggcaccugggucuccgccacccucgagcaggacaagugcgucaccgucauggcccccgacaagcccucccucgacaucucccucgagaccgucgccaucgaccgccccgccgagguccgcaaggucugcuacaacgccguccucacccacgucaagaucaacgacaagugccccuccaccggcgaggcccaccucgccgaggagaacgagggcgacaacgccugcaagcgcaccuacuccgaccgcggcuggggcaacggcugcggccucuucggcaagggcuccaucgucgccugcgccaaguucaccugcgccaaguccaugucccucuucgaggucgaccagaccaagauccaguacgucauccgcgcccagcuccacgucggcgccaagcaggagaacuggaacaccgacaucaagacccucaaguucgacgcccucuccggcucccaggaggucgaguucaucggcuacggcaaggccacccucgagugccagguccagaccgccgucgacuucggcaacuccuacaucgccgagauggagaccgaguccuggaucgucgaccgccagugggcccaggaccucacccuccccuggcaguccggcuccggcggcgucuggcgcgagaugcaccaccucgucgaguucgagcccccccacgccgccaccauccgcguccucgcccucggcaaccaggagggcucccucaagaccgcccucaccggcgccaugcgcgucaccaaggacaccaacgacaacaaccucuacaagcuccacggcggccacgucuccugccgcgucaagcucuccgcccucacccucaagggcaccuccuacaagaucugcaccgacaagauguucuucgucaagaaccccaccgacaccggccacggcaccgucgucaugcaggucaaggucuccaagggcgcccccugccgcauccccgucaucgucgccgacgaccucaccgccgccaucaacaagggcauccucgucaccgucaaccccaucgccuccaccaacgacgacgagguccucaucgaggucaacccccccuucggcgacuccuacaucaucgucggccgcggcgacucccgccucaccuaccaguggcacaaggagggcuccuccaucggcaagcucuucacccagaccaugaagggcgucgagcgccucgccgucaugggcgacaccgccugggacuucuccuccgccggcggcuucuucaccuccgucggcaagggcauccacaccgucuucggcuccgccuuccagggccucuucggcggccucaacuggaucaccaaggucaucaugggcgccguccucaucugggucggcaucaacacccgcaacaugaccauguccauguccaugauccucgucggcgucaucaugauguuccucucccucggcgucggcgccgaccagggcugcgccaucaacuucggcaagugaggacuagucccuguucccagagcccacuuuuuuuucuuuuuuugaaauaaaauagccugucuuucagaucuaaaaaaaaaaaaaaaaaaaaaaaaaaaaaaaaaaaaaaaaaaaaaaaaaaaaaaaaaaaaaaaaugcaucccccccccccccccccccccccccccccccaaaggcucuuuucagagccaccagaauu

SEQ ID NO: 795 - RNA, 2326 nt, Artificial Sequence
  mRNA product Design d-1 comprising derived and/or modified sequence from YFV__NC_002031.1__SSIgE-prME (polyprotein: aa122-778) (opt2)
gggagacccgugacccggaaguuguacggcuacgcgacuuucccucccacaaacccucgcgcccuuccuuuccuacuugggcccggcagaaagcuuaccauggacuggaccuggauccucuuccucgucgccgccgccacccgcguccacuccgucacccucguccgcaagaaccgcuggcuccuccucaacgucaccuccgaggaccucggcaagaccuucuccgucggcaccggcaacugcaccaccaacauccucgaggccaaguacuggugccccgacuccauggaguacaacugccccaaccucuccccccgcgaggagcccgacgacaucgacugcuggugcuacggcgucgagaacguccgcgucgccuacggcaagugcgacuccgccggccgcucccgccgcucccgccgcgccaucgaccuccccacccacgagaaccacggccucaagacccgccaggagaaguggaugaccggccgcaugggcgagcgccagcuccagaagaucgagcgcugguucguccgcaaccccuucuucgccgucaccgcccucaccaucgccuaccucgucggcuccaacaugacccagcgcgucgucaucgcccuccucguccucgccgucggccccgccuacuccgcccacugcaucggcaucaccgaccgcgacuucaucgagggcguccacggcggcaccugggucuccgccacccucgagcaggacaagugcgucaccgucauggcccccgacaagcccucccucgacaucucccucgagaccgucgccaucgaccgccccgccgagguccgcaaggucugcuacaacgccguccucacccacgucaagaucaacgacaagugccccuccaccggcgaggcccaccucgccgaggagaacgagggcgacaacgccugcaagcgcaccuacuccgaccgcggcuggggcaacggcugcggccucuucggcaagggcuccaucgucgccugcgccaaguucaccugcgccaaguccaugucccucuucgaggucgaccagaccaagauccaguacgucauccgcgcccagcuccacgucggcgccaagcaggagaacuggaacaccgacaucaagacccucaaguucgacgcccucuccggcucccaggaggucgaguucaucggcuacggcaaggccacccucgagugccagguccagaccgccgucgacuucggcaacuccuacaucgccgagauggagaccgaguccuggaucgucgaccgccagugggcccaggaccucacccuccccuggcaguccggcuccggcggcgucuggcgcgagaugcaccaccucgucgaguucgagcccccccacgccgccaccauccgcguccucgcccucggcaaccaggagggcucccucaagaccgcccucaccggcgccaugcgcgucaccaaggacaccaacgacaacaaccucuacaagcuccacggcggccacgucuccugccgcgucaagcucuccgcccucacccucaagggcaccuccuacaagaucugcaccgacaagauguucuucgucaagaaccccaccgacaccggccacggcaccgucgucaugcaggucaaggucuccaagggcgcccccugccgcauccccgucaucgucgccgacgaccucaccgccgccaucaacaagggcauccucgucaccgucaaccccaucgccuccaccaacgacgacgagguccucaucgaggucaacccccccuucggcgacuccuacaucaucgucggccgcggcgacucccgccucaccuaccaguggcacaaggagggcuccuccaucggcaagcucuucacccagaccaugaagggcgucgagcgccucgccgucaugggcgacaccgccugggacuucuccuccgccggcggcuucuucaccuccgucggcaagggcauccacaccgucuucggcuccgccuuccagggccucuucggcggccucaacuggaucaccaaggucaucaugggcgccguccucaucugggucggcaucaacacccgcaacaugaccauguccauguccaugauccucgucggcgucaucaugauguuccucucccucggcgucggcgccugaggacuagucccuguucccagagcccacuuuuuuuucuuuuuuugaaauaaaauagccugucuuucagaucuaaaaaaaaaaaaaaaaaaaaaaaaaaaaaaaaaaaaaaaaaaaaaaaaaaaaaaaaaaaaaaaaugcaucccccccccccccccccccccccccccccccaaaggcucuuuucagagccaccagaauu

SEQ ID NO: 796 - RNA, 2374 nt, Artificial Sequence
  mRNA product Design d-1 comprising derived and/or modified sequence from YFV__NC_002031.1__SSjev-prME-XX (polyprotein: aa122-788) (opt2)
gggagacccgugacccggaaguuguacggcuacgcgacuuucccucccacaaacccucgcgcccuuccuuuccuacuugggcccggcagaaagcuuaccaugggcaagcgcuccgccggcuccaucauguggcucgccucccucgccgucgucaucgccugcgccggcgccgucacccucguccgcaagaaccgcuggcuccuccucaacgucaccuccgaggaccucggcaagaccuucuccgucggcaccggcaacugcaccaccaacauccucgaggccaaguacuggugccccgacuccauggaguacaacugccccaaccucuccccccgcgaggagcccgacgacaucgacugcuggugcuacggcgucgagaacguccgcgucgccuacggcaagugcgacuccgccggccgcucccgccgcucccgccgcgccaucgaccuccccacccacgagaaccacggccucaagacccgccaggagaaguggaugaccggccgcaugggcgagcgccagcuccagaagaucgagcgcugguucguccgcaaccccuucuucgccgucaccgcccucaccaucgccuaccucgucggcuccaacaugacccagcgcgucgucaucgcccuccucguccucgccgucggccccgccuacuccgcccacugcaucggcaucaccgaccgcgacuucaucgagggcguccacggcggcaccugggucuccgccacccucgagcaggacaagugcgucaccgucauggcccccgacaagcccucccucgacaucucccucgagaccgucgccaucgaccgccccgccgagguccgcaaggucugcuacaacgccguccucacccacgucaagaucaacgacaagugccccuccaccggcgaggcccaccucgccgaggagaacgagggcgacaacgccugcaagcgcaccuacuccgaccgcggcuggggcaacggcugcggccucuucggcaagggcuccaucgucgccugcgccaaguucaccugcgccaaguccaugucccucuucgaggucgaccagaccaagauccaguacgucauccgcgcccagcuccacgucggcgccaagcaggagaacuggaacaccgacaucaagacccucaaguucgacgcccucuccggcucccaggaggucgaguucaucggcuacggcaaggccacccucgagugccagguccagaccgccgucgacuucggcaacuccuacaucgccgagauggagaccgaguccuggaucgucgaccgccagugggcccaggaccucacccuccccuggcaguccggcuccggcggcgucuggcgcgagaugcaccaccucgucgaguucgagcccccccacgccgccaccauccgcguccucgcccucggcaaccaggagggcucccucaagaccgcccucaccggcgccaugcgcgucaccaaggacaccaacgacaacaaccucuacaagcuccacggcggccacgucuccugccgcgucaagcucuccgcccucacccucaagggcaccuccuacaagaucugcaccgacaagauguucuucgucaagaaccccaccgacaccggccacggcaccgucgucaugcaggucaaggucuccaagggcgcccccugccgcauccccgucaucgucgccgacgaccucaccgccgccaucaacaagggcauccucgucaccgucaaccccaucgccuccaccaacgacgacgagguccucaucgaggucaacccccccuucggcgacuccuacaucaucgucggccgcggcgacucccgccucaccuaccaguggcacaaggagggcuccuccaucggcaagcucuucacccagaccaugaagggcgucgagcgccucgccgucaugggcgacaccgccugggacuucuccuccgccggcggcuucuucaccuccgucggcaagggcauccacaccgucuucggcuccgccuuccagggccucuucggcggccucaacuggaucaccaaggucaucaugggcgccguccucaucugggucggcaucaacacccgcaacaugaccauguccauguccaugauccucgucggcgucaucaugauguuccucucccucggcgucggcgccgaccagggcugcgccaucaacuucggcaagugaggacuagucccuguucccagagcccacuuuuuuuucuuuuuuugaaauaaaauagccugucuuucagaucuaaaaaaaaaaaaaaaaaaaaaaaaaaaaaaaaaaaaaaaaaaaaaaaaaaaaaaaaaaaaaaaaugcaucccccccccccccccccccccccccccccccaaaggcucuuuucagagccaccagaauu

SEQ ID NO: 797 - RNA, 2344 nt, Artificial Sequence
  mRNA product Design d-1 comprising derived and/or modified sequence from YFV__NC_002031.1__SSjev-prME (polyprotein: aa122-778) (opt2)
gggagacccgugacccggaaguuguacggcuacgcgacuuucccucccacaaacccucgcgcccuuccuuuccuacuugggcccggcagaaagcuuaccaugggcaagcgcuccgccggcuccaucauguggcucgccucccucgccgucgucaucgccugcgccggcgccgucacccucguccgcaagaaccgcuggcuccuccucaacgucaccuccgaggaccucggcaagaccuucuccgucggcaccggcaacugcaccaccaacauccucgaggccaaguacuggugccccgacuccauggaguacaacugccccaaccucuccccccgcgaggagcccgacgacaucgacugcuggugcuacggcgucgagaacguccgcgucgccuacggcaagugcgacuccgccggccgcucccgccgcucccgccgcgccaucgaccuccccacccacgagaaccacggccucaagacccgccaggagaaguggaugaccggccgcaugggcgagcgccagcuccagaagaucgagcgcugguucguccgcaaccccuucuucgccgucaccgcccucaccaucgccuaccucgucggcuccaacaugacccagcgcgucgucaucgcccuccucguccucgccgucggccccgccuacuccgcccacugcaucggcaucaccgaccgcgacuucaucgagggcguccacggcggcaccugggucuccgccacccucgagcaggacaagugcgucaccgucauggcccccgacaagcccucccucgacaucucccucgagaccgucgccaucgaccgccccgccgagguccgcaaggucugcuacaacgccguccucacccacgucaagaucaacgacaagugccccuccaccggcgaggcccaccucgccgaggagaacgagggcgacaacgccugcaagcgcaccuacuccgaccgcggcuggggcaacggcugcggccucuucggcaagggcuccaucgucgccugcgccaaguucaccugcgccaaguccaugucccucuucgaggucgaccagaccaagauccaguacgucauccgcgcccagcuccacgucggcgccaagcaggagaacuggaacaccgacaucaagacccucaaguucgacgcccucuccggcucccaggaggucgaguucaucggcuacggcaaggccacccucgagugccagguccagaccgccgucgacuucggcaacuccuacaucgccgagauggagaccgaguccuggaucgucgaccgccagugggcccaggaccucacccuccccuggcaguccggcuccggcggcgucuggcgcgagaugcaccaccucgucgaguucgagcccccccacgccgccaccauccgcguccucgcccucggcaaccaggagggcucccucaagaccgcccucaccggcgccaugcgcgucaccaaggacaccaacgacaacaaccucuacaagcuccacggcggccacgucuccugccgcgucaagcucuccgcccucacccucaagggcaccuccuacaagaucugcaccgacaagauguucuucgucaagaaccccaccgacaccggccacggcaccgucgucaugcaggucaaggucuccaagggcgcccccugccgcauccccgucaucgucgccgacgaccucaccgccgccaucaacaagggcauccucgucaccgucaaccccaucgccuccaccaacgacgacgagguccucaucgaggucaacccccccuucggcgacuccuacaucaucgucggccgcggcgacucccgccucaccuaccaguggcacaaggagggcuccuccaucggcaagcucuucacccagaccaugaagggcgucgagcgccucgccgucaugggcgacaccgccugggacuucuccuccgccggcggcuucuucaccuccgucggcaagggcauccacaccgucuucggcuccgccuuccagggccucuucggcggccucaacuggaucaccaaggucaucaugggcgccguccucaucugggucggcaucaacacccgcaacaugaccauguccauguccaugauccucgucggcgucaucaugauguuccucucccucggcgucggcgccugaggacuagucccuguucccagagcccacuuuuuuuucuuuuuuugaaauaaaauagccugucuuucagaucuaaaaaaaaaaaaaaaaaaaaaaaaaaaaaaaaaaaaaaaaaaaaaaaaaaaaaaaaaaaaaaaaugcaucccccccccccccccccccccccccccccccaaaggcucuuuucagagccaccagaauu

SEQ ID NO: 798 - RNA, 2392 nt, Artificial Sequence
  mRNA product Design d-1 comprising derived and/or modified sequence from YFV__NC_002031.1__X-SS-prME-XX (polyprotein: aa92-788) (opt3)
gggagacccgugacccggaaguuguacggcuacgcgacuuucccucccacaaacccucgcgcccuuccuuuccuacuugggcccggcagaaagcuuaccaugagaggccugagcuccaggaagcggcgcucucacgacgugcucaccguccaguuccuuauccuggggauguuguuaaugacaggagguguuacucuggugcguaaaaaccgauggcuacuccugaauguaacgucagaggaucuuggcaagaccuuuaguguggggacaggaaacugcacuaccaauauucuggaagccaaauacuggugucccgacagcauggaguauaacugcccuaauuuguccccaagagaggaaccggaugacauagauuguuggugcuacggcgucgaaaacgugaggguugcuuaugguaagugugacucugcagggcggucgcgcagaucaaggcgggccaucgaucuccccacacaugagaaucacggacugaaaacccgccaagagaaguggaugacuggccgaaugggcgaaagacagcugcagaagauugagaggugguucgugcggaacccuuucuucgcggucacagcucucaccaucgccuacuuaguggggagcaauaugacgcagcguguaguuauugcacugcuuguguuggccgucggaccagcuuauagugcacauugcaucgguauaacugaccgcgauuuuaucgaaggcgugcacgggggaaccuggguguccgccacacuggagcaagacaaaugugucacuguuauggcucccgauaagccuucucuagacauuagccucgagaccguggccaucgauagaccagcggaaguaaggaaagugugcuacaacgcaguccugacacaugugaagauuaaugacaaaugucccuccaccggcgaggcccaccuugcugaagagaacgaaggugacaaugccugcaagcggacguauucagaucgaggguggggaaacggcuguggccuguucgggaagggaaguaucguugcaugcgcuaaauuuacuugcgccaagagcaugucuuuguucgagguggaccagacaaaaauacaguacgucauucgcgcgcagcuccacgugggugccaagcaagagaauuggaacaccgauaucaaaacucugaaguuugacgcauuauccggcucacaggaaguagaguucauuggguacggaaaagcuacacuggaaugucagguucagaccgccguggauuuuggcaacagcuauaucgcugagauggaaacggagaguuggaucgucgacagacaaugggcccaggaucucacccuuccuuggcagucugguuccgggggcguguggagggagaugcaucaccuggucgaauuugagccaccgcaugcagccacaauucggguguuggcucuaggaaaucaagaaggcagccugaagacugcgcucaccggggcaaugcgcguuacaaaggacacuaacgauaauaaccuguacaaacuucacggaggucacgugucgugcagaguaaagcugucugccuugacccucaaaggcacauccuauaagauauguaccgacaaaauguuuuucgucaagaaucccacugauacggggcauggaacagugguuaugcaagugaaggucucaaaaggcgcuccuugcaggaucccagugauuguagccgacgaccugaccgcagccaucaacaaggguauauuagugacuguuaaucccauugcuaguaccaacgaugacgagguccugaucgaagugaauccuccauucggggauagcuacaucauugugggccguggagacucccggcuaacauaucaguggcacaaagagggcucuagcaucgggaagcucuuuacccagacuaugaaaggagucgagcgacuggccguuaugggugauacagcaugggacuucucaagugcgggcggguuuuucacguccgugggaaagggcauucauaccguguuugguagcgcuuuccaggggcuuuuuggcggauugaacuggauaacuaagguaaucaugggcgccguccugauuuggguggggaucaauacaagaaacaugaccaugucuaugucaaugauccucguuggagugauuaugauguuccugagucuuggcgucggugcagaucaggggugugccauaaauuuuggaaaaugaggacuagucccuguucccagagcccacuuuuuuuucuuuuuuugaaauaaaauagccugucuuucagaucuaaaaaaaaaaaaaaaaaaaaaaaaaaaaaaaaaaaaaaaaaaaaaaaaaaaaaaaaaaaaaaaaugcaucccccccccccccccccccccccccccccccaaaggcucuuuucagagccaccagaauu

SEQ ID NO: 799 - RNA, 2329 nt, Artificial Sequence
  mRNA product Design d-1 comprising derived and/or modified sequence from YFV__NC_002031.1__SS-prME (polyprotein: M,aa104-778) (opt3)
gggagacccgugacccggaaguuguacggcuacgcgacuuucccucccacaaacccucgcgcccuuccuuuccuacuugggcccggcagaaagcuuaccauggacgugcugaccguccaguuccucauccuuggcaugcuguugaugacagggggaguuacuuuagugagaaagaacagguggcugcuacucaauguaacgagcgaggaucuggguaaaaccuuuuccgugggcacagggaacugcacuaccaauauucuugaagccaaguacuggugucccgacucuauggaguauaacugcccuaaucugucaccacgggaggaaccggaugacauagauuguuggugcuacggagucgaaaacgugcgcguugcuuauggcaaaugugacagugcaggucgaagccguagauccaggcgggccaucgauuugcccacacacgagaaucaugggcucaagacccgccaagagaaauggaugacuggaagaaugggcgaaaggcagcugcagaagauugagcggugguucgugcgcaacccuuucuucgcggucacagcucugaccaucgccuaccucgugggcucuaauaugacgcagcgaguaguuauugcauuacuggugcuugccgucgggccagcuuauucggcacacugcaucggaauaacugacagagauuuuaucgaaggugugcauggcgggaccugggugucagccacauuggagcaagacaagugugucacuguuauggcucccgauaaaccuagccuggacauuagucuagagaccguggccaucgauaggccagcggaaguacggaaggugugcuacaacgcaguccucacacacgugaaaauuaaugacaagugucccuccaccggagaggcccaucuggcugaagagaacgaaggcgacaaugccugcaaacguacguauucugaucgcgguugggggaacggauguggccuuuucggcaaggggagcaucguugcaugcgcuaaguuuacuugcgccaaauccaugucacuguucgagguggaccagacaaagauacaguacgucauuagagcgcaguugcacgugggagccaaacaagagaauuggaacaccgauaucaagacucucaaauuugacgcacugagugguagccaggaaguagaguucauuggcuacgggaaggcuacauuagaaugucagguucagaccgccguggauuuuggaaacucuuauaucgcugagauggaaacggaguccuggaucgucgacaggcaaugggcccaggaucugacccucccuuggcagucaggcagcggugggguguggcgggagaugcaccaucuugucgaauuugagccaccgcacgcagccacaauucgagugcuggcuuugggcaaucaagaaggaagucuaaaaacugcgcugaccggcgcaaugcgcguuacaaaggacacuaacgauaauaaccucuacaagcugcaugggggacacgugucuugcagaguaaaacuuuccgcccugaccuugaaggguacaagcuauaaaauauguaccgacaagauguuuuucgucaaaaaucccacugauacgggccacgggacagugguuaugcaagugaaggucucgaagggagcuccuugcaggaucccagugauuguagccgacgaccucaccgcagccaucaacaaaggcauacuggugacuguuaaucccauugcuucuaccaacgaugacgaggucuuaaucgaagugaauccuccauucggugauuccuacaucauuguggggcggggcgacucacgccugacauaucaguggcauaaggagggaaguagcaucggcaaacuauuuacccagacuaugaagggggucgagagacucgccguuaugggagauacagcaugggacuucuccucugcggguggcuuuuucacgagcguggggaaaggcauucacaccguguuuggaucagcuuuccagggucuguuugggggccuuaacuggauaacuaagguaaucaugggagccgucuugauuugggugggcaucaauacaaggaacaugaccaugaguauguccaugauccugguuggggugauuaugauguuccucagccugggagucggcgcaugaggacuagucccuguucccagagcccacuuuuuuuucuuuuuuugaaauaaaauagccugucuuucagaucuaaaaaaaaaaaaaaaaaaaaaaaaaaaaaaaaaaaaaaaaaaaaaaaaaaaaaaaaaaaaaaaaugcaucccccccccccccccccccccccccccccccaaaggcucuuuucagagccaccagaauu

SEQ ID NO: 800 - RNA, 2356 nt, Artificial Sequence
  mRNA product Design d-1 comprising derived and/or modified sequence from YFV__NC_002031.1__SSIgE-prME-XX (polyprotein: aa122-788) (opt3)
gggagacccgugacccggaaguuguacggcuacgcgacuuucccucccacaaacccucgcgcccuuccuuuccuacuugggcccggcagaaagcuuaccauggacuggaccuggauccuguuccucguggccgcugcaacaagaguccacagcguuacucuggugcguaaaaaccgauggcuacuccugaauguaacgucagaggaucuuggcaagaccuuuaguguggggacaggaaacugcacuaccaauauucuggaagccaaauacuggugucccgacagcauggaguauaacugcccuaauuuguccccaagagaggaaccggaugacauagauuguuggugcuacggcgucgaaaacgugaggguugcuuaugguaagugugacucugcagggcggucgcgcagaucaaggcgggccaucgaucuccccacacaugagaaucacggacugaaaacccgccaagagaaguggaugacuggccgaaugggcgaaagacagcugcagaagauugagaggugguucgugcggaacccuuucuucgcggucacagcucucaccaucgccuacuuaguggggagcaauaugacgcagcguguaguuauugcacugcuuguguuggccgucggaccagcuuauagugcacauugcaucgguauaacugaccgcgauuuuaucgaaggcgugcacgggggaaccuggguguccgccacacuggagcaagacaaaugugucacuguuauggcucccgauaagccuucucuagacauuagccucgagaccguggccaucgauagaccagcggaaguaaggaaagugugcuacaacgcaguccugacacaugugaagauuaaugacaaaugucccuccaccggcgaggcccaccuugcugaagagaacgaaggugacaaugccugcaagcggacguauucagaucgaggguggggaaacggcuguggccuguucgggaagggaaguaucguugcaugcgcuaaauuuacuugcgccaagagcaugucuuuguucgagguggaccagacaaaaauacaguacgucauucgcgcgcagcuccacgugggugccaagcaagagaauuggaacaccgauaucaaaacucugaaguuugacgcauuauccggcucacaggaaguagaguucauuggguacggaaaagcuacacuggaaugucagguucagaccgccguggauuuuggcaacagcuauaucgcugagauggaaacggagaguuggaucgucgacagacaaugggcccaggaucucacccuuccuuggcagucugguuccgggggcguguggagggagaugcaucaccuggucgaauuugagccaccgcaugcagccacaauucggguguuggcucuaggaaaucaagaaggcagccugaagacugcgcucaccggggcaaugcgcguuacaaaggacacuaacgauaauaaccuguacaaacuucacggaggucacgugucgugcagaguaaagcugucugccuugacccucaaaggcacauccuauaagauauguaccgacaaaauguuuuucgucaagaaucccacugauacggggcauggaacagugguuaugcaagugaaggucucaaaaggcgcuccuugcaggaucccagugauuguagccgacgaccugaccgcagccaucaacaaggguauauuagugacuguuaaucccauugcuaguaccaacgaugacgagguccugaucgaagugaauccuccauucggggauagcuacaucauugugggccguggagacucccggcuaacauaucaguggcacaaagagggcucuagcaucgggaagcucuuuacccagacuaugaaaggagucgagcgacuggccguuaugggugauacagcaugggacuucucaagugcgggcggguuuuucacguccgugggaaagggcauucauaccguguuugguagcgcuuuccaggggcuuuuuggcggauugaacuggauaacuaagguaaucaugggcgccguccugauuuggguggggaucaauacaagaaacaugaccaugucuaugucaaugauccucguuggagugauuaugauguuccugagucuuggcgucggugcagaucaggggugugccauaaauuuuggaaaaugaggacuagucccuguucccagagcccacuuuuuuuucuuuuuuugaaauaaaauagccugucuuucagaucuaaaaaaaaaaaaaaaaaaaaaaaaaaaaaaaaaaaaaaaaaaaaaaaaaaaaaaaaaaaaaaaaugcaucccccccccccccccccccccccccccccccaaaggcucuuuucagagccaccagaauu

SEQ ID NO: 801 - RNA, 2326 nt, Artificial Sequence
  mRNA product Design d-1 comprising derived and/or modified sequence from YFV__NC_002031.1__SSIgE-prME (polyprotein: aa122-778) (opt3)
gggagacccgugacccggaaguuguacggcuacgcgacuuucccucccacaaacccucgcgcccuuccuuuccuacuugggcccggcagaaagcuuaccauggacuggaccuggauccuguuccucguggccgcugcaacaagaguccacagcgugacccuggucagaaagaacagguggcuccuucugaauguuacaagcgaggacuugggcaaaacuuucuccguggggacgggaaacugcaccacaaauaucuuagaagccaaguacuggugucccgauucuauggaguauaacugcccuaaucugucaccacgggaggaaccggacgauauugacuguuggugcuacgguguagaaaacgugcgcgucgcuuauggcaaaugugauagugcagggcgaagccguagauccaggcgggccauagaccuacccacucacgagaaucauggacucaagacccgccaggagaaauggaugacaggcagaaugggugaaaggcaacugcagaagaucgagcggugguuugugcgcaacccuuucuuugcgguuaccgcucuuacuauugccuaccugguggggucuaauaugacacagcgagucgugaucgcauugcucguacuggccguuggaccagcuuauucggcacacugcauuggcaucaccgauagagacuucauagaaggcgugcaugggggaacgugggucucagccacucuggagcaggauaagugugugaccgugauggcucccgacaaaccuagccucgauaucaguuuagagacagucgccauugacaggccagcggaaguucggaaggugugcuacaacgcaguacugacucacgugaaaaucaaugauaagugucccuccaccggugaggcccaucuugcugaagagaacgaaggcgacaaugccugcaaacguacauauucugaccgcggguggggaaacggcugugguuuguuugggaagggaagcauugucgcaugcgcuaaguuuaccugcgccaaauccaugucacuguucgagguggaucaaacgaagauccaguacguuauaagagcgcagcuacacgugggcgccaaacaggagaauuggaacacugacauuaagacacucaaauucgaugcacugaguggcagccaagaagucgaguuuaucggguacggaaaggcuacccuugaaugucaggugcagacugccguagacuucgguaacucuuauauugcugagauggaaacagaguccuggaucguugauaggcagugggcccaagaccugaccuugccuuggcagucaggcagcgggggaguguggcgggagaugcaccaucucgucgaauuugagccaccgcacgcagccacgauccgagugcuggcuuuaggcaaucaggaagguagucugaaaaccgcgcucacaggggcaaugcgcgucacuaaggauaccaacgacaauaaccuuuacaagcugcauggcggacacgugucuugcagaguuaaauuguccgcccuaacacugaagggcacuagcuauaaaauuuguaccgauaagauguucuuugugaaaaaucccacagacaccgggcacggaacuguagucaugcaagugaagguuucgaagggugcuccuugcaggauaccagugaucgucgccgaugaccucacggcagccauuaacaaaggcauccuggugacaguaaaucccauagcuucuaccaacgacgaugaggugcuuauugaaguuaauccuccauucggggacuccuacaucaucgucggacggggcgauucacgccugacuuaucaguggcauaaggaggguaguagcauugggaaauuguucacccagacaaugaagggcguggagagacucgccgugaugggagacaccgcaugggauuuuuccucugcgggcggguucuuuacuagcgucggaaaagguauccacacaguuuucggcucagcuuuucaggggcuguucggaggcuuaaacuggauuacgaaggugauaaugggugccgugcugaucuggguagggauuaauaccaggaacaugacuaugaguauguccaugauccuagucggcgugaucaugauguuucucagccugggaguuggcgcaugaggacuagucccuguucccagagcccacuuuuuuuucuuuuuuugaaauaaaauagccugucuuucagaucuaaaaaaaaaaaaaaaaaaaaaaaaaaaaaaaaaaaaaaaaaaaaaaaaaaaaaaaaaaaaaaaaugcaucccccccccccccccccccccccccccccccaaaggcucuuuucagagccaccagaauu

SEQ ID NO: 802 - RNA, 2374 nt, Artificial Sequence
  mRNA product Design d-1 comprising derived and/or modified sequence from YFV__NC_002031.1__SSjev-prME-XX (polyprotein: aa122-788) (opt3)
gggagacccgugacccggaaguuguacggcuacgcgacuuucccucccacaaacccucgcgcccuuccuuuccuacuugggcccggcagaaagcuuaccaugggcaagagaagcgccggguccaucauguggcuggcuucucucgcaguggucauugccugcgcgggagcuguuacucuggugcguaaaaaccgauggcuacuccugaauguaacgucagaggaucuuggcaagaccuuuaguguggggacaggaaacugcacuaccaauauucuggaagccaaauacuggugucccgacagcauggaguauaacugcccuaauuuguccccaagagaggaaccggaugacauagauuguuggugcuacggcgucgaaaacgugaggguugcuuaugguaagugugacucugcagggcggucgcgcagaucaaggcgggccaucgaucuccccacacaugagaaucacggacugaaaacccgccaagagaaguggaugacuggccgaaugggcgaaagacagcugcagaagauugagaggugguucgugcggaacccuuucuucgcggucacagcucucaccaucgccuacuuaguggggagcaauaugacgcagcguguaguuauugcacugcuuguguuggccgucggaccagcuuauagugcacauugcaucgguauaacugaccgcgauuuuaucgaaggcgugcacgggggaaccuggguguccgccacacuggagcaagacaaaugugucacuguuauggcucccgauaagccuucucuagacauuagccucgagaccguggccaucgauagaccagcggaaguaaggaaagugugcuacaacgcaguccugacacaugugaagauuaaugacaaaugucccuccaccggcgaggcccaccuugcugaagagaacgaaggugacaaugccugcaagcggacguauucagaucgaggguggggaaacggcuguggccuguucgggaagggaaguaucguugcaugcgcuaaauuuacuugcgccaagagcaugucuuuguucgagguggaccagacaaaaauacaguacgucauucgcgcgcagcuccacgugggugccaagcaagagaauuggaacaccgauaucaaaacucugaaguuugacgcauuauccggcucacaggaaguagaguucauuggguacggaaaagcuacacuggaaugucagguucagaccgccguggauuuuggcaacagcuauaucgcugagauggaaacggagaguuggaucgucgacagacaaugggcccaggaucucacccuuccuuggcagucugguuccgggggcguguggagggagaugcaucaccuggucgaauuugagccaccgcaugcagccacaauucggguguuggcucuaggaaaucaagaaggcagccugaagacugcgcucaccggggcaaugcgcguuacaaaggacacuaacgauaauaaccuguacaaacuucacggaggucacgugucgugcagaguaaagcugucugccuugacccucaaaggcacauccuauaagauauguaccgacaaaauguuuuucgucaagaaucccacugauacggggcauggaacagugguuaugcaagugaaggucucaaaaggcgcuccuugcaggaucccagugauuguagccgacgaccugaccgcagccaucaacaaggguauauuagugacuguuaaucccauugcuaguaccaacgaugacgagguccugaucgaagugaauccuccauucggggauagcuacaucauugugggccguggagacucccggcuaacauaucaguggcacaaagagggcucuagcaucgggaagcucuuuacccagacuaugaaaggagucgagcgacuggccguuaugggugauacagcaugggacuucucaagugcgggcggguuuuucacguccgugggaaagggcauucauaccguguuugguagcgcuuuccaggggcuuuuuggcggauugaacuggauaacuaagguaaucaugggcgccguccugauuuggguggggaucaauacaagaaacaugaccaugucuaugucaaugauccucguuggagugauuaugauguuccugagucuuggcgucggugcagaucaggggugugccauaaauuuuggaaaaugaggacuagucccuguucccagagcccacuuuuuuuucuuuuuuugaaauaaaauagccugucuuucagaucuaaaaaaaaaaaaaaaaaaaaaaaaaaaaaaaaaaaaaaaaaaaaaaaaaaaaaaaaaaaaaaaaugcaucccccccccccccccccccccccccccccccaaaggcucuuuucagagccaccagaauu

SEQ ID NO: 803 - RNA, 2344 nt, Artificial Sequence
  mRNA product Design d-1 comprising derived and/or modified sequence from YFV__NC_002031.1__SSjev-prME (polyprotein: aa122-778) (opt3)
gggagacccgugacccggaaguuguacggcuacgcgacuuucccucccacaaacccucgcgcccuuccuuuccuacuugggcccggcagaaagcuuaccaugggcaagagaagcgccggguccaucauguggcuggcuucucucgcaguggucauugccugcgcgggagcugugacccuggucagaaagaacagguggcuccuucugaauguuacaagcgaggacuugggcaaaacuuucuccguggggacgggaaacugcaccacaaauaucuuagaagccaaguacuggugucccgauucuauggaguauaacugcccuaaucugucaccacgggaggaaccggacgauauugacuguuggugcuacgguguagaaaacgugcgcgucgcuuauggcaaaugugauagugcagggcgaagccguagauccaggcgggccauagaccuacccacucacgagaaucauggacucaagacccgccaggagaaauggaugacaggcagaaugggugaaaggcaacugcagaagaucgagcggugguuugugcgcaacccuuucuuugcgguuaccgcucuuacuauugccuaccugguggggucuaauaugacacagcgagucgugaucgcauugcucguacuggccguuggaccagcuuauucggcacacugcauuggcaucaccgauagagacuucauagaaggcgugcaugggggaacgugggucucagccacucuggagcaggauaagugugugaccgugauggcucccgacaaaccuagccucgauaucaguuuagagacagucgccauugacaggccagcggaaguucggaaggugugcuacaacgcaguacugacucacgugaaaaucaaugauaagugucccuccaccggugaggcccaucuugcugaagagaacgaaggcgacaaugccugcaaacguacauauucugaccgcggguggggaaacggcugugguuuguuugggaagggaagcauugucgcaugcgcuaaguuuaccugcgccaaauccaugucacuguucgagguggaucaaacgaagauccaguacguuauaagagcgcagcuacacgugggcgccaaacaggagaauuggaacacugacauuaagacacucaaauucgaugcacugaguggcagccaagaagucgaguuuaucggguacggaaaggcuacccuugaaugucaggugcagacugccguagacuucgguaacucuuauauugcugagauggaaacagaguccuggaucguugauaggcagugggcccaagaccugaccuugccuuggcagucaggcagcgggggaguguggcgggagaugcaccaucucgucgaauuugagccaccgcacgcagccacgauccgagugcuggcuuuaggcaaucaggaagguagucugaaaaccgcgcucacaggggcaaugcgcgucacuaaggauaccaacgacaauaaccuuuacaagcugcauggcggacacgugucuugcagaguuaaauuguccgcccuaacacugaagggcacuagcuauaaaauuuguaccgauaagauguucuuugugaaaaaucccacagacaccgggcacggaacuguagucaugcaagugaagguuucgaagggugcuccuugcaggauaccagugaucgucgccgaugaccucacggcagccauuaacaaaggcauccuggugacaguaaaucccauagcuucuaccaacgacgaugaggugcuuauugaaguuaauccuccauucggggacuccuacaucaucgucggacggggcgauucacgccugacuuaucaguggcauaaggaggguaguagcauugggaaauuguucacccagacaaugaagggcguggagagacucgccgugaugggagacaccgcaugggauuuuuccucugcgggcggguucuuuacuagcgucggaaaagguauccacacaguuuucggcucagcuuuucaggggcuguucggaggcuuaaacuggauuacgaaggugauaaugggugccgugcugaucuggguagggauuaauaccaggaacaugacuaugaguauguccaugauccuagucggcgugaucaugauguuucucagccugggaguuggcgcaugaggacuagucccuguucccagagcccacuuuuuuuucuuuuuuugaaauaaaauagccugucuuucagaucuaaaaaaaaaaaaaaaaaaaaaaaaaaaaaaaaaaaaaaaaaaaaaaaaaaaaaaaaaaaaaaaaugcaucccccccccccccccccccccccccccccccaaaggcucuuuucagagccaccagaauu

SEQ ID NO: 804 - RNA, 2392 nt, Artificial Sequence
  mRNA product Design d-1 comprising derived and/or modified sequence from YFV__NC_002031.1__X-SS-prME-XX (polyprotein: aa92-788) (opt4)
gggagacccgugacccggaaguuguacggcuacgcgacuuucccucccacaaacccucgcgcccuuccuuuccuacuugggcccggcagaaagcuuaccaugagaggccugagcagcagaaagagaagaagccacgacgugcugaccgugcaguuccugauccugggcaugcugcugaugaccggcggcgugacccuggugagaaagaacagauggcugcugcugaacgugaccagcgaggaccugggcaagaccuucagcgugggcaccggcaacugcaccaccaacauccuggaggccaaguacuggugccccgacagcauggaguacaacugccccaaccugagccccagagaggagcccgacgacaucgacugcuggugcuacggcguggagaacgugagaguggccuacggcaagugcgacagcgccggcagaagcagaagaagcagaagagccaucgaccugcccacccacgagaaccacggccugaagaccagacaggagaaguggaugaccggcagaaugggcgagagacagcugcagaagaucgagagaugguucgugagaaaccccuucuucgccgugaccgcccugaccaucgccuaccuggugggcagcaacaugacccagagaguggugaucgcccugcuggugcuggccgugggccccgccuacagcgcccacugcaucggcaucaccgacagagacuucaucgagggcgugcacggcggcaccugggugagcgccacccuggagcaggacaagugcgugaccgugauggcccccgacaagcccagccuggacaucagccuggagaccguggccaucgacagacccgccgaggugagaaaggugugcuacaacgccgugcugacccacgugaagaucaacgacaagugccccagcaccggcgaggcccaccuggccgaggagaacgagggcgacaacgccugcaagagaaccuacagcgacagaggcuggggcaacggcugcggccuguucggcaagggcagcaucguggccugcgccaaguucaccugcgccaagagcaugagccuguucgagguggaccagaccaagauccaguacgugaucagagcccagcugcacgugggcgccaagcaggagaacuggaacaccgacaucaagacccugaaguucgacgcccugagcggcagccaggagguggaguucaucggcuacggcaaggccacccuggagugccaggugcagaccgccguggacuucggcaacagcuacaucgccgagauggagaccgagagcuggaucguggacagacagugggcccaggaccugacccugcccuggcagagcggcagcggcggcguguggagagagaugcaccaccugguggaguucgagcccccccacgccgccaccaucagagugcuggcccugggcaaccaggagggcagccugaagaccgcccugaccggcgccaugagagugaccaaggacaccaacgacaacaaccuguacaagcugcacggcggccacgugagcugcagagugaagcugagcgcccugacccugaagggcaccagcuacaagaucugcaccgacaagauguucuucgugaagaaccccaccgacaccggccacggcaccguggugaugcaggugaaggugagcaagggcgcccccugcagaauccccgugaucguggccgacgaccugaccgccgccaucaacaagggcauccuggugaccgugaaccccaucgccagcaccaacgacgacgaggugcugaucgaggugaacccccccuucggcgacagcuacaucaucgugggcagaggcgacagcagacugaccuaccaguggcacaaggagggcagcagcaucggcaagcuguucacccagaccaugaagggcguggagagacuggccgugaugggcgacaccgccugggacuucagcagcgccggcggcuucuucaccagcgugggcaagggcauccacaccguguucggcagcgccuuccagggccuguucggcggccugaacuggaucaccaaggugaucaugggcgccgugcugaucugggugggcaucaacaccagaaacaugaccaugagcaugagcaugauccuggugggcgugaucaugauguuccugagccugggcgugggcgccgaccagggcugcgccaucaacuucggcaagugaggacuagucccuguucccagagcccacuuuuuuuucuuuuuuugaaauaaaauagccugucuuucagaucuaaaaaaaaaaaaaaaaaaaaaaaaaaaaaaaaaaaaaaaaaaaaaaaaaaaaaaaaaaaaaaaaugcaucccccccccccccccccccccccccccccccaaaggcucuuuucagagccaccagaauu

SEQ ID NO: 805 - RNA, 2329 nt, Artificial Sequence
  mRNA product Design d-1 comprising derived and/or modified sequence from YFV__NC_002031.1__SS-prME (polyprotein: M,aa104-778) (opt4)
gggagacccgugacccggaaguuguacggcuacgcgacuuucccucccacaaacccucgcgcccuuccuuuccuacuugggcccggcagaaagcuuaccauggacgugcugaccgugcaguuccugauccugggcaugcugcugaugaccggcggcgugacccuggugagaaagaacagauggcugcugcugaacgugaccagcgaggaccugggcaagaccuucagcgugggcaccggcaacugcaccaccaacauccuggaggccaaguacuggugccccgacagcauggaguacaacugccccaaccugagccccagagaggagcccgacgacaucgacugcuggugcuacggcguggagaacgugagaguggccuacggcaagugcgacagcgccggcagaagcagaagaagcagaagagccaucgaccugcccacccacgagaaccacggccugaagaccagacaggagaaguggaugaccggcagaaugggcgagagacagcugcagaagaucgagagaugguucgugagaaaccccuucuucgccgugaccgcccugaccaucgccuaccuggugggcagcaacaugacccagagaguggugaucgcccugcuggugcuggccgugggccccgccuacagcgcccacugcaucggcaucaccgacagagacuucaucgagggcgugcacggcggcaccugggugagcgccacccuggagcaggacaagugcgugaccgugauggcccccgacaagcccagccuggacaucagccuggagaccguggccaucgacagacccgccgaggugagaaaggugugcuacaacgccgugcugacccacgugaagaucaacgacaagugccccagcaccggcgaggcccaccuggccgaggagaacgagggcgacaacgccugcaagagaaccuacagcgacagaggcuggggcaacggcugcggccuguucggcaagggcagcaucguggccugcgccaaguucaccugcgccaagagcaugagccuguucgagguggaccagaccaagauccaguacgugaucagagcccagcugcacgugggcgccaagcaggagaacuggaacaccgacaucaagacccugaaguucgacgcccugagcggcagccaggagguggaguucaucggcuacggcaaggccacccuggagugccaggugcagaccgccguggacuucggcaacagcuacaucgccgagauggagaccgagagcuggaucguggacagacagugggcccaggaccugacccugcccuggcagagcggcagcggcggcguguggagagagaugcaccaccugguggaguucgagcccccccacgccgccaccaucagagugcuggcccugggcaaccaggagggcagccugaagaccgcccugaccggcgccaugagagugaccaaggacaccaacgacaacaaccuguacaagcugcacggcggccacgugagcugcagagugaagcugagcgcccugacccugaagggcaccagcuacaagaucugcaccgacaagauguucuucgugaagaaccccaccgacaccggccacggcaccguggugaugcaggugaaggugagcaagggcgcccccugcagaauccccgugaucguggccgacgaccugaccgccgccaucaacaagggcauccuggugaccgugaaccccaucgccagcaccaacgacgacgaggugcugaucgaggugaacccccccuucggcgacagcuacaucaucgugggcagaggcgacagcagacugaccuaccaguggcacaaggagggcagcagcaucggcaagcuguucacccagaccaugaagggcguggagagacuggccgugaugggcgacaccgccugggacuucagcagcgccggcggcuucuucaccagcgugggcaagggcauccacaccguguucggcagcgccuuccagggccuguucggcggccugaacuggaucaccaaggugaucaugggcgccgugcugaucugggugggcaucaacaccagaaacaugaccaugagcaugagcaugauccuggugggcgugaucaugauguuccugagccugggcgugggcgccugaggacuagucccuguucccagagcccacuuuuuuuucuuuuuuugaaauaaaauagccugucuuucagaucuaaaaaaaaaaaaaaaaaaaaaaaaaaaaaaaaaaaaaaaaaaaaaaaaaaaaaaaaaaaaaaaaugcaucccccccccccccccccccccccccccccccaaaggcucuuuucagagccaccagaauu

SEQ ID NO: 806 - RNA, 2356 nt, Artificial Sequence
  mRNA product Design d-1 comprising derived and/or modified sequence from YFV__NC_002031.1__SSIgE-prME-XX (polyprotein: aa122-788) (opt4)
gggagacccgugacccggaaguuguacggcuacgcgacuuucccucccacaaacccucgcgcccuuccuuuccuacuugggcccggcagaaagcuuaccauggacuggaccuggauccuguuccugguggccgccgccaccagagugcacagcgugacccuggugagaaagaacagauggcugcugcugaacgugaccagcgaggaccugggcaagaccuucagcgugggcaccggcaacugcaccaccaacauccuggaggccaaguacuggugccccgacagcauggaguacaacugccccaaccugagccccagagaggagcccgacgacaucgacugcuggugcuacggcguggagaacgugagaguggccuacggcaagugcgacagcgccggcagaagcagaagaagcagaagagccaucgaccugcccacccacgagaaccacggccugaagaccagacaggagaaguggaugaccggcagaaugggcgagagacagcugcagaagaucgagagaugguucgugagaaaccccuucuucgccgugaccgcccugaccaucgccuaccuggugggcagcaacaugacccagagaguggugaucgcccugcuggugcuggccgugggccccgccuacagcgcccacugcaucggcaucaccgacagagacuucaucgagggcgugcacggcggcaccugggugagcgccacccuggagcaggacaagugcgugaccgugauggcccccgacaagcccagccuggacaucagccuggagaccguggccaucgacagacccgccgaggugagaaaggugugcuacaacgccgugcugacccacgugaagaucaacgacaagugccccagcaccggcgaggcccaccuggccgaggagaacgagggcgacaacgccugcaagagaaccuacagcgacagaggcuggggcaacggcugcggccuguucggcaagggcagcaucguggccugcgccaaguucaccugcgccaagagcaugagccuguucgagguggaccagaccaagauccaguacgugaucagagcccagcugcacgugggcgccaagcaggagaacuggaacaccgacaucaagacccugaaguucgacgcccugagcggcagccaggagguggaguucaucggcuacggcaaggccacccuggagugccaggugcagaccgccguggacuucggcaacagcuacaucgccgagauggagaccgagagcuggaucguggacagacagugggcccaggaccugacccugcccuggcagagcggcagcggcggcguguggagagagaugcaccaccugguggaguucgagcccccccacgccgccaccaucagagugcuggcccugggcaaccaggagggcagccugaagaccgcccugaccggcgccaugagagugaccaaggacaccaacgacaacaaccuguacaagcugcacggcggccacgugagcugcagagugaagcugagcgcccugacccugaagggcaccagcuacaagaucugcaccgacaagauguucuucgugaagaaccccaccgacaccggccacggcaccguggugaugcaggugaaggugagcaagggcgcccccugcagaauccccgugaucguggccgacgaccugaccgccgccaucaacaagggcauccuggugaccgugaaccccaucgccagcaccaacgacgacgaggugcugaucgaggugaacccccccuucggcgacagcuacaucaucgugggcagaggcgacagcagacugaccuaccaguggcacaaggagggcagcagcaucggcaagcuguucacccagaccaugaagggcguggagagacuggccgugaugggcgacaccgccugggacuucagcagcgccggcggcuucuucaccagcgugggcaagggcauccacaccguguucggcagcgccuuccagggccuguucggcggccugaacuggaucaccaaggugaucaugggcgccgugcugaucugggugggcaucaacaccagaaacaugaccaugagcaugagcaugauccuggugggcgugaucaugauguuccugagccugggcgugggcgccgaccagggcugcgccaucaacuucggcaagugaggacuagucccuguucccagagcccacuuuuuuuucuuuuuuugaaauaaaauagccugucuuucagaucuaaaaaaaaaaaaaaaaaaaaaaaaaaaaaaaaaaaaaaaaaaaaaaaaaaaaaaaaaaaaaaaaugcaucccccccccccccccccccccccccccccccaaaggcucuuuucagagccaccagaauu

SEQ ID NO: 807 - RNA, 2326 nt, Artificial Sequence
  mRNA product Design d-1 comprising derived and/or modified sequence from YFV__NC_002031.1__SSIgE-prME (polyprotein: aa122-778) (opt4)
gggagacccgugacccggaaguuguacggcuacgcgacuuucccucccacaaacccucgcgcccuuccuuuccuacuugggcccggcagaaagcuuaccauggacuggaccuggauccuguuccugguggccgccgccaccagagugcacagcgugacccuggugagaaagaacagauggcugcugcugaacgugaccagcgaggaccugggcaagaccuucagcgugggcaccggcaacugcaccaccaacauccuggaggccaaguacuggugccccgacagcauggaguacaacugccccaaccugagccccagagaggagcccgacgacaucgacugcuggugcuacggcguggagaacgugagaguggccuacggcaagugcgacagcgccggcagaagcagaagaagcagaagagccaucgaccugcccacccacgagaaccacggccugaagaccagacaggagaaguggaugaccggcagaaugggcgagagacagcugcagaagaucgagagaugguucgugagaaaccccuucuucgccgugaccgcccugaccaucgccuaccuggugggcagcaacaugacccagagaguggugaucgcccugcuggugcuggccgugggccccgccuacagcgcccacugcaucggcaucaccgacagagacuucaucgagggcgugcacggcggcaccugggugagcgccacccuggagcaggacaagugcgugaccgugauggcccccgacaagcccagccuggacaucagccuggagaccguggccaucgacagacccgccgaggugagaaaggugugcuacaacgccgugcugacccacgugaagaucaacgacaagugccccagcaccggcgaggcccaccuggccgaggagaacgagggcgacaacgccugcaagagaaccuacagcgacagaggcuggggcaacggcugcggccuguucggcaagggcagcaucguggccugcgccaaguucaccugcgccaagagcaugagccuguucgagguggaccagaccaagauccaguacgugaucagagcccagcugcacgugggcgccaagcaggagaacuggaacaccgacaucaagacccugaaguucgacgcccugagcggcagccaggagguggaguucaucggcuacggcaaggccacccuggagugccaggugcagaccgccguggacuucggcaacagcuacaucgccgagauggagaccgagagcuggaucguggacagacagugggcccaggaccugacccugcccuggcagagcggcagcggcggcguguggagagagaugcaccaccugguggaguucgagcccccccacgccgccaccaucagagugcuggcccugggcaaccaggagggcagccugaagaccgcccugaccggcgccaugagagugaccaaggacaccaacgacaacaaccuguacaagcugcacggcggccacgugagcugcagagugaagcugagcgcccugacccugaagggcaccagcuacaagaucugcaccgacaagauguucuucgugaagaaccccaccgacaccggccacggcaccguggugaugcaggugaaggugagcaagggcgcccccugcagaauccccgugaucguggccgacgaccugaccgccgccaucaacaagggcauccuggugaccgugaaccccaucgccagcaccaacgacgacgaggugcugaucgaggugaacccccccuucggcgacagcuacaucaucgugggcagaggcgacagcagacugaccuaccaguggcacaaggagggcagcagcaucggcaagcuguucacccagaccaugaagggcguggagagacuggccgugaugggcgacaccgccugggacuucagcagcgccggcggcuucuucaccagcgugggcaagggcauccacaccguguucggcagcgccuuccagggccuguucggcggccugaacuggaucaccaaggugaucaugggcgccgugcugaucugggugggcaucaacaccagaaacaugaccaugagcaugagcaugauccuggugggcgugaucaugauguuccugagccugggcgugggcgccugaggacuagucccuguucccagagcccacuuuuuuuucuuuuuuugaaauaaaauagccugucuuucagaucuaaaaaaaaaaaaaaaaaaaaaaaaaaaaaaaaaaaaaaaaaaaaaaaaaaaaaaaaaaaaaaaaugcaucccccccccccccccccccccccccccccccaaaggcucuuuucagagccaccagaauu

SEQ ID NO: 808 - RNA, 2374 nt, Artificial Sequence
  mRNA product Design d-1 comprising derived and/or modified sequence from YFV__NC_002031.1__SSjev-prME-XX (polyprotein: aa122-788) (opt4)
gggagacccgugacccggaaguuguacggcuacgcgacuuucccucccacaaacccucgcgcccuuccuuuccuacuugggcccggcagaaagcuuaccaugggcaagagaagcgccggcagcaucauguggcuggccagccuggccguggugaucgccugcgccggcgccgugacccuggugagaaagaacagauggcugcugcugaacgugaccagcgaggaccugggcaagaccuucagcgugggcaccggcaacugcaccaccaacauccuggaggccaaguacuggugccccgacagcauggaguacaacugccccaaccugagccccagagaggagcccgacgacaucgacugcuggugcuacggcguggagaacgugagaguggccuacggcaagugcgacagcgccggcagaagcagaagaagcagaagagccaucgaccugcccacccacgagaaccacggccugaagaccagacaggagaaguggaugaccggcagaaugggcgagagacagcugcagaagaucgagagaugguucgugagaaaccccuucuucgccgugaccgcccugaccaucgccuaccuggugggcagcaacaugacccagagaguggugaucgcccugcuggugcuggccgugggccccgccuacagcgcccacugcaucggcaucaccgacagagacuucaucgagggcgugcacggcggcaccugggugagcgccacccuggagcaggacaagugcgugaccgugauggcccccgacaagcccagccuggacaucagccuggagaccguggccaucgacagacccgccgaggugagaaaggugugcuacaacgccgugcugacccacgugaagaucaacgacaagugccccagcaccggcgaggcccaccuggccgaggagaacgagggcgacaacgccugcaagagaaccuacagcgacagaggcuggggcaacggcugcggccuguucggcaagggcagcaucguggccugcgccaaguucaccugcgccaagagcaugagccuguucgagguggaccagaccaagauccaguacgugaucagagcccagcugcacgugggcgccaagcaggagaacuggaacaccgacaucaagacccugaaguucgacgcccugagcggcagccaggagguggaguucaucggcuacggcaaggccacccuggagugccaggugcagaccgccguggacuucggcaacagcuacaucgccgagauggagaccgagagcuggaucguggacagacagugggcccaggaccugacccugcccuggcagagcggcagcggcggcguguggagagagaugcaccaccugguggaguucgagcccccccacgccgccaccaucagagugcuggcccugggcaaccaggagggcagccugaagaccgcccugaccggcgccaugagagugaccaaggacaccaacgacaacaaccuguacaagcugcacggcggccacgugagcugcagagugaagcugagcgcccugacccugaagggcaccagcuacaagaucugcaccgacaagauguucuucgugaagaaccccaccgacaccggccacggcaccguggugaugcaggugaaggugagcaagggcgcccccugcagaauccccgugaucguggccgacgaccugaccgccgccaucaacaagggcauccuggugaccgugaaccccaucgccagcaccaacgacgacgaggugcugaucgaggugaacccccccuucggcgacagcuacaucaucgugggcagaggcgacagcagacugaccuaccaguggcacaaggagggcagcagcaucggcaagcuguucacccagaccaugaagggcguggagagacuggccgugaugggcgacaccgccugggacuucagcagcgccggcggcuucuucaccagcgugggcaagggcauccacaccguguucggcagcgccuuccagggccuguucggcggccugaacuggaucaccaaggugaucaugggcgccgugcugaucugggugggcaucaacaccagaaacaugaccaugagcaugagcaugauccuggugggcgugaucaugauguuccugagccugggcgugggcgccgaccagggcugcgccaucaacuucggcaagugaggacuagucccuguucccagagcccacuuuuuuuucuuuuuuugaaauaaaauagccugucuuucagaucuaaaaaaaaaaaaaaaaaaaaaaaaaaaaaaaaaaaaaaaaaaaaaaaaaaaaaaaaaaaaaaaaugcaucccccccccccccccccccccccccccccccaaaggcucuuuucagagccaccagaauu

SEQ ID NO: 809 - RNA, 2344 nt, Artificial Sequence
  mRNA product Design d-1 comprising derived and/or modified sequence from YFV__NC_002031.1__SSjev-prME (polyprotein: aa122-778) (opt4)
gggagacccgugacccggaaguuguacggcuacgcgacuuucccucccacaaacccucgcgcccuuccuuuccuacuugggcccggcagaaagcuuaccaugggcaagagaagcgccggcagcaucauguggcuggccagccuggccguggugaucgccugcgccggcgccgugacccuggugagaaagaacagauggcugcugcugaacgugaccagcgaggaccugggcaagaccuucagcgugggcaccggcaacugcaccaccaacauccuggaggccaaguacuggugccccgacagcauggaguacaacugccccaaccugagccccagagaggagcccgacgacaucgacugcuggugcuacggcguggagaacgugagaguggccuacggcaagugcgacagcgccggcagaagcagaagaagcagaagagccaucgaccugcccacccacgagaaccacggccugaagaccagacaggagaaguggaugaccggcagaaugggcgagagacagcugcagaagaucgagagaugguucgugagaaaccccuucuucgccgugaccgcccugaccaucgccuaccuggugggcagcaacaugacccagagaguggugaucgcccugcuggugcuggccgugggccccgccuacagcgcccacugcaucggcaucaccgacagagacuucaucgagggcgugcacggcggcaccugggugagcgccacccuggagcaggacaagugcgugaccgugauggcccccgacaagcccagccuggacaucagccuggagaccguggccaucgacagacccgccgaggugagaaaggugugcuacaacgccgugcugacccacgugaagaucaacgacaagugccccagcaccggcgaggcccaccuggccgaggagaacgagggcgacaacgccugcaagagaaccuacagcgacagaggcuggggcaacggcugcggccuguucggcaagggcagcaucguggccugcgccaaguucaccugcgccaagagcaugagccuguucgagguggaccagaccaagauccaguacgugaucagagcccagcugcacgugggcgccaagcaggagaacuggaacaccgacaucaagacccugaaguucgacgcccugagcggcagccaggagguggaguucaucggcuacggcaaggccacccuggagugccaggugcagaccgccguggacuucggcaacagcuacaucgccgagauggagaccgagagcuggaucguggacagacagugggcccaggaccugacccugcccuggcagagcggcagcggcggcguguggagagagaugcaccaccugguggaguucgagcccccccacgccgccaccaucagagugcuggcccugggcaaccaggagggcagccugaagaccgcccugaccggcgccaugagagugaccaaggacaccaacgacaacaaccuguacaagcugcacggcggccacgugagcugcagagugaagcugagcgcccugacccugaagggcaccagcuacaagaucugcaccgacaagauguucuucgugaagaaccccaccgacaccggccacggcaccguggugaugcaggugaaggugagcaagggcgcccccugcagaauccccgugaucguggccgacgaccugaccgccgccaucaacaagggcauccuggugaccgugaaccccaucgccagcaccaacgacgacgaggugcugaucgaggugaacccccccuucggcgacagcuacaucaucgugggcagaggcgacagcagacugaccuaccaguggcacaaggagggcagcagcaucggcaagcuguucacccagaccaugaagggcguggagagacuggccgugaugggcgacaccgccugggacuucagcagcgccggcggcuucuucaccagcgugggcaagggcauccacaccguguucggcagcgccuuccagggccuguucggcggccugaacuggaucaccaaggugaucaugggcgccgugcugaucugggugggcaucaacaccagaaacaugaccaugagcaugagcaugauccuggugggcgugaucaugauguuccugagccugggcgugggcgccugaggacuagucccuguucccagagcccacuuuuuuuucuuuuuuugaaauaaaauagccugucuuucagaucuaaaaaaaaaaaaaaaaaaaaaaaaaaaaaaaaaaaaaaaaaaaaaaaaaaaaaaaaaaaaaaaaugcaucccccccccccccccccccccccccccccccaaaggcucuuuucagagccaccagaauu

SEQ ID NO: 810 - RNA, 2392 nt, Artificial Sequence
  mRNA product Design d-1 comprising derived and/or modified sequence from YFV__NC_002031.1__X-SS-prME-XX (polyprotein: aa92-788) (opt5)
gggagacccgugacccggaaguuguacggcuacgcgacuuucccucccacaaacccucgcgcccuuccuuuccuacuugggcccggcagaaagcuuaccaugagaggccugagcucccggaagcgcagaucucacgacgugcucaccguccaguuccugauccuugggaugcugcucaugacaggaggcguuacgcuggugcggaaaaaccgcuggcuucugcucaaugugaccagcgaggaucuggggaagacauuuuccgucggaaccggcaacugcacaaccaauauucuggaagccaaauacuggugucccgacucuauggaguauaacugcccuaaucucagcccgagagaagaacccgaugacaucgauuguuggugcuacgggguggaaaacguucggguggcuuauggaaagugugacuccgccggccgcucuagacggagccgcagagcgauugaucugccuacacaugagaaucacggccuuaaaacccggcaagagaaguggaugacggggcgcaugggagaaagacagcugcagaagaucgagcggugguucguccgcaaccccuuuuucgcugugaccgcccucacaauugccuaccugguuggcuccaauaugacccagagaguggucaucgcccuucuggugcucgcuguggggccugcuuauagcgcccauugcaucggaauuacagaccgggauuuuaucgaaggcguccacgggggaaccuggguuucugcgacgcuggagcaagacaaaugugugacagugauggcccccgauaagccuucccuggacauuagccucgagaccgucgcuaucgauagaccggccgaagugcgcaaaguuugcuacaacgcugugcugacacaugucaagauuaaugacaaaugucccucuaccggcgaggcccaccuugcggaagagaacgaaggcgacaaugccugcaagcggaccuauuccgauagaggguggggaaacggcugugggcuguucggaaagggcagcaucguggcuugcgccaaauuuacaugcgcuaagucuaugucccucuucgagguugaccagacgaaaauucaguacgugauccgcgcccagcugcacgucggggccaagcaagagaauuggaacaccgauaucaaaacacuuaaguuugacgcucugagcggaucccaggaaguggaguucauuggcuacggcaaagcgacccucgaaugucagguccagacagccguggauuuugggaacucuuauaucgcugagauggaaaccgagagcuggauuguugaccggcaaugggcccaggaucugacgcugccuuggcaguccggaagcggcgggguguggagagagaugcaucaccucgucgaguucgagcccccucaugccgcuacaauccgcgugcuggcccuuggaaaucaagaaggcucucugaagaccgcgcucaccggggcuaugcggguuacaaaggacaccaacgauaauaaccuguacaaacuucacggcggacacguguccugcagagucaagcugagcgcccucacacugaaaggcacgucuuauaagauuuguaccgacaaaauguuuuucgugaagaaucccacagauaccgggcauggaacagugguuaugcaggucaaggugagcaaaggcgccccgugccgcaucccugugaucgucgcugacgaccugaccgccgcuauuaacaaggggauccucgugacgguuaaucccauugccuccaccaacgaugacgaggugcugaucgaagucaauccucccuucggagauucuuacauuaucgugggccggggagacagcagacuuacauaucaguggcacaaagagggcuccagcaucggaaagcuguuuacccagacaaugaaaggcguugagcgccucgcggugaugggggauaccgccugggacuucucuuccgcuggaggcuuuuucacgagcgucgggaaggggauucauacaguguuuggcucugccuuccaagggcuguuuggcggacugaacuggaucaccaagguuauuaugggcgcugugcuuaucugggucgggauuaauacacggaacaugaccauguccaugagcaugauccucgugggagugauuaugauguuccugucccugggcgucggggccgaucagggaugugcgaucaauuuuggcaaaugaggacuagucccuguucccagagcccacuuuuuuuucuuuuuuugaaauaaaauagccugucuuucagaucuaaaaaaaaaaaaaaaaaaaaaaaaaaaaaaaaaaaaaaaaaaaaaaaaaaaaaaaaaaaaaaaaugcaucccccccccccccccccccccccccccccccaaaggcucuuuucagagccaccagaauu

SEQ ID NO: 811 - RNA, 2329 nt, Artificial Sequence
  mRNA product Design d-1 comprising derived and/or modified sequence from YFV__NC_002031.1__SS-prME (polyprotein: M,aa104-778) (opt5)
gggagacccgugacccggaaguuguacggcuacgcgacuuucccucccacaaacccucgcgcccuuccuuuccuacuugggcccggcagaaagcuuaccauggacgugcugaccguccaguuccucauccugggcaugcuucugaugacagggggaguuacgcucgugagaaagaaccgguggcugcuucugaaugugaccagcgaggaucucggcaaaacauuuuccgucgggaccggaaacugcacaaccaauauucuggaagccaaguacuggugucccgacucuauggaguauaacugcccuaaucugagcccgcgcgaagaacccgaugacaucgauuguuggugcuacggcguggaaaacguuagaguggcuuaugggaaaugugacuccgccggacggucucgcagaagccggcgcgcgauugaucucccuacacacgagaaucauggccugaagaccagacaagagaaauggaugacgggccggaugggggaacgccagcuucagaagaucgagagaugguucguccggaaccccuuuuucgcugugaccgcccugacaauugccuaccucguuggauccaauaugacccagcgcguggucaucgcucugcuugugcuggccgugggcccugcuuauucugcccacugcaucgggauuacagacagagauuuuaucgaaggaguccauggcgggaccuggguuagcgcgacgcucgagcaagacaagugugugacagugauggcccccgauaaaccuucccuggacauuagccuggagaccgucgcuaucgaucggccggccgaagugcgcaagguuugcuacaacgcugugcucacacacgucaaaauuaaugacaagugucccucuaccggagaggcccaucuggcggaagagaacgaaggcgacaaugccugcaaaagaaccuauuccgaucggggcugggggaacggauguggccuuuucgggaagggaagcaucguggcuugcgccaaguuuacaugcgcuaaaucuaugucccuguucgagguugaccagacgaagauucaguacgugaucagagcccagcuccacgucggcgccaaacaagagaauuggaacaccgauaucaagacacugaaauuugacgcucuuagcgggucucaggaaguggaguucauuggauacggcaaggcgacccuggaaugucagguccagacagccguggauuuuggcaacuccuauaucgcugagauggaaaccgagagcuggauuguugaccgccaaugggcccaggaucucacgcugccuuggcaguccgggucuggaggcguguggcgggagaugcaccaucuggucgaguucgagcccccucacgccgcuacaaucagagugcucgcccuggggaaucaagaaggaagccuuaaaaccgcgcugaccggcgcuaugcgcguuacaaaggacaccaacgauaauaaccucuacaagcugcaugggggccacguguccugccgggucaaacuuagcgcccugacacucaagggaacgucuuauaaaauuuguaccgacaagauguuuuucgugaaaaaucccacagauaccggccacgggacagugguuaugcaggucaagguguccaagggagccccgugcagaaucccugugaucgucgcugacgaccugaccgccgcuauuaacaaaggcauccuggugacgguuaaucccauugccagcaccaacgaugacgaggugcucaucgaagucaauccucccuucggggauucuuacauuaucgugggacgcggcgacagccggcugacauaucaguggcauaaggagggguccucuaucggcaaacuuuuuacccagacaaugaagggaguugagagacuggcggugaugggcgauaccgccugggacuucagcuccgcugggggauuuuucacgagcgucggcaaagggauucacacaguguuuggaucugccuuccaaggccucuuugggggccugaacuggaucaccaagguuauuaugggagcugugcugaucugggucggcauuaauacacgcaacaugaccauguccaugagcaugauccuugugggggugauuaugauguuccucucucugggagucggcgccugaggacuagucccuguucccagagcccacuuuuuuuucuuuuuuugaaauaaaauagccugucuuucagaucuaaaaaaaaaaaaaaaaaaaaaaaaaaaaaaaaaaaaaaaaaaaaaaaaaaaaaaaaaaaaaaaaugcaucccccccccccccccccccccccccccccccaaaggcucuuuucagagccaccagaauu

SEQ ID NO: 812 - RNA, 2356 nt, Artificial Sequence
  mRNA product Design d-1 comprising derived and/or modified sequence from YFV__NC_002031.1__SSIgE-prME-XX (polyprotein: aa122-788) (opt5)
gggagacccgugacccggaaguuguacggcuacgcgacuuucccucccacaaacccucgcgcccuuccuuuccuacuugggcccggcagaaagcuuaccauggacuggaccuggauccuguuccucguggccgcugccacaagaguccacagcguuacgcuggugcggaaaaaccgcuggcuucugcucaaugugaccagcgaggaucuggggaagacauuuuccgucggaaccggcaacugcacaaccaauauucuggaagccaaauacuggugucccgacucuauggaguauaacugcccuaaucucagcccgagagaagaacccgaugacaucgauuguuggugcuacgggguggaaaacguucggguggcuuauggaaagugugacuccgccggccgcucuagacggagccgcagagcgauugaucugccuacacaugagaaucacggccuuaaaacccggcaagagaaguggaugacggggcgcaugggagaaagacagcugcagaagaucgagcggugguucguccgcaaccccuuuuucgcugugaccgcccucacaauugccuaccugguuggcuccaauaugacccagagaguggucaucgcccuucuggugcucgcuguggggccugcuuauagcgcccauugcaucggaauuacagaccgggauuuuaucgaaggcguccacgggggaaccuggguuucugcgacgcuggagcaagacaaaugugugacagugauggcccccgauaagccuucccuggacauuagccucgagaccgucgcuaucgauagaccggccgaagugcgcaaaguuugcuacaacgcugugcugacacaugucaagauuaaugacaaaugucccucuaccggcgaggcccaccuugcggaagagaacgaaggcgacaaugccugcaagcggaccuauuccgauagaggguggggaaacggcugugggcuguucggaaagggcagcaucguggcuugcgccaaauuuacaugcgcuaagucuaugucccucuucgagguugaccagacgaaaauucaguacgugauccgcgcccagcugcacgucggggccaagcaagagaauuggaacaccgauaucaaaacacuuaaguuugacgcucugagcggaucccaggaaguggaguucauuggcuacggcaaagcgacccucgaaugucagguccagacagccguggauuuugggaacucuuauaucgcugagauggaaaccgagagcuggauuguugaccggcaaugggcccaggaucugacgcugccuuggcaguccggaagcggcgggguguggagagagaugcaucaccucgucgaguucgagcccccucaugccgcuacaauccgcgugcuggcccuuggaaaucaagaaggcucucugaagaccgcgcucaccggggcuaugcggguuacaaaggacaccaacgauaauaaccuguacaaacuucacggcggacacguguccugcagagucaagcugagcgcccucacacugaaaggcacgucuuauaagauuuguaccgacaaaauguuuuucgugaagaaucccacagauaccgggcauggaacagugguuaugcaggucaaggugagcaaaggcgccccgugccgcaucccugugaucgucgcugacgaccugaccgccgcuauuaacaaggggauccucgugacgguuaaucccauugccuccaccaacgaugacgaggugcugaucgaagucaauccucccuucggagauucuuacauuaucgugggccggggagacagcagacuuacauaucaguggcacaaagagggcuccagcaucggaaagcuguuuacccagacaaugaaaggcguugagcgccucgcggugaugggggauaccgccugggacuucucuuccgcuggaggcuuuuucacgagcgucgggaaggggauucauacaguguuuggcucugccuuccaagggcuguuuggcggacugaacuggaucaccaagguuauuaugggcgcugugcuuaucugggucgggauuaauacacggaacaugaccauguccaugagcaugauccucgugggagugauuaugauguuccugucccugggcgucggggccgaucagggaugugcgaucaauuuuggcaaaugaggacuagucccuguucccagagcccacuuuuuuuucuuuuuuugaaauaaaauagccugucuuucagaucuaaaaaaaaaaaaaaaaaaaaaaaaaaaaaaaaaaaaaaaaaaaaaaaaaaaaaaaaaaaaaaaaugcaucccccccccccccccccccccccccccccccaaaggcucuuuucagagccaccagaauu

SEQ ID NO: 813 - RNA, 2326 nt, Artificial Sequence
  mRNA product Design d-1 comprising derived and/or modified sequence from YFV__NC_002031.1__SSIgE-prME (polyprotein: aa122-778) (opt5)
gggagacccgugacccggaaguuguacggcuacgcgacuuucccucccacaaacccucgcgcccuuccuuuccuacuugggcccggcagaaagcuuaccauggacuggaccuggauccuguuccucguggccgcugccacaagaguccacagcgugacccuggucagaaagaaccgguggcuccugcuuaauguuacaagcgaggaccugggcaaaacguucuccguggggaccggaaacugcacaaccaauauccucgaagccaaguacuggugucccgauucuauggaguauaacugcccuaaucugagcccgcgcgaggaacccgacgauauugacuguuggugcuacggcguggaaaacgucagaguggcuuaugggaaaugugauuccgccggacggucucgcagaagccggcgcgcgaucgaccuuccuacacacgagaaucauggccugaagaccagacaggagaaauggaugacagggcggaugggagaacgccaacuccagaagauugagagaugguuuguucggaaccccuucuuugcugugaccgcccugacgaucgccuaccuggucggcuccaauaugacccagcgcgugguuauugcucuccuggugcuugccgucggcccugcuuauucugcccacugcaucgggaucacagauagagacuucauugaaggagugcauggcgggaccugggugagcgcgacacuggagcaggauaagugugucaccguuauggcccccgacaaaccuucccucgauaucagccuggagacgguggcuauugaccggccggccgaagugcgcaaggucugcuacaacgcugugcuuacacacguuaaaaucaaugauaagugucccucuaccggagaggcccaucuggcggaagagaacgaaggcgacaaugccugcaaaagaacauauuccgaccggggguggggaaacggcuguggccucuuugggaagggaagcauuguggcuugcgccaaguuuaccugcgcuaaaucuaugucccuguucgaggucgaucaaaccaagauccaguacgugauuagagcccagcugcacguuggcgccaaacaggagaauuggaacacagacaucaagacgcucaaauucgaugcucugagcgggucucaagaaguggaguuuaucggauacggcaaggcgacccuugaaugucagguccagacagccguggacuucgggaacuccuauauugcugagauggaaaccgagagcuggaucgucgaucgccagugggcccaagaccugacacucccuuggcaguccggaucuggcggcguguggcgggagaugcaccaucugguugaauuugagcccccucacgccgcuaccauuagagugcuugcccuggggaaucaggaaggaagccucaaaacggcgcugacaggcgcuaugcgcgucaccaaggauaccaacgacaauaaccuguacaagcuccaugggggacacguguccugccggguuaaacugagcgcccuuacacugaagggcaccucuuauaaaaucuguacagauaagauguucuuugugaaaaaucccacggacaccgggcacggcacagucgugaugcaagugaagguuuccaagggagccccgugccgcauuccugucaucguggcugaugaccucaccgccgcuaucaacaaaggcauucuggugacagucaaucccaucgccagcaccaacgacgaugaggugcuuauugaaguuaauccucccuucggggacucuuacaucauugugggaagaggcgauagccggcugacguaucaguggcauaaggagggguccucuaucggaaaacucuucacccagacaaugaagggcgucgagagacuggcggugaugggggacaccgccugggauuuuagcuccgcuggcggauucuuuacaagcguuggcaaagggauccacaccguguucggaucugccuuucagggccuguucgggggacucaacuggauuacgaaggucaucaugggcgcugugcugauuuggguugggaucaauacacgcaacaugaccauguccaugagcaugauucuugugggcgucaucaugauguuucugucucucggagugggcgccugaggacuagucccuguucccagagcccacuuuuuuuucuuuuuuugaaauaaaauagccugucuuucagaucuaaaaaaaaaaaaaaaaaaaaaaaaaaaaaaaaaaaaaaaaaaaaaaaaaaaaaaaaaaaaaaaaugcaucccccccccccccccccccccccccccccccaaaggcucuuuucagagccaccagaauu

SEQ ID NO: 814 - RNA, 2374 nt, Artificial Sequence
  mRNA product Design d-1 comprising derived and/or modified sequence from YFV__NC_002031.1__SSjev-prME-XX (polyprotein: aa122-788) (opt5)
gggagacccgugacccggaaguuguacggcuacgcgacuuucccucccacaaacccucgcgcccuuccuuuccuacuugggcccggcagaaagcuuaccaugggcaagagaagcgccggguccaucauguggcuggcuucucucgccguggucauugcgugcgcuggagccguuacgcuggugcggaaaaaccgcuggcuucugcucaaugugaccagcgaggaucuggggaagacauuuuccgucggaaccggcaacugcacaaccaauauucuggaagccaaauacuggugucccgacucuauggaguauaacugcccuaaucucagcccgagagaagaacccgaugacaucgauuguuggugcuacgggguggaaaacguucggguggcuuauggaaagugugacuccgccggccgcucuagacggagccgcagagcgauugaucugccuacacaugagaaucacggccuuaaaacccggcaagagaaguggaugacggggcgcaugggagaaagacagcugcagaagaucgagcggugguucguccgcaaccccuuuuucgcugugaccgcccucacaauugccuaccugguuggcuccaauaugacccagagaguggucaucgcccuucuggugcucgcuguggggccugcuuauagcgcccauugcaucggaauuacagaccgggauuuuaucgaaggcguccacgggggaaccuggguuucugcgacgcuggagcaagacaaaugugugacagugauggcccccgauaagccuucccuggacauuagccucgagaccgucgcuaucgauagaccggccgaagugcgcaaaguuugcuacaacgcugugcugacacaugucaagauuaaugacaaaugucccucuaccggcgaggcccaccuugcggaagagaacgaaggcgacaaugccugcaagcggaccuauuccgauagaggguggggaaacggcugugggcuguucggaaagggcagcaucguggcuugcgccaaauuuacaugcgcuaagucuaugucccucuucgagguugaccagacgaaaauucaguacgugauccgcgcccagcugcacgucggggccaagcaagagaauuggaacaccgauaucaaaacacuuaaguuugacgcucugagcggaucccaggaaguggaguucauuggcuacggcaaagcgacccucgaaugucagguccagacagccguggauuuugggaacucuuauaucgcugagauggaaaccgagagcuggauuguugaccggcaaugggcccaggaucugacgcugccuuggcaguccggaagcggcgggguguggagagagaugcaucaccucgucgaguucgagcccccucaugccgcuacaauccgcgugcuggcccuuggaaaucaagaaggcucucugaagaccgcgcucaccggggcuaugcggguuacaaaggacaccaacgauaauaaccuguacaaacuucacggcggacacguguccugcagagucaagcugagcgcccucacacugaaaggcacgucuuauaagauuuguaccgacaaaauguuuuucgugaagaaucccacagauaccgggcauggaacagugguuaugcaggucaaggugagcaaaggcgccccgugccgcaucccugugaucgucgcugacgaccugaccgccgcuauuaacaaggggauccucgugacgguuaaucccauugccuccaccaacgaugacgaggugcugaucgaagucaauccucccuucggagauucuuacauuaucgugggccggggagacagcagacuuacauaucaguggcacaaagagggcuccagcaucggaaagcuguuuacccagacaaugaaaggcguugagcgccucgcggugaugggggauaccgccugggacuucucuuccgcuggaggcuuuuucacgagcgucgggaaggggauucauacaguguuuggcucugccuuccaagggcuguuuggcggacugaacuggaucaccaagguuauuaugggcgcugugcuuaucugggucgggauuaauacacggaacaugaccauguccaugagcaugauccucgugggagugauuaugauguuccugucccugggcgucggggccgaucagggaugugcgaucaauuuuggcaaaugaggacuagucccuguucccagagcccacuuuuuuuucuuuuuuugaaauaaaauagccugucuuucagaucuaaaaaaaaaaaaaaaaaaaaaaaaaaaaaaaaaaaaaaaaaaaaaaaaaaaaaaaaaaaaaaaaugcaucccccccccccccccccccccccccccccccaaaggcucuuuucagagccaccagaauu

SEQ ID NO: 815 - RNA, 2344 nt, Artificial Sequence
  mRNA product Design d-1 comprising derived and/or modified sequence from YFV__NC_002031.1__SSjev-prME (polyprotein: aa122-778) (opt5)
gggagacccgugacccggaaguuguacggcuacgcgacuuucccucccacaaacccucgcgcccuuccuuuccuacuugggcccggcagaaagcuuaccaugggcaagagaagcgccggguccaucauguggcuggcuucucucgccguggucauugcgugcgcuggagccgugacccuggucagaaagaaccgguggcuccugcuuaauguuacaagcgaggaccugggcaaaacguucuccguggggaccggaaacugcacaaccaauauccucgaagccaaguacuggugucccgauucuauggaguauaacugcccuaaucugagcccgcgcgaggaacccgacgauauugacuguuggugcuacggcguggaaaacgucagaguggcuuaugggaaaugugauuccgccggacggucucgcagaagccggcgcgcgaucgaccuuccuacacacgagaaucauggccugaagaccagacaggagaaauggaugacagggcggaugggagaacgccaacuccagaagauugagagaugguuuguucggaaccccuucuuugcugugaccgcccugacgaucgccuaccuggucggcuccaauaugacccagcgcgugguuauugcucuccuggugcuugccgucggcccugcuuauucugcccacugcaucgggaucacagauagagacuucauugaaggagugcauggcgggaccugggugagcgcgacacuggagcaggauaagugugucaccguuauggcccccgacaaaccuucccucgauaucagccuggagacgguggcuauugaccggccggccgaagugcgcaaggucugcuacaacgcugugcuuacacacguuaaaaucaaugauaagugucccucuaccggagaggcccaucuggcggaagagaacgaaggcgacaaugccugcaaaagaacauauuccgaccggggguggggaaacggcuguggccucuuugggaagggaagcauuguggcuugcgccaaguuuaccugcgcuaaaucuaugucccuguucgaggucgaucaaaccaagauccaguacgugauuagagcccagcugcacguuggcgccaaacaggagaauuggaacacagacaucaagacgcucaaauucgaugcucugagcgggucucaagaaguggaguuuaucggauacggcaaggcgacccuugaaugucagguccagacagccguggacuucgggaacuccuauauugcugagauggaaaccgagagcuggaucgucgaucgccagugggcccaagaccugacacucccuuggcaguccggaucuggcggcguguggcgggagaugcaccaucugguugaauuugagcccccucacgccgcuaccauuagagugcuugcccuggggaaucaggaaggaagccucaaaacggcgcugacaggcgcuaugcgcgucaccaaggauaccaacgacaauaaccuguacaagcuccaugggggacacguguccugccggguuaaacugagcgcccuuacacugaagggcaccucuuauaaaaucuguacagauaagauguucuuugugaaaaaucccacggacaccgggcacggcacagucgugaugcaagugaagguuuccaagggagccccgugccgcauuccugucaucguggcugaugaccucaccgccgcuaucaacaaaggcauucuggugacagucaaucccaucgccagcaccaacgacgaugaggugcuuauugaaguuaauccucccuucggggacucuuacaucauugugggaagaggcgauagccggcugacguaucaguggcauaaggagggguccucuaucggaaaacucuucacccagacaaugaagggcgucgagagacuggcggugaugggggacaccgccugggauuuuagcuccgcuggcggauucuuuacaagcguuggcaaagggauccacaccguguucggaucugccuuucagggccuguucgggggacucaacuggauuacgaaggucaucaugggcgcugugcugauuuggguugggaucaauacacgcaacaugaccauguccaugagcaugauucuugugggcgucaucaugauguuucugucucucggagugggcgccugaggacuagucccuguucccagagcccacuuuuuuuucuuuuuuugaaauaaaauagccugucuuucagaucuaaaaaaaaaaaaaaaaaaaaaaaaaaaaaaaaaaaaaaaaaaaaaaaaaaaaaaaaaaaaaaaaugcaucccccccccccccccccccccccccccccccaaaggcucuuuucagagccaccagaauu

SEQ ID NO: 816 - RNA, 2392 nt, Artificial Sequence
  mRNA product Design d-1 comprising derived and/or modified sequence from YFV__NC_002031.1__X-SS-prME-XX (polyprotein: aa92-788) (opt6)
gggagacccgugacccggaaguuguacggcuacgcgacuuucccucccacaaacccucgcgcccuuccuuuccuacuugggcccggcagaaagcuuaccaugagaggauuaucaaguagaaaaagaagaucacaugauguacuaaccgugcaauuuuugaucuuagggaugcucuuaaugacaggagguguuacauuaguaagaaagaaucgauggcugcuuuuaaaugugacaucagaggauuuagggaaaacauuuucgguaggaacaggaaauuguacuacaaauauacuugaagcaaaauauuggugcccagacucuauggaauauaauuguccaaauuuaaguccuagagaagaaccugacgauauagauuguugguguuaugguguagaaaauguaagaguagcauacggcaaaugcgauagugcaggacguucuagacguucaaggagagccauagaucugcccacucacgaaaaucacggauugaaaacacgacaagaaaaauggaugacugggcgaaugggagaaagacaacuacagaaaauugaaagaugguucguuagaaauccauucuuugccguaacagcuuuaacaauagccuauuuaguagguaguaauaugacacaaagaguaguaauagcauugcuaguguuagcaguuggaccagcuuauagugcacauugcauaggaauaacagauagagacuuuauagaaggaguacacgggggaacuuggguaagugccacuuuagaacaagauaaauguguuacagugauggcgccagauaaaccaagucuggacauaaguuuggaaacaguagcgauugauagacccgcagaaguaagaaaaguuuguuauaaugcuguucuaacccauguuaaaauaaaugauaaaugcccuagcaccggagaagcccaucuagcagaagaaaaugaaggagauaacgcauguaaacgaacauacucagauagaggauggggcaacggauguggcuuguuuggaaaagguagcauaguagcaugcgcuaaauuuacaugcgcaaagucaaugucauuauuugaaguagaucaaacaaaaauacaauauguaauaagagcucaauuacacgugggugcaaaacaagaaaauuggaauacagacauaaagacacuaaaguucgacgcauuaaguggaucacaagagguagaauuuauaggguacggaaaagcgacuuuagagugucaaguccaaacagcaguagauuucgguaacucauacauagcagaaauggaaacugaaaguuggauaguagauagacaaugggcacaagacuugacacuaccuuggcaaucaggaagcggaggaguauggagagaaaugcaucauuuaguagaauuugaaccaccucaugcagcaacaauaagaguauuagcccuaggaaaccaagaaggaaguuuaaaaacagcacuaacaggagcuaugagaguaacaaaagauacaaaugacaacaaucuauacaaauuacacggaggacauguaagcugccggguaaaguugagcgcacuaacauuaaaaggaacgaguuauaaaauaugcacagauaaaauguucuuuguuaaaaauccuacagauaccggucauggaacaguaguaaugcaaguaaaaguaaguaaaggcgcucccuguagaauaccuguaauagucgcagacgauuuaaccgcagcaauaaauaaaggaauauuagucacgguaaacccaauagcgucaacaaaugaugaugaaguauuaauagaaguuaacccaccuuuuggagacaguuauauaauagucggaaggggugauaguagacuaacauaccaauggcauaaagaaggaagcucaauaggaaaauuauuuacucaaaccaugaaagguguagaaaggcuagcuguuaugggugacacagcaugggauuuuucaagcgcaggaggguucuuuacaucaguagguaaaggaauacauacaguauuuggaagugcauuucaaggauuauuuggugguuuaaauuggauaacaaaaguaauaaugggcgcaguuuuaauauggguagguauaaacacaagaaauaugacaaugucuaugaguaugauauuggucggaguaauaaugauguuuuuaucacuaggagugggugcagaucaagguugcgcuauuaauuuuggaaaaugaggacuagucccuguucccagagcccacuuuuuuuucuuuuuuugaaauaaaauagccugucuuucagaucuaaaaaaaaaaaaaaaaaaaaaaaaaaaaaaaaaaaaaaaaaaaaaaaaaaaaaaaaaaaaaaaaugcaucccccccccccccccccccccccccccccccaaaggcucuuuucagagccaccagaauu

SEQ ID NO: 817 - RNA, 2329 nt, Artificial Sequence
  mRNA product Design d-1 comprising derived and/or modified sequence from YFV__NC_002031.1__SS-prME (polyprotein: M,aa104-778) (opt6)
gggagacccgugacccggaaguuguacggcuacgcgacuuucccucccacaaacccucgcgcccuuccuuuccuacuugggcccggcagaaagcuuaccauggauguucuaacaguacaauuuuuaauauuagggauguuauuaaugacaggaggcguaacauuaguacgaaagaaucgauggcuauuacuaaacguuacgucugaagauuuaggaaaaacauuuagcguaggaacaggaaauugcaccacgaauaucuuagaagcaaaauauugguguccagauaguauggaauacaauuguccaaauuuaaguccuagagaggaacccgacgauauagauugcugguguuacggaguggaaaauguaagaguagcauauggaaaaugugacagcgcagguagaaguagaagaucacgacgagcaauugaucuacccacucaugagaaccauggacuaaaaacaagacaagaaaaauggaugacagguagaaugggcgaaagacaauuacagaaaauagaaagaugguuuguacgaaauccuuucuuugcugucacugcauuaacuauagcuuauuuaguaggaaguaacaugacucaaagaguaguaauagcacuauuaguacuagcaguaggaccagcuuacagugcacacuguauagggauaacggauagagauuuuauagaaggaguacauggggguacaugggugucugccacuuuagaacaagacaaauguguuacaguuauggccccagauaaacccucuuuagacauaucauuagaaacuguagcaauagauagaccggcggaagugagaaagguauguuauaaugcaguacuaacccauguaaaaauuaaugacaaaugcccaucaacaggagaggcucaucuagcugaagaaaaugaaggagacaaugcuugcaaacguacauauucagacaggggguggggaaauggauguggauuauuugguaaagggucaauaguagcaugugcaaaauuuacaugcgcaaaaaguaugagcuuauuugaaguagaucaaacaaaaauccaauauguaauuagagcucaacuucacguaggagcaaaacaagagaauuggaacacagauauaaaaacauuaaaauuugacgcuuugucuggaagucaagaagucgaauuuauuggcuauggaaaggcaacauuagaaugccaaguucaaaccgcaguagauuuuggaaauucauacauagcagaaauggagacugaaaguuggauaguagauagacagugggcucaagaccuaacuuuaccauggcaaucaggaaguggugguguauggagagaaaugcaucauuuaguagaauuugaaccaccacaugcagcaacaauuagaguacuagcauuaggaaaucaagaagguaguuuaaagacagcgcuuaccggagcaaugagaguuacaaaagauacuaaugacaauaauuuauauaaacuucauggaggacauguuagcuguagagucaaauuaagugcauuaacacucaaaggaacaucauacaaaauauguacagauaaaauguuuuucgucaagaauccaacagauacaggacauggaacaguuguaaugcaaguaaaaguaucaaaaggagcaccuugcagaauaccaguaauaguagcagaugauuuaacagccgcaauuaauaaagggauauuaguaacaguaaacccuauagcaaguacaaaugaugaugaagucuugauagaaguaaauccaccauuuggagauucguauauaauagucggaagaggagauagucgauuaacauaucaauggcauaaagaagguucaucaauaggaaaauuauuuacacaaaccaugaaaggaguugaaagauuagcuguaaugggggacacagcuugggauuuuucuagcgcaggaggauucuuuacauccguaggaaaagguauacacacaguauuuggcucagcauuccaaggguuauuuggugguuuaaauuggauaacaaaagugauuaugggagcagugcuaaucuggguaggaauaaauacaagaaauaugacaaugaguaugagcaugauucucguaggaguaauaaugauguuccuuaguuugggaguuggcgcuugaggacuagucccuguucccagagcccacuuuuuuuucuuuuuuugaaauaaaauagccugucuuucagaucuaaaaaaaaaaaaaaaaaaaaaaaaaaaaaaaaaaaaaaaaaaaaaaaaaaaaaaaaaaaaaaaaugcaucccccccccccccccccccccccccccccccaaaggcucuuuucagagccaccagaauu

SEQ ID NO: 818 - RNA, 2356 nt, Artificial Sequence
  mRNA product Design d-1 comprising derived and/or modified sequence from YFV__NC_002031.1__SSIgE-prME-XX (polyprotein: aa122-788) (opt6)
gggagacccgugacccggaaguuguacggcuacgcgacuuucccucccacaaacccucgcgcccuuccuuuccuacuugggcccggcagaaagcuuaccauggacuggacauggauauuauuuuuaguagcagcagcaacaagaguacauucaguuacauuaguaagaaagaaucgauggcugcuuuuaaaugugacaucagaggauuuagggaaaacauuuucgguaggaacaggaaauuguacuacaaauauacuugaagcaaaauauuggugcccagacucuauggaauauaauuguccaaauuuaaguccuagagaagaaccugacgauauagauuguugguguuaugguguagaaaauguaagaguagcauacggcaaaugcgauagugcaggacguucuagacguucaaggagagccauagaucugcccacucacgaaaaucacggauugaaaacacgacaagaaaaauggaugacugggcgaaugggagaaagacaacuacagaaaauugaaagaugguucguuagaaauccauucuuugccguaacagcuuuaacaauagccuauuuaguagguaguaauaugacacaaagaguaguaauagcauugcuaguguuagcaguuggaccagcuuauagugcacauugcauaggaauaacagauagagacuuuauagaaggaguacacgggggaacuuggguaagugccacuuuagaacaagauaaauguguuacagugauggcgccagauaaaccaagucuggacauaaguuuggaaacaguagcgauugauagacccgcagaaguaagaaaaguuuguuauaaugcuguucuaacccauguuaaaauaaaugauaaaugcccuagcaccggagaagcccaucuagcagaagaaaaugaaggagauaacgcauguaaacgaacauacucagauagaggauggggcaacggauguggcuuguuuggaaaagguagcauaguagcaugcgcuaaauuuacaugcgcaaagucaaugucauuauuugaaguagaucaaacaaaaauacaauauguaauaagagcucaauuacacgugggugcaaaacaagaaaauuggaauacagacauaaagacacuaaaguucgacgcauuaaguggaucacaagagguagaauuuauaggguacggaaaagcgacuuuagagugucaaguccaaacagcaguagauuucgguaacucauacauagcagaaauggaaacugaaaguuggauaguagauagacaaugggcacaagacuugacacuaccuuggcaaucaggaagcggaggaguauggagagaaaugcaucauuuaguagaauuugaaccaccucaugcagcaacaauaagaguauuagcccuaggaaaccaagaaggaaguuuaaaaacagcacuaacaggagcuaugagaguaacaaaagauacaaaugacaacaaucuauacaaauuacacggaggacauguaagcugccggguaaaguugagcgcacuaacauuaaaaggaacgaguuauaaaauaugcacagauaaaauguucuuuguuaaaaauccuacagauaccggucauggaacaguaguaaugcaaguaaaaguaaguaaaggcgcucccuguagaauaccuguaauagucgcagacgauuuaaccgcagcaauaaauaaaggaauauuagucacgguaaacccaauagcgucaacaaaugaugaugaaguauuaauagaaguuaacccaccuuuuggagacaguuauauaauagucggaaggggugauaguagacuaacauaccaauggcauaaagaaggaagcucaauaggaaaauuauuuacucaaaccaugaaagguguagaaaggcuagcuguuaugggugacacagcaugggauuuuucaagcgcaggaggguucuuuacaucaguagguaaaggaauacauacaguauuuggaagugcauuucaaggauuauuuggugguuuaaauuggauaacaaaaguaauaaugggcgcaguuuuaauauggguagguauaaacacaagaaauaugacaaugucuaugaguaugauauuggucggaguaauaaugauguuuuuaucacuaggagugggugcagaucaagguugcgcuauuaauuuuggaaaaugaggacuagucccuguucccagagcccacuuuuuuuucuuuuuuugaaauaaaauagccugucuuucagaucuaaaaaaaaaaaaaaaaaaaaaaaaaaaaaaaaaaaaaaaaaaaaaaaaaaaaaaaaaaaaaaaaugcaucccccccccccccccccccccccccccccccaaaggcucuuuucagagccaccagaauu

SEQ ID NO: 819 - RNA, 2326 nt, Artificial Sequence
  mRNA product Design d-1 comprising derived and/or modified sequence from YFV__NC_002031.1__SSIgE-prME (polyprotein: aa122-778) (opt6)
gggagacccgugacccggaaguuguacggcuacgcgacuuucccucccacaaacccucgcgcccuuccuuuccuacuugggcccggcagaaagcuuaccauggacuggacauggauauuauuuuuaguagcagcagcaacaagaguacauucaguaacauuagucagaaagaacagaugguuauuacugaacguaacaagugaagacuuaggaaaaacauuuaguguaggcacaggaaauugcacaacaaauauacuugaagcaaaauauugguguccagauagcauggaauauaauuguccaaauuuaucaccuagagaggaacccgaugauauagauuguugguguuauggaguugaaaacgugcgaguagcauaugguaaaugugauagcgcaggaagaaguagaagaaguagaagggcaauagacuuaccaacucaugaaaaccauggauuaaaaacaagacaggaaaaauggaugacaggaagaaugggagaacgacaauuacagaaaauagaaagaugguucguaagaaauccauucuuugcaguaacagcauuaacaauagcauaucuaguuggaaguaacaugacucaaagaguaguaauagcauuguuaguacuagcaguaggaccggcuuauagcgcacauuguauagggauaacagauagagacuuuauagaaggagugcacgguggaacauggguuucagcaacgcuagagcaagauaaauguguaacgguaauggcgccggauaaaccaagccuugacauaucacuagaaacgguugcaaucgaucgaccagccgaaguaagaaaaguaugcuauaaugcggucuuaacacacguaaaaauaaaugauaaauguccuucaacgggagaagcacauuuagcagaagaaaacgaaggagacaacgcguguaaaagaacauauucagauaggggcuggggaaacggcugcgguuuauuuggaaaaggaaguauaguagcaugcgcaaaauuuacuugcgcaaaaaguaugaguuuauucgaaguugaucaaacaaagauacaauauguaauacgagcacaauuacauguaggugcaaagcaagaaaauuggaauacagacauaaaaacauugaaauuugacgcuuugaguggaucacaagaaguagaauuuauaggauacggaaaagcuacauuagaaugucaaguacaaacugcaguagauuuuggaaauucguauauagcagaaauggaaacugaaucauggauuguagauaggcaaugggcacaagauuuaaccuugccauggcaaagcggaagcggggguguauggcgggaaaugcaucauuuaguagaguucgaacccccacacgcggcuaccauaagaguacuagcauuaggaaaucaagaagggagucucaagacagcacucacaggugcaaugcgaguaacgaaagauacaaaugacaauaaucuauacaaacuacacggaggacauguaucuugcagaguaaaauuaucugcauuaacacuaaaagggacaaguuacaaaauuuguacagauaagauguucuuugucaaaaacccaacagacacgggacacggaacgguagucaugcaaguuaaaguaagcaaaggagcgccaugcagaauaccaguaaucgucgcagaugauuuaacagccgcaauaaauaaagguauauuaguaacgguaaauccaauagcgaguaccaaugaugaugaaguacuaauagaagugaacccaccauuuggugauagcuauauaauaguagggcgaggagauucaagauuaacauaucaauggcauaaagaagguaguaguauaggaaaauuauuuacacaaacuaugaaaggcguagaaagacuagcagucaugggagauacagcaugggauuucucaagugcaggcggauuuuucacaagcgucggaaaaggaauacauacaguguuugguagugcguuucaaggauuauucggaggacuaaauuggauaacgaaaguaauuaugggagcaguucucauaugggucggaauaaauacaaggaacaugacuaugaguaugagcaugauccuaguaggaguaauaaugauguuucuaagccuaggcguuggugcaugaggacuagucccuguucccagagcccacuuuuuuuucuuuuuuugaaauaaaauagccugucuuucagaucuaaaaaaaaaaaaaaaaaaaaaaaaaaaaaaaaaaaaaaaaaaaaaaaaaaaaaaaaaaaaaaaaugcaucccccccccccccccccccccccccccccccaaaggcucuuuucagagccaccagaauu

SEQ ID NO: 820 - RNA, 2374 nt, Artificial Sequence
  mRNA product Design d-1 comprising derived and/or modified sequence from YFV__NC_002031.1__SSjev-prME-XX (polyprotein: aa122-788) (opt6)
gggagacccgugacccggaaguuguacggcuacgcgacuuucccucccacaaacccucgcgcccuuccuuuccuacuugggcccggcagaaagcuuaccaugggaaaaagaagugcaggaaguauaaugugguuggcaaguuuagcaguaguaauagcaugugcaggagcaguuacauuaguaagaaagaaucgauggcugcuuuuaaaugugacaucagaggauuuagggaaaacauuuucgguaggaacaggaaauuguacuacaaauauacuugaagcaaaauauuggugcccagacucuauggaauauaauuguccaaauuuaaguccuagagaagaaccugacgauauagauuguugguguuaugguguagaaaauguaagaguagcauacggcaaaugcgauagugcaggacguucuagacguucaaggagagccauagaucugcccacucacgaaaaucacggauugaaaacacgacaagaaaaauggaugacugggcgaaugggagaaagacaacuacagaaaauugaaagaugguucguuagaaauccauucuuugccguaacagcuuuaacaauagccuauuuaguagguaguaauaugacacaaagaguaguaauagcauugcuaguguuagcaguuggaccagcuuauagugcacauugcauaggaauaacagauagagacuuuauagaaggaguacacgggggaacuuggguaagugccacuuuagaacaagauaaauguguuacagugauggcgccagauaaaccaagucuggacauaaguuuggaaacaguagcgauugauagacccgcagaaguaagaaaaguuuguuauaaugcuguucuaacccauguuaaaauaaaugauaaaugcccuagcaccggagaagcccaucuagcagaagaaaaugaaggagauaacgcauguaaacgaacauacucagauagaggauggggcaacggauguggcuuguuuggaaaagguagcauaguagcaugcgcuaaauuuacaugcgcaaagucaaugucauuauuugaaguagaucaaacaaaaauacaauauguaauaagagcucaauuacacgugggugcaaaacaagaaaauuggaauacagacauaaagacacuaaaguucgacgcauuaaguggaucacaagagguagaauuuauaggguacggaaaagcgacuuuagagugucaaguccaaacagcaguagauuucgguaacucauacauagcagaaauggaaacugaaaguuggauaguagauagacaaugggcacaagacuugacacuaccuuggcaaucaggaagcggaggaguauggagagaaaugcaucauuuaguagaauuugaaccaccucaugcagcaacaauaagaguauuagcccuaggaaaccaagaaggaaguuuaaaaacagcacuaacaggagcuaugagaguaacaaaagauacaaaugacaacaaucuauacaaauuacacggaggacauguaagcugccggguaaaguugagcgcacuaacauuaaaaggaacgaguuauaaaauaugcacagauaaaauguucuuuguuaaaaauccuacagauaccggucauggaacaguaguaaugcaaguaaaaguaaguaaaggcgcucccuguagaauaccuguaauagucgcagacgauuuaaccgcagcaauaaauaaaggaauauuagucacgguaaacccaauagcgucaacaaaugaugaugaaguauuaauagaaguuaacccaccuuuuggagacaguuauauaauagucggaaggggugauaguagacuaacauaccaauggcauaaagaaggaagcucaauaggaaaauuauuuacucaaaccaugaaagguguagaaaggcuagcuguuaugggugacacagcaugggauuuuucaagcgcaggaggguucuuuacaucaguagguaaaggaauacauacaguauuuggaagugcauuucaaggauuauuuggugguuuaaauuggauaacaaaaguaauaaugggcgcaguuuuaauauggguagguauaaacacaagaaauaugacaaugucuaugaguaugauauuggucggaguaauaaugauguuuuuaucacuaggagugggugcagaucaagguugcgcuauuaauuuuggaaaaugaggacuagucccuguucccagagcccacuuuuuuuucuuuuuuugaaauaaaauagccugucuuucagaucuaaaaaaaaaaaaaaaaaaaaaaaaaaaaaaaaaaaaaaaaaaaaaaaaaaaaaaaaaaaaaaaaugcaucccccccccccccccccccccccccccccccaaaggcucuuuucagagccaccagaauu

SEQ ID NO: 821 - RNA, 2344 nt, Artificial Sequence
  mRNA product Design d-1 comprising derived and/or modified sequence from YFV__NC_002031.1__SSjev-prME (polyprotein: aa122-778) (opt6)
gggagacccgugacccggaaguuguacggcuacgcgacuuucccucccacaaacccucgcgcccuuccuuuccuacuugggcccggcagaaagcuuaccaugggaaaaagaagugcaggaaguauaaugugguuggcaaguuuagcaguaguaauagcaugugcaggagcaguaacauuagucagaaagaacagaugguuauuacugaacguaacaagugaagacuuaggaaaaacauuuaguguaggcacaggaaauugcacaacaaauauacuugaagcaaaauauugguguccagauagcauggaauauaauuguccaaauuuaucaccuagagaggaacccgaugauauagauuguugguguuauggaguugaaaacgugcgaguagcauaugguaaaugugauagcgcaggaagaaguagaagaaguagaagggcaauagacuuaccaacucaugaaaaccauggauuaaaaacaagacaggaaaaauggaugacaggaagaaugggagaacgacaauuacagaaaauagaaagaugguucguaagaaauccauucuuugcaguaacagcauuaacaauagcauaucuaguuggaaguaacaugacucaaagaguaguaauagcauuguuaguacuagcaguaggaccggcuuauagcgcacauuguauagggauaacagauagagacuuuauagaaggagugcacgguggaacauggguuucagcaacgcuagagcaagauaaauguguaacgguaauggcgccggauaaaccaagccuugacauaucacuagaaacgguugcaaucgaucgaccagccgaaguaagaaaaguaugcuauaaugcggucuuaacacacguaaaaauaaaugauaaauguccuucaacgggagaagcacauuuagcagaagaaaacgaaggagacaacgcguguaaaagaacauauucagauaggggcuggggaaacggcugcgguuuauuuggaaaaggaaguauaguagcaugcgcaaaauuuacuugcgcaaaaaguaugaguuuauucgaaguugaucaaacaaagauacaauauguaauacgagcacaauuacauguaggugcaaagcaagaaaauuggaauacagacauaaaaacauugaaauuugacgcuuugaguggaucacaagaaguagaauuuauaggauacggaaaagcuacauuagaaugucaaguacaaacugcaguagauuuuggaaauucguauauagcagaaauggaaacugaaucauggauuguagauaggcaaugggcacaagauuuaaccuugccauggcaaagcggaagcggggguguauggcgggaaaugcaucauuuaguagaguucgaacccccacacgcggcuaccauaagaguacuagcauuaggaaaucaagaagggagucucaagacagcacucacaggugcaaugcgaguaacgaaagauacaaaugacaauaaucuauacaaacuacacggaggacauguaucuugcagaguaaaauuaucugcauuaacacuaaaagggacaaguuacaaaauuuguacagauaagauguucuuugucaaaaacccaacagacacgggacacggaacgguagucaugcaaguuaaaguaagcaaaggagcgccaugcagaauaccaguaaucgucgcagaugauuuaacagccgcaauaaauaaagguauauuaguaacgguaaauccaauagcgaguaccaaugaugaugaaguacuaauagaagugaacccaccauuuggugauagcuauauaauaguagggcgaggagauucaagauuaacauaucaauggcauaaagaagguaguaguauaggaaaauuauuuacacaaacuaugaaaggcguagaaagacuagcagucaugggagauacagcaugggauuucucaagugcaggcggauuuuucacaagcgucggaaaaggaauacauacaguguuugguagugcguuucaaggauuauucggaggacuaaauuggauaacgaaaguaauuaugggagcaguucucauaugggucggaauaaauacaaggaacaugacuaugaguaugagcaugauccuaguaggaguaauaaugauguuucuaagccuaggcguuggugcaugaggacuagucccuguucccagagcccacuuuuuuuucuuuuuuugaaauaaaauagccugucuuucagaucuaaaaaaaaaaaaaaaaaaaaaaaaaaaaaaaaaaaaaaaaaaaaaaaaaaaaaaaaaaaaaaaaugcaucccccccccccccccccccccccccccccccaaaggcucuuuucagagccaccagaauu

SEQ ID NO: 822 - RNA, 2392 nt, Artificial Sequence
  mRNA product Design d-1 comprising derived and/or modified sequence from YFV__NC_002031.1__X-SS-prME-XX (polyprotein: aa92-788) (opt11)
gggagacccgugacccggaaguuguacggcuacgcgacuuucccucccacaaacccucgcgcccuuccuuuccuacuugggcccggcagaaagcuuaccaugcggggacuaagcagcagaaaaagacgcagccacgaugugcucaccgugcaauuccucauacuggggaugcuccuaaugaccggaggcgugacccuaguaaggaaaaacagauggcuacuacuaaacguaaccucagaagaucuaggaaagacauuuucagucggcacaggcaacugcacaaccaacauacuagaagcaaaauauuggugcccagacagcauggaauacaacugucccaaccucagcccaagagaggaaccagacgacauagacugcugguguuacggaguagaaaacguaagaguggcauacggcaaaugcgacagcgcaggcaggagccgaagaucccgcagagccaucgacuugcccacgcacgaaaaccacggccucaaaacacgacaagaaaaauggaugacagggcgaaugggagaacgacagcuccagaaaauagaacgaugguucguccggaacccguucuucgcaguaacggcacuaacaaucgcauaccucguaggcagcaacaugacacaaagaguggucaucgcgcuacucguacuagcaguggggcccgcauacagugcacacugcauaggaaucacagaccgugacuucaucgaaggcguacacggaggaacguggguaagcgcgacacuggaacaagacaaaugcgugacaguaauggcaccagacaaaccaagccuagacauaucccuagaaacggucgccaucgaccgucccgcagaaguacgaaagguaugcuauaaugcaguccucacacacgucaaaauaaacgacaaaugccccagcacgggcgaagcacaccucgccgaagaaaacgaaggggauaacgcgugcaaacgcaccuacuccgacaggggauggggcaacggaugcggacuguucggaaaaggauccauagucgcaugcgcaaaauuuaccugcgcaaaaagcaugagcuuguucgagguagaccaaacgaagauccaauacguaauccgagcucaacuacacguuggggccaagcaagagaacuggaauacggacaucaaaacacuaaaauucgacgcacucuccggcucacaagaagucgaguucaucggcuacggcaaagcaacacuagaaugccaaguacaaacagcgguggacuucggcaacagcuacauagcagaaauggaaacagaaagcuggauaguagaccgacaaugggcacaagaccuaacucugccauggcaaagcggcucaggaggaguguggagagagaugcaccaccugguagaguucgaacccccacacgcagcaacaauaaggguacuggcacuaggcaaccaagaaggcagccuaaaaaccgcacucacaggagccaugcgcgugacgaaggacaccaacgacaacaaccucuacaaacuccacggagggcacguauccugccgcguaaaacuaucagcacuaacgcuaaaaggaacaagcuacaaaauaugcacagacaaaauguucuucgucaaaaaccccacagacacaggccacggcacagucguaaugcaagugaaggucagcaagggggcccccugccgaaucccagucauaguggcagacgaccucacggccgccaucaacaaagggauccugguaacagugaacccaauagcaucgaccaacgacgacgaaguccucauagaagugaaucccccguucggcgacagcuacaucaucguaggacgcggcgacucccgacugacguaccaauggcauaaagaaggcagcagcauuggaaaacuauucacccaaaccaugaagggcgucgaaagacucgcggugaugggagacaccgcaugggacuucucgagcgcaggcggcuucuucacaagcguaggaaaagggauucacacaguauucggauccgcauuccaaggccucuucgggggacuaaacuggauaacgaaaguaauaaugggagcaguucucauauggguaggaaucaacacacgaaacaugacaauguccaugucaaugauacucguaggcguaaucaugauguuucugucacucggagugggagcagaccaagguugcgccauaaacuucggcaagugaggacuagucccuguucccagagcccacuuuuuuuucuuuuuuugaaauaaaauagccugucuuucagaucuaaaaaaaaaaaaaaaaaaaaaaaaaaaaaaaaaaaaaaaaaaaaaaaaaaaaaaaaaaaaaaaaugcaucccccccccccccccccccccccccccccccaaaggcucuuuucagagccaccagaauu

SEQ ID NO: 823 - RNA, 2329 nt, Artificial Sequence
  mRNA product Design d-1 comprising derived and/or modified sequence from YFV__NC_002031.1__SS-prME (polyprotein: M,aa104-778) (opt11)
gggagacccgugacccggaaguuguacggcuacgcgacuuucccucccacaaacccucgcgcccuuccuuuccuacuugggcccggcagaaagcuuaccauggacguccuuacgguacaauuccuaauacuaggaaugcuucucaugaccgggggcgucacccuaguccggaaaaacagauggcuacugcuaaauguuacaagcgaagaccuuggcaagacauucagcguaggcacgggcaacuguacaaccaacauacuagaagcgaaauacuggugcccagacuccauggaguacaacugccccaaccuaagcccacgggaagaacccgacgacauagacugcugguguuacggggucgaaaacguccgcgucgcauacgggaaaugcgauagcgcaggccgcaguagacgcucccgccgcgccauagaccuaccaacgcacgagaaccacggccucaaaacucgccaagaaaaauggaugacagggcgaaugggugaacgccaacuacagaagaucgaaaggugguucgucaggaacccauucuucgcagugaccgcacuaacgauagccuaccuagugggaucaaacaugacgcaacgagucgugaucgcacuccuaguacuggccguaggaccggccuacuccgcgcacugcaucggcauaacggauagggacuucauugaaggaguacauggcggcacgugggucagcgcgacacucgaacaagacaaaugcguaaccgugauggcacccgacaaaccgagucuugacauaagccuggaaacgguagcgauagaucguccagccgaaguaagaaaaguaugcuacaacgcaguccuaacacacguaaaaauaaacgacaaaugcccaagcacaggggaagcccaccucgcagaagagaacgaaggcgacaacgcaugcaaacgcacauacuccgacaggggaugggggaauggcugcggacuauucgggaaaggaagcaucgucgcgugcgccaaauucacaugcgccaagagcaugagccuguucgaagucgaccaaacaaaaauccaauacguaauacgcgcgcaacugcacguaggagcgaaacaggaaaacuggaacacggacauuaaaacccucaaauucgacgcgcucucaggaucacaagaagucgaguucaucggcuacggcaaggcaacgcucgaaugccaaguacaaacagcaguagacuucggaaacagcuacauugccgagauggaaaccgagagcuggauagucgacagacaaugggcccaagaccuaacccugccauggcaaucaggcuccgggggcgucuggcgagagaugcaccaccuaguagaguucgaaccaccccacgccgccacgaucagaguacuggcccugggcaaccaagaaggcucacucaagacggcgcucacaggagcaaugagggucacgaaagacaccaacgacaacaaccucuacaaacuacacggagggcacgugagcugccggguaaaacugagcgcacucacucugaagggaacaagcuacaagauaugcaccgacaaaauguucuucgugaaaaacccaaccgacacuggacacggcacggucguuaugcaagucaagguaucaaaaggagccccaugcagaaucccaguaauaguagcggacgaccuaacagccgccauaaacaaaggaauccuagucacgguaaauccgauagcaucgaccaacgacgacgaaguacuaauagaagugaacccaccauucggcgacagcuacauaauagucgggagaggcgacucgcgacuaaccuaccaauggcacaaggaagggagcucuaucgggaaacuauucacccaaacgaugaagggcguagaaaggcucgcagucaugggcgacaccgcaugggacuucuccagcgcgggaggcuucuuuacuucagugggaaaagggauacacaccgucuucggcagcgcauuccagggccuauucggcggguuaaacuggaucacgaaagugauaaugggggcaguucucaucugggucggaauaaacacacguaacaugaccaugagcaugagcaugauccuagucggggucauaaugauguucuugagcuugggaguaggugcaugaggacuagucccuguucccagagcccacuuuuuuuucuuuuuuugaaauaaaauagccugucuuucagaucuaaaaaaaaaaaaaaaaaaaaaaaaaaaaaaaaaaaaaaaaaaaaaaaaaaaaaaaaaaaaaaaaugcaucccccccccccccccccccccccccccccccaaaggcucuuuucagagccaccagaauu

SEQ ID NO: 824 - RNA, 2356 nt, Artificial Sequence
  mRNA product Design d-1 comprising derived and/or modified sequence from YFV__NC_002031.1__SSIgE-prME-XX (polyprotein: aa122-788) (opt11)
gggagacccgugacccggaaguuguacggcuacgcgacuuucccucccacaaacccucgcgcccuuccuuuccuacuugggcccggcagaaagcuuaccauggauuggacguggauacucuuucucguggccgcggccacgcgcgugcacucggugacccuaguaaggaaaaacagauggcuacuacuaaacguaaccucagaagaucuaggaaagacauuuucagucggcacaggcaacugcacaaccaacauacuagaagcaaaauauuggugcccagacagcauggaauacaacugucccaaccucagcccaagagaggaaccagacgacauagacugcugguguuacggaguagaaaacguaagaguggcauacggcaaaugcgacagcgcaggcaggagccgaagaucccgcagagccaucgacuugcccacgcacgaaaaccacggccucaaaacacgacaagaaaaauggaugacagggcgaaugggagaacgacagcuccagaaaauagaacgaugguucguccggaacccguucuucgcaguaacggcacuaacaaucgcauaccucguaggcagcaacaugacacaaagaguggucaucgcgcuacucguacuagcaguggggcccgcauacagugcacacugcauaggaaucacagaccgugacuucaucgaaggcguacacggaggaacguggguaagcgcgacacuggaacaagacaaaugcgugacaguaauggcaccagacaaaccaagccuagacauaucccuagaaacggucgccaucgaccgucccgcagaaguacgaaagguaugcuauaaugcaguccucacacacgucaaaauaaacgacaaaugccccagcacgggcgaagcacaccucgccgaagaaaacgaaggggauaacgcgugcaaacgcaccuacuccgacaggggauggggcaacggaugcggacuguucggaaaaggauccauagucgcaugcgcaaaauuuaccugcgcaaaaagcaugagcuuguucgagguagaccaaacgaagauccaauacguaauccgagcucaacuacacguuggggccaagcaagagaacuggaauacggacaucaaaacacuaaaauucgacgcacucuccggcucacaagaagucgaguucaucggcuacggcaaagcaacacuagaaugccaaguacaaacagcgguggacuucggcaacagcuacauagcagaaauggaaacagaaagcuggauaguagaccgacaaugggcacaagaccuaacucugccauggcaaagcggcucaggaggaguguggagagagaugcaccaccugguagaguucgaacccccacacgcagcaacaauaaggguacuggcacuaggcaaccaagaaggcagccuaaaaaccgcacucacaggagccaugcgcgugacgaaggacaccaacgacaacaaccucuacaaacuccacggagggcacguauccugccgcguaaaacuaucagcacuaacgcuaaaaggaacaagcuacaaaauaugcacagacaaaauguucuucgucaaaaaccccacagacacaggccacggcacagucguaaugcaagugaaggucagcaagggggcccccugccgaaucccagucauaguggcagacgaccucacggccgccaucaacaaagggauccugguaacagugaacccaauagcaucgaccaacgacgacgaaguccucauagaagugaaucccccguucggcgacagcuacaucaucguaggacgcggcgacucccgacugacguaccaauggcauaaagaaggcagcagcauuggaaaacuauucacccaaaccaugaagggcgucgaaagacucgcggugaugggagacaccgcaugggacuucucgagcgcaggcggcuucuucacaagcguaggaaaagggauucacacaguauucggauccgcauuccaaggccucuucgggggacuaaacuggauaacgaaaguaauaaugggagcaguucucauauggguaggaaucaacacacgaaacaugacaauguccaugucaaugauacucguaggcguaaucaugauguuucugucacucggagugggagcagaccaagguugcgccauaaacuucggcaagugaggacuagucccuguucccagagcccacuuuuuuuucuuuuuuugaaauaaaauagccugucuuucagaucuaaaaaaaaaaaaaaaaaaaaaaaaaaaaaaaaaaaaaaaaaaaaaaaaaaaaaaaaaaaaaaaaugcaucccccccccccccccccccccccccccccccaaaggcucuuuucagagccaccagaauu

SEQ ID NO: 825 - RNA, 2326 nt, Artificial Sequence
  mRNA product Design d-1 comprising derived and/or modified sequence from YFV__NC_002031.1__SSIgE-prME (polyprotein: aa122-778) (opt11)
gggagacccgugacccggaaguuguacggcuacgcgacuuucccucccacaaacccucgcgcccuuccuuuccuacuugggcccggcagaaagcuuaccauggauuggacguggauacucuuucucguggccgcggccacgcgcgugcacucggugacccuaguccgcaaaaacagauggcuacuacuaaacguaacaagcgaagaccugggcaaaacauucagcguuggcacaggcaauugcacgacaaacauacucgaagcaaaauacuggugccccgacagcauggaauacaacugcccaaaucuaagcccacgcgaagaaccagacgacaucgacuguuggugcuacggagucgaaaacgugagggucgcauacgguaaaugcgacagcgcuggcagaagcagacgcucccgacgagccauugaccucccuacccacgaaaaccacggccuaaaaacccggcaggaaaaauggaugacaggccggaugggagaacgccaacuacagaaaauagagaggugguuuguaagaaacccauucuucgccguaaccgcgcucaccaucgcuuaccucguaggaucaaacaugacgcaaagaguagugaucgcgcuacucguacuagcgguaggccccgccuacagcgcacacugcaucggcaucacugacagggacuucauagaaggcguccacgggggcacguggguuagcgccacacucgaacaagacaaaugcgucacagugauggcaccagacaaacccucacuagacaucucacuagaaaccgucgcaaucgaccgcccagcagaagucaggaaagugugcuacaacgccgucuuaacccacguaaaaauaaaugauaaaugcccaagcacgggagaggcacaccuagcggaagaaaacgaaggcgacaacgcgugcaaacguaccuacagcgacagaggguggggcaacggaugcggcuuauucggaaaaggaaguaucguagcaugcgcaaaauuuaccugcgccaaaagcaugucccuauucgaaguagaucaaacaaaaauacaauacgucauccgagcccaacuacacgugggggcaaaacaagaaaacuggaacaccgacaucaaaacacucaaauucgaugcccuaagcggcucccaagaaguagaguucaucgguuacggcaaggccacgcucgagugccaaguccaaacagcaguagacuucgggaacucauacaucgccgagauggaaacggaaucauggauugucgacagacaaugggcacaagaccuaacacuaccauggcaaucaggcagcggaggggucuggcgagaaaugcaccaccuaguagaguucgaacccccacacgccgcaacaauccgaguacuagcccucggaaaccaagaaggaucacuaaaaaccgcacucaccggcgcaaugcgcguaacaaaagauacaaacgacaacaaccuauacaaacuacacggcggacacgucagcugccgcgucaaacuauccgcccuaacacuaaaaggaacaagcuacaaaauaugcacagacaaaauguucuucgucaaaaauccgacugacacgggccacggcacagucguaaugcaaguaaaagucucaaaaggcgcaccaugcagaaucccaguaaucgucgccgaugaccuaacagccgcaaucaacaagggcauccucguaacaguaaaccccauagccagcaccaacgacgacgaaguccuaaucgaagucaacccacccuucggagacagcuacauaauaguaggacgaggggacucacgccuaaccuaccaauggcacaaagaaggauccucaaucggcaaacuguucacacaaacgaugaaaggcguagaaagacucgcaguaaugggcgauacggccugggacuucucaagcgcgggcggcuucuucacgagcgucggaaaaggcauccauacaguauucggaagcgcauuccaaggccuauuuggaggccucaacuggauaacaaaagugaucaugggagcaguacugaucugggucggcaucaacacccgcaacaugacgaugagcaugucaaugauccucgugggaguaauaaugauguuccucagccugggcguaggcgcaugaggacuagucccuguucccagagcccacuuuuuuuucuuuuuuugaaauaaaauagccugucuuucagaucuaaaaaaaaaaaaaaaaaaaaaaaaaaaaaaaaaaaaaaaaaaaaaaaaaaaaaaaaaaaaaaaaugcaucccccccccccccccccccccccccccccccaaaggcucuuuucagagccaccagaauu

SEQ ID NO: 826 - RNA, 2374 nt, Artificial Sequence
  mRNA product Design d-1 comprising derived and/or modified sequence from YFV__NC_002031.1__SSjev-prME-XX (polyprotein: aa122-788) (opt11)
gggagacccgugacccggaaguuguacggcuacgcgacuuucccucccacaaacccucgcgcccuuccuuuccuacuugggcccggcagaaagcuuaccauggggaaaaggagcgcgggcucgauaaugugguuggccucgcucgcggucgugaucgcgugcgcgggcgcggugacccuaguaaggaaaaacagauggcuacuacuaaacguaaccucagaagaucuaggaaagacauuuucagucggcacaggcaacugcacaaccaacauacuagaagcaaaauauuggugcccagacagcauggaauacaacugucccaaccucagcccaagagaggaaccagacgacauagacugcugguguuacggaguagaaaacguaagaguggcauacggcaaaugcgacagcgcaggcaggagccgaagaucccgcagagccaucgacuugcccacgcacgaaaaccacggccucaaaacacgacaagaaaaauggaugacagggcgaaugggagaacgacagcuccagaaaauagaacgaugguucguccggaacccguucuucgcaguaacggcacuaacaaucgcauaccucguaggcagcaacaugacacaaagaguggucaucgcgcuacucguacuagcaguggggcccgcauacagugcacacugcauaggaaucacagaccgugacuucaucgaaggcguacacggaggaacguggguaagcgcgacacuggaacaagacaaaugcgugacaguaauggcaccagacaaaccaagccuagacauaucccuagaaacggucgccaucgaccgucccgcagaaguacgaaagguaugcuauaaugcaguccucacacacgucaaaauaaacgacaaaugccccagcacgggcgaagcacaccucgccgaagaaaacgaaggggauaacgcgugcaaacgcaccuacuccgacaggggauggggcaacggaugcggacuguucggaaaaggauccauagucgcaugcgcaaaauuuaccugcgcaaaaagcaugagcuuguucgagguagaccaaacgaagauccaauacguaauccgagcucaacuacacguuggggccaagcaagagaacuggaauacggacaucaaaacacuaaaauucgacgcacucuccggcucacaagaagucgaguucaucggcuacggcaaagcaacacuagaaugccaaguacaaacagcgguggacuucggcaacagcuacauagcagaaauggaaacagaaagcuggauaguagaccgacaaugggcacaagaccuaacucugccauggcaaagcggcucaggaggaguguggagagagaugcaccaccugguagaguucgaacccccacacgcagcaacaauaaggguacuggcacuaggcaaccaagaaggcagccuaaaaaccgcacucacaggagccaugcgcgugacgaaggacaccaacgacaacaaccucuacaaacuccacggagggcacguauccugccgcguaaaacuaucagcacuaacgcuaaaaggaacaagcuacaaaauaugcacagacaaaauguucuucgucaaaaaccccacagacacaggccacggcacagucguaaugcaagugaaggucagcaagggggcccccugccgaaucccagucauaguggcagacgaccucacggccgccaucaacaaagggauccugguaacagugaacccaauagcaucgaccaacgacgacgaaguccucauagaagugaaucccccguucggcgacagcuacaucaucguaggacgcggcgacucccgacugacguaccaauggcauaaagaaggcagcagcauuggaaaacuauucacccaaaccaugaagggcgucgaaagacucgcggugaugggagacaccgcaugggacuucucgagcgcaggcggcuucuucacaagcguaggaaaagggauucacacaguauucggauccgcauuccaaggccucuucgggggacuaaacuggauaacgaaaguaauaaugggagcaguucucauauggguaggaaucaacacacgaaacaugacaauguccaugucaaugauacucguaggcguaaucaugauguuucugucacucggagugggagcagaccaagguugcgccauaaacuucggcaagugaggacuagucccuguucccagagcccacuuuuuuuucuuuuuuugaaauaaaauagccugucuuucagaucuaaaaaaaaaaaaaaaaaaaaaaaaaaaaaaaaaaaaaaaaaaaaaaaaaaaaaaaaaaaaaaaaugcaucccccccccccccccccccccccccccccccaaaggcucuuuucagagccaccagaauu

SEQ ID NO: 827 - RNA, 2344 nt, Artificial Sequence
  mRNA product Design d-1 comprising derived and/or modified sequence from YFV__NC_002031.1__SSjev-prME (polyprotein: aa122-778) (opt11)
gggagacccgugacccggaaguuguacggcuacgcgacuuucccucccacaaacccucgcgcccuuccuuuccuacuugggcccggcagaaagcuuaccauggggaaaaggagcgcgggcucgauaaugugguuggccucgcucgcggucgugaucgcgugcgcgggcgcggugacccuaguccgcaaaaacagauggcuacuacuaaacguaacaagcgaagaccugggcaaaacauucagcguuggcacaggcaauugcacgacaaacauacucgaagcaaaauacuggugccccgacagcauggaauacaacugcccaaaucuaagcccacgcgaagaaccagacgacaucgacuguuggugcuacggagucgaaaacgugagggucgcauacgguaaaugcgacagcgcuggcagaagcagacgcucccgacgagccauugaccucccuacccacgaaaaccacggccuaaaaacccggcaggaaaaauggaugacaggccggaugggagaacgccaacuacagaaaauagagaggugguuuguaagaaacccauucuucgccguaaccgcgcucaccaucgcuuaccucguaggaucaaacaugacgcaaagaguagugaucgcgcuacucguacuagcgguaggccccgccuacagcgcacacugcaucggcaucacugacagggacuucauagaaggcguccacgggggcacguggguuagcgccacacucgaacaagacaaaugcgucacagugauggcaccagacaaacccucacuagacaucucacuagaaaccgucgcaaucgaccgcccagcagaagucaggaaagugugcuacaacgccgucuuaacccacguaaaaauaaaugauaaaugcccaagcacgggagaggcacaccuagcggaagaaaacgaaggcgacaacgcgugcaaacguaccuacagcgacagaggguggggcaacggaugcggcuuauucggaaaaggaaguaucguagcaugcgcaaaauuuaccugcgccaaaagcaugucccuauucgaaguagaucaaacaaaaauacaauacgucauccgagcccaacuacacgugggggcaaaacaagaaaacuggaacaccgacaucaaaacacucaaauucgaugcccuaagcggcucccaagaaguagaguucaucgguuacggcaaggccacgcucgagugccaaguccaaacagcaguagacuucgggaacucauacaucgccgagauggaaacggaaucauggauugucgacagacaaugggcacaagaccuaacacuaccauggcaaucaggcagcggaggggucuggcgagaaaugcaccaccuaguagaguucgaacccccacacgccgcaacaauccgaguacuagcccucggaaaccaagaaggaucacuaaaaaccgcacucaccggcgcaaugcgcguaacaaaagauacaaacgacaacaaccuauacaaacuacacggcggacacgucagcugccgcgucaaacuauccgcccuaacacuaaaaggaacaagcuacaaaauaugcacagacaaaauguucuucgucaaaaauccgacugacacgggccacggcacagucguaaugcaaguaaaagucucaaaaggcgcaccaugcagaaucccaguaaucgucgccgaugaccuaacagccgcaaucaacaagggcauccucguaacaguaaaccccauagccagcaccaacgacgacgaaguccuaaucgaagucaacccacccuucggagacagcuacauaauaguaggacgaggggacucacgccuaaccuaccaauggcacaaagaaggauccucaaucggcaaacuguucacacaaacgaugaaaggcguagaaagacucgcaguaaugggcgauacggccugggacuucucaagcgcgggcggcuucuucacgagcgucggaaaaggcauccauacaguauucggaagcgcauuccaaggccuauuuggaggccucaacuggauaacaaaagugaucaugggagcaguacugaucugggucggcaucaacacccgcaacaugacgaugagcaugucaaugauccucgugggaguaauaaugauguuccucagccugggcguaggcgcaugaggacuagucccuguucccagagcccacuuuuuuuucuuuuuuugaaauaaaauagccugucuuucagaucuaaaaaaaaaaaaaaaaaaaaaaaaaaaaaaaaaaaaaaaaaaaaaaaaaaaaaaaaaaaaaaaaugcaucccccccccccccccccccccccccccccccaaaggcucuuuucagagccaccagaauu

SEQ ID NO: 828 - RNA, 2543 nt, Artificial Sequence
  mRNA product Design d-5 comprising derived and/or modified sequence from YFV__NC_002031.1__X-SS-prME-XX (polyprotein: aa92-788) (wt)
gggagagggcgcuuggcuugcaaggacccugagcugcggcauugaagcacacccaacccaacucgacugaagucagccucacugaaccggaucugagaaucuucucucucugggcuugccagggcucuccgaaccuagcuagcauccucuucaauuccaacuagaaagcuuaccaugagaggauuguccucaaggaaacgccguucccaugauguucugacugugcaauuccuaauuuugggaaugcuguugaugacggguggagugaccuuggugcggaaaaacagaugguugcuccuaaaugugacaucugaggaccucgggaaaacauucucugugggcacaggcaacugcacaacaaacauuuuggaagccaaguacuggugcccagacucaauggaauacaacugucccaaucucaguccaagagaggagccagaugacauugauugcuggugcuaugggguggaaaacguuagagucgcauaugguaagugugacucagcaggcaggucuaggaggucaagaagggccauugacuugccuacgcaugaaaaccaugguuugaagacccggcaagaaaaauggaugacuggaagaaugggugaaaggcaacuccaaaagauugagagaugguucgugaggaaccccuuuuuugcagugacggcucugaccauugccuaccuugugggaagcaacaugacgcaacgagucgugauugcccuacuggucuuggcuguugguccggccuacucagcucacugcauuggaauuacugacagggauuucauugagggggugcauggaggaacuuggguuucagcuacccuggagcaagacaagugugucacuguuauggccccugacaagccuucauuggacaucucacuagagacaguagccauugauagaccugcugaggugaggaaaguguguuacaaugcaguucucacucaugugaagauuaaugacaagugccccagcacuggagaggcccaccuagcugaagagaacgaaggggacaaugcgugcaagcgcacuuauucugauagaggcuggggcaauggcuguggccuauuugggaaagggagcauuguggcaugcgccaaauucacuugugccaaauccaugaguuuguuugagguugaucagaccaaaauucaguaugucaucagagcacaauugcauguaggggccaagcaggaaaauuggaauaccgacauuaagacucucaaguuugaugcccugucaggcucccaggaagucgaguucauuggguauggaaaagcuacacuggaaugccaggugcaaacugcgguggacuuugguaacaguuacaucgcugagauggaaacagagagcuggauaguggacagacagugggcccaggacuugacccugccauggcagaguggaaguggcgggguguggagagagaugcaucaucuugucgaauuugaaccuccgcaugccgccacuaucagaguacuggcccugggaaaccaggaaggcuccuugaaaacagcucuuacuggcgcaaugaggguuacaaaggacacaaaugacaacaaccuuuacaaacuacaugguggacauguuucuugcagagugaaauugucagcuuugacacucaaggggacauccuacaaaauaugcacugacaaaauguuuuuugucaagaacccaacugacacuggccauggcacuguugugaugcaggugaaagugucaaaaggagcccccugcaggauuccagugauaguagcugaugaucuuacagcggcaaucaauaaaggcauuuugguuacaguuaaccccaucgccucaaccaaugaugaugaagugcugauugaggugaacccaccuuuuggagacagcuacauuaucguugggagaggagauucacgucucacuuaccaguggcacaaagagggaagcucaauaggaaaguuguucacucagaccaugaaaggcguggaacgccuggccgucaugggagacaccgccugggauuucagcuccgcuggaggguucuucacuucgguugggaaaggaauccauacgguguuuggcucugccuuucaggggcuauuuggcggcuugaacuggauaacaaaggucaucaugggggcgguacuuauauggguuggcaucaacacaagaaacaugacaauguccaugagcaugaucuugguaggagugaucaugauguuuuugucucuaggaguuggggcggaucaaggaugcgccaucaacuuuggcaaguaaggacuaguggaagcauuuuccuggcugauuaaaagaaauuacucagcuauggucaucuguuccuguuagaaggcuaugcagcauauuauauacuaugcgcauguuaugaaaugcauaauaaaaaauuuuaaaaaaucuaaaagaucuaaaaaaaaaaaaaaaaaaaaaaaaaaaaaaaaaaaaaaaaaaaaaaaaaaaaaaaaaaaaaaaaugcaucccccccccccccccccccccccccccccccaaaggcucuuuucagagccaccagaauu

SEQ ID NO: 829 - RNA, 2510 nt, Artificial Sequence
  mRNA product Design d-5 comprising derived and/or modified sequence from YFV__NC_002031.1__SS-prME (polyprotein: M,aa104-778) (wt)
gggagagggcgcuuggcuugcaaggacccugagcugcggcauugaagcacacccaacccaacucgacugaagucagccucacugaaccggaucugagaaucuucucucucugggcuugccagggcucuccgaaccuagcuagcauccucuucaauuccaacuagaaagcuuaccauggauguucugacugugcaauuccuaauuuugggaaugcuguugaugacggguggagugaccuuggugcggaaaaacagaugguugcuccuaaaugugacaucugaggaccucgggaaaacauucucugugggcacaggcaacugcacaacaaacauuuuggaagccaaguacuggugcccagacucaauggaauacaacugucccaaucucaguccaagagaggagccagaugacauugauugcuggugcuaugggguggaaaacguuagagucgcauaugguaagugugacucagcaggcaggucuaggaggucaagaagggccauugacuugccuacgcaugaaaaccaugguuugaagacccggcaagaaaaauggaugacuggaagaaugggugaaaggcaacuccaaaagauugagagaugguucgugaggaaccccuuuuuugcagugacggcucugaccauugccuaccuugugggaagcaacaugacgcaacgagucgugauugcccuacuggucuuggcuguugguccggccuacucagcucacugcauuggaauuacugacagggauuucauugagggggugcauggaggaacuuggguuucagcuacccuggagcaagacaagugugucacuguuauggccccugacaagccuucauuggacaucucacuagagacaguagccauugauagaccugcugaggugaggaaaguguguuacaaugcaguucucacucaugugaagauuaaugacaagugccccagcacuggagaggcccaccuagcugaagagaacgaaggggacaaugcgugcaagcgcacuuauucugauagaggcuggggcaauggcuguggccuauuugggaaagggagcauuguggcaugcgccaaauucacuugugccaaauccaugaguuuguuugagguugaucagaccaaaauucaguaugucaucagagcacaauugcauguaggggccaagcaggaaaauuggaauaccgacauuaagacucucaaguuugaugcccugucaggcucccaggaagucgaguucauuggguauggaaaagcuacacuggaaugccaggugcaaacugcgguggacuuugguaacaguuacaucgcugagauggaaacagagagcuggauaguggacagacagugggcccaggacuugacccugccauggcagaguggaaguggcgggguguggagagagaugcaucaucuugucgaauuugaaccuccgcaugccgccacuaucagaguacuggcccugggaaaccaggaaggcuccuugaaaacagcucuuacuggcgcaaugaggguuacaaaggacacaaaugacaacaaccuuuacaaacuacaugguggacauguuucuugcagagugaaauugucagcuuugacacucaaggggacauccuacaaaauaugcacugacaaaauguuuuuugucaagaacccaacugacacuggccauggcacuguugugaugcaggugaaagugucaaaaggagcccccugcaggauuccagugauaguagcugaugaucuuacagcggcaaucaauaaaggcauuuugguuacaguuaaccccaucgccucaaccaaugaugaugaagugcugauugaggugaacccaccuuuuggagacagcuacauuaucguugggagaggagauucacgucucacuuaccaguggcacaaagagggaagcucaauaggaaaguuguucacucagaccaugaaaggcguggaacgccuggccgucaugggagacaccgccugggauuucagcuccgcuggaggguucuucacuucgguugggaaaggaauccauacgguguuuggcucugccuuucaggggcuauuuggcggcuugaacuggauaacaaaggucaucaugggggcgguacuuauauggguuggcaucaacacaagaaacaugacaauguccaugagcaugaucuugguaggagugaucaugauguuuuugucucuaggaguuggggcggaucaaggaugcgccaucaacuuuggcaaguaaggacuaguggaagcauuuuccuggcugauuaaaagaaauuacucagcuauggucaucuguuccuguuagaaggcuaugcagcauauuauauacuaugcgcauguuaugaaaugcauaauaaaaaauuuuaaaaaaucuaaaagaucuaaaaaaaaaaaaaaaaaaaaaaaaaaaaaaaaaaaaaaaaaaaaaaaaaaaaaaaaaaaaaaaaugcaucccccccccccccccccccccccccccccccaaaggcucuuuucagagccaccagaauu

SEQ ID NO: 830 - RNA, 2507 nt, Artificial Sequence
  mRNA product Design d-5 comprising derived and/or modified sequence from YFV__NC_002031.1__SSIgE-prME-XX (polyprotein: aa122-788) (wt)
gggagagggcgcuuggcuugcaaggacccugagcugcggcauugaagcacacccaacccaacucgacugaagucagccucacugaaccggaucugagaaucuucucucucugggcuugccagggcucuccgaaccuagcuagcauccucuucaauuccaacuagaaagcuuaccauggacuggaccuggauccuguuccucguggccgccgcgacccgcguccacagcgugaccuuggugcggaaaaacagaugguugcuccuaaaugugacaucugaggaccucgggaaaacauucucugugggcacaggcaacugcacaacaaacauuuuggaagccaaguacuggugcccagacucaauggaauacaacugucccaaucucaguccaagagaggagccagaugacauugauugcuggugcuaugggguggaaaacguuagagucgcauaugguaagugugacucagcaggcaggucuaggaggucaagaagggccauugacuugccuacgcaugaaaaccaugguuugaagacccggcaagaaaaauggaugacuggaagaaugggugaaaggcaacuccaaaagauugagagaugguucgugaggaaccccuuuuuugcagugacggcucugaccauugccuaccuugugggaagcaacaugacgcaacgagucgugauugcccuacuggucuuggcuguugguccggccuacucagcucacugcauuggaauuacugacagggauuucauugagggggugcauggaggaacuuggguuucagcuacccuggagcaagacaagugugucacuguuauggccccugacaagccuucauuggacaucucacuagagacaguagccauugauagaccugcugaggugaggaaaguguguuacaaugcaguucucacucaugugaagauuaaugacaagugccccagcacuggagaggcccaccuagcugaagagaacgaaggggacaaugcgugcaagcgcacuuauucugauagaggcuggggcaauggcuguggccuauuugggaaagggagcauuguggcaugcgccaaauucacuugugccaaauccaugaguuuguuugagguugaucagaccaaaauucaguaugucaucagagcacaauugcauguaggggccaagcaggaaaauuggaauaccgacauuaagacucucaaguuugaugcccugucaggcucccaggaagucgaguucauuggguauggaaaagcuacacuggaaugccaggugcaaacugcgguggacuuugguaacaguuacaucgcugagauggaaacagagagcuggauaguggacagacagugggcccaggacuugacccugccauggcagaguggaaguggcgggguguggagagagaugcaucaucuugucgaauuugaaccuccgcaugccgccacuaucagaguacuggcccugggaaaccaggaaggcuccuugaaaacagcucuuacuggcgcaaugaggguuacaaaggacacaaaugacaacaaccuuuacaaacuacaugguggacauguuucuugcagagugaaauugucagcuuugacacucaaggggacauccuacaaaauaugcacugacaaaauguuuuuugucaagaacccaacugacacuggccauggcacuguugugaugcaggugaaagugucaaaaggagcccccugcaggauuccagugauaguagcugaugaucuuacagcggcaaucaauaaaggcauuuugguuacaguuaaccccaucgccucaaccaaugaugaugaagugcugauugaggugaacccaccuuuuggagacagcuacauuaucguugggagaggagauucacgucucacuuaccaguggcacaaagagggaagcucaauaggaaaguuguucacucagaccaugaaaggcguggaacgccuggccgucaugggagacaccgccugggauuucagcuccgcuggaggguucuucacuucgguugggaaaggaauccauacgguguuuggcucugccuuucaggggcuauuuggcggcuugaacuggauaacaaaggucaucaugggggcgguacuuauauggguuggcaucaacacaagaaacaugacaauguccaugagcaugaucuugguaggagugaucaugauguuuuugucucuaggaguuggggcggaucaaggaugcgccaucaacuuuggcaaguaaggacuaguggaagcauuuuccuggcugauuaaaagaaauuacucagcuauggucaucuguuccuguuagaaggcuaugcagcauauuauauacuaugcgcauguuaugaaaugcauaauaaaaaauuuuaaaaaaucuaaaagaucuaaaaaaaaaaaaaaaaaaaaaaaaaaaaaaaaaaaaaaaaaaaaaaaaaaaaaaaaaaaaaaaaugcaucccccccccccccccccccccccccccccccaaaggcucuuuucagagccaccagaauu

SEQ ID NO: 831 - RNA, 2477 nt, Artificial Sequence
  mRNA product Design d-5 comprising derived and/or modified sequence from YFV__NC_002031.1__SSIgE-prME (polyprotein: aa122-778) (wt)
gggagagggcgcuuggcuugcaaggacccugagcugcggcauugaagcacacccaacccaacucgacugaagucagccucacugaaccggaucugagaaucuucucucucugggcuugccagggcucuccgaaccuagcuagcauccucuucaauuccaacuagaaagcuuaccauggacuggaccuggauccuguuccucguggccgccgcgacccgcguccacagcgugaccuuggugcggaaaaacagaugguugcuccuaaaugugacaucugaggaccucgggaaaacauucucugugggcacaggcaacugcacaacaaacauuuuggaagccaaguacuggugcccagacucaauggaauacaacugucccaaucucaguccaagagaggagccagaugacauugauugcuggugcuaugggguggaaaacguuagagucgcauaugguaagugugacucagcaggcaggucuaggaggucaagaagggccauugacuugccuacgcaugaaaaccaugguuugaagacccggcaagaaaaauggaugacuggaagaaugggugaaaggcaacuccaaaagauugagagaugguucgugaggaaccccuuuuuugcagugacggcucugaccauugccuaccuugugggaagcaacaugacgcaacgagucgugauugcccuacuggucuuggcuguugguccggccuacucagcucacugcauuggaauuacugacagggauuucauugagggggugcauggaggaacuuggguuucagcuacccuggagcaagacaagugugucacuguuauggccccugacaagccuucauuggacaucucacuagagacaguagccauugauagaccugcugaggugaggaaaguguguuacaaugcaguucucacucaugugaagauuaaugacaagugccccagcacuggagaggcccaccuagcugaagagaacgaaggggacaaugcgugcaagcgcacuuauucugauagaggcuggggcaauggcuguggccuauuugggaaagggagcauuguggcaugcgccaaauucacuugugccaaauccaugaguuuguuugagguugaucagaccaaaauucaguaugucaucagagcacaauugcauguaggggccaagcaggaaaauuggaauaccgacauuaagacucucaaguuugaugcccugucaggcucccaggaagucgaguucauuggguauggaaaagcuacacuggaaugccaggugcaaacugcgguggacuuugguaacaguuacaucgcugagauggaaacagagagcuggauaguggacagacagugggcccaggacuugacccugccauggcagaguggaaguggcgggguguggagagagaugcaucaucuugucgaauuugaaccuccgcaugccgccacuaucagaguacuggcccugggaaaccaggaaggcuccuugaaaacagcucuuacuggcgcaaugaggguuacaaaggacacaaaugacaacaaccuuuacaaacuacaugguggacauguuucuugcagagugaaauugucagcuuugacacucaaggggacauccuacaaaauaugcacugacaaaauguuuuuugucaagaacccaacugacacuggccauggcacuguugugaugcaggugaaagugucaaaaggagcccccugcaggauuccagugauaguagcugaugaucuuacagcggcaaucaauaaaggcauuuugguuacaguuaaccccaucgccucaaccaaugaugaugaagugcugauugaggugaacccaccuuuuggagacagcuacauuaucguugggagaggagauucacgucucacuuaccaguggcacaaagagggaagcucaauaggaaaguuguucacucagaccaugaaaggcguggaacgccuggccgucaugggagacaccgccugggauuucagcuccgcuggaggguucuucacuucgguugggaaaggaauucauacgguguuuggcucugccuuucaggggcuauuuggcggcuugaacuggauaacaaaggucaucaugggggcgguacuuauauggguuggcaucaacacaagaaacaugacaauguccaugagcaugaucuugguaggagugaucaugauguuuuugucucuaggaguuggggcguaaggacuaguggaagcauuuuccuggcugauuaaaagaaauuacucagcuauggucaucuguuccuguuagaaggcuaugcagcauauuauauacuaugcgcauguuaugaaaugcauaauaaaaaauuuuaaaaaaucuaaaagaucuaaaaaaaaaaaaaaaaaaaaaaaaaaaaaaaaaaaaaaaaaaaaaaaaaaaaaaaaaaaaaaaaugcaucccccccccccccccccccccccccccccccaaaggcucuuuucagagccaccagaauu

SEQ ID NO: 832 - RNA, 2525 nt, Artificial Sequence
  mRNA product Design d-5 comprising derived and/or modified sequence from YFV__NC_002031.1__SSjev-prME-XX (polyprotein: aa122-788) (wt)
gggagagggcgcuuggcuugcaaggacccugagcugcggcauugaagcacacccaacccaacucgacugaagucagccucacugaaccggaucugagaaucuucucucucugggcuugccagggcucuccgaaccuagcuagcauccucuucaauuccaacuagaaagcuuaccauggguaaacggagcgcuggcucaaucauguggcucgcgagcuuggcaguugucauagcuugugcaggagccgugaccuuggugcggaaaaacagaugguugcuccuaaaugugacaucugaggaccucgggaaaacauucucugugggcacaggcaacugcacaacaaacauuuuggaagccaaguacuggugcccagacucaauggaauacaacugucccaaucucaguccaagagaggagccagaugacauugauugcuggugcuaugggguggaaaacguuagagucgcauaugguaagugugacucagcaggcaggucuaggaggucaagaagggccauugacuugccuacgcaugaaaaccaugguuugaagacccggcaagaaaaauggaugacuggaagaaugggugaaaggcaacuccaaaagauugagagaugguucgugaggaaccccuuuuuugcagugacggcucugaccauugccuaccuugugggaagcaacaugacgcaacgagucgugauugcccuacuggucuuggcuguugguccggccuacucagcucacugcauuggaauuacugacagggauuucauugagggggugcauggaggaacuuggguuucagcuacccuggagcaagacaagugugucacuguuauggccccugacaagccuucauuggacaucucacuagagacaguagccauugauagaccugcugaggugaggaaaguguguuacaaugcaguucucacucaugugaagauuaaugacaagugccccagcacuggagaggcccaccuagcugaagagaacgaaggggacaaugcgugcaagcgcacuuauucugauagaggcuggggcaauggcuguggccuauuugggaaagggagcauuguggcaugcgccaaauucacuugugccaaauccaugaguuuguuugagguugaucagaccaaaauucaguaugucaucagagcacaauugcauguaggggccaagcaggaaaauuggaauaccgacauuaagacucucaaguuugaugcccugucaggcucccaggaagucgaguucauuggguauggaaaagcuacacuggaaugccaggugcaaacugcgguggacuuugguaacaguuacaucgcugagauggaaacagagagcuggauaguggacagacagugggcccaggacuugacccugccauggcagaguggaaguggcgggguguggagagagaugcaucaucuugucgaauuugaaccuccgcaugccgccacuaucagaguacuggcccugggaaaccaggaaggcuccuugaaaacagcucuuacuggcgcaaugaggguuacaaaggacacaaaugacaacaaccuuuacaaacuacaugguggacauguuucuugcagagugaaauugucagcuuugacacucaaggggacauccuacaaaauaugcacugacaaaauguuuuuugucaagaacccaacugacacuggccauggcacuguugugaugcaggugaaagugucaaaaggagcccccugcaggauuccagugauaguagcugaugaucuuacagcggcaaucaauaaaggcauuuugguuacaguuaaccccaucgccucaaccaaugaugaugaagugcugauugaggugaacccaccuuuuggagacagcuacauuaucguugggagaggagauucacgucucacuuaccaguggcacaaagagggaagcucaauaggaaaguuguucacucagaccaugaaaggcguggaacgccuggccgucaugggagacaccgccugggauuucagcuccgcuggaggguucuucacuucgguugggaaaggaauccauacgguguuuggcucugccuuucaggggcuauuuggcggcuugaacuggauaacaaaggucaucaugggggcgguacuuauauggguuggcaucaacacaagaaacaugacaauguccaugagcaugaucuugguaggagugaucaugauguuuuugucucuaggaguuggggcggaucaaggaugcgccaucaacuuuggcaaguaaggacuaguggaagcauuuuccuggcugauuaaaagaaauuacucagcuauggucaucuguuccuguuagaaggcuaugcagcauauuauauacuaugcgcauguuaugaaaugcauaauaaaaaauuuuaaaaaaucuaaaagaucuaaaaaaaaaaaaaaaaaaaaaaaaaaaaaaaaaaaaaaaaaaaaaaaaaaaaaaaaaaaaaaaaugcaucccccccccccccccccccccccccccccccaaaggcucuuuucagagccaccagaauu

SEQ ID NO: 833 - RNA, 2495 nt, Artificial Sequence
  mRNA product Design d-5 comprising derived and/or modified sequence from YFV__NC_002031.1__SSjev-prME (polyprotein: aa122-778) (wt)
gggagagggcgcuuggcuugcaaggacccugagcugcggcauugaagcacacccaacccaacucgacugaagucagccucacugaaccggaucugagaaucuucucucucugggcuugccagggcucuccgaaccuagcuagcauccucuucaauuccaacuagaaagcuuaccauggguaaacggagcgcuggcucaaucauguggcucgcgagcuuggcaguugucauagcuugugcaggagccgugaccuuggugcggaaaaacagaugguugcuccuaaaugugacaucugaggaccucgggaaaacauucucugugggcacaggcaacugcacaacaaacauuuuggaagccaaguacuggugcccagacucaauggaauacaacugucccaaucucaguccaagagaggagccagaugacauugauugcuggugcuaugggguggaaaacguuagagucgcauaugguaagugugacucagcaggcaggucuaggaggucaagaagggccauugacuugccuacgcaugaaaaccaugguuugaagacccggcaagaaaaauggaugacuggaagaaugggugaaaggcaacuccaaaagauugagagaugguucgugaggaaccccuuuuuugcagugacggcucugaccauugccuaccuugugggaagcaacaugacgcaacgagucgugauugcccuacuggucuuggcuguugguccggccuacucagcucacugcauuggaauuacugacagggauuucauugagggggugcauggaggaacuuggguuucagcuacccuggagcaagacaagugugucacuguuauggccccugacaagccuucauuggacaucucacuagagacaguagccauugauagaccugcugaggugaggaaaguguguuacaaugcaguucucacucaugugaagauuaaugacaagugccccagcacuggagaggcccaccuagcugaagagaacgaaggggacaaugcgugcaagcgcacuuauucugauagaggcuggggcaauggcuguggccuauuugggaaagggagcauuguggcaugcgccaaauucacuugugccaaauccaugaguuuguuugagguugaucagaccaaaauucaguaugucaucagagcacaauugcauguaggggccaagcaggaaaauuggaauaccgacauuaagacucucaaguuugaugcccugucaggcucccaggaagucgaguucauuggguauggaaaagcuacacuggaaugccaggugcaaacugcgguggacuuugguaacaguuacaucgcugagauggaaacagagagcuggauaguggacagacagugggcccaggacuugacccugccauggcagaguggaaguggcgggguguggagagagaugcaucaucuugucgaauuugaaccuccgcaugccgccacuaucagaguacuggcccugggaaaccaggaaggcuccuugaaaacagcucuuacuggcgcaaugaggguuacaaaggacacaaaugacaacaaccuuuacaaacuacaugguggacauguuucuugcagagugaaauugucagcuuugacacucaaggggacauccuacaaaauaugcacugacaaaauguuuuuugucaagaacccaacugacacuggccauggcacuguugugaugcaggugaaagugucaaaaggagcccccugcaggauuccagugauaguagcugaugaucuuacagcggcaaucaauaaaggcauuuugguuacaguuaaccccaucgccucaaccaaugaugaugaagugcugauugaggugaacccaccuuuuggagacagcuacauuaucguugggagaggagauucacgucucacuuaccaguggcacaaagagggaagcucaauaggaaaguuguucacucagaccaugaaaggcguggaacgccuggccgucaugggagacaccgccugggauuucagcuccgcuggaggguucuucacuucgguugggaaaggaauucauacgguguuuggcucugccuuucaggggcuauuuggcggcuugaacuggauaacaaaggucaucaugggggcgguacuuauauggguuggcaucaacacaagaaacaugacaauguccaugagcaugaucuugguaggagugaucaugauguuuuugucucuaggaguuggggcguaaggacuaguggaagcauuuuccuggcugauuaaaagaaauuacucagcuauggucaucuguuccuguuagaaggcuaugcagcauauuauauacuaugcgcauguuaugaaaugcauaauaaaaaauuuuaaaaaaucuaaaagaucuaaaaaaaaaaaaaaaaaaaaaaaaaaaaaaaaaaaaaaaaaaaaaaaaaaaaaaaaaaaaaaaaugcaucccccccccccccccccccccccccccccccaaaggcucuuuucagagccaccagaauu

SEQ ID NO: 834 - RNA, 2543 nt, Artificial Sequence
  mRNA product Design d-5 comprising derived and/or modified sequence from YFV__NC_002031.1__X-SS-prME-XX (polyprotein: aa92-788) (opt1)
gggagagggcgcuuggcuugcaaggacccugagcugcggcauugaagcacacccaacccaacucgacugaagucagccucacugaaccggaucugagaaucuucucucucugggcuugccagggcucuccgaaccuagcuagcauccucuucaauuccaacuagaaagcuuaccaugcggggccugagcucccgcaagcggcgcagccacgacgugcucaccguccaguuccugauccuggggaugcuccugaugaccggcggggugacgcuggugcggaagaaccgcuggcuccugcugaacgucaccuccgaggaccucggcaagaccuucagcguggggaccggcaacugcacgaccaacauccuggaggccaaguacuggugccccgacuccauggaguacaacugcccgaaccugagcccccgggaggagcccgacgacaucgacugcuggugcuacggcguggagaacguccgcguggccuacgggaagugcgacuccgcgggccggagccgccggucccgccgggccaucgaccuccccacccacgagaaccacgggcugaagacccgccaggagaaguggaugacgggccggaugggggagcgccagcugcagaagaucgagcggugguucgugcgcaacccguucuucgccgucaccgcccucaccaucgccuaccuggugggcagcaacaugacccagcggguggucaucgcgcugcucgugcuggccgugggccccgccuacuccgcccacugcaucgggaucacggaccgcgacuucaucgagggcguccacgggggcaccugggugagcgcgacccuggagcaggacaagugcgugaccgucauggcccccgacaagcccucccucgacaucagccuggagacgguggccaucgaccggccggccgaggugcgcaaggucugcuacaacgccgugcugacccacgugaagaucaacgacaagugccccuccaccggcgaggcgcaccucgccgaggagaacgagggggacaacgccugcaagcggaccuacagcgaccggggcugggggaacggcugcgggcuguucggcaagggcuccaucgucgccugcgccaaguucacgugcgcgaagagcaugucccuguucgagguggaccagaccaagauccaguacgucauccgcgcccagcuccacgugggggccaagcaggagaacuggaacaccgacaucaagacccugaaguucgacgcccugagcggcagccaggagguggaguucaucggguacggcaaggccacgcucgagugccagguccagaccgcgguggacuucgggaacuccuacaucgccgagauggagaccgagagcuggaucguggaccggcagugggcccaggaccugacccugcccuggcaguccggcagcggcggggucuggcgcgagaugcaccaccucguggaguucgagcccccgcacgccgccacgauccgggugcuggcgcugggcaaccaggaggggucccucaagaccgcccugaccggcgccaugcgcgucaccaaggacacgaacgacaacaaccuguacaagcuccacgggggccacgugagcugccgggugaagcuguccgcccugacccucaagggcaccagcuacaagaucugcaccgacaagauguucuucgucaagaaccccacggacaccgggcacggcaccguggugaugcaggucaagguguccaagggggcgcccugccgcaucccggugaucgucgccgacgaccugaccgccgccaucaacaagggcauccuggugaccgugaacccgaucgccagcacgaacgacgacgagguccucaucgaggugaacccccccuucggcgacuccuacaucaucguggggcggggcgacagccgccugaccuaccaguggcacaaggagggguccagcaucggcaagcuguucacccagaccaugaagggggucgagcggcuggcggugaugggcgacacggccugggacuucuccagcgccggcggguucuucaccuccgugggcaaggggauccacaccgucuucggcagcgccuuccaggggcucuucggcggccugaacuggaucaccaaggugaucaugggggccgugcugaucugggucggcaucaacacgcgcaacaugaccauguccaugagcaugauccucgugggggugaucaugauguuccugagccugggcgucggggcggaccagggcugcgccaucaacuucggcaagugaggacuaguggaagcauuuuccuggcugauuaaaagaaauuacucagcuauggucaucuguuccuguuagaaggcuaugcagcauauuauauacuaugcgcauguuaugaaaugcauaauaaaaaauuuuaaaaaaucuaaaagaucuaaaaaaaaaaaaaaaaaaaaaaaaaaaaaaaaaaaaaaaaaaaaaaaaaaaaaaaaaaaaaaaaugcaucccccccccccccccccccccccccccccccaaaggcucuuuucagagccaccagaauu

SEQ ID NO: 835 - RNA, 2480 nt, Artificial Sequence
  mRNA product Design d-5 comprising derived and/or modified sequence from YFV__NC_002031.1__SS-prME (polyprotein: M,aa104-778) (opt1)
gggagagggcgcuuggcuugcaaggacccugagcugcggcauugaagcacacccaacccaacucgacugaagucagccucacugaaccggaucugagaaucuucucucucugggcuugccagggcucuccgaaccuagcuagcauccucuucaauuccaacuagaaagcuuaccauggacgugcugaccguccaguuccucauccugggcaugcugcucaugaccgggggcgugacccugguccggaagaaccgcuggcuccugcugaacgugaccagcgaggaccucggcaagacguucuccguggggaccggcaacugcaccaccaacauccuggaggccaaguacuggugccccgacagcauggaguacaacugccccaaccuguccccgcgggaggagcccgacgacaucgacugcuggugcuacggggucgagaacgugcgcguggccuacggcaagugcgacagcgcggggcggucccgccggagccgccgggccaucgaccugcccacccacgagaaccacggccucaagacccggcaggagaaguggaugacggggcgcaugggcgagcggcagcugcagaagaucgagcgcugguucgugcggaacccguucuucgccgucaccgcgcugaccaucgccuaccucguggggagcaacaugacccagcgcguggucaucgcccugcuggugcucgccgugggccccgccuacuccgcgcacugcaucgggaucacggaccgggacuucaucgagggcguccacggcgggaccugggugagcgccacccuggagcaggacaagugcgugaccgucauggcccccgacaagcccucccuggacaucagccucgagacgguggccaucgaccgcccggcggaggugcggaaggucugcuacaacgccgugcugacccacgugaagaucaacgacaagugccccuccaccggcgaggcccaccuggccgaggagaacgagggggacaacgccugcaagcgcaccuacagcgaccggggcugggggaacggcugcggccucuucgggaagggcuccaucgucgcgugcgccaaguucacgugcgccaagagcaugucccuguucgagguggaccagaccaagauccaguacgugauccgcgcccagcugcacgucggggccaagcaggagaacuggaacaccgacaucaagacccucaaguucgacgcgcugagcggcucccaggagguggaguucaucggcuacgggaaggccacgcuggagugccaggugcagaccgccgucgacuucggcaacagcuacaucgccgagauggagaccgaguccuggaucguggaccggcagugggcccaggaccucacccugcccuggcagagcggguccggcgggguguggcgcgagaugcaccaccuggucgaguucgagcccccgcacgcggccacgauccgggugcucgcccugggcaaccaggagggcagccugaagaccgcccucaccggggccaugcgcgucaccaaggacacgaacgacaacaaccuguacaagcugcacggcgggcacguguccugccgggugaagcucagcgcgcugacccugaagggcaccuccuacaagaucugcaccgacaagauguucuucgucaagaaccccacggacaccgggcacggcaccguggugaugcaggucaaggugagcaagggcgcccccugccgcaucccggugaucgucgccgacgaccucaccgccgcgaucaacaaggggauccuggugacggugaaccccaucgccagcaccaacgacgacgagguccugaucgaggugaacccgcccuucggcgacuccuacaucaucguggggcggggcgacagccgccucaccuaccaguggcacaaggagggguccagcaucggcaagcuguucacccagacgaugaagggcgucgagcggcuggccgugaugggggacaccgccugggacuucuccagcgccggcggguucuucaccuccgugggcaagggcauccacaccgucuucgggagcgcguuccagggccucuucgggggccugaacuggaucaccaaggugaucaugggggccgugcugaucugggucggcaucaacacgcgcaacaugaccauguccaugagcaugauccucgugggcgugaucaugauguuccugucccugggggucggcgccugaggacuaguggaagcauuuuccuggcugauuaaaagaaauuacucagcuauggucaucuguuccuguuagaaggcuaugcagcauauuauauacuaugcgcauguuaugaaaugcauaauaaaaaauuuuaaaaaaucuaaaagaucuaaaaaaaaaaaaaaaaaaaaaaaaaaaaaaaaaaaaaaaaaaaaaaaaaaaaaaaaaaaaaaaaugcaucccccccccccccccccccccccccccccccaaaggcucuuuucagagccaccagaauu

SEQ ID NO: 836 - RNA, 2507 nt, Artificial Sequence
  mRNA product Design d-5 comprising derived and/or modified sequence from YFV__NC_002031.1__SSIgE-prME-XX (polyprotein: aa122-788) (opt1)
gggagagggcgcuuggcuugcaaggacccugagcugcggcauugaagcacacccaacccaacucgacugaagucagccucacugaaccggaucugagaaucuucucucucugggcuugccagggcucuccgaaccuagcuagcauccucuucaauuccaacuagaaagcuuaccauggacuggaccuggauccuguuccucguggccgccgcgacccgcguccacagcgugacgcuggugcggaagaaccgcuggcuccugcugaacgucaccuccgaggaccucggcaagaccuucagcguggggaccggcaacugcacgaccaacauccuggaggccaaguacuggugccccgacuccauggaguacaacugcccgaaccugagcccccgggaggagcccgacgacaucgacugcuggugcuacggcguggagaacguccgcguggccuacgggaagugcgacuccgcgggccggagccgccggucccgccgggccaucgaccuccccacccacgagaaccacgggcugaagacccgccaggagaaguggaugacgggccggaugggggagcgccagcugcagaagaucgagcggugguucgugcgcaacccguucuucgccgucaccgcccucaccaucgccuaccuggugggcagcaacaugacccagcggguggucaucgcgcugcucgugcuggccgugggccccgccuacuccgcccacugcaucgggaucacggaccgcgacuucaucgagggcguccacgggggcaccugggugagcgcgacccuggagcaggacaagugcgugaccgucauggcccccgacaagcccucccucgacaucagccuggagacgguggccaucgaccggccggccgaggugcgcaaggucugcuacaacgccgugcugacccacgugaagaucaacgacaagugccccuccaccggcgaggcgcaccucgccgaggagaacgagggggacaacgccugcaagcggaccuacagcgaccggggcugggggaacggcugcgggcuguucggcaagggcuccaucgucgccugcgccaaguucacgugcgcgaagagcaugucccuguucgagguggaccagaccaagauccaguacgucauccgcgcccagcuccacgugggggccaagcaggagaacuggaacaccgacaucaagacccugaaguucgacgcccugagcggcagccaggagguggaguucaucggguacggcaaggccacgcucgagugccagguccagaccgcgguggacuucgggaacuccuacaucgccgagauggagaccgagagcuggaucguggaccggcagugggcccaggaccugacccugcccuggcaguccggcagcggcggggucuggcgcgagaugcaccaccucguggaguucgagcccccgcacgccgccacgauccgggugcuggcgcugggcaaccaggaggggucccucaagaccgcccugaccggcgccaugcgcgucaccaaggacacgaacgacaacaaccuguacaagcuccacgggggccacgugagcugccgggugaagcuguccgcccugacccucaagggcaccagcuacaagaucugcaccgacaagauguucuucgucaagaaccccacggacaccgggcacggcaccguggugaugcaggucaagguguccaagggggcgcccugccgcaucccggugaucgucgccgacgaccugaccgccgccaucaacaagggcauccuggugaccgugaacccgaucgccagcacgaacgacgacgagguccucaucgaggugaacccccccuucggcgacuccuacaucaucguggggcggggcgacagccgccugaccuaccaguggcacaaggagggguccagcaucggcaagcuguucacccagaccaugaagggggucgagcggcuggcggugaugggcgacacggccugggacuucuccagcgccggcggguucuucaccuccgugggcaaggggauccacaccgucuucggcagcgccuuccaggggcucuucggcggccugaacuggaucaccaaggugaucaugggggccgugcugaucugggucggcaucaacacgcgcaacaugaccauguccaugagcaugauccucgugggggugaucaugauguuccugagccugggcgucggggcggaccagggcugcgccaucaacuucggcaagugaggacuaguggaagcauuuuccuggcugauuaaaagaaauuacucagcuauggucaucuguuccuguuagaaggcuaugcagcauauuauauacuaugcgcauguuaugaaaugcauaauaaaaaauuuuaaaaaaucuaaaagaucuaaaaaaaaaaaaaaaaaaaaaaaaaaaaaaaaaaaaaaaaaaaaaaaaaaaaaaaaaaaaaaaaugcaucccccccccccccccccccccccccccccccaaaggcucuuuucagagccaccagaauu

SEQ ID NO: 837 - RNA, 2477 nt, Artificial Sequence
  mRNA product Design d-5 comprising derived and/or modified sequence from YFV__NC_002031.1__SSIgE-prME (polyprotein: aa122-778) (opt1)
gggagagggcgcuuggcuugcaaggacccugagcugcggcauugaagcacacccaacccaacucgacugaagucagccucacugaaccggaucugagaaucuucucucucugggcuugccagggcucuccgaaccuagcuagcauccucuucaauuccaacuagaaagcuuaccauggacuggaccuggauccuguuccucguggccgccgcgacccgcguccacagcgugacccugguccgcaagaaccgguggcuccugcugaacgugaccagcgaggaccucggcaagacguucuccguggggaccggcaacugcaccaccaacauccuggaggccaaguacuggugccccgacagcauggaguacaacugcccgaaccuguccccgcgcgaggagcccgacgacaucgacugcuggugcuacggggucgagaacgugcggguggccuacggcaagugcgacagcgcggggcgcucccggcgcagccggcgcgccaucgaccuccccacgcacgagaaccacggccugaagacccggcaggagaaguggaugaccggccgcaugggggagcggcagcugcagaagaucgagcgcugguucguccggaaccccuucuucgccgugaccgcccucacgaucgccuaccuggugggcuccaacaugacccagcgcgucgugaucgcgcugcucgugcuggccgucgggcccgccuacagcgcccacugcaucggcaucaccgaccgggacuucaucgagggggugcacggcggcaccuggguguccgcgacgcuggagcaggacaagugcgucaccgugauggcccccgacaagcccagccucgacaucucccuggagaccguggccaucgaccgcccggccgagguccggaaggugugcuacaacgccgugcugacccacgucaagaucaacgacaagugccccagcacgggggaggcgcaccucgccgaggagaacgagggcgacaacgccugcaagcgcaccuacuccgaccggggguggggcaacggcugcgggcuguucggcaaggggagcaucguggccugcgccaaguucaccugcgcgaaguccaugagccuguucgagguggaccagaccaagauccaguacgucauccgcgcccagcuccacgugggcgccaagcaggagaacuggaacacggacaucaagacccugaaguucgacgcccuguccgggagccaggaggucgaguucaucggcuacggcaaggccacccucgagugccaggugcagaccgcgguggacuucgggaacuccuacaucgccgagauggagacggagagcuggaucgucgaccggcagugggcccaggaccugacccugcccuggcagagcggcuccgggggcguguggcgcgagaugcaccaccucguggaguucgagcccccgcacgccgccaccauccgcguccuggcgcuggggaaccaggagggcagccucaagaccgcccugacgggcgccaugcgggugaccaaggacaccaacgacaacaaccuguacaagcuccacgggggccacguguccugccgcgucaagcugagcgcccugacccucaaggggacguccuacaagaucugcaccgacaagauguucuucgugaagaaccccaccgacaccggccacgggacgguggucaugcaggugaaggugagcaagggcgcgcccugccggauccccgucaucguggccgacgaccugaccgccgccaucaacaagggcauccuggugaccgucaacccgaucgccuccaccaacgacgacgaggugcucaucgaggugaacccgcccuucggggacagcuacaucaucgucggccgcggggacucccggcugaccuaccaguggcacaaggagggcagcuccaucggcaagcuguucacgcagaccaugaaggggguggagcgccucgcggugaugggcgacaccgccugggacuucagcuccgccgggggcuucuucaccagcgucgggaagggcauccacacgguguucggcuccgccuuccaggggcuguucggcgggcugaacuggaucaccaaggugaucaugggcgccguccucaucuggguggggaucaacacccggaacaugaccaugagcauguccaugauccuggugggcgucaucaugauguuccugagccugggcgugggggcgugaggacuaguggaagcauuuuccuggcugauuaaaagaaauuacucagcuauggucaucuguuccuguuagaaggcuaugcagcauauuauauacuaugcgcauguuaugaaaugcauaauaaaaaauuuuaaaaaaucuaaaagaucuaaaaaaaaaaaaaaaaaaaaaaaaaaaaaaaaaaaaaaaaaaaaaaaaaaaaaaaaaaaaaaaaugcaucccccccccccccccccccccccccccccccaaaggcucuuuucagagccaccagaauu

SEQ ID NO: 838 - RNA, 2525 nt, Artificial Sequence
  mRNA product Design d-5 comprising derived and/or modified sequence from YFV__NC_002031.1__SSjev-prME-XX (polyprotein: aa122-788) (opt1)
gggagagggcgcuuggcuugcaaggacccugagcugcggcauugaagcacacccaacccaacucgacugaagucagccucacugaaccggaucugagaaucuucucucucugggcuugccagggcucuccgaaccuagcuagcauccucuucaauuccaacuagaaagcuuaccaugggcaagcgcagcgccggguccaucauguggcuggccagccucgcgguggucaucgccugcgccggcgccgugacgcuggugcggaagaaccgcuggcuccugcugaacgucaccuccgaggaccucggcaagaccuucagcguggggaccggcaacugcacgaccaacauccuggaggccaaguacuggugccccgacuccauggaguacaacugcccgaaccugagcccccgggaggagcccgacgacaucgacugcuggugcuacggcguggagaacguccgcguggccuacgggaagugcgacuccgcgggccggagccgccggucccgccgggccaucgaccuccccacccacgagaaccacgggcugaagacccgccaggagaaguggaugacgggccggaugggggagcgccagcugcagaagaucgagcggugguucgugcgcaacccguucuucgccgucaccgcccucaccaucgccuaccuggugggcagcaacaugacccagcggguggucaucgcgcugcucgugcuggccgugggccccgccuacuccgcccacugcaucgggaucacggaccgcgacuucaucgagggcguccacgggggcaccugggugagcgcgacccuggagcaggacaagugcgugaccgucauggcccccgacaagcccucccucgacaucagccuggagacgguggccaucgaccggccggccgaggugcgcaaggucugcuacaacgccgugcugacccacgugaagaucaacgacaagugccccuccaccggcgaggcgcaccucgccgaggagaacgagggggacaacgccugcaagcggaccuacagcgaccggggcugggggaacggcugcgggcuguucggcaagggcuccaucgucgccugcgccaaguucacgugcgcgaagagcaugucccuguucgagguggaccagaccaagauccaguacgucauccgcgcccagcuccacgugggggccaagcaggagaacuggaacaccgacaucaagacccugaaguucgacgcccugagcggcagccaggagguggaguucaucggguacggcaaggccacgcucgagugccagguccagaccgcgguggacuucgggaacuccuacaucgccgagauggagaccgagagcuggaucguggaccggcagugggcccaggaccugacccugcccuggcaguccggcagcggcggggucuggcgcgagaugcaccaccucguggaguucgagcccccgcacgccgccacgauccgggugcuggcgcugggcaaccaggaggggucccucaagaccgcccugaccggcgccaugcgcgucaccaaggacacgaacgacaacaaccuguacaagcuccacgggggccacgugagcugccgggugaagcuguccgcccugacccucaagggcaccagcuacaagaucugcaccgacaagauguucuucgucaagaaccccacggacaccgggcacggcaccguggugaugcaggucaagguguccaagggggcgcccugccgcaucccggugaucgucgccgacgaccugaccgccgccaucaacaagggcauccuggugaccgugaacccgaucgccagcacgaacgacgacgagguccucaucgaggugaacccccccuucggcgacuccuacaucaucguggggcggggcgacagccgccugaccuaccaguggcacaaggagggguccagcaucggcaagcuguucacccagaccaugaagggggucgagcggcuggcggugaugggcgacacggccugggacuucuccagcgccggcggguucuucaccuccgugggcaaggggauccacaccgucuucggcagcgccuuccaggggcucuucggcggccugaacuggaucaccaaggugaucaugggggccgugcugaucugggucggcaucaacacgcgcaacaugaccauguccaugagcaugauccucgugggggugaucaugauguuccugagccugggcgucggggcggaccagggcugcgccaucaacuucggcaagugaggacuaguggaagcauuuuccuggcugauuaaaagaaauuacucagcuauggucaucuguuccuguuagaaggcuaugcagcauauuauauacuaugcgcauguuaugaaaugcauaauaaaaaauuuuaaaaaaucuaaaagaucuaaaaaaaaaaaaaaaaaaaaaaaaaaaaaaaaaaaaaaaaaaaaaaaaaaaaaaaaaaaaaaaaugcaucccccccccccccccccccccccccccccccaaaggcucuuuucagagccaccagaauu

SEQ ID NO: 839 - RNA, 2495 nt, Artificial Sequence
  mRNA product Design d-5 comprising derived and/or modified sequence from YFV__NC_002031.1__SSjev-prME (polyprotein: aa122-778) (opt1)
gggagagggcgcuuggcuugcaaggacccugagcugcggcauugaagcacacccaacccaacucgacugaagucagccucacugaaccggaucugagaaucuucucucucugggcuugccagggcucuccgaaccuagcuagcauccucuucaauuccaacuagaaagcuuaccaugggcaagcgcagcgccggguccaucauguggcuggccagccucgcgguggucaucgccugcgccggcgccgugacccugguccgcaagaaccgguggcuccugcugaacgugaccagcgaggaccucggcaagacguucuccguggggaccggcaacugcaccaccaacauccuggaggccaaguacuggugccccgacagcauggaguacaacugcccgaaccuguccccgcgcgaggagcccgacgacaucgacugcuggugcuacggggucgagaacgugcggguggccuacggcaagugcgacagcgcggggcgcucccggcgcagccggcgcgccaucgaccuccccacgcacgagaaccacggccugaagacccggcaggagaaguggaugaccggccgcaugggggagcggcagcugcagaagaucgagcgcugguucguccggaaccccuucuucgccgugaccgcccucacgaucgccuaccuggugggcuccaacaugacccagcgcgucgugaucgcgcugcucgugcuggccgucgggcccgccuacagcgcccacugcaucggcaucaccgaccgggacuucaucgagggggugcacggcggcaccuggguguccgcgacgcuggagcaggacaagugcgucaccgugauggcccccgacaagcccagccucgacaucucccuggagaccguggccaucgaccgcccggccgagguccggaaggugugcuacaacgccgugcugacccacgucaagaucaacgacaagugccccagcacgggggaggcgcaccucgccgaggagaacgagggcgacaacgccugcaagcgcaccuacuccgaccggggguggggcaacggcugcgggcuguucggcaaggggagcaucguggccugcgccaaguucaccugcgcgaaguccaugagccuguucgagguggaccagaccaagauccaguacgucauccgcgcccagcuccacgugggcgccaagcaggagaacuggaacacggacaucaagacccugaaguucgacgcccuguccgggagccaggaggucgaguucaucggcuacggcaaggccacccucgagugccaggugcagaccgcgguggacuucgggaacuccuacaucgccgagauggagacggagagcuggaucgucgaccggcagugggcccaggaccugacccugcccuggcagagcggcuccgggggcguguggcgcgagaugcaccaccucguggaguucgagcccccgcacgccgccaccauccgcguccuggcgcuggggaaccaggagggcagccucaagaccgcccugacgggcgccaugcgggugaccaaggacaccaacgacaacaaccuguacaagcuccacgggggccacguguccugccgcgucaagcugagcgcccugacccucaaggggacguccuacaagaucugcaccgacaagauguucuucgugaagaaccccaccgacaccggccacgggacgguggucaugcaggugaaggugagcaagggcgcgcccugccggauccccgucaucguggccgacgaccugaccgccgccaucaacaagggcauccuggugaccgucaacccgaucgccuccaccaacgacgacgaggugcucaucgaggugaacccgcccuucggggacagcuacaucaucgucggccgcggggacucccggcugaccuaccaguggcacaaggagggcagcuccaucggcaagcuguucacgcagaccaugaaggggguggagcgccucgcggugaugggcgacaccgccugggacuucagcuccgccgggggcuucuucaccagcgucgggaagggcauccacacgguguucggcuccgccuuccaggggcuguucggcgggcugaacuggaucaccaaggugaucaugggcgccguccucaucuggguggggaucaacacccggaacaugaccaugagcauguccaugauccuggugggcgucaucaugauguuccugagccugggcgugggggcgugaggacuaguggaagcauuuuccuggcugauuaaaagaaauuacucagcuauggucaucuguuccuguuagaaggcuaugcagcauauuauauacuaugcgcauguuaugaaaugcauaauaaaaaauuuuaaaaaaucuaaaagaucuaaaaaaaaaaaaaaaaaaaaaaaaaaaaaaaaaaaaaaaaaaaaaaaaaaaaaaaaaaaaaaaaugcaucccccccccccccccccccccccccccccccaaaggcucuuuucagagccaccagaauu

SEQ ID NO: 840 - RNA, 2543 nt, Artificial Sequence
  mRNA product Design d-5 comprising derived and/or modified sequence from YFV__NC_002031.1__X-SS-prME-XX (polyprotein: aa92-788) (opt1)
gggagagggcgcuuggcuugcaaggacccugagcugcggcauugaagcacacccaacccaacucgacugaagucagccucacugaaccggaucugagaaucuucucucucugggcuugccagggcucuccgaaccuagcuagcauccucuucaauuccaacuagaaagcuuaccaugcggggccugagcucccgcaagcggcgcagccacgacgugcucaccguccaguuccugauccuggggaugcuccugaugaccggcggggugacgcuggugcggaagaaccgcuggcuccugcugaacgucaccuccgaggaccucggcaagaccuucagcguggggaccggcaacugcacgaccaacauccuggaggccaaguacuggugccccgacuccauggaguacaacugcccgaaccugagcccccgggaggagcccgacgacaucgacugcuggugcuacggcguggagaacguccgcguggccuacgggaagugcgacuccgcgggccggagccgccggucccgccgggccaucgaccuccccacccacgagaaccacgggcugaagacccgccaggagaaguggaugacgggccggaugggggagcgccagcugcagaagaucgagcggugguucgugcgcaacccguucuucgccgucaccgcccucaccaucgccuaccuggugggcagcaacaugacccagcggguggucaucgcgcugcucgugcuggccgugggccccgccuacuccgcccacugcaucgggaucacggaccgcgacuucaucgagggcguccacgggggcaccugggugagcgcgacccuggagcaggacaagugcgugaccgucauggcccccgacaagcccucccucgacaucagccuggagacgguggccaucgaccggccggccgaggugcgcaaggucugcuacaacgccgugcugacccacgugaagaucaacgacaagugccccuccaccggcgaggcgcaccucgccgaggagaacgagggggacaacgccugcaagcggaccuacagcgaccggggcugggggaacggcugcgggcuguucggcaagggcuccaucgucgccugcgccaaguucacgugcgcgaaguccaugagccuguucgagguggaccagaccaagauccaguacgucauccgcgcccagcuccacgugggggccaagcaggagaacuggaacaccgacaucaagacccugaaguucgacgcccugagcggcagccaggagguggaguucaucggguacggcaaggccacgcucgagugccagguccagaccgcgguggacuucgggaacuccuacaucgccgagauggagaccgagagcuggaucguggaccggcagugggcccaggaccugacccugcccuggcaguccggcagcggcggggucuggcgcgagaugcaccaccucguggaguucgagcccccgcacgccgccacgauccgggugcuggcgcugggcaaccaggaggggucccucaagaccgcccugaccggcgccaugcgcgucaccaaggacacgaacgacaacaaccuguacaagcuccacgggggccacgugagcugccgggugaagcuguccgcccugacccucaagggcaccagcuacaagaucugcaccgacaagauguucuucgucaagaaccccacggacaccgggcacggcaccguggugaugcaggucaagguguccaagggggcgcccugccgcaucccggugaucgucgccgacgaccugaccgccgccaucaacaagggcauccuggugaccgugaacccgaucgccagcacgaacgacgacgagguccucaucgaggugaacccccccuucggcgacuccuacaucaucguggggcggggcgacagccgccugaccuaccaguggcacaaggagggguccagcaucggcaagcuguucacccagaccaugaagggggucgagcggcuggcggugaugggcgacacggccugggacuucuccagcgccggcggguucuucaccuccgugggcaaggggauccacaccgucuucggcagcgccuuccaggggcuguucggcggccucaacuggaucaccaaggugaucaugggggccgugcugaucugggucggcaucaacacgcgcaacaugaccauguccaugagcaugauccucgugggggugaucaugauguuccugagccugggcgucggggcggaccagggcugcgccaucaacuucggcaagugaggacuaguggaagcauuuuccuggcugauuaaaagaaauuacucagcuauggucaucuguuccuguuagaaggcuaugcagcauauuauauacuaugcgcauguuaugaaaugcauaauaaaaaauuuuaaaaaaucuaaaagaucuaaaaaaaaaaaaaaaaaaaaaaaaaaaaaaaaaaaaaaaaaaaaaaaaaaaaaaaaaaaaaaaaugcaucccccccccccccccccccccccccccccccaaaggcucuuuucagagccaccagaauu

SEQ ID NO: 841 - RNA, 2480 nt, Artificial Sequence
  mRNA product Design d-5 comprising derived and/or modified sequence from YFV__NC_002031.1__SS-prME (polyprotein: M,aa104-778) (opt1)
gggagagggcgcuuggcuugcaaggacccugagcugcggcauugaagcacacccaacccaacucgacugaagucagccucacugaaccggaucugagaaucuucucucucugggcuugccagggcucuccgaaccuagcuagcauccucuucaauuccaacuagaaagcuuaccauggacgugcucaccguccaguuccugauccuggggaugcuccugaugaccggcggggugacgcuggugcggaagaaccgcuggcuccugcugaacgucaccuccgaggaccucggcaagaccuucagcguggggaccggcaacugcacgaccaacauccuggaggccaaguacuggugccccgacuccauggaguacaacugcccgaaccugagcccccgggaggagcccgacgacaucgacugcuggugcuacggcguggagaacguccgcguggccuacgggaagugcgacuccgcgggccggagccgccggucccgccgggccaucgaccuccccacccacgagaaccacgggcugaagacccgccaggagaaguggaugacgggccggaugggggagcgccagcugcagaagaucgagcggugguucgugcgcaacccguucuucgccgucaccgcccucaccaucgccuaccuggugggcagcaacaugacccagcggguggucaucgcgcugcucgugcuggccgugggccccgccuacuccgcccacugcaucgggaucacggaccgcgacuucaucgagggcguccacgggggcaccugggugagcgcgacccuggagcaggacaagugcgugaccgucauggcccccgacaagcccucccucgacaucagccuggagacgguggccaucgaccggccggccgaggugcgcaaggucugcuacaacgccgugcugacccacgugaagaucaacgacaagugccccuccaccggcgaggcgcaccucgccgaggagaacgagggggacaacgccugcaagcggaccuacagcgaccggggcugggggaacggcugcgggcuguucggcaagggcuccaucgucgccugcgccaaguucacgugcgcgaaguccaugagccuguucgagguggaccagaccaagauccaguacgucauccgcgcccagcuccacgugggggccaagcaggagaacuggaacaccgacaucaagacccugaaguucgacgcccugagcggcagccaggagguggaguucaucggguacggcaaggccacgcucgagugccagguccagaccgcgguggacuucgggaacuccuacaucgccgagauggagaccgagagcuggaucguggaccggcagugggcccaggaccugacccugcccuggcaguccggcagcggcggggucuggcgcgagaugcaccaccucguggaguucgagcccccgcacgccgccacgauccgggugcuggcgcugggcaaccaggaggggucccucaagaccgcccugaccggcgccaugcgcgucaccaaggacacgaacgacaacaaccuguacaagcuccacgggggccacgugagcugccgggugaagcuguccgcccugacccucaagggcaccagcuacaagaucugcaccgacaagauguucuucgucaagaaccccacggacaccgggcacggcaccguggugaugcaggucaagguguccaagggggcgcccugccgcaucccggugaucgucgccgacgaccugaccgccgccaucaacaagggcauccuggugaccgugaacccgaucgccagcacgaacgacgacgagguccucaucgaggugaacccccccuucggcgacuccuacaucaucguggggcggggcgacagccgccugaccuaccaguggcacaaggagggguccagcaucggcaagcuguucacccagaccaugaagggggucgagcggcuggcggugaugggcgacacggccugggacuucuccagcgccggcggguucuucaccuccgugggcaaggggauccacaccgucuucggcagcgccuuccaggggcuguucggcggccucaacuggaucaccaaggugaucaugggggccgugcugaucugggucggcaucaacacgcgcaacaugaccauguccaugagcaugauccucgugggggugaucaugauguuccugagccugggcgucggggcgugaggacuaguggaagcauuuuccuggcugauuaaaagaaauuacucagcuauggucaucuguuccuguuagaaggcuaugcagcauauuauauacuaugcgcauguuaugaaaugcauaauaaaaaauuuuaaaaaaucuaaaagaucuaaaaaaaaaaaaaaaaaaaaaaaaaaaaaaaaaaaaaaaaaaaaaaaaaaaaaaaaaaaaaaaaugcaucccccccccccccccccccccccccccccccaaaggcucuuuucagagccaccagaauu

SEQ ID NO: 842 - RNA, 2507 nt, Artificial Sequence
  mRNA product Design d-5 comprising derived and/or modified sequence from YFV__NC_002031.1__SSIgE-prME-XX (polyprotein: aa122-788) (opt1)
gggagagggcgcuuggcuugcaaggacccugagcugcggcauugaagcacacccaacccaacucgacugaagucagccucacugaaccggaucugagaaucuucucucucugggcuugccagggcucuccgaaccuagcuagcauccucuucaauuccaacuagaaagcuuaccauggacuggaccuggauccuguuccucguggccgccgcgacccgcguccacagcgugacgcuggugcggaagaaccgcuggcuccugcugaacgucaccuccgaggaccucggcaagaccuucagcguggggaccggcaacugcacgaccaacauccuggaggccaaguacuggugccccgacuccauggaguacaacugcccgaaccugagcccccgggaggagcccgacgacaucgacugcuggugcuacggcguggagaacguccgcguggccuacgggaagugcgacuccgcgggccggagccgccggucccgccgggccaucgaccuccccacccacgagaaccacgggcugaagacccgccaggagaaguggaugacgggccggaugggggagcgccagcugcagaagaucgagcggugguucgugcgcaacccguucuucgccgucaccgcccucaccaucgccuaccuggugggcagcaacaugacccagcggguggucaucgcgcugcucgugcuggccgugggccccgccuacuccgcccacugcaucgggaucacggaccgcgacuucaucgagggcguccacgggggcaccugggugagcgcgacccuggagcaggacaagugcgugaccgucauggcccccgacaagcccucccucgacaucagccuggagacgguggccaucgaccggccggccgaggugcgcaaggucugcuacaacgccgugcugacccacgugaagaucaacgacaagugccccuccaccggcgaggcgcaccucgccgaggagaacgagggggacaacgccugcaagcggaccuacagcgaccggggcugggggaacggcugcgggcuguucggcaagggcuccaucgucgccugcgccaaguucacgugcgcgaaguccaugagccuguucgagguggaccagaccaagauccaguacgucauccgcgcccagcuccacgugggggccaagcaggagaacuggaacaccgacaucaagacccugaaguucgacgcccugagcggcagccaggagguggaguucaucggguacggcaaggccacgcucgagugccagguccagaccgcgguggacuucgggaacuccuacaucgccgagauggagaccgagagcuggaucguggaccggcagugggcccaggaccugacccugcccuggcaguccggcagcggcggggucuggcgcgagaugcaccaccucguggaguucgagcccccgcacgccgccacgauccgggugcuggcgcugggcaaccaggaggggucccucaagaccgcccugaccggcgccaugcgcgucaccaaggacacgaacgacaacaaccuguacaagcuccacgggggccacgugagcugccgggugaagcuguccgcccugacccucaagggcaccagcuacaagaucugcaccgacaagauguucuucgucaagaaccccacggacaccgggcacggcaccguggugaugcaggucaagguguccaagggggcgcccugccgcaucccggugaucgucgccgacgaccugaccgccgccaucaacaagggcauccuggugaccgugaacccgaucgccagcacgaacgacgacgagguccucaucgaggugaacccccccuucggcgacuccuacaucaucguggggcggggcgacagccgccugaccuaccaguggcacaaggagggguccagcaucggcaagcuguucacccagaccaugaagggggucgagcggcuggcggugaugggcgacacggccugggacuucuccagcgccggcggguucuucaccuccgugggcaaggggauccacaccgucuucggcagcgccuuccaggggcuguucggcggccucaacuggaucaccaaggugaucaugggggccgugcugaucugggucggcaucaacacgcgcaacaugaccauguccaugagcaugauccucgugggggugaucaugauguuccugagccugggcgucggggcggaccagggcugcgccaucaacuucggcaagugaggacuaguggaagcauuuuccuggcugauuaaaagaaauuacucagcuauggucaucuguuccuguuagaaggcuaugcagcauauuauauacuaugcgcauguuaugaaaugcauaauaaaaaauuuuaaaaaaucuaaaagaucuaaaaaaaaaaaaaaaaaaaaaaaaaaaaaaaaaaaaaaaaaaaaaaaaaaaaaaaaaaaaaaaaugcaucccccccccccccccccccccccccccccccaaaggcucuuuucagagccaccagaauu

SEQ ID NO: 843 - RNA, 2477 nt, Artificial Sequence
  mRNA product Design d-5 comprising derived and/or modified sequence from YFV__NC_002031.1__SSIgE-prME (polyprotein: aa122-778) (opt1)
gggagagggcgcuuggcuugcaaggacccugagcugcggcauugaagcacacccaacccaacucgacugaagucagccucacugaaccggaucugagaaucuucucucucugggcuugccagggcucuccgaaccuagcuagcauccucuucaauuccaacuagaaagcuuaccauggacuggaccuggauccuguuccucguggccgccgcgacccgcguccacagcgugacgcuggugcggaagaaccgcuggcuccugcugaacgucaccuccgaggaccucggcaagaccuucagcguggggaccggcaacugcacgaccaacauccuggaggccaaguacuggugccccgacuccauggaguacaacugcccgaaccugagcccccgggaggagcccgacgacaucgacugcuggugcuacggcguggagaacguccgcguggccuacgggaagugcgacuccgcgggccggagccgccggucccgccgggccaucgaccuccccacccacgagaaccacgggcugaagacccgccaggagaaguggaugacgggccggaugggggagcgccagcugcagaagaucgagcggugguucgugcgcaacccguucuucgccgucaccgcccucaccaucgccuaccuggugggcagcaacaugacccagcggguggucaucgcgcugcucgugcuggccgugggccccgccuacuccgcccacugcaucgggaucacggaccgcgacuucaucgagggcguccacgggggcaccugggugagcgcgacccuggagcaggacaagugcgugaccgucauggcccccgacaagcccucccucgacaucagccuggagacgguggccaucgaccggccggccgaggugcgcaaggucugcuacaacgccgugcugacccacgugaagaucaacgacaagugccccuccaccggcgaggcgcaccucgccgaggagaacgagggggacaacgccugcaagcggaccuacagcgaccggggcugggggaacggcugcgggcuguucggcaagggcuccaucgucgccugcgccaaguucacgugcgcgaaguccaugagccuguucgagguggaccagaccaagauccaguacgucauccgcgcccagcuccacgugggggccaagcaggagaacuggaacaccgacaucaagacccugaaguucgacgcccugagcggcagccaggagguggaguucaucggguacggcaaggccacgcucgagugccagguccagaccgcgguggacuucgggaacuccuacaucgccgagauggagaccgagagcuggaucguggaccggcagugggcccaggaccugacccugcccuggcaguccggcagcggcggggucuggcgcgagaugcaccaccucguggaguucgagcccccgcacgccgccacgauccgggugcuggcgcugggcaaccaggaggggucccucaagaccgcccugaccggcgccaugcgcgucaccaaggacacgaacgacaacaaccuguacaagcuccacgggggccacgugagcugccgggugaagcuguccgcccugacccucaagggcaccagcuacaagaucugcaccgacaagauguucuucgucaagaaccccacggacaccgggcacggcaccguggugaugcaggucaagguguccaagggggcgcccugccgcaucccggugaucgucgccgacgaccugaccgccgccaucaacaagggcauccuggugaccgugaacccgaucgccagcacgaacgacgacgagguccucaucgaggugaacccccccuucggcgacuccuacaucaucguggggcggggcgacagccgccugaccuaccaguggcacaaggagggguccagcaucggcaagcuguucacccagaccaugaagggggucgagcggcuggcggugaugggcgacacggccugggacuucuccagcgccggcggguucuucaccuccgugggcaaggggauccacaccgucuucggcagcgccuuccaggggcuguucggcggccucaacuggaucaccaaggugaucaugggggccgugcugaucugggucggcaucaacacgcgcaacaugaccauguccaugagcaugauccucgugggggugaucaugauguuccugagccugggcgucggggcgugaggacuaguggaagcauuuuccuggcugauuaaaagaaauuacucagcuauggucaucuguuccuguuagaaggcuaugcagcauauuauauacuaugcgcauguuaugaaaugcauaauaaaaaauuuuaaaaaaucuaaaagaucuaaaaaaaaaaaaaaaaaaaaaaaaaaaaaaaaaaaaaaaaaaaaaaaaaaaaaaaaaaaaaaaaugcaucccccccccccccccccccccccccccccccaaaggcucuuuucagagccaccagaauu

SEQ ID NO: 844 - RNA, 2525 nt, Artificial Sequence
  mRNA product Design d-5 comprising derived and/or modified sequence from YFV__NC_002031.1__SSjev-prME-XX (polyprotein: aa122-788) (opt1)
gggagagggcgcuuggcuugcaaggacccugagcugcggcauugaagcacacccaacccaacucgacugaagucagccucacugaaccggaucugagaaucuucucucucugggcuugccagggcucuccgaaccuagcuagcauccucuucaauuccaacuagaaagcuuaccaugggcaagcgcagcgccggguccaucauguggcuggccagccucgcgguggucaucgccugcgccggcgccgugacgcuggugcggaagaaccgcuggcuccugcugaacgucaccuccgaggaccucggcaagaccuucagcguggggaccggcaacugcacgaccaacauccuggaggccaaguacuggugccccgacuccauggaguacaacugcccgaaccugagcccccgggaggagcccgacgacaucgacugcuggugcuacggcguggagaacguccgcguggccuacgggaagugcgacuccgcgggccggagccgccggucccgccgggccaucgaccuccccacccacgagaaccacgggcugaagacccgccaggagaaguggaugacgggccggaugggggagcgccagcugcagaagaucgagcggugguucgugcgcaacccguucuucgccgucaccgcccucaccaucgccuaccuggugggcagcaacaugacccagcggguggucaucgcgcugcucgugcuggccgugggccccgccuacuccgcccacugcaucgggaucacggaccgcgacuucaucgagggcguccacgggggcaccugggugagcgcgacccuggagcaggacaagugcgugaccgucauggcccccgacaagcccucccucgacaucagccuggagacgguggccaucgaccggccggccgaggugcgcaaggucugcuacaacgccgugcugacccacgugaagaucaacgacaagugccccuccaccggcgaggcgcaccucgccgaggagaacgagggggacaacgccugcaagcggaccuacagcgaccggggcugggggaacggcugcgggcuguucggcaagggcuccaucgucgccugcgccaaguucacgugcgcgaaguccaugagccuguucgagguggaccagaccaagauccaguacgucauccgcgcccagcuccacgugggggccaagcaggagaacuggaacaccgacaucaagacccugaaguucgacgcccugagcggcagccaggagguggaguucaucggguacggcaaggccacgcucgagugccagguccagaccgcgguggacuucgggaacuccuacaucgccgagauggagaccgagagcuggaucguggaccggcagugggcccaggaccugacccugcccuggcaguccggcagcggcggggucuggcgcgagaugcaccaccucguggaguucgagcccccgcacgccgccacgauccgggugcuggcgcugggcaaccaggaggggucccucaagaccgcccugaccggcgccaugcgcgucaccaaggacacgaacgacaacaaccuguacaagcuccacgggggccacgugagcugccgggugaagcuguccgcccugacccucaagggcaccagcuacaagaucugcaccgacaagauguucuucgucaagaaccccacggacaccgggcacggcaccguggugaugcaggucaagguguccaagggggcgcccugccgcaucccggugaucgucgccgacgaccugaccgccgccaucaacaagggcauccuggugaccgugaacccgaucgccagcacgaacgacgacgagguccucaucgaggugaacccccccuucggcgacuccuacaucaucguggggcggggcgacagccgccugaccuaccaguggcacaaggagggguccagcaucggcaagcuguucacccagaccaugaagggggucgagcggcuggcggugaugggcgacacggccugggacuucuccagcgccggcggguucuucaccuccgugggcaaggggauccacaccgucuucggcagcgccuuccaggggcuguucggcggccucaacuggaucaccaaggugaucaugggggccgugcugaucugggucggcaucaacacgcgcaacaugaccauguccaugagcaugauccucgugggggugaucaugauguuccugagccugggcgucggggcggaccagggcugcgccaucaacuucggcaagugaggacuaguggaagcauuuuccuggcugauuaaaagaaauuacucagcuauggucaucuguuccuguuagaaggcuaugcagcauauuauauacuaugcgcauguuaugaaaugcauaauaaaaaauuuuaaaaaaucuaaaagaucuaaaaaaaaaaaaaaaaaaaaaaaaaaaaaaaaaaaaaaaaaaaaaaaaaaaaaaaaaaaaaaaaugcaucccccccccccccccccccccccccccccccaaaggcucuuuucagagccaccagaauu

SEQ ID NO: 845 - RNA, 2495 nt, Artificial Sequence
  mRNA product Design d-5 comprising derived and/or modified sequence from YFV__NC_002031.1__SSjev-prME (polyprotein: aa122-778) (opt1)
gggagagggcgcuuggcuugcaaggacccugagcugcggcauugaagcacacccaacccaacucgacugaagucagccucacugaaccggaucugagaaucuucucucucugggcuugccagggcucuccgaaccuagcuagcauccucuucaauuccaacuagaaagcuuaccaugggcaagcgcagcgccggguccaucauguggcuggccagccucgcgguggucaucgccugcgccggcgccgugacgcuggugcggaagaaccgcuggcuccugcugaacgucaccuccgaggaccucggcaagaccuucagcguggggaccggcaacugcacgaccaacauccuggaggccaaguacuggugccccgacuccauggaguacaacugcccgaaccugagcccccgggaggagcccgacgacaucgacugcuggugcuacggcguggagaacguccgcguggccuacgggaagugcgacuccgcgggccggagccgccggucccgccgggccaucgaccuccccacccacgagaaccacgggcugaagacccgccaggagaaguggaugacgggccggaugggggagcgccagcugcagaagaucgagcggugguucgugcgcaacccguucuucgccgucaccgcccucaccaucgccuaccuggugggcagcaacaugacccagcggguggucaucgcgcugcucgugcuggccgugggccccgccuacuccgcccacugcaucgggaucacggaccgcgacuucaucgagggcguccacgggggcaccugggugagcgcgacccuggagcaggacaagugcgugaccgucauggcccccgacaagcccucccucgacaucagccuggagacgguggccaucgaccggccggccgaggugcgcaaggucugcuacaacgccgugcugacccacgugaagaucaacgacaagugccccuccaccggcgaggcgcaccucgccgaggagaacgagggggacaacgccugcaagcggaccuacagcgaccggggcugggggaacggcugcgggcuguucggcaagggcuccaucgucgccugcgccaaguucacgugcgcgaaguccaugagccuguucgagguggaccagaccaagauccaguacgucauccgcgcccagcuccacgugggggccaagcaggagaacuggaacaccgacaucaagacccugaaguucgacgcccugagcggcagccaggagguggaguucaucggguacggcaaggccacgcucgagugccagguccagaccgcgguggacuucgggaacuccuacaucgccgagauggagaccgagagcuggaucguggaccggcagugggcccaggaccugacccugcccuggcaguccggcagcggcggggucuggcgcgagaugcaccaccucguggaguucgagcccccgcacgccgccacgauccgggugcuggcgcugggcaaccaggaggggucccucaagaccgcccugaccggcgccaugcgcgucaccaaggacacgaacgacaacaaccuguacaagcuccacgggggccacgugagcugccgggugaagcuguccgcccugacccucaagggcaccagcuacaagaucugcaccgacaagauguucuucgucaagaaccccacggacaccgggcacggcaccguggugaugcaggucaagguguccaagggggcgcccugccgcaucccggugaucgucgccgacgaccugaccgccgccaucaacaagggcauccuggugaccgugaacccgaucgccagcacgaacgacgacgagguccucaucgaggugaacccccccuucggcgacuccuacaucaucguggggcggggcgacagccgccugaccuaccaguggcacaaggagggguccagcaucggcaagcuguucacccagaccaugaagggggucgagcggcuggcggugaugggcgacacggccugggacuucuccagcgccggcggguucuucaccuccgugggcaaggggauccacaccgucuucggcagcgccuuccaggggcuguucggcggccucaacuggaucaccaaggugaucaugggggccgugcugaucugggucggcaucaacacgcgcaacaugaccauguccaugagcaugauccucgugggggugaucaugauguuccugagccugggcgucggggcgugaggacuaguggaagcauuuuccuggcugauuaaaagaaauuacucagcuauggucaucuguuccuguuagaaggcuaugcagcauauuauauacuaugcgcauguuaugaaaugcauaauaaaaaauuuuaaaaaaucuaaaagaucuaaaaaaaaaaaaaaaaaaaaaaaaaaaaaaaaaaaaaaaaaaaaaaaaaaaaaaaaaaaaaaaaugcaucccccccccccccccccccccccccccccccaaaggcucuuuucagagccaccagaauu

SEQ ID NO: 846 - RNA, 2543 nt, Artificial Sequence
  mRNA product Design d-5 comprising derived and/or modified sequence from YFV__NC_002031.1__X-SS-prME-XX (polyprotein: aa92-788) (opt1)
gggagagggcgcuuggcuugcaaggacccugagcugcggcauugaagcacacccaacccaacucgacugaagucagccucacugaaccggaucugagaaucuucucucucugggcuugccagggcucuccgaaccuagcuagcauccucuucaauuccaacuagaaagcuuaccaugcgcggccugagcucccggaagcgccggagccacgacgugcucaccguccaguuccugauccuggggaugcuccugaugaccggcggggugacgcuggugcgcaagaaccgguggcuccugcugaacgucaccuccgaggaccucggcaagaccuucagcguggggaccggcaacugcacgaccaacauccuggaggccaaguacuggugccccgacuccauggaguacaacugccccaaccugagcccccgcgaggagcccgacgacaucgacugcuggugcuacggcguggagaacguccggguggccuacgggaagugcgacuccgcgggccgcagccggcgcucccggcgcgccaucgaccuccccacccacgagaaccacgggcugaagacccggcaggagaaguggaugacgggccgcaugggggagcggcagcugcagaagaucgagcgcugguucgugcggaacccguucuucgccgucaccgcccucaccaucgccuaccuggugggcagcaacaugacccagcgcguggucaucgcgcugcucgugcuggccgugggccccgccuacuccgcccacugcaucgggaucacggaccgggacuucaucgagggcguccacgggggcaccugggugagcgcgacccuggagcaggacaagugcgugaccgucauggcccccgacaagcccucccucgacaucagccuggagacgguggccaucgaccgcccggccgaggugcggaaggucugcuacaacgccgugcugacccacgugaagaucaacgacaagugccccuccaccggcgaggcgcaccucgccgaggagaacgagggggacaacgccugcaagcgcaccuacagcgaccgcggcugggggaacggcugcgggcuguucggcaagggcuccaucgucgccugcgccaaguucacgugcgccaagagcaugucccuguucgagguggaccagaccaagauccaguacgucauccgggcgcagcuccacgugggggccaagcaggagaacuggaacaccgacaucaagacccugaaguucgacgcccugagcggcagccaggagguggaguucaucggguacggcaaggccacgcucgagugccagguccagaccgcgguggacuucgggaacuccuacaucgccgagauggagaccgagagcuggaucguggaccgccagugggcccaggaccugacccugcccuggcaguccggcagcggcggggucuggcgggagaugcaccaccucguggaguucgagcccccgcacgccgccacgauccgcgugcuggcgcugggcaaccaggaggggucccucaagaccgcccugaccggcgccaugcgggucaccaaggacacgaacgacaacaaccuguacaagcuccacgggggccacgugagcugccgcgugaagcuguccgcccugacccucaagggcaccagcuacaagaucugcaccgacaagauguucuucgucaagaaccccacggacaccgggcacggcaccguggugaugcaggucaagguguccaagggggcgcccugccggauccccgugaucgucgccgacgaccugaccgccgccaucaacaagggcauccuggugaccgugaacccgaucgccagcacgaacgacgacgagguccucaucgaggugaacccgcccuucggcgacuccuacaucaucguggggcgcggcgacagccggcugaccuaccaguggcacaaggagggguccagcaucggcaagcuguucacccagaccaugaagggggucgagcgccucgcggugaugggcgacacggccugggacuucuccagcgccggcggguucuucaccuccgugggcaaggggauccacaccgucuucggcagcgccuuccaggggcuguucggcggccugaacuggaucaccaaggugaucaugggggccgugcugaucugggucggcaucaacacgcggaacaugaccauguccaugagcaugauccucgugggggugaucaugauguuccugagccugggcgucggggcggaccagggcugcgccaucaacuucggcaagugaggacuaguggaagcauuuuccuggcugauuaaaagaaauuacucagcuauggucaucuguuccuguuagaaggcuaugcagcauauuauauacuaugcgcauguuaugaaaugcauaauaaaaaauuuuaaaaaaucuaaaagaucuaaaaaaaaaaaaaaaaaaaaaaaaaaaaaaaaaaaaaaaaaaaaaaaaaaaaaaaaaaaaaaaaugcaucccccccccccccccccccccccccccccccaaaggcucuuuucagagccaccagaauu

SEQ ID NO: 847 - RNA, 2480 nt, Artificial Sequence
  mRNA product Design d-5 comprising derived and/or modified sequence from YFV__NC_002031.1__SS-prME (polyprotein: M,aa104-778) (opt1)
gggagagggcgcuuggcuugcaaggacccugagcugcggcauugaagcacacccaacccaacucgacugaagucagccucacugaaccggaucugagaaucuucucucucugggcuugccagggcucuccgaaccuagcuagcauccucuucaauuccaacuagaaagcuuaccauggacgugcugaccguccaguuccucauccugggcaugcugcucaugaccgggggcgugacgcuggugcgcaagaaccgguggcugcuccugaacgucaccagcgaggaccuggggaagaccuucuccgugggcaccgggaacugcacgaccaacauccucgaggccaaguacuggugccccgacagcauggaguacaacugccccaaccugagcccccgcgaggagcccgacgacaucgacugcuggugcuacggcguggagaacguccggguggccuacggcaagugcgacuccgcggggcgcucccggcgcagccggcgcgccaucgaccugcccacccacgagaaccacggccucaagacccggcaggagaaguggaugacggggcgcaugggcgagcggcagcugcagaagaucgagcgcugguucgugcggaacccguucuucgccgucaccgcccugaccaucgccuaccucgugggguccaacaugacccagcgcguggucaucgcgcugcuggugcucgccgugggccccgccuacagcgcccacugcaucggcaucacggaccgggacuucaucgaggggguccacggcgggaccuggguguccgcgacccuggagcaggacaagugcgugaccgucauggcccccgacaagcccagccuggacaucucccucgagacgguggccaucgaccgcccggccgaggugcggaaggucugcuacaacgccgugcugacccacgugaagaucaacgacaagugccccagcaccggcgaggcgcaccuggccgaggagaacgagggcgacaacgccugcaagcgcaccuacuccgaccggggguggggcaacgggugcggccucuucgggaagggcagcaucgucgccugcgccaaguucacgugcgcgaaguccaugagccuguucgagguggaccagaccaagauccaguacgucauccgcgcccagcugcacgugggcgccaagcaggagaacuggaacaccgacaucaagacccucaaguucgacgcccuguccgggagccaggagguggaguucaucggcuacgggaaggccacgcuggagugccagguccagaccgcgguggacuucggcaacuccuacaucgccgagauggagaccgagagcuggaucguggaccggcagugggcccaggaccucacccugcccuggcagagcggguccggcggcgucuggcgcgagaugcaccaccugguggaguucgagcccccgcacgccgccacgauccgcgugcucgcgcuggggaaccaggagggcagccugaagaccgcccucaccggggccaugcgggucaccaaggacacgaacgacaacaaccuguacaagcugcacggcgggcacguguccugccgcgugaagcucagcgcccugacccugaagggcaccuccuacaagaucugcaccgacaagauguucuucgucaagaaccccacggacaccggccacgggaccguggugaugcaggucaaggugagcaagggcgcgcccugccggauccccgugaucgucgccgacgaccucaccgccgccaucaacaaggggauccuggugaccgugaacccgaucgccuccacgaacgacgacgagguccugaucgaggugaacccgcccuucggcgacagcuacaucaucgugggccgcggggacucccggcucaccuaccaguggcacaaggagggcagcuccaucgggaagcuguucacccagaccaugaagggcgucgagcgccuggcggugaugggggacacggccugggacuucagcuccgccggcggcuucuucaccagcguggggaagggcauccacaccgucuucggguccgccuuccagggccucuucgggggccugaacuggaucaccaaggugaucaugggcgccgugcugaucugggucgggaucaacacgcggaacaugaccaugagcauguccaugauccuggugggcgugaucaugauguuccucagccugggggucggcgcgugaggacuaguggaagcauuuuccuggcugauuaaaagaaauuacucagcuauggucaucuguuccuguuagaaggcuaugcagcauauuauauacuaugcgcauguuaugaaaugcauaauaaaaaauuuuaaaaaaucuaaaagaucuaaaaaaaaaaaaaaaaaaaaaaaaaaaaaaaaaaaaaaaaaaaaaaaaaaaaaaaaaaaaaaaaugcaucccccccccccccccccccccccccccccccaaaggcucuuuucagagccaccagaauu

SEQ ID NO: 848 - RNA, 2507 nt, Artificial Sequence
  mRNA product Design d-5 comprising derived and/or modified sequence from YFV__NC_002031.1__SSIgE-prME-XX (polyprotein: aa122-788) (opt1)
gggagagggcgcuuggcuugcaaggacccugagcugcggcauugaagcacacccaacccaacucgacugaagucagccucacugaaccggaucugagaaucuucucucucugggcuugccagggcucuccgaaccuagcuagcauccucuucaauuccaacuagaaagcuuaccauggacuggaccuggauccuguuccucguggccgccgcgacccgcguccacagcgugacgcuggugcggaagaaccgcuggcugcuccugaacgucaccuccgaggaccugggcaagaccuucagcguggggaccggcaacugcacgaccaacauccucgaggccaaguacuggugccccgacuccauggaguacaacugccccaaccugagcccccgggaggagcccgacgacaucgacugcuggugcuacgggguggagaacguccgcguggccuacggcaagugcgacuccgccgggcggagccgccggucccgccgggccaucgaccugcccacccacgagaaccacggccucaagacccgccaggagaaguggaugacgggccggaugggggagcgccagcugcagaagaucgagcggugguucgugcgcaacccguucuucgcggucaccgcccugaccaucgccuaccucgugggcagcaacaugacccagcggguggucaucgcccugcuggugcucgcgguggggcccgccuacuccgcccacugcaucggcaucacggaccgcgacuucaucgaggggguccacggcggcaccugggugagcgccacccuggagcaggacaagugcgugaccgucauggcccccgacaagcccucccuggacaucagccucgagacgguggcgaucgaccggccggccgaggugcgcaaggucugcuacaacgccgugcugacccacgugaagaucaacgacaagugccccuccaccggggaggcccaccuggccgaggagaacgagggcgacaacgcgugcaagcggaccuacagcgaccgcggguggggcaacggcugcggccucuucgggaagggguccaucgucgccugcgccaaguucacgugcgccaagagcaugucccuguucgagguggaccagaccaagauccaguacgucauccgggcccagcugcacgugggcgcgaagcaggagaacuggaacaccgacaucaagacccucaaguucgacgcccugagcgggucccaggagguggaguucaucggcuacggcaaggccacgcuggagugccagguccagaccgccguggacuucgggaacagcuacaucgccgagauggagaccgagagcuggaucguggaccgccagugggcgcaggaccucacccugcccuggcaguccggcagcgggggcgucuggcgcgagaugcaccaccugguggaguucgagcccccgcacgccgccacgauccgggugcucgcccuggggaaccaggagggcucccugaagaccgcgcucaccggcgccaugcgcgucaccaaggacacgaacgacaacaaccuguacaagcugcacgggggccacgugagcugccgggugaagcucuccgcccugacccugaaggggaccagcuacaagaucugcaccgacaagauguucuucgucaagaaccccacggacaccggccacgggaccguggugaugcaggucaagguguccaagggcgcccccugccgcauccccgugaucgucgccgacgaccucaccgcggccaucaacaagggcauccuggugaccgugaacccgaucgccagcacgaacgacgacgagguccugaucgaggugaacccgcccuucggggacuccuacaucaucgugggccgcggggacagccggcucaccuaccaguggcacaaggagggcuccagcaucggcaagcuguucacccagaccaugaagggggucgagcggcuggccgugaugggcgacacggccugggacuucuccagcgccgggggcuucuucaccuccguggggaagggcauccacaccgucuucggcagcgcguuccaggggcuguucggcgggcucaacuggaucaccaaggugaucaugggcgccgugcugaucugggucgggaucaacacgcgcaacaugaccauguccaugagcaugauccucgugggcgugaucaugauguuccugucccugggcgucggggccgaccagggcugcgccaucaacuucgggaagugaggacuaguggaagcauuuuccuggcugauuaaaagaaauuacucagcuauggucaucuguuccuguuagaaggcuaugcagcauauuauauacuaugcgcauguuaugaaaugcauaauaaaaaauuuuaaaaaaucuaaaagaucuaaaaaaaaaaaaaaaaaaaaaaaaaaaaaaaaaaaaaaaaaaaaaaaaaaaaaaaaaaaaaaaaugcaucccccccccccccccccccccccccccccccaaaggcucuuuucagagccaccagaauu

SEQ ID NO: 849 - RNA, 2477 nt, Artificial Sequence
  mRNA product Design d-5 comprising derived and/or modified sequence from YFV__NC_002031.1__SSIgE-prME (polyprotein: aa122-778) (opt1)
gggagagggcgcuuggcuugcaaggacccugagcugcggcauugaagcacacccaacccaacucgacugaagucagccucacugaaccggaucugagaaucuucucucucugggcuugccagggcucuccgaaccuagcuagcauccucuucaauuccaacuagaaagcuuaccauggacuggaccuggauccuguuccucguggccgccgcgacccgcguccacagcgugacgcuggugcggaagaaccgcuggcugcuccugaacgucaccuccgaggaccugggcaagaccuucagcguggggaccggcaacugcacgaccaacauccucgaggccaaguacuggugccccgacuccauggaguacaacugccccaaccugagcccccgggaggagcccgacgacaucgacugcuggugcuacgggguggagaacguccgcguggccuacggcaagugcgacuccgccgggcggagccgccggucccgccgggccaucgaccugcccacccacgagaaccacggccucaagacccgccaggagaaguggaugacgggccggaugggggagcgccagcugcagaagaucgagcggugguucgugcgcaacccguucuucgcggucaccgcccugaccaucgccuaccucgugggcagcaacaugacccagcggguggucaucgcccugcuggugcucgcgguggggcccgccuacuccgcccacugcaucggcaucacggaccgcgacuucaucgaggggguccacggcggcaccugggugagcgccacccuggagcaggacaagugcgugaccgucauggcccccgacaagcccucccuggacaucagccucgagacgguggcgaucgaccggccggccgaggugcgcaaggucugcuacaacgccgugcugacccacgugaagaucaacgacaagugccccuccaccggggaggcccaccuggccgaggagaacgagggcgacaacgcgugcaagcggaccuacagcgaccgcggguggggcaacggcugcggccucuucgggaagggguccaucgucgccugcgccaaguucacgugcgccaagagcaugucccuguucgagguggaccagaccaagauccaguacgucauccgggcccagcugcacgugggcgcgaagcaggagaacuggaacaccgacaucaagacccucaaguucgacgcccugagcgggucccaggagguggaguucaucggcuacggcaaggccacgcuggagugccagguccagaccgccguggacuucgggaacagcuacaucgccgagauggagaccgagagcuggaucguggaccgccagugggcgcaggaccucacccugcccuggcaguccggcagcgggggcgucuggcgcgagaugcaccaccugguggaguucgagcccccgcacgccgccacgauccgggugcucgcccuggggaaccaggagggcucccugaagaccgcgcucaccggcgccaugcgcgucaccaaggacacgaacgacaacaaccuguacaagcugcacgggggccacgugagcugccgggugaagcucuccgcccugacccugaaggggaccagcuacaagaucugcaccgacaagauguucuucgucaagaaccccacggacaccggccacgggaccguggugaugcaggucaagguguccaagggcgcccccugccgcauccccgugaucgucgccgacgaccucaccgcggccaucaacaagggcauccuggugaccgugaacccgaucgccagcacgaacgacgacgagguccugaucgaggugaacccgcccuucggggacuccuacaucaucgugggccgcggggacagccggcucaccuaccaguggcacaaggagggcuccagcaucggcaagcuguucacccagaccaugaagggggucgagcggcuggccgugaugggcgacacggccugggacuucuccagcgccgggggcuucuucaccuccguggggaagggcauccacaccgucuucggcagcgcguuccaggggcuguucggcgggcucaacuggaucaccaaggugaucaugggcgccgugcugaucugggucgggaucaacacgcgcaacaugaccauguccaugagcaugauccucgugggcgugaucaugauguuccugucccugggcgucggggccugaggacuaguggaagcauuuuccuggcugauuaaaagaaauuacucagcuauggucaucuguuccuguuagaaggcuaugcagcauauuauauacuaugcgcauguuaugaaaugcauaauaaaaaauuuuaaaaaaucuaaaagaucuaaaaaaaaaaaaaaaaaaaaaaaaaaaaaaaaaaaaaaaaaaaaaaaaaaaaaaaaaaaaaaaaugcaucccccccccccccccccccccccccccccccaaaggcucuuuucagagccaccagaauu

SEQ ID NO: 850 - RNA, 2525 nt, Artificial Sequence
  mRNA product Design d-5 comprising derived and/or modified sequence from YFV__NC_002031.1__SSjev-prME-XX (polyprotein: aa122-788) (opt1)
gggagagggcgcuuggcuugcaaggacccugagcugcggcauugaagcacacccaacccaacucgacugaagucagccucacugaaccggaucugagaaucuucucucucugggcuugccagggcucuccgaaccuagcuagcauccucuucaauuccaacuagaaagcuuaccaugggcaagcgcagcgccggguccaucauguggcuggccagccucgcgguggucaucgccugcgccggcgccgugacccuggugcggaagaaccgcuggcugcuccugaacgucaccuccgaggaccuggggaagacguucagcgugggcaccgggaacugcaccaccaacauccucgaggccaaguacuggugccccgacuccauggaguacaacugccccaaccugagcccccgggaggagcccgacgacaucgacugcuggugcuacggcguggagaacguccgcguggcguacggcaagugcgacuccgccgggcggagccgccggucccgccgggccaucgaccugcccacgcacgagaaccacggccucaagacccgccaggagaaguggaugaccgggcggaugggcgagcgccagcugcagaagaucgagcggugguucgugcgcaacccguucuucgccgucaccgcgcugacgaucgccuaccucguggggagcaacaugacccagcggguggucaucgcccugcuggugcucgccgugggccccgccuacuccgcgcacugcaucggcaucaccgaccgcgacuucaucgaggggguccacggcgggaccugggugagcgccacgcuggagcaggacaagugcgugaccgucauggcccccgacaagcccucccuggacaucagccucgagaccguggccaucgaccggccggccgaggugcgcaaggucugcuacaacgcggugcugacccacgugaagaucaacgacaagugccccuccacgggcgaggcccaccuggccgaggagaacgagggcgacaacgccugcaagcggaccuacagcgaccgcggguggggcaacgggugcggccucuucgggaagggcuccaucgucgccugcgcgaaguucacgugcgccaagagcaugucccuguucgagguggaccagaccaagauccaguacgucauccgggcccagcugcacgugggcgccaagcaggagaacuggaacaccgacaucaagacccucaaguucgacgcccugagcgggagccaggagguggaguucaucggcuacgggaaggcgacccuggagugccagguccagaccgccguggacuucggcaacuccuacaucgccgagauggagacggagagcuggaucguggaccgccagugggcccaggaccucacccugcccuggcaguccgggagcggcggcgucuggcgcgagaugcaccaccugguggaguucgagcccccgcacgcggccaccauccgggugcucgcccuggggaaccaggagggcucccugaagaccgcccucacgggggccaugcgcgucaccaaggacaccaacgacaacaaccuguacaagcugcacggcgggcacgugagcugccgggugaagcucuccgcgcugacccugaagggcacgagcuacaagaucugcaccgacaagauguucuucgucaagaaccccaccgacaccggccacgggacgguggugaugcaggucaagguguccaagggcgcccccugccgcauccccgugaucgucgccgacgaccucaccgccgccaucaacaaggggauccuggugaccgugaacccgaucgcgagcaccaacgacgacgagguccugaucgaggugaacccgcccuucggcgacuccuacaucaucgugggccgcggggacagccggcucaccuaccaguggcacaaggagggcuccagcaucgggaagcuguucacgcagaccaugaagggcgucgagcggcuggccgugaugggggacaccgccugggacuucuccagcgccggcggcuucuucaccuccguggggaagggcauccacacggucuucgggagcgccuuccagggccucuucgggggccugaacuggaucaccaaggugaucaugggcgcggugcugaucugggucgggaucaacacccgcaacaugaccauguccaugagcaugauccucgugggcgugaucaugauguuccugagccugggggucggcgccgaccaggggugcgccaucaacuucggcaagugaggacuaguggaagcauuuuccuggcugauuaaaagaaauuacucagcuauggucaucuguuccuguuagaaggcuaugcagcauauuauauacuaugcgcauguuaugaaaugcauaauaaaaaauuuuaaaaaaucuaaaagaucuaaaaaaaaaaaaaaaaaaaaaaaaaaaaaaaaaaaaaaaaaaaaaaaaaaaaaaaaaaaaaaaaugcaucccccccccccccccccccccccccccccccaaaggcucuuuucagagccaccagaauu

SEQ ID NO: 851 - RNA, 2495 nt, Artificial Sequence
  mRNA product Design d-5 comprising derived and/or modified sequence from YFV__NC_002031.1__SSjev-prME (polyprotein: aa122-778) (opt1)
gggagagggcgcuuggcuugcaaggacccugagcugcggcauugaagcacacccaacccaacucgacugaagucagccucacugaaccggaucugagaaucuucucucucugggcuugccagggcucuccgaaccuagcuagcauccucuucaauuccaacuagaaagcuuaccaugggcaagcgcagcgccggguccaucauguggcuggccagccucgcgguggucaucgccugcgccggcgccgugacccuggugcggaagaaccgcuggcugcuccugaacgucaccuccgaggaccuggggaagacguucagcgugggcaccgggaacugcaccaccaacauccucgaggccaaguacuggugccccgacuccauggaguacaacugccccaaccugagcccccgggaggagcccgacgacaucgacugcuggugcuacggcguggagaacguccgcguggcguacggcaagugcgacuccgccgggcggagccgccggucccgccgggccaucgaccugcccacgcacgagaaccacggccucaagacccgccaggagaaguggaugaccgggcggaugggcgagcgccagcugcagaagaucgagcggugguucgugcgcaacccguucuucgccgucaccgcgcugacgaucgccuaccucguggggagcaacaugacccagcggguggucaucgcccugcuggugcucgccgugggccccgccuacuccgcgcacugcaucggcaucaccgaccgcgacuucaucgaggggguccacggcgggaccugggugagcgccacgcuggagcaggacaagugcgugaccgucauggcccccgacaagcccucccuggacaucagccucgagaccguggccaucgaccggccggccgaggugcgcaaggucugcuacaacgcggugcugacccacgugaagaucaacgacaagugccccuccacgggcgaggcccaccuggccgaggagaacgagggcgacaacgccugcaagcggaccuacagcgaccgcggguggggcaacgggugcggccucuucgggaagggcuccaucgucgccugcgcgaaguucacgugcgccaagagcaugucccuguucgagguggaccagaccaagauccaguacgucauccgggcccagcugcacgugggcgccaagcaggagaacuggaacaccgacaucaagacccucaaguucgacgcccugagcgggagccaggagguggaguucaucggcuacgggaaggcgacccuggagugccagguccagaccgccguggacuucggcaacuccuacaucgccgagauggagacggagagcuggaucguggaccgccagugggcccaggaccucacccugcccuggcaguccgggagcggcggcgucuggcgcgagaugcaccaccugguggaguucgagcccccgcacgcggccaccauccgggugcucgcccuggggaaccaggagggcucccugaagaccgcccucacgggggccaugcgcgucaccaaggacaccaacgacaacaaccuguacaagcugcacggcgggcacgugagcugccgggugaagcucuccgcgcugacccugaagggcacgagcuacaagaucugcaccgacaagauguucuucgucaagaaccccaccgacaccggccacgggacgguggugaugcaggucaagguguccaagggcgcccccugccgcauccccgugaucgucgccgacgaccucaccgccgccaucaacaaggggauccuggugaccgugaacccgaucgcgagcaccaacgacgacgagguccugaucgaggugaacccgcccuucggcgacuccuacaucaucgugggccgcggggacagccggcucaccuaccaguggcacaaggagggcuccagcaucgggaagcuguucacgcagaccaugaagggcgucgagcggcuggccgugaugggggacaccgccugggacuucuccagcgccggcggcuucuucaccuccguggggaagggcauccacacggucuucgggagcgccuuccagggccucuucgggggccugaacuggaucaccaaggugaucaugggcgcggugcugaucugggucgggaucaacacccgcaacaugaccauguccaugagcaugauccucgugggcgugaucaugauguuccugagccugggggucggcgccugaggacuaguggaagcauuuuccuggcugauuaaaagaaauuacucagcuauggucaucuguuccuguuagaaggcuaugcagcauauuauauacuaugcgcauguuaugaaaugcauaauaaaaaauuuuaaaaaaucuaaaagaucuaaaaaaaaaaaaaaaaaaaaaaaaaaaaaaaaaaaaaaaaaaaaaaaaaaaaaaaaaaaaaaaaugcaucccccccccccccccccccccccccccccccaaaggcucuuuucagagccaccagaauu

SEQ ID NO: 852 - RNA, 2543 nt, Artificial Sequence
  mRNA product Design d-5 comprising derived and/or modified sequence from YFV__NC_002031.1__X-SS-prME-XX (polyprotein: aa92-788) (opt2)
gggagagggcgcuuggcuugcaaggacccugagcugcggcauugaagcacacccaacccaacucgacugaagucagccucacugaaccggaucugagaaucuucucucucugggcuugccagggcucuccgaaccuagcuagcauccucuucaauuccaacuagaaagcuuaccaugcgcggccucuccucccgcaagcgccgcucccacgacguccucaccguccaguuccucauccucggcaugcuccucaugaccggcggcgucacccucguccgcaagaaccgcuggcuccuccucaacgucaccuccgaggaccucggcaagaccuucuccgucggcaccggcaacugcaccaccaacauccucgaggccaaguacuggugccccgacuccauggaguacaacugccccaaccucuccccccgcgaggagcccgacgacaucgacugcuggugcuacggcgucgagaacguccgcgucgccuacggcaagugcgacuccgccggccgcucccgccgcucccgccgcgccaucgaccuccccacccacgagaaccacggccucaagacccgccaggagaaguggaugaccggccgcaugggcgagcgccagcuccagaagaucgagcgcugguucguccgcaaccccuucuucgccgucaccgcccucaccaucgccuaccucgucggcuccaacaugacccagcgcgucgucaucgcccuccucguccucgccgucggccccgccuacuccgcccacugcaucggcaucaccgaccgcgacuucaucgagggcguccacggcggcaccugggucuccgccacccucgagcaggacaagugcgucaccgucauggcccccgacaagcccucccucgacaucucccucgagaccgucgccaucgaccgccccgccgagguccgcaaggucugcuacaacgccguccucacccacgucaagaucaacgacaagugccccuccaccggcgaggcccaccucgccgaggagaacgagggcgacaacgccugcaagcgcaccuacuccgaccgcggcuggggcaacggcugcggccucuucggcaagggcuccaucgucgccugcgccaaguucaccugcgccaaguccaugucccucuucgaggucgaccagaccaagauccaguacgucauccgcgcccagcuccacgucggcgccaagcaggagaacuggaacaccgacaucaagacccucaaguucgacgcccucuccggcucccaggaggucgaguucaucggcuacggcaaggccacccucgagugccagguccagaccgccgucgacuucggcaacuccuacaucgccgagauggagaccgaguccuggaucgucgaccgccagugggcccaggaccucacccuccccuggcaguccggcuccggcggcgucuggcgcgagaugcaccaccucgucgaguucgagcccccccacgccgccaccauccgcguccucgcccucggcaaccaggagggcucccucaagaccgcccucaccggcgccaugcgcgucaccaaggacaccaacgacaacaaccucuacaagcuccacggcggccacgucuccugccgcgucaagcucuccgcccucacccucaagggcaccuccuacaagaucugcaccgacaagauguucuucgucaagaaccccaccgacaccggccacggcaccgucgucaugcaggucaaggucuccaagggcgcccccugccgcauccccgucaucgucgccgacgaccucaccgccgccaucaacaagggcauccucgucaccgucaaccccaucgccuccaccaacgacgacgagguccucaucgaggucaacccccccuucggcgacuccuacaucaucgucggccgcggcgacucccgccucaccuaccaguggcacaaggagggcuccuccaucggcaagcucuucacccagaccaugaagggcgucgagcgccucgccgucaugggcgacaccgccugggacuucuccuccgccggcggcuucuucaccuccgucggcaagggcauccacaccgucuucggcuccgccuuccagggccucuucggcggccucaacuggaucaccaaggucaucaugggcgccguccucaucugggucggcaucaacacccgcaacaugaccauguccauguccaugauccucgucggcgucaucaugauguuccucucccucggcgucggcgccgaccagggcugcgccaucaacuucggcaagugaggacuaguggaagcauuuuccuggcugauuaaaagaaauuacucagcuauggucaucuguuccuguuagaaggcuaugcagcauauuauauacuaugcgcauguuaugaaaugcauaauaaaaaauuuuaaaaaaucuaaaagaucuaaaaaaaaaaaaaaaaaaaaaaaaaaaaaaaaaaaaaaaaaaaaaaaaaaaaaaaaaaaaaaaaugcaucccccccccccccccccccccccccccccccaaaggcucuuuucagagccaccagaauu

SEQ ID NO: 853 - RNA, 2480 nt, Artificial Sequence
  mRNA product Design d-5 comprising derived and/or modified sequence from YFV__NC_002031.1__SS-prME (polyprotein: M,aa104-778) (opt2)
gggagagggcgcuuggcuugcaaggacccugagcugcggcauugaagcacacccaacccaacucgacugaagucagccucacugaaccggaucugagaaucuucucucucugggcuugccagggcucuccgaaccuagcuagcauccucuucaauuccaacuagaaagcuuaccauggacguccucaccguccaguuccucauccucggcaugcuccucaugaccggcggcgucacccucguccgcaagaaccgcuggcuccuccucaacgucaccuccgaggaccucggcaagaccuucuccgucggcaccggcaacugcaccaccaacauccucgaggccaaguacuggugccccgacuccauggaguacaacugccccaaccucuccccccgcgaggagcccgacgacaucgacugcuggugcuacggcgucgagaacguccgcgucgccuacggcaagugcgacuccgccggccgcucccgccgcucccgccgcgccaucgaccuccccacccacgagaaccacggccucaagacccgccaggagaaguggaugaccggccgcaugggcgagcgccagcuccagaagaucgagcgcugguucguccgcaaccccuucuucgccgucaccgcccucaccaucgccuaccucgucggcuccaacaugacccagcgcgucgucaucgcccuccucguccucgccgucggccccgccuacuccgcccacugcaucggcaucaccgaccgcgacuucaucgagggcguccacggcggcaccugggucuccgccacccucgagcaggacaagugcgucaccgucauggcccccgacaagcccucccucgacaucucccucgagaccgucgccaucgaccgccccgccgagguccgcaaggucugcuacaacgccguccucacccacgucaagaucaacgacaagugccccuccaccggcgaggcccaccucgccgaggagaacgagggcgacaacgccugcaagcgcaccuacuccgaccgcggcuggggcaacggcugcggccucuucggcaagggcuccaucgucgccugcgccaaguucaccugcgccaaguccaugucccucuucgaggucgaccagaccaagauccaguacgucauccgcgcccagcuccacgucggcgccaagcaggagaacuggaacaccgacaucaagacccucaaguucgacgcccucuccggcucccaggaggucgaguucaucggcuacggcaaggccacccucgagugccagguccagaccgccgucgacuucggcaacuccuacaucgccgagauggagaccgaguccuggaucgucgaccgccagugggcccaggaccucacccuccccuggcaguccggcuccggcggcgucuggcgcgagaugcaccaccucgucgaguucgagcccccccacgccgccaccauccgcguccucgcccucggcaaccaggagggcucccucaagaccgcccucaccggcgccaugcgcgucaccaaggacaccaacgacaacaaccucuacaagcuccacggcggccacgucuccugccgcgucaagcucuccgcccucacccucaagggcaccuccuacaagaucugcaccgacaagauguucuucgucaagaaccccaccgacaccggccacggcaccgucgucaugcaggucaaggucuccaagggcgcccccugccgcauccccgucaucgucgccgacgaccucaccgccgccaucaacaagggcauccucgucaccgucaaccccaucgccuccaccaacgacgacgagguccucaucgaggucaacccccccuucggcgacuccuacaucaucgucggccgcggcgacucccgccucaccuaccaguggcacaaggagggcuccuccaucggcaagcucuucacccagaccaugaagggcgucgagcgccucgccgucaugggcgacaccgccugggacuucuccuccgccggcggcuucuucaccuccgucggcaagggcauccacaccgucuucggcuccgccuuccagggccucuucggcggccucaacuggaucaccaaggucaucaugggcgccguccucaucugggucggcaucaacacccgcaacaugaccauguccauguccaugauccucgucggcgucaucaugauguuccucucccucggcgucggcgccugaggacuaguggaagcauuuuccuggcugauuaaaagaaauuacucagcuauggucaucuguuccuguuagaaggcuaugcagcauauuauauacuaugcgcauguuaugaaaugcauaauaaaaaauuuuaaaaaaucuaaaagaucuaaaaaaaaaaaaaaaaaaaaaaaaaaaaaaaaaaaaaaaaaaaaaaaaaaaaaaaaaaaaaaaaugcaucccccccccccccccccccccccccccccccaaaggcucuuuucagagccaccagaauu

SEQ ID NO: 854 - RNA, 2507 nt, Artificial Sequence
  mRNA product Design d-5 comprising derived and/or modified sequence from YFV__NC_002031.1__SSIgE-prME-XX (polyprotein: aa122-788) (opt2)
gggagagggcgcuuggcuugcaaggacccugagcugcggcauugaagcacacccaacccaacucgacugaagucagccucacugaaccggaucugagaaucuucucucucugggcuugccagggcucuccgaaccuagcuagcauccucuucaauuccaacuagaaagcuuaccauggacuggaccuggauccucuuccucgucgccgccgccacccgcguccacuccgucacccucguccgcaagaaccgcuggcuccuccucaacgucaccuccgaggaccucggcaagaccuucuccgucggcaccggcaacugcaccaccaacauccucgaggccaaguacuggugccccgacuccauggaguacaacugccccaaccucuccccccgcgaggagcccgacgacaucgacugcuggugcuacggcgucgagaacguccgcgucgccuacggcaagugcgacuccgccggccgcucccgccgcucccgccgcgccaucgaccuccccacccacgagaaccacggccucaagacccgccaggagaaguggaugaccggccgcaugggcgagcgccagcuccagaagaucgagcgcugguucguccgcaaccccuucuucgccgucaccgcccucaccaucgccuaccucgucggcuccaacaugacccagcgcgucgucaucgcccuccucguccucgccgucggccccgccuacuccgcccacugcaucggcaucaccgaccgcgacuucaucgagggcguccacggcggcaccugggucuccgccacccucgagcaggacaagugcgucaccgucauggcccccgacaagcccucccucgacaucucccucgagaccgucgccaucgaccgccccgccgagguccgcaaggucugcuacaacgccguccucacccacgucaagaucaacgacaagugccccuccaccggcgaggcccaccucgccgaggagaacgagggcgacaacgccugcaagcgcaccuacuccgaccgcggcuggggcaacggcugcggccucuucggcaagggcuccaucgucgccugcgccaaguucaccugcgccaaguccaugucccucuucgaggucgaccagaccaagauccaguacgucauccgcgcccagcuccacgucggcgccaagcaggagaacuggaacaccgacaucaagacccucaaguucgacgcccucuccggcucccaggaggucgaguucaucggcuacggcaaggccacccucgagugccagguccagaccgccgucgacuucggcaacuccuacaucgccgagauggagaccgaguccuggaucgucgaccgccagugggcccaggaccucacccuccccuggcaguccggcuccggcggcgucuggcgcgagaugcaccaccucgucgaguucgagcccccccacgccgccaccauccgcguccucgcccucggcaaccaggagggcucccucaagaccgcccucaccggcgccaugcgcgucaccaaggacaccaacgacaacaaccucuacaagcuccacggcggccacgucuccugccgcgucaagcucuccgcccucacccucaagggcaccuccuacaagaucugcaccgacaagauguucuucgucaagaaccccaccgacaccggccacggcaccgucgucaugcaggucaaggucuccaagggcgcccccugccgcauccccgucaucgucgccgacgaccucaccgccgccaucaacaagggcauccucgucaccgucaaccccaucgccuccaccaacgacgacgagguccucaucgaggucaacccccccuucggcgacuccuacaucaucgucggccgcggcgacucccgccucaccuaccaguggcacaaggagggcuccuccaucggcaagcucuucacccagaccaugaagggcgucgagcgccucgccgucaugggcgacaccgccugggacuucuccuccgccggcggcuucuucaccuccgucggcaagggcauccacaccgucuucggcuccgccuuccagggccucuucggcggccucaacuggaucaccaaggucaucaugggcgccguccucaucugggucggcaucaacacccgcaacaugaccauguccauguccaugauccucgucggcgucaucaugauguuccucucccucggcgucggcgccgaccagggcugcgccaucaacuucggcaagugaggacuaguggaagcauuuuccuggcugauuaaaagaaauuacucagcuauggucaucuguuccuguuagaaggcuaugcagcauauuauauacuaugcgcauguuaugaaaugcauaauaaaaaauuuuaaaaaaucuaaaagaucuaaaaaaaaaaaaaaaaaaaaaaaaaaaaaaaaaaaaaaaaaaaaaaaaaaaaaaaaaaaaaaaaugcaucccccccccccccccccccccccccccccccaaaggcucuuuucagagccaccagaauu

SEQ ID NO: 855 - RNA, 2477 nt, Artificial Sequence
  mRNA product Design d-5 comprising derived and/or modified sequence from YFV__NC_002031.1__SSIgE-prME (polyprotein: aa122-778) (opt2)
gggagagggcgcuuggcuugcaaggacccugagcugcggcauugaagcacacccaacccaacucgacugaagucagccucacugaaccggaucugagaaucuucucucucugggcuugccagggcucuccgaaccuagcuagcauccucuucaauuccaacuagaaagcuuaccauggacuggaccuggauccucuuccucgucgccgccgccacccgcguccacuccgucacccucguccgcaagaaccgcuggcuccuccucaacgucaccuccgaggaccucggcaagaccuucuccgucggcaccggcaacugcaccaccaacauccucgaggccaaguacuggugccccgacuccauggaguacaacugccccaaccucuccccccgcgaggagcccgacgacaucgacugcuggugcuacggcgucgagaacguccgcgucgccuacggcaagugcgacuccgccggccgcucccgccgcucccgccgcgccaucgaccuccccacccacgagaaccacggccucaagacccgccaggagaaguggaugaccggccgcaugggcgagcgccagcuccagaagaucgagcgcugguucguccgcaaccccuucuucgccgucaccgcccucaccaucgccuaccucgucggcuccaacaugacccagcgcgucgucaucgcccuccucguccucgccgucggccccgccuacuccgcccacugcaucggcaucaccgaccgcgacuucaucgagggcguccacggcggcaccugggucuccgccacccucgagcaggacaagugcgucaccgucauggcccccgacaagcccucccucgacaucucccucgagaccgucgccaucgaccgccccgccgagguccgcaaggucugcuacaacgccguccucacccacgucaagaucaacgacaagugccccuccaccggcgaggcccaccucgccgaggagaacgagggcgacaacgccugcaagcgcaccuacuccgaccgcggcuggggcaacggcugcggccucuucggcaagggcuccaucgucgccugcgccaaguucaccugcgccaaguccaugucccucuucgaggucgaccagaccaagauccaguacgucauccgcgcccagcuccacgucggcgccaagcaggagaacuggaacaccgacaucaagacccucaaguucgacgcccucuccggcucccaggaggucgaguucaucggcuacggcaaggccacccucgagugccagguccagaccgccgucgacuucggcaacuccuacaucgccgagauggagaccgaguccuggaucgucgaccgccagugggcccaggaccucacccuccccuggcaguccggcuccggcggcgucuggcgcgagaugcaccaccucgucgaguucgagcccccccacgccgccaccauccgcguccucgcccucggcaaccaggagggcucccucaagaccgcccucaccggcgccaugcgcgucaccaaggacaccaacgacaacaaccucuacaagcuccacggcggccacgucuccugccgcgucaagcucuccgcccucacccucaagggcaccuccuacaagaucugcaccgacaagauguucuucgucaagaaccccaccgacaccggccacggcaccgucgucaugcaggucaaggucuccaagggcgcccccugccgcauccccgucaucgucgccgacgaccucaccgccgccaucaacaagggcauccucgucaccgucaaccccaucgccuccaccaacgacgacgagguccucaucgaggucaacccccccuucggcgacuccuacaucaucgucggccgcggcgacucccgccucaccuaccaguggcacaaggagggcuccuccaucggcaagcucuucacccagaccaugaagggcgucgagcgccucgccgucaugggcgacaccgccugggacuucuccuccgccggcggcuucuucaccuccgucggcaagggcauccacaccgucuucggcuccgccuuccagggccucuucggcggccucaacuggaucaccaaggucaucaugggcgccguccucaucugggucggcaucaacacccgcaacaugaccauguccauguccaugauccucgucggcgucaucaugauguuccucucccucggcgucggcgccugaggacuaguggaagcauuuuccuggcugauuaaaagaaauuacucagcuauggucaucuguuccuguuagaaggcuaugcagcauauuauauacuaugcgcauguuaugaaaugcauaauaaaaaauuuuaaaaaaucuaaaagaucuaaaaaaaaaaaaaaaaaaaaaaaaaaaaaaaaaaaaaaaaaaaaaaaaaaaaaaaaaaaaaaaaugcaucccccccccccccccccccccccccccccccaaaggcucuuuucagagccaccagaauu

SEQ ID NO: 856 - RNA, 2525 nt, Artificial Sequence
  mRNA product Design d-5 comprising derived and/or modified sequence from YFV__NC_002031.1__SSjev-prME-XX (polyprotein: aa122-788) (opt2)
gggagagggcgcuuggcuugcaaggacccugagcugcggcauugaagcacacccaacccaacucgacugaagucagccucacugaaccggaucugagaaucuucucucucugggcuugccagggcucuccgaaccuagcuagcauccucuucaauuccaacuagaaagcuuaccaugggcaagcgcuccgccggcuccaucauguggcucgccucccucgccgucgucaucgccugcgccggcgccgucacccucguccgcaagaaccgcuggcuccuccucaacgucaccuccgaggaccucggcaagaccuucuccgucggcaccggcaacugcaccaccaacauccucgaggccaaguacuggugccccgacuccauggaguacaacugccccaaccucuccccccgcgaggagcccgacgacaucgacugcuggugcuacggcgucgagaacguccgcgucgccuacggcaagugcgacuccgccggccgcucccgccgcucccgccgcgccaucgaccuccccacccacgagaaccacggccucaagacccgccaggagaaguggaugaccggccgcaugggcgagcgccagcuccagaagaucgagcgcugguucguccgcaaccccuucuucgccgucaccgcccucaccaucgccuaccucgucggcuccaacaugacccagcgcgucgucaucgcccuccucguccucgccgucggccccgccuacuccgcccacugcaucggcaucaccgaccgcgacuucaucgagggcguccacggcggcaccugggucuccgccacccucgagcaggacaagugcgucaccgucauggcccccgacaagcccucccucgacaucucccucgagaccgucgccaucgaccgccccgccgagguccgcaaggucugcuacaacgccguccucacccacgucaagaucaacgacaagugccccuccaccggcgaggcccaccucgccgaggagaacgagggcgacaacgccugcaagcgcaccuacuccgaccgcggcuggggcaacggcugcggccucuucggcaagggcuccaucgucgccugcgccaaguucaccugcgccaaguccaugucccucuucgaggucgaccagaccaagauccaguacgucauccgcgcccagcuccacgucggcgccaagcaggagaacuggaacaccgacaucaagacccucaaguucgacgcccucuccggcucccaggaggucgaguucaucggcuacggcaaggccacccucgagugccagguccagaccgccgucgacuucggcaacuccuacaucgccgagauggagaccgaguccuggaucgucgaccgccagugggcccaggaccucacccuccccuggcaguccggcuccggcggcgucuggcgcgagaugcaccaccucgucgaguucgagcccccccacgccgccaccauccgcguccucgcccucggcaaccaggagggcucccucaagaccgcccucaccggcgccaugcgcgucaccaaggacaccaacgacaacaaccucuacaagcuccacggcggccacgucuccugccgcgucaagcucuccgcccucacccucaagggcaccuccuacaagaucugcaccgacaagauguucuucgucaagaaccccaccgacaccggccacggcaccgucgucaugcaggucaaggucuccaagggcgcccccugccgcauccccgucaucgucgccgacgaccucaccgccgccaucaacaagggcauccucgucaccgucaaccccaucgccuccaccaacgacgacgagguccucaucgaggucaacccccccuucggcgacuccuacaucaucgucggccgcggcgacucccgccucaccuaccaguggcacaaggagggcuccuccaucggcaagcucuucacccagaccaugaagggcgucgagcgccucgccgucaugggcgacaccgccugggacuucuccuccgccggcggcuucuucaccuccgucggcaagggcauccacaccgucuucggcuccgccuuccagggccucuucggcggccucaacuggaucaccaaggucaucaugggcgccguccucaucugggucggcaucaacacccgcaacaugaccauguccauguccaugauccucgucggcgucaucaugauguuccucucccucggcgucggcgccgaccagggcugcgccaucaacuucggcaagugaggacuaguggaagcauuuuccuggcugauuaaaagaaauuacucagcuauggucaucuguuccuguuagaaggcuaugcagcauauuauauacuaugcgcauguuaugaaaugcauaauaaaaaauuuuaaaaaaucuaaaagaucuaaaaaaaaaaaaaaaaaaaaaaaaaaaaaaaaaaaaaaaaaaaaaaaaaaaaaaaaaaaaaaaaugcaucccccccccccccccccccccccccccccccaaaggcucuuuucagagccaccagaauu

SEQ ID NO: 857 - RNA, 2495 nt, Artificial Sequence
  mRNA product Design d-5 comprising derived and/or modified sequence from YFV__NC_002031.1__SSjev-prME (polyprotein: aa122-778) (opt2)
gggagagggcgcuuggcuugcaaggacccugagcugcggcauugaagcacacccaacccaacucgacugaagucagccucacugaaccggaucugagaaucuucucucucugggcuugccagggcucuccgaaccuagcuagcauccucuucaauuccaacuagaaagcuuaccaugggcaagcgcuccgccggcuccaucauguggcucgccucccucgccgucgucaucgccugcgccggcgccgucacccucguccgcaagaaccgcuggcuccuccucaacgucaccuccgaggaccucggcaagaccuucuccgucggcaccggcaacugcaccaccaacauccucgaggccaaguacuggugccccgacuccauggaguacaacugccccaaccucuccccccgcgaggagcccgacgacaucgacugcuggugcuacggcgucgagaacguccgcgucgccuacggcaagugcgacuccgccggccgcucccgccgcucccgccgcgccaucgaccuccccacccacgagaaccacggccucaagacccgccaggagaaguggaugaccggccgcaugggcgagcgccagcuccagaagaucgagcgcugguucguccgcaaccccuucuucgccgucaccgcccucaccaucgccuaccucgucggcuccaacaugacccagcgcgucgucaucgcccuccucguccucgccgucggccccgccuacuccgcccacugcaucggcaucaccgaccgcgacuucaucgagggcguccacggcggcaccugggucuccgccacccucgagcaggacaagugcgucaccgucauggcccccgacaagcccucccucgacaucucccucgagaccgucgccaucgaccgccccgccgagguccgcaaggucugcuacaacgccguccucacccacgucaagaucaacgacaagugccccuccaccggcgaggcccaccucgccgaggagaacgagggcgacaacgccugcaagcgcaccuacuccgaccgcggcuggggcaacggcugcggccucuucggcaagggcuccaucgucgccugcgccaaguucaccugcgccaaguccaugucccucuucgaggucgaccagaccaagauccaguacgucauccgcgcccagcuccacgucggcgccaagcaggagaacuggaacaccgacaucaagacccucaaguucgacgcccucuccggcucccaggaggucgaguucaucggcuacggcaaggccacccucgagugccagguccagaccgccgucgacuucggcaacuccuacaucgccgagauggagaccgaguccuggaucgucgaccgccagugggcccaggaccucacccuccccuggcaguccggcuccggcggcgucuggcgcgagaugcaccaccucgucgaguucgagcccccccacgccgccaccauccgcguccucgcccucggcaaccaggagggcucccucaagaccgcccucaccggcgccaugcgcgucaccaaggacaccaacgacaacaaccucuacaagcuccacggcggccacgucuccugccgcgucaagcucuccgcccucacccucaagggcaccuccuacaagaucugcaccgacaagauguucuucgucaagaaccccaccgacaccggccacggcaccgucgucaugcaggucaaggucuccaagggcgcccccugccgcauccccgucaucgucgccgacgaccucaccgccgccaucaacaagggcauccucgucaccgucaaccccaucgccuccaccaacgacgacgagguccucaucgaggucaacccccccuucggcgacuccuacaucaucgucggccgcggcgacucccgccucaccuaccaguggcacaaggagggcuccuccaucggcaagcucuucacccagaccaugaagggcgucgagcgccucgccgucaugggcgacaccgccugggacuucuccuccgccggcggcuucuucaccuccgucggcaagggcauccacaccgucuucggcuccgccuuccagggccucuucggcggccucaacuggaucaccaaggucaucaugggcgccguccucaucugggucggcaucaacacccgcaacaugaccauguccauguccaugauccucgucggcgucaucaugauguuccucucccucggcgucggcgccugaggacuaguggaagcauuuuccuggcugauuaaaagaaauuacucagcuauggucaucuguuccuguuagaaggcuaugcagcauauuauauacuaugcgcauguuaugaaaugcauaauaaaaaauuuuaaaaaaucuaaaagaucuaaaaaaaaaaaaaaaaaaaaaaaaaaaaaaaaaaaaaaaaaaaaaaaaaaaaaaaaaaaaaaaaugcaucccccccccccccccccccccccccccccccaaaggcucuuuucagagccaccagaauu

SEQ ID NO: 858 - RNA, 2543 nt, Artificial Sequence
  mRNA product Design d-5 comprising derived and/or modified sequence from YFV__NC_002031.1__X-SS-prME-XX (polyprotein: aa92-788) (opt3)
gggagagggcgcuuggcuugcaaggacccugagcugcggcauugaagcacacccaacccaacucgacugaagucagccucacugaaccggaucugagaaucuucucucucugggcuugccagggcucuccgaaccuagcuagcauccucuucaauuccaacuagaaagcuuaccaugagaggccugagcuccaggaagcggcgcucucacgacgugcucaccguccaguuccuuauccuggggauguuguuaaugacaggagguguuacucuggugcguaaaaaccgauggcuacuccugaauguaacgucagaggaucuuggcaagaccuuuaguguggggacaggaaacugcacuaccaauauucuggaagccaaauacuggugucccgacagcauggaguauaacugcccuaauuuguccccaagagaggaaccggaugacauagauuguuggugcuacggcgucgaaaacgugaggguugcuuaugguaagugugacucugcagggcggucgcgcagaucaaggcgggccaucgaucuccccacacaugagaaucacggacugaaaacccgccaagagaaguggaugacuggccgaaugggcgaaagacagcugcagaagauugagaggugguucgugcggaacccuuucuucgcggucacagcucucaccaucgccuacuuaguggggagcaauaugacgcagcguguaguuauugcacugcuuguguuggccgucggaccagcuuauagugcacauugcaucgguauaacugaccgcgauuuuaucgaaggcgugcacgggggaaccuggguguccgccacacuggagcaagacaaaugugucacuguuauggcucccgauaagccuucucuagacauuagccucgagaccguggccaucgauagaccagcggaaguaaggaaagugugcuacaacgcaguccugacacaugugaagauuaaugacaaaugucccuccaccggcgaggcccaccuugcugaagagaacgaaggugacaaugccugcaagcggacguauucagaucgaggguggggaaacggcuguggccuguucgggaagggaaguaucguugcaugcgcuaaauuuacuugcgccaagagcaugucuuuguucgagguggaccagacaaaaauacaguacgucauucgcgcgcagcuccacgugggugccaagcaagagaauuggaacaccgauaucaaaacucugaaguuugacgcauuauccggcucacaggaaguagaguucauuggguacggaaaagcuacacuggaaugucagguucagaccgccguggauuuuggcaacagcuauaucgcugagauggaaacggagaguuggaucgucgacagacaaugggcccaggaucucacccuuccuuggcagucugguuccgggggcguguggagggagaugcaucaccuggucgaauuugagccaccgcaugcagccacaauucggguguuggcucuaggaaaucaagaaggcagccugaagacugcgcucaccggggcaaugcgcguuacaaaggacacuaacgauaauaaccuguacaaacuucacggaggucacgugucgugcagaguaaagcugucugccuugacccucaaaggcacauccuauaagauauguaccgacaaaauguuuuucgucaagaaucccacugauacggggcauggaacagugguuaugcaagugaaggucucaaaaggcgcuccuugcaggaucccagugauuguagccgacgaccugaccgcagccaucaacaaggguauauuagugacuguuaaucccauugcuaguaccaacgaugacgagguccugaucgaagugaauccuccauucggggauagcuacaucauugugggccguggagacucccggcuaacauaucaguggcacaaagagggcucuagcaucgggaagcucuuuacccagacuaugaaaggagucgagcgacuggccguuaugggugauacagcaugggacuucucaagugcgggcggguuuuucacguccgugggaaagggcauucauaccguguuugguagcgcuuuccaggggcuuuuuggcggauugaacuggauaacuaagguaaucaugggcgccguccugauuuggguggggaucaauacaagaaacaugaccaugucuaugucaaugauccucguuggagugauuaugauguuccugagucuuggcgucggugcagaucaggggugugccauaaauuuuggaaaaugaggacuaguggaagcauuuuccuggcugauuaaaagaaauuacucagcuauggucaucuguuccuguuagaaggcuaugcagcauauuauauacuaugcgcauguuaugaaaugcauaauaaaaaauuuuaaaaaaucuaaaagaucuaaaaaaaaaaaaaaaaaaaaaaaaaaaaaaaaaaaaaaaaaaaaaaaaaaaaaaaaaaaaaaaaugcaucccccccccccccccccccccccccccccccaaaggcucuuuucagagccaccagaauu

SEQ ID NO: 859 - RNA, 2480 nt, Artificial Sequence
  mRNA product Design d-5 comprising derived and/or modified sequence from YFV__NC_002031.1__SS-prME (polyprotein: M,aa104-778) (opt3)
gggagagggcgcuuggcuugcaaggacccugagcugcggcauugaagcacacccaacccaacucgacugaagucagccucacugaaccggaucugagaaucuucucucucugggcuugccagggcucuccgaaccuagcuagcauccucuucaauuccaacuagaaagcuuaccauggacgugcugaccguccaguuccucauccuuggcaugcuguugaugacagggggaguuacuuuagugagaaagaacagguggcugcuacucaauguaacgagcgaggaucuggguaaaaccuuuuccgugggcacagggaacugcacuaccaauauucuugaagccaaguacuggugucccgacucuauggaguauaacugcccuaaucugucaccacgggaggaaccggaugacauagauuguuggugcuacggagucgaaaacgugcgcguugcuuauggcaaaugugacagugcaggucgaagccguagauccaggcgggccaucgauuugcccacacacgagaaucaugggcucaagacccgccaagagaaauggaugacuggaagaaugggcgaaaggcagcugcagaagauugagcggugguucgugcgcaacccuuucuucgcggucacagcucugaccaucgccuaccucgugggcucuaauaugacgcagcgaguaguuauugcauuacuggugcuugccgucgggccagcuuauucggcacacugcaucggaauaacugacagagauuuuaucgaaggugugcauggcgggaccugggugucagccacauuggagcaagacaagugugucacuguuauggcucccgauaaaccuagccuggacauuagucuagagaccguggccaucgauaggccagcggaaguacggaaggugugcuacaacgcaguccucacacacgugaaaauuaaugacaagugucccuccaccggagaggcccaucuggcugaagagaacgaaggcgacaaugccugcaaacguacguauucugaucgcgguugggggaacggauguggccuuuucggcaaggggagcaucguugcaugcgcuaaguuuacuugcgccaaauccaugucacuguucgagguggaccagacaaagauacaguacgucauuagagcgcaguugcacgugggagccaaacaagagaauuggaacaccgauaucaagacucucaaauuugacgcacugagugguagccaggaaguagaguucauuggcuacgggaaggcuacauuagaaugucagguucagaccgccguggauuuuggaaacucuuauaucgcugagauggaaacggaguccuggaucgucgacaggcaaugggcccaggaucugacccucccuuggcagucaggcagcggugggguguggcgggagaugcaccaucuugucgaauuugagccaccgcacgcagccacaauucgagugcuggcuuugggcaaucaagaaggaagucuaaaaacugcgcugaccggcgcaaugcgcguuacaaaggacacuaacgauaauaaccucuacaagcugcaugggggacacgugucuugcagaguaaaacuuuccgcccugaccuugaaggguacaagcuauaaaauauguaccgacaagauguuuuucgucaaaaaucccacugauacgggccacgggacagugguuaugcaagugaaggucucgaagggagcuccuugcaggaucccagugauuguagccgacgaccucaccgcagccaucaacaaaggcauacuggugacuguuaaucccauugcuucuaccaacgaugacgaggucuuaaucgaagugaauccuccauucggugauuccuacaucauuguggggcggggcgacucacgccugacauaucaguggcauaaggagggaaguagcaucggcaaacuauuuacccagacuaugaagggggucgagagacucgccguuaugggagauacagcaugggacuucuccucugcggguggcuuuuucacgagcguggggaaaggcauucacaccguguuuggaucagcuuuccagggucuguuugggggccuuaacuggauaacuaagguaaucaugggagccgucuugauuugggugggcaucaauacaaggaacaugaccaugaguauguccaugauccugguuggggugauuaugauguuccucagccugggagucggcgcaugaggacuaguggaagcauuuuccuggcugauuaaaagaaauuacucagcuauggucaucuguuccuguuagaaggcuaugcagcauauuauauacuaugcgcauguuaugaaaugcauaauaaaaaauuuuaaaaaaucuaaaagaucuaaaaaaaaaaaaaaaaaaaaaaaaaaaaaaaaaaaaaaaaaaaaaaaaaaaaaaaaaaaaaaaaugcaucccccccccccccccccccccccccccccccaaaggcucuuuucagagccaccagaauu

SEQ ID NO: 860 - RNA, 2507 nt, Artificial Sequence
  mRNA product Design d-5 comprising derived and/or modified sequence from YFV__NC_002031.1__SSIgE-prME-XX (polyprotein: aa122-788) (opt3)
gggagagggcgcuuggcuugcaaggacccugagcugcggcauugaagcacacccaacccaacucgacugaagucagccucacugaaccggaucugagaaucuucucucucugggcuugccagggcucuccgaaccuagcuagcauccucuucaauuccaacuagaaagcuuaccauggacuggaccuggauccuguuccucguggccgcugcaacaagaguccacagcguuacucuggugcguaaaaaccgauggcuacuccugaauguaacgucagaggaucuuggcaagaccuuuaguguggggacaggaaacugcacuaccaauauucuggaagccaaauacuggugucccgacagcauggaguauaacugcccuaauuuguccccaagagaggaaccggaugacauagauuguuggugcuacggcgucgaaaacgugaggguugcuuaugguaagugugacucugcagggcggucgcgcagaucaaggcgggccaucgaucuccccacacaugagaaucacggacugaaaacccgccaagagaaguggaugacuggccgaaugggcgaaagacagcugcagaagauugagaggugguucgugcggaacccuuucuucgcggucacagcucucaccaucgccuacuuaguggggagcaauaugacgcagcguguaguuauugcacugcuuguguuggccgucggaccagcuuauagugcacauugcaucgguauaacugaccgcgauuuuaucgaaggcgugcacgggggaaccuggguguccgccacacuggagcaagacaaaugugucacuguuauggcucccgauaagccuucucuagacauuagccucgagaccguggccaucgauagaccagcggaaguaaggaaagugugcuacaacgcaguccugacacaugugaagauuaaugacaaaugucccuccaccggcgaggcccaccuugcugaagagaacgaaggugacaaugccugcaagcggacguauucagaucgaggguggggaaacggcuguggccuguucgggaagggaaguaucguugcaugcgcuaaauuuacuugcgccaagagcaugucuuuguucgagguggaccagacaaaaauacaguacgucauucgcgcgcagcuccacgugggugccaagcaagagaauuggaacaccgauaucaaaacucugaaguuugacgcauuauccggcucacaggaaguagaguucauuggguacggaaaagcuacacuggaaugucagguucagaccgccguggauuuuggcaacagcuauaucgcugagauggaaacggagaguuggaucgucgacagacaaugggcccaggaucucacccuuccuuggcagucugguuccgggggcguguggagggagaugcaucaccuggucgaauuugagccaccgcaugcagccacaauucggguguuggcucuaggaaaucaagaaggcagccugaagacugcgcucaccggggcaaugcgcguuacaaaggacacuaacgauaauaaccuguacaaacuucacggaggucacgugucgugcagaguaaagcugucugccuugacccucaaaggcacauccuauaagauauguaccgacaaaauguuuuucgucaagaaucccacugauacggggcauggaacagugguuaugcaagugaaggucucaaaaggcgcuccuugcaggaucccagugauuguagccgacgaccugaccgcagccaucaacaaggguauauuagugacuguuaaucccauugcuaguaccaacgaugacgagguccugaucgaagugaauccuccauucggggauagcuacaucauugugggccguggagacucccggcuaacauaucaguggcacaaagagggcucuagcaucgggaagcucuuuacccagacuaugaaaggagucgagcgacuggccguuaugggugauacagcaugggacuucucaagugcgggcggguuuuucacguccgugggaaagggcauucauaccguguuugguagcgcuuuccaggggcuuuuuggcggauugaacuggauaacuaagguaaucaugggcgccguccugauuuggguggggaucaauacaagaaacaugaccaugucuaugucaaugauccucguuggagugauuaugauguuccugagucuuggcgucggugcagaucaggggugugccauaaauuuuggaaaaugaggacuaguggaagcauuuuccuggcugauuaaaagaaauuacucagcuauggucaucuguuccuguuagaaggcuaugcagcauauuauauacuaugcgcauguuaugaaaugcauaauaaaaaauuuuaaaaaaucuaaaagaucuaaaaaaaaaaaaaaaaaaaaaaaaaaaaaaaaaaaaaaaaaaaaaaaaaaaaaaaaaaaaaaaaugcaucccccccccccccccccccccccccccccccaaaggcucuuuucagagccaccagaauu

SEQ ID NO: 861 - RNA, 2477 nt, Artificial Sequence
  mRNA product Design d-5 comprising derived and/or modified sequence from YFV__NC_002031.1__SSIgE-prME (polyprotein: aa122-778) (opt3)
gggagagggcgcuuggcuugcaaggacccugagcugcggcauugaagcacacccaacccaacucgacugaagucagccucacugaaccggaucugagaaucuucucucucugggcuugccagggcucuccgaaccuagcuagcauccucuucaauuccaacuagaaagcuuaccauggacuggaccuggauccuguuccucguggccgcugcaacaagaguccacagcgugacccuggucagaaagaacagguggcuccuucugaauguuacaagcgaggacuugggcaaaacuuucuccguggggacgggaaacugcaccacaaauaucuuagaagccaaguacuggugucccgauucuauggaguauaacugcccuaaucugucaccacgggaggaaccggacgauauugacuguuggugcuacgguguagaaaacgugcgcgucgcuuauggcaaaugugauagugcagggcgaagccguagauccaggcgggccauagaccuacccacucacgagaaucauggacucaagacccgccaggagaaauggaugacaggcagaaugggugaaaggcaacugcagaagaucgagcggugguuugugcgcaacccuuucuuugcgguuaccgcucuuacuauugccuaccugguggggucuaauaugacacagcgagucgugaucgcauugcucguacuggccguuggaccagcuuauucggcacacugcauuggcaucaccgauagagacuucauagaaggcgugcaugggggaacgugggucucagccacucuggagcaggauaagugugugaccgugauggcucccgacaaaccuagccucgauaucaguuuagagacagucgccauugacaggccagcggaaguucggaaggugugcuacaacgcaguacugacucacgugaaaaucaaugauaagugucccuccaccggugaggcccaucuugcugaagagaacgaaggcgacaaugccugcaaacguacauauucugaccgcggguggggaaacggcugugguuuguuugggaagggaagcauugucgcaugcgcuaaguuuaccugcgccaaauccaugucacuguucgagguggaucaaacgaagauccaguacguuauaagagcgcagcuacacgugggcgccaaacaggagaauuggaacacugacauuaagacacucaaauucgaugcacugaguggcagccaagaagucgaguuuaucggguacggaaaggcuacccuugaaugucaggugcagacugccguagacuucgguaacucuuauauugcugagauggaaacagaguccuggaucguugauaggcagugggcccaagaccugaccuugccuuggcagucaggcagcgggggaguguggcgggagaugcaccaucucgucgaauuugagccaccgcacgcagccacgauccgagugcuggcuuuaggcaaucaggaagguagucugaaaaccgcgcucacaggggcaaugcgcgucacuaaggauaccaacgacaauaaccuuuacaagcugcauggcggacacgugucuugcagaguuaaauuguccgcccuaacacugaagggcacuagcuauaaaauuuguaccgauaagauguucuuugugaaaaaucccacagacaccgggcacggaacuguagucaugcaagugaagguuucgaagggugcuccuugcaggauaccagugaucgucgccgaugaccucacggcagccauuaacaaaggcauccuggugacaguaaaucccauagcuucuaccaacgacgaugaggugcuuauugaaguuaauccuccauucggggacuccuacaucaucgucggacggggcgauucacgccugacuuaucaguggcauaaggaggguaguagcauugggaaauuguucacccagacaaugaagggcguggagagacucgccgugaugggagacaccgcaugggauuuuuccucugcgggcggguucuuuacuagcgucggaaaagguauccacacaguuuucggcucagcuuuucaggggcuguucggaggcuuaaacuggauuacgaaggugauaaugggugccgugcugaucuggguagggauuaauaccaggaacaugacuaugaguauguccaugauccuagucggcgugaucaugauguuucucagccugggaguuggcgcaugaggacuaguggaagcauuuuccuggcugauuaaaagaaauuacucagcuauggucaucuguuccuguuagaaggcuaugcagcauauuauauacuaugcgcauguuaugaaaugcauaauaaaaaauuuuaaaaaaucuaaaagaucuaaaaaaaaaaaaaaaaaaaaaaaaaaaaaaaaaaaaaaaaaaaaaaaaaaaaaaaaaaaaaaaaugcaucccccccccccccccccccccccccccccccaaaggcucuuuucagagccaccagaauu

SEQ ID NO: 862 - RNA, 2525 nt, Artificial Sequence
  mRNA product Design d-5 comprising derived and/or modified sequence from YFV__NC_002031.1__SSjev-prME-XX (polyprotein: aa122-788) (opt3)
gggagagggcgcuuggcuugcaaggacccugagcugcggcauugaagcacacccaacccaacucgacugaagucagccucacugaaccggaucugagaaucuucucucucugggcuugccagggcucuccgaaccuagcuagcauccucuucaauuccaacuagaaagcuuaccaugggcaagagaagcgccggguccaucauguggcuggcuucucucgcaguggucauugccugcgcgggagcuguuacucuggugcguaaaaaccgauggcuacuccugaauguaacgucagaggaucuuggcaagaccuuuaguguggggacaggaaacugcacuaccaauauucuggaagccaaauacuggugucccgacagcauggaguauaacugcccuaauuuguccccaagagaggaaccggaugacauagauuguuggugcuacggcgucgaaaacgugaggguugcuuaugguaagugugacucugcagggcggucgcgcagaucaaggcgggccaucgaucuccccacacaugagaaucacggacugaaaacccgccaagagaaguggaugacuggccgaaugggcgaaagacagcugcagaagauugagaggugguucgugcggaacccuuucuucgcggucacagcucucaccaucgccuacuuaguggggagcaauaugacgcagcguguaguuauugcacugcuuguguuggccgucggaccagcuuauagugcacauugcaucgguauaacugaccgcgauuuuaucgaaggcgugcacgggggaaccuggguguccgccacacuggagcaagacaaaugugucacuguuauggcucccgauaagccuucucuagacauuagccucgagaccguggccaucgauagaccagcggaaguaaggaaagugugcuacaacgcaguccugacacaugugaagauuaaugacaaaugucccuccaccggcgaggcccaccuugcugaagagaacgaaggugacaaugccugcaagcggacguauucagaucgaggguggggaaacggcuguggccuguucgggaagggaaguaucguugcaugcgcuaaauuuacuugcgccaagagcaugucuuuguucgagguggaccagacaaaaauacaguacgucauucgcgcgcagcuccacgugggugccaagcaagagaauuggaacaccgauaucaaaacucugaaguuugacgcauuauccggcucacaggaaguagaguucauuggguacggaaaagcuacacuggaaugucagguucagaccgccguggauuuuggcaacagcuauaucgcugagauggaaacggagaguuggaucgucgacagacaaugggcccaggaucucacccuuccuuggcagucugguuccgggggcguguggagggagaugcaucaccuggucgaauuugagccaccgcaugcagccacaauucggguguuggcucuaggaaaucaagaaggcagccugaagacugcgcucaccggggcaaugcgcguuacaaaggacacuaacgauaauaaccuguacaaacuucacggaggucacgugucgugcagaguaaagcugucugccuugacccucaaaggcacauccuauaagauauguaccgacaaaauguuuuucgucaagaaucccacugauacggggcauggaacagugguuaugcaagugaaggucucaaaaggcgcuccuugcaggaucccagugauuguagccgacgaccugaccgcagccaucaacaaggguauauuagugacuguuaaucccauugcuaguaccaacgaugacgagguccugaucgaagugaauccuccauucggggauagcuacaucauugugggccguggagacucccggcuaacauaucaguggcacaaagagggcucuagcaucgggaagcucuuuacccagacuaugaaaggagucgagcgacuggccguuaugggugauacagcaugggacuucucaagugcgggcggguuuuucacguccgugggaaagggcauucauaccguguuugguagcgcuuuccaggggcuuuuuggcggauugaacuggauaacuaagguaaucaugggcgccguccugauuuggguggggaucaauacaagaaacaugaccaugucuaugucaaugauccucguuggagugauuaugauguuccugagucuuggcgucggugcagaucaggggugugccauaaauuuuggaaaaugaggacuaguggaagcauuuuccuggcugauuaaaagaaauuacucagcuauggucaucuguuccuguuagaaggcuaugcagcauauuauauacuaugcgcauguuaugaaaugcauaauaaaaaauuuuaaaaaaucuaaaagaucuaaaaaaaaaaaaaaaaaaaaaaaaaaaaaaaaaaaaaaaaaaaaaaaaaaaaaaaaaaaaaaaaugcaucccccccccccccccccccccccccccccccaaaggcucuuuucagagccaccagaauu

SEQ ID NO: 863 - RNA, 2495 nt, Artificial Sequence
  mRNA product Design d-5 comprising derived and/or modified sequence from YFV__NC_002031.1__SSjev-prME (polyprotein: aa122-778) (opt3)
gggagagggcgcuuggcuugcaaggacccugagcugcggcauugaagcacacccaacccaacucgacugaagucagccucacugaaccggaucugagaaucuucucucucugggcuugccagggcucuccgaaccuagcuagcauccucuucaauuccaacuagaaagcuuaccaugggcaagagaagcgccggguccaucauguggcuggcuucucucgcaguggucauugccugcgcgggagcugugacccuggucagaaagaacagguggcuccuucugaauguuacaagcgaggacuugggcaaaacuuucuccguggggacgggaaacugcaccacaaauaucuuagaagccaaguacuggugucccgauucuauggaguauaacugcccuaaucugucaccacgggaggaaccggacgauauugacuguuggugcuacgguguagaaaacgugcgcgucgcuuauggcaaaugugauagugcagggcgaagccguagauccaggcgggccauagaccuacccacucacgagaaucauggacucaagacccgccaggagaaauggaugacaggcagaaugggugaaaggcaacugcagaagaucgagcggugguuugugcgcaacccuuucuuugcgguuaccgcucuuacuauugccuaccugguggggucuaauaugacacagcgagucgugaucgcauugcucguacuggccguuggaccagcuuauucggcacacugcauuggcaucaccgauagagacuucauagaaggcgugcaugggggaacgugggucucagccacucuggagcaggauaagugugugaccgugauggcucccgacaaaccuagccucgauaucaguuuagagacagucgccauugacaggccagcggaaguucggaaggugugcuacaacgcaguacugacucacgugaaaaucaaugauaagugucccuccaccggugaggcccaucuugcugaagagaacgaaggcgacaaugccugcaaacguacauauucugaccgcggguggggaaacggcugugguuuguuugggaagggaagcauugucgcaugcgcuaaguuuaccugcgccaaauccaugucacuguucgagguggaucaaacgaagauccaguacguuauaagagcgcagcuacacgugggcgccaaacaggagaauuggaacacugacauuaagacacucaaauucgaugcacugaguggcagccaagaagucgaguuuaucggguacggaaaggcuacccuugaaugucaggugcagacugccguagacuucgguaacucuuauauugcugagauggaaacagaguccuggaucguugauaggcagugggcccaagaccugaccuugccuuggcagucaggcagcgggggaguguggcgggagaugcaccaucucgucgaauuugagccaccgcacgcagccacgauccgagugcuggcuuuaggcaaucaggaagguagucugaaaaccgcgcucacaggggcaaugcgcgucacuaaggauaccaacgacaauaaccuuuacaagcugcauggcggacacgugucuugcagaguuaaauuguccgcccuaacacugaagggcacuagcuauaaaauuuguaccgauaagauguucuuugugaaaaaucccacagacaccgggcacggaacuguagucaugcaagugaagguuucgaagggugcuccuugcaggauaccagugaucgucgccgaugaccucacggcagccauuaacaaaggcauccuggugacaguaaaucccauagcuucuaccaacgacgaugaggugcuuauugaaguuaauccuccauucggggacuccuacaucaucgucggacggggcgauucacgccugacuuaucaguggcauaaggaggguaguagcauugggaaauuguucacccagacaaugaagggcguggagagacucgccgugaugggagacaccgcaugggauuuuuccucugcgggcggguucuuuacuagcgucggaaaagguauccacacaguuuucggcucagcuuuucaggggcuguucggaggcuuaaacuggauuacgaaggugauaaugggugccgugcugaucuggguagggauuaauaccaggaacaugacuaugaguauguccaugauccuagucggcgugaucaugauguuucucagccugggaguuggcgcaugaggacuaguggaagcauuuuccuggcugauuaaaagaaauuacucagcuauggucaucuguuccuguuagaaggcuaugcagcauauuauauacuaugcgcauguuaugaaaugcauaauaaaaaauuuuaaaaaaucuaaaagaucuaaaaaaaaaaaaaaaaaaaaaaaaaaaaaaaaaaaaaaaaaaaaaaaaaaaaaaaaaaaaaaaaugcaucccccccccccccccccccccccccccccccaaaggcucuuuucagagccaccagaauu

SEQ ID NO: 864 - RNA, 2543 nt, Artificial Sequence
  mRNA product Design d-5 comprising derived and/or modified sequence from YFV__NC_002031.1__X-SS-prME-XX (polyprotein: aa92-788) (opt4)
gggagagggcgcuuggcuugcaaggacccugagcugcggcauugaagcacacccaacccaacucgacugaagucagccucacugaaccggaucugagaaucuucucucucugggcuugccagggcucuccgaaccuagcuagcauccucuucaauuccaacuagaaagcuuaccaugagaggccugagcagcagaaagagaagaagccacgacgugcugaccgugcaguuccugauccugggcaugcugcugaugaccggcggcgugacccuggugagaaagaacagauggcugcugcugaacgugaccagcgaggaccugggcaagaccuucagcgugggcaccggcaacugcaccaccaacauccuggaggccaaguacuggugccccgacagcauggaguacaacugccccaaccugagccccagagaggagcccgacgacaucgacugcuggugcuacggcguggagaacgugagaguggccuacggcaagugcgacagcgccggcagaagcagaagaagcagaagagccaucgaccugcccacccacgagaaccacggccugaagaccagacaggagaaguggaugaccggcagaaugggcgagagacagcugcagaagaucgagagaugguucgugagaaaccccuucuucgccgugaccgcccugaccaucgccuaccuggugggcagcaacaugacccagagaguggugaucgcccugcuggugcuggccgugggccccgccuacagcgcccacugcaucggcaucaccgacagagacuucaucgagggcgugcacggcggcaccugggugagcgccacccuggagcaggacaagugcgugaccgugauggcccccgacaagcccagccuggacaucagccuggagaccguggccaucgacagacccgccgaggugagaaaggugugcuacaacgccgugcugacccacgugaagaucaacgacaagugccccagcaccggcgaggcccaccuggccgaggagaacgagggcgacaacgccugcaagagaaccuacagcgacagaggcuggggcaacggcugcggccuguucggcaagggcagcaucguggccugcgccaaguucaccugcgccaagagcaugagccuguucgagguggaccagaccaagauccaguacgugaucagagcccagcugcacgugggcgccaagcaggagaacuggaacaccgacaucaagacccugaaguucgacgcccugagcggcagccaggagguggaguucaucggcuacggcaaggccacccuggagugccaggugcagaccgccguggacuucggcaacagcuacaucgccgagauggagaccgagagcuggaucguggacagacagugggcccaggaccugacccugcccuggcagagcggcagcggcggcguguggagagagaugcaccaccugguggaguucgagcccccccacgccgccaccaucagagugcuggcccugggcaaccaggagggcagccugaagaccgcccugaccggcgccaugagagugaccaaggacaccaacgacaacaaccuguacaagcugcacggcggccacgugagcugcagagugaagcugagcgcccugacccugaagggcaccagcuacaagaucugcaccgacaagauguucuucgugaagaaccccaccgacaccggccacggcaccguggugaugcaggugaaggugagcaagggcgcccccugcagaauccccgugaucguggccgacgaccugaccgccgccaucaacaagggcauccuggugaccgugaaccccaucgccagcaccaacgacgacgaggugcugaucgaggugaacccccccuucggcgacagcuacaucaucgugggcagaggcgacagcagacugaccuaccaguggcacaaggagggcagcagcaucggcaagcuguucacccagaccaugaagggcguggagagacuggccgugaugggcgacaccgccugggacuucagcagcgccggcggcuucuucaccagcgugggcaagggcauccacaccguguucggcagcgccuuccagggccuguucggcggccugaacuggaucaccaaggugaucaugggcgccgugcugaucugggugggcaucaacaccagaaacaugaccaugagcaugagcaugauccuggugggcgugaucaugauguuccugagccugggcgugggcgccgaccagggcugcgccaucaacuucggcaagugaggacuaguggaagcauuuuccuggcugauuaaaagaaauuacucagcuauggucaucuguuccuguuagaaggcuaugcagcauauuauauacuaugcgcauguuaugaaaugcauaauaaaaaauuuuaaaaaaucuaaaagaucuaaaaaaaaaaaaaaaaaaaaaaaaaaaaaaaaaaaaaaaaaaaaaaaaaaaaaaaaaaaaaaaaugcaucccccccccccccccccccccccccccccccaaaggcucuuuucagagccaccagaauu

SEQ ID NO: 865 - RNA, 2480 nt, Artificial Sequence
  mRNA product Design d-5 comprising derived and/or modified sequence from YFV__NC_002031.1__SS-prME (polyprotein: M,aa104-778) (opt4)
gggagagggcgcuuggcuugcaaggacccugagcugcggcauugaagcacacccaacccaacucgacugaagucagccucacugaaccggaucugagaaucuucucucucugggcuugccagggcucuccgaaccuagcuagcauccucuucaauuccaacuagaaagcuuaccauggacgugcugaccgugcaguuccugauccugggcaugcugcugaugaccggcggcgugacccuggugagaaagaacagauggcugcugcugaacgugaccagcgaggaccugggcaagaccuucagcgugggcaccggcaacugcaccaccaacauccuggaggccaaguacuggugccccgacagcauggaguacaacugccccaaccugagccccagagaggagcccgacgacaucgacugcuggugcuacggcguggagaacgugagaguggccuacggcaagugcgacagcgccggcagaagcagaagaagcagaagagccaucgaccugcccacccacgagaaccacggccugaagaccagacaggagaaguggaugaccggcagaaugggcgagagacagcugcagaagaucgagagaugguucgugagaaaccccuucuucgccgugaccgcccugaccaucgccuaccuggugggcagcaacaugacccagagaguggugaucgcccugcuggugcuggccgugggccccgccuacagcgcccacugcaucggcaucaccgacagagacuucaucgagggcgugcacggcggcaccugggugagcgccacccuggagcaggacaagugcgugaccgugauggcccccgacaagcccagccuggacaucagccuggagaccguggccaucgacagacccgccgaggugagaaaggugugcuacaacgccgugcugacccacgugaagaucaacgacaagugccccagcaccggcgaggcccaccuggccgaggagaacgagggcgacaacgccugcaagagaaccuacagcgacagaggcuggggcaacggcugcggccuguucggcaagggcagcaucguggccugcgccaaguucaccugcgccaagagcaugagccuguucgagguggaccagaccaagauccaguacgugaucagagcccagcugcacgugggcgccaagcaggagaacuggaacaccgacaucaagacccugaaguucgacgcccugagcggcagccaggagguggaguucaucggcuacggcaaggccacccuggagugccaggugcagaccgccguggacuucggcaacagcuacaucgccgagauggagaccgagagcuggaucguggacagacagugggcccaggaccugacccugcccuggcagagcggcagcggcggcguguggagagagaugcaccaccugguggaguucgagcccccccacgccgccaccaucagagugcuggcccugggcaaccaggagggcagccugaagaccgcccugaccggcgccaugagagugaccaaggacaccaacgacaacaaccuguacaagcugcacggcggccacgugagcugcagagugaagcugagcgcccugacccugaagggcaccagcuacaagaucugcaccgacaagauguucuucgugaagaaccccaccgacaccggccacggcaccguggugaugcaggugaaggugagcaagggcgcccccugcagaauccccgugaucguggccgacgaccugaccgccgccaucaacaagggcauccuggugaccgugaaccccaucgccagcaccaacgacgacgaggugcugaucgaggugaacccccccuucggcgacagcuacaucaucgugggcagaggcgacagcagacugaccuaccaguggcacaaggagggcagcagcaucggcaagcuguucacccagaccaugaagggcguggagagacuggccgugaugggcgacaccgccugggacuucagcagcgccggcggcuucuucaccagcgugggcaagggcauccacaccguguucggcagcgccuuccagggccuguucggcggccugaacuggaucaccaaggugaucaugggcgccgugcugaucugggugggcaucaacaccagaaacaugaccaugagcaugagcaugauccuggugggcgugaucaugauguuccugagccugggcgugggcgccugaggacuaguggaagcauuuuccuggcugauuaaaagaaauuacucagcuauggucaucuguuccuguuagaaggcuaugcagcauauuauauacuaugcgcauguuaugaaaugcauaauaaaaaauuuuaaaaaaucuaaaagaucuaaaaaaaaaaaaaaaaaaaaaaaaaaaaaaaaaaaaaaaaaaaaaaaaaaaaaaaaaaaaaaaaugcaucccccccccccccccccccccccccccccccaaaggcucuuuucagagccaccagaauu

SEQ ID NO: 866 - RNA, 2507 nt, Artificial Sequence
  mRNA product Design d-5 comprising derived and/or modified sequence from YFV__NC_002031.1__SSIgE-prME-XX (polyprotein: aa122-788) (opt4)
gggagagggcgcuuggcuugcaaggacccugagcugcggcauugaagcacacccaacccaacucgacugaagucagccucacugaaccggaucugagaaucuucucucucugggcuugccagggcucuccgaaccuagcuagcauccucuucaauuccaacuagaaagcuuaccauggacuggaccuggauccuguuccugguggccgccgccaccagagugcacagcgugacccuggugagaaagaacagauggcugcugcugaacgugaccagcgaggaccugggcaagaccuucagcgugggcaccggcaacugcaccaccaacauccuggaggccaaguacuggugccccgacagcauggaguacaacugccccaaccugagccccagagaggagcccgacgacaucgacugcuggugcuacggcguggagaacgugagaguggccuacggcaagugcgacagcgccggcagaagcagaagaagcagaagagccaucgaccugcccacccacgagaaccacggccugaagaccagacaggagaaguggaugaccggcagaaugggcgagagacagcugcagaagaucgagagaugguucgugagaaaccccuucuucgccgugaccgcccugaccaucgccuaccuggugggcagcaacaugacccagagaguggugaucgcccugcuggugcuggccgugggccccgccuacagcgcccacugcaucggcaucaccgacagagacuucaucgagggcgugcacggcggcaccugggugagcgccacccuggagcaggacaagugcgugaccgugauggcccccgacaagcccagccuggacaucagccuggagaccguggccaucgacagacccgccgaggugagaaaggugugcuacaacgccgugcugacccacgugaagaucaacgacaagugccccagcaccggcgaggcccaccuggccgaggagaacgagggcgacaacgccugcaagagaaccuacagcgacagaggcuggggcaacggcugcggccuguucggcaagggcagcaucguggccugcgccaaguucaccugcgccaagagcaugagccuguucgagguggaccagaccaagauccaguacgugaucagagcccagcugcacgugggcgccaagcaggagaacuggaacaccgacaucaagacccugaaguucgacgcccugagcggcagccaggagguggaguucaucggcuacggcaaggccacccuggagugccaggugcagaccgccguggacuucggcaacagcuacaucgccgagauggagaccgagagcuggaucguggacagacagugggcccaggaccugacccugcccuggcagagcggcagcggcggcguguggagagagaugcaccaccugguggaguucgagcccccccacgccgccaccaucagagugcuggcccugggcaaccaggagggcagccugaagaccgcccugaccggcgccaugagagugaccaaggacaccaacgacaacaaccuguacaagcugcacggcggccacgugagcugcagagugaagcugagcgcccugacccugaagggcaccagcuacaagaucugcaccgacaagauguucuucgugaagaaccccaccgacaccggccacggcaccguggugaugcaggugaaggugagcaagggcgcccccugcagaauccccgugaucguggccgacgaccugaccgccgccaucaacaagggcauccuggugaccgugaaccccaucgccagcaccaacgacgacgaggugcugaucgaggugaacccccccuucggcgacagcuacaucaucgugggcagaggcgacagcagacugaccuaccaguggcacaaggagggcagcagcaucggcaagcuguucacccagaccaugaagggcguggagagacuggccgugaugggcgacaccgccugggacuucagcagcgccggcggcuucuucaccagcgugggcaagggcauccacaccguguucggcagcgccuuccagggccuguucggcggccugaacuggaucaccaaggugaucaugggcgccgugcugaucugggugggcaucaacaccagaaacaugaccaugagcaugagcaugauccuggugggcgugaucaugauguuccugagccugggcgugggcgccgaccagggcugcgccaucaacuucggcaagugaggacuaguggaagcauuuuccuggcugauuaaaagaaauuacucagcuauggucaucuguuccuguuagaaggcuaugcagcauauuauauacuaugcgcauguuaugaaaugcauaauaaaaaauuuuaaaaaaucuaaaagaucuaaaaaaaaaaaaaaaaaaaaaaaaaaaaaaaaaaaaaaaaaaaaaaaaaaaaaaaaaaaaaaaaugcaucccccccccccccccccccccccccccccccaaaggcucuuuucagagccaccagaauu

SEQ ID NO: 867 - RNA, 2477 nt, Artificial Sequence
  mRNA product Design d-5 comprising derived and/or modified sequence from YFV__NC_002031.1__SSIgE-prME (polyprotein: aa122-778) (opt4)
gggagagggcgcuuggcuugcaaggacccugagcugcggcauugaagcacacccaacccaacucgacugaagucagccucacugaaccggaucugagaaucuucucucucugggcuugccagggcucuccgaaccuagcuagcauccucuucaauuccaacuagaaagcuuaccauggacuggaccuggauccuguuccugguggccgccgccaccagagugcacagcgugacccuggugagaaagaacagauggcugcugcugaacgugaccagcgaggaccugggcaagaccuucagcgugggcaccggcaacugcaccaccaacauccuggaggccaaguacuggugccccgacagcauggaguacaacugccccaaccugagccccagagaggagcccgacgacaucgacugcuggugcuacggcguggagaacgugagaguggccuacggcaagugcgacagcgccggcagaagcagaagaagcagaagagccaucgaccugcccacccacgagaaccacggccugaagaccagacaggagaaguggaugaccggcagaaugggcgagagacagcugcagaagaucgagagaugguucgugagaaaccccuucuucgccgugaccgcccugaccaucgccuaccuggugggcagcaacaugacccagagaguggugaucgcccugcuggugcuggccgugggccccgccuacagcgcccacugcaucggcaucaccgacagagacuucaucgagggcgugcacggcggcaccugggugagcgccacccuggagcaggacaagugcgugaccgugauggcccccgacaagcccagccuggacaucagccuggagaccguggccaucgacagacccgccgaggugagaaaggugugcuacaacgccgugcugacccacgugaagaucaacgacaagugccccagcaccggcgaggcccaccuggccgaggagaacgagggcgacaacgccugcaagagaaccuacagcgacagaggcuggggcaacggcugcggccuguucggcaagggcagcaucguggccugcgccaaguucaccugcgccaagagcaugagccuguucgagguggaccagaccaagauccaguacgugaucagagcccagcugcacgugggcgccaagcaggagaacuggaacaccgacaucaagacccugaaguucgacgcccugagcggcagccaggagguggaguucaucggcuacggcaaggccacccuggagugccaggugcagaccgccguggacuucggcaacagcuacaucgccgagauggagaccgagagcuggaucguggacagacagugggcccaggaccugacccugcccuggcagagcggcagcggcggcguguggagagagaugcaccaccugguggaguucgagcccccccacgccgccaccaucagagugcuggcccugggcaaccaggagggcagccugaagaccgcccugaccggcgccaugagagugaccaaggacaccaacgacaacaaccuguacaagcugcacggcggccacgugagcugcagagugaagcugagcgcccugacccugaagggcaccagcuacaagaucugcaccgacaagauguucuucgugaagaaccccaccgacaccggccacggcaccguggugaugcaggugaaggugagcaagggcgcccccugcagaauccccgugaucguggccgacgaccugaccgccgccaucaacaagggcauccuggugaccgugaaccccaucgccagcaccaacgacgacgaggugcugaucgaggugaacccccccuucggcgacagcuacaucaucgugggcagaggcgacagcagacugaccuaccaguggcacaaggagggcagcagcaucggcaagcuguucacccagaccaugaagggcguggagagacuggccgugaugggcgacaccgccugggacuucagcagcgccggcggcuucuucaccagcgugggcaagggcauccacaccguguucggcagcgccuuccagggccuguucggcggccugaacuggaucaccaaggugaucaugggcgccgugcugaucugggugggcaucaacaccagaaacaugaccaugagcaugagcaugauccuggugggcgugaucaugauguuccugagccugggcgugggcgccugaggacuaguggaagcauuuuccuggcugauuaaaagaaauuacucagcuauggucaucuguuccuguuagaaggcuaugcagcauauuauauacuaugcgcauguuaugaaaugcauaauaaaaaauuuuaaaaaaucuaaaagaucuaaaaaaaaaaaaaaaaaaaaaaaaaaaaaaaaaaaaaaaaaaaaaaaaaaaaaaaaaaaaaaaaugcaucccccccccccccccccccccccccccccccaaaggcucuuuucagagccaccagaauu

SEQ ID NO: 868 - RNA, 2525 nt, Artificial Sequence
  mRNA product Design d-5 comprising derived and/or modified sequence from YFV__NC_002031.1__SSjev-prME-XX (polyprotein: aa122-788) (opt4)
gggagagggcgcuuggcuugcaaggacccugagcugcggcauugaagcacacccaacccaacucgacugaagucagccucacugaaccggaucugagaaucuucucucucugggcuugccagggcucuccgaaccuagcuagcauccucuucaauuccaacuagaaagcuuaccaugggcaagagaagcgccggcagcaucauguggcuggccagccuggccguggugaucgccugcgccggcgccgugacccuggugagaaagaacagauggcugcugcugaacgugaccagcgaggaccugggcaagaccuucagcgugggcaccggcaacugcaccaccaacauccuggaggccaaguacuggugccccgacagcauggaguacaacugccccaaccugagccccagagaggagcccgacgacaucgacugcuggugcuacggcguggagaacgugagaguggccuacggcaagugcgacagcgccggcagaagcagaagaagcagaagagccaucgaccugcccacccacgagaaccacggccugaagaccagacaggagaaguggaugaccggcagaaugggcgagagacagcugcagaagaucgagagaugguucgugagaaaccccuucuucgccgugaccgcccugaccaucgccuaccuggugggcagcaacaugacccagagaguggugaucgcccugcuggugcuggccgugggccccgccuacagcgcccacugcaucggcaucaccgacagagacuucaucgagggcgugcacggcggcaccugggugagcgccacccuggagcaggacaagugcgugaccgugauggcccccgacaagcccagccuggacaucagccuggagaccguggccaucgacagacccgccgaggugagaaaggugugcuacaacgccgugcugacccacgugaagaucaacgacaagugccccagcaccggcgaggcccaccuggccgaggagaacgagggcgacaacgccugcaagagaaccuacagcgacagaggcuggggcaacggcugcggccuguucggcaagggcagcaucguggccugcgccaaguucaccugcgccaagagcaugagccuguucgagguggaccagaccaagauccaguacgugaucagagcccagcugcacgugggcgccaagcaggagaacuggaacaccgacaucaagacccugaaguucgacgcccugagcggcagccaggagguggaguucaucggcuacggcaaggccacccuggagugccaggugcagaccgccguggacuucggcaacagcuacaucgccgagauggagaccgagagcuggaucguggacagacagugggcccaggaccugacccugcccuggcagagcggcagcggcggcguguggagagagaugcaccaccugguggaguucgagcccccccacgccgccaccaucagagugcuggcccugggcaaccaggagggcagccugaagaccgcccugaccggcgccaugagagugaccaaggacaccaacgacaacaaccuguacaagcugcacggcggccacgugagcugcagagugaagcugagcgcccugacccugaagggcaccagcuacaagaucugcaccgacaagauguucuucgugaagaaccccaccgacaccggccacggcaccguggugaugcaggugaaggugagcaagggcgcccccugcagaauccccgugaucguggccgacgaccugaccgccgccaucaacaagggcauccuggugaccgugaaccccaucgccagcaccaacgacgacgaggugcugaucgaggugaacccccccuucggcgacagcuacaucaucgugggcagaggcgacagcagacugaccuaccaguggcacaaggagggcagcagcaucggcaagcuguucacccagaccaugaagggcguggagagacuggccgugaugggcgacaccgccugggacuucagcagcgccggcggcuucuucaccagcgugggcaagggcauccacaccguguucggcagcgccuuccagggccuguucggcggccugaacuggaucaccaaggugaucaugggcgccgugcugaucugggugggcaucaacaccagaaacaugaccaugagcaugagcaugauccuggugggcgugaucaugauguuccugagccugggcgugggcgccgaccagggcugcgccaucaacuucggcaagugaggacuaguggaagcauuuuccuggcugauuaaaagaaauuacucagcuauggucaucuguuccuguuagaaggcuaugcagcauauuauauacuaugcgcauguuaugaaaugcauaauaaaaaauuuuaaaaaaucuaaaagaucuaaaaaaaaaaaaaaaaaaaaaaaaaaaaaaaaaaaaaaaaaaaaaaaaaaaaaaaaaaaaaaaaugcaucccccccccccccccccccccccccccccccaaaggcucuuuucagagccaccagaauu

SEQ ID NO: 869 - RNA, 2495 nt, Artificial Sequence
  mRNA product Design d-5 comprising derived and/or modified sequence from YFV__NC_002031.1__SSjev-prME (polyprotein: aa122-778) (opt4)
gggagagggcgcuuggcuugcaaggacccugagcugcggcauugaagcacacccaacccaacucgacugaagucagccucacugaaccggaucugagaaucuucucucucugggcuugccagggcucuccgaaccuagcuagcauccucuucaauuccaacuagaaagcuuaccaugggcaagagaagcgccggcagcaucauguggcuggccagccuggccguggugaucgccugcgccggcgccgugacccuggugagaaagaacagauggcugcugcugaacgugaccagcgaggaccugggcaagaccuucagcgugggcaccggcaacugcaccaccaacauccuggaggccaaguacuggugccccgacagcauggaguacaacugccccaaccugagccccagagaggagcccgacgacaucgacugcuggugcuacggcguggagaacgugagaguggccuacggcaagugcgacagcgccggcagaagcagaagaagcagaagagccaucgaccugcccacccacgagaaccacggccugaagaccagacaggagaaguggaugaccggcagaaugggcgagagacagcugcagaagaucgagagaugguucgugagaaaccccuucuucgccgugaccgcccugaccaucgccuaccuggugggcagcaacaugacccagagaguggugaucgcccugcuggugcuggccgugggccccgccuacagcgcccacugcaucggcaucaccgacagagacuucaucgagggcgugcacggcggcaccugggugagcgccacccuggagcaggacaagugcgugaccgugauggcccccgacaagcccagccuggacaucagccuggagaccguggccaucgacagacccgccgaggugagaaaggugugcuacaacgccgugcugacccacgugaagaucaacgacaagugccccagcaccggcgaggcccaccuggccgaggagaacgagggcgacaacgccugcaagagaaccuacagcgacagaggcuggggcaacggcugcggccuguucggcaagggcagcaucguggccugcgccaaguucaccugcgccaagagcaugagccuguucgagguggaccagaccaagauccaguacgugaucagagcccagcugcacgugggcgccaagcaggagaacuggaacaccgacaucaagacccugaaguucgacgcccugagcggcagccaggagguggaguucaucggcuacggcaaggccacccuggagugccaggugcagaccgccguggacuucggcaacagcuacaucgccgagauggagaccgagagcuggaucguggacagacagugggcccaggaccugacccugcccuggcagagcggcagcggcggcguguggagagagaugcaccaccugguggaguucgagcccccccacgccgccaccaucagagugcuggcccugggcaaccaggagggcagccugaagaccgcccugaccggcgccaugagagugaccaaggacaccaacgacaacaaccuguacaagcugcacggcggccacgugagcugcagagugaagcugagcgcccugacccugaagggcaccagcuacaagaucugcaccgacaagauguucuucgugaagaaccccaccgacaccggccacggcaccguggugaugcaggugaaggugagcaagggcgcccccugcagaauccccgugaucguggccgacgaccugaccgccgccaucaacaagggcauccuggugaccgugaaccccaucgccagcaccaacgacgacgaggugcugaucgaggugaacccccccuucggcgacagcuacaucaucgugggcagaggcgacagcagacugaccuaccaguggcacaaggagggcagcagcaucggcaagcuguucacccagaccaugaagggcguggagagacuggccgugaugggcgacaccgccugggacuucagcagcgccggcggcuucuucaccagcgugggcaagggcauccacaccguguucggcagcgccuuccagggccuguucggcggccugaacuggaucaccaaggugaucaugggcgccgugcugaucugggugggcaucaacaccagaaacaugaccaugagcaugagcaugauccuggugggcgugaucaugauguuccugagccugggcgugggcgccugaggacuaguggaagcauuuuccuggcugauuaaaagaaauuacucagcuauggucaucuguuccuguuagaaggcuaugcagcauauuauauacuaugcgcauguuaugaaaugcauaauaaaaaauuuuaaaaaaucuaaaagaucuaaaaaaaaaaaaaaaaaaaaaaaaaaaaaaaaaaaaaaaaaaaaaaaaaaaaaaaaaaaaaaaaugcaucccccccccccccccccccccccccccccccaaaggcucuuuucagagccaccagaauu

SEQ ID NO: 870 - RNA, 2543 nt, Artificial Sequence
  mRNA product Design d-5 comprising derived and/or modified sequence from YFV__NC_002031.1__X-SS-prME-XX (polyprotein: aa92-788) (opt5)
gggagagggcgcuuggcuugcaaggacccugagcugcggcauugaagcacacccaacccaacucgacugaagucagccucacugaaccggaucugagaaucuucucucucugggcuugccagggcucuccgaaccuagcuagcauccucuucaauuccaacuagaaagcuuaccaugagaggccugagcucccggaagcgcagaucucacgacgugcucaccguccaguuccugauccuugggaugcugcucaugacaggaggcguuacgcuggugcggaaaaaccgcuggcuucugcucaaugugaccagcgaggaucuggggaagacauuuuccgucggaaccggcaacugcacaaccaauauucuggaagccaaauacuggugucccgacucuauggaguauaacugcccuaaucucagcccgagagaagaacccgaugacaucgauuguuggugcuacgggguggaaaacguucggguggcuuauggaaagugugacuccgccggccgcucuagacggagccgcagagcgauugaucugccuacacaugagaaucacggccuuaaaacccggcaagagaaguggaugacggggcgcaugggagaaagacagcugcagaagaucgagcggugguucguccgcaaccccuuuuucgcugugaccgcccucacaauugccuaccugguuggcuccaauaugacccagagaguggucaucgcccuucuggugcucgcuguggggccugcuuauagcgcccauugcaucggaauuacagaccgggauuuuaucgaaggcguccacgggggaaccuggguuucugcgacgcuggagcaagacaaaugugugacagugauggcccccgauaagccuucccuggacauuagccucgagaccgucgcuaucgauagaccggccgaagugcgcaaaguuugcuacaacgcugugcugacacaugucaagauuaaugacaaaugucccucuaccggcgaggcccaccuugcggaagagaacgaaggcgacaaugccugcaagcggaccuauuccgauagaggguggggaaacggcugugggcuguucggaaagggcagcaucguggcuugcgccaaauuuacaugcgcuaagucuaugucccucuucgagguugaccagacgaaaauucaguacgugauccgcgcccagcugcacgucggggccaagcaagagaauuggaacaccgauaucaaaacacuuaaguuugacgcucugagcggaucccaggaaguggaguucauuggcuacggcaaagcgacccucgaaugucagguccagacagccguggauuuugggaacucuuauaucgcugagauggaaaccgagagcuggauuguugaccggcaaugggcccaggaucugacgcugccuuggcaguccggaagcggcgggguguggagagagaugcaucaccucgucgaguucgagcccccucaugccgcuacaauccgcgugcuggcccuuggaaaucaagaaggcucucugaagaccgcgcucaccggggcuaugcggguuacaaaggacaccaacgauaauaaccuguacaaacuucacggcggacacguguccugcagagucaagcugagcgcccucacacugaaaggcacgucuuauaagauuuguaccgacaaaauguuuuucgugaagaaucccacagauaccgggcauggaacagugguuaugcaggucaaggugagcaaaggcgccccgugccgcaucccugugaucgucgcugacgaccugaccgccgcuauuaacaaggggauccucgugacgguuaaucccauugccuccaccaacgaugacgaggugcugaucgaagucaauccucccuucggagauucuuacauuaucgugggccggggagacagcagacuuacauaucaguggcacaaagagggcuccagcaucggaaagcuguuuacccagacaaugaaaggcguugagcgccucgcggugaugggggauaccgccugggacuucucuuccgcuggaggcuuuuucacgagcgucgggaaggggauucauacaguguuuggcucugccuuccaagggcuguuuggcggacugaacuggaucaccaagguuauuaugggcgcugugcuuaucugggucgggauuaauacacggaacaugaccauguccaugagcaugauccucgugggagugauuaugauguuccugucccugggcgucggggccgaucagggaugugcgaucaauuuuggcaaaugaggacuaguggaagcauuuuccuggcugauuaaaagaaauuacucagcuauggucaucuguuccuguuagaaggcuaugcagcauauuauauacuaugcgcauguuaugaaaugcauaauaaaaaauuuuaaaaaaucuaaaagaucuaaaaaaaaaaaaaaaaaaaaaaaaaaaaaaaaaaaaaaaaaaaaaaaaaaaaaaaaaaaaaaaaugcaucccccccccccccccccccccccccccccccaaaggcucuuuucagagccaccagaauu

SEQ ID NO: 871 - RNA, 2480 nt, Artificial Sequence
  mRNA product Design d-5 comprising derived and/or modified sequence from YFV__NC_002031.1__SS-prME (polyprotein: M,aa104-778) (opt5)
gggagagggcgcuuggcuugcaaggacccugagcugcggcauugaagcacacccaacccaacucgacugaagucagccucacugaaccggaucugagaaucuucucucucugggcuugccagggcucuccgaaccuagcuagcauccucuucaauuccaacuagaaagcuuaccauggacgugcugaccguccaguuccucauccugggcaugcuucugaugacagggggaguuacgcucgugagaaagaaccgguggcugcuucugaaugugaccagcgaggaucucggcaaaacauuuuccgucgggaccggaaacugcacaaccaauauucuggaagccaaguacuggugucccgacucuauggaguauaacugcccuaaucugagcccgcgcgaagaacccgaugacaucgauuguuggugcuacggcguggaaaacguuagaguggcuuaugggaaaugugacuccgccggacggucucgcagaagccggcgcgcgauugaucucccuacacacgagaaucauggccugaagaccagacaagagaaauggaugacgggccggaugggggaacgccagcuucagaagaucgagagaugguucguccggaaccccuuuuucgcugugaccgcccugacaauugccuaccucguuggauccaauaugacccagcgcguggucaucgcucugcuugugcuggccgugggcccugcuuauucugcccacugcaucgggauuacagacagagauuuuaucgaaggaguccauggcgggaccuggguuagcgcgacgcucgagcaagacaagugugugacagugauggcccccgauaaaccuucccuggacauuagccuggagaccgucgcuaucgaucggccggccgaagugcgcaagguuugcuacaacgcugugcucacacacgucaaaauuaaugacaagugucccucuaccggagaggcccaucuggcggaagagaacgaaggcgacaaugccugcaaaagaaccuauuccgaucggggcugggggaacggauguggccuuuucgggaagggaagcaucguggcuugcgccaaguuuacaugcgcuaaaucuaugucccuguucgagguugaccagacgaagauucaguacgugaucagagcccagcuccacgucggcgccaaacaagagaauuggaacaccgauaucaagacacugaaauuugacgcucuuagcgggucucaggaaguggaguucauuggauacggcaaggcgacccuggaaugucagguccagacagccguggauuuuggcaacuccuauaucgcugagauggaaaccgagagcuggauuguugaccgccaaugggcccaggaucucacgcugccuuggcaguccgggucuggaggcguguggcgggagaugcaccaucuggucgaguucgagcccccucacgccgcuacaaucagagugcucgcccuggggaaucaagaaggaagccuuaaaaccgcgcugaccggcgcuaugcgcguuacaaaggacaccaacgauaauaaccucuacaagcugcaugggggccacguguccugccgggucaaacuuagcgcccugacacucaagggaacgucuuauaaaauuuguaccgacaagauguuuuucgugaaaaaucccacagauaccggccacgggacagugguuaugcaggucaagguguccaagggagccccgugcagaaucccugugaucgucgcugacgaccugaccgccgcuauuaacaaaggcauccuggugacgguuaaucccauugccagcaccaacgaugacgaggugcucaucgaagucaauccucccuucggggauucuuacauuaucgugggacgcggcgacagccggcugacauaucaguggcauaaggagggguccucuaucggcaaacuuuuuacccagacaaugaagggaguugagagacuggcggugaugggcgauaccgccugggacuucagcuccgcugggggauuuuucacgagcgucggcaaagggauucacacaguguuuggaucugccuuccaaggccucuuugggggccugaacuggaucaccaagguuauuaugggagcugugcugaucugggucggcauuaauacacgcaacaugaccauguccaugagcaugauccuugugggggugauuaugauguuccucucucugggagucggcgccugaggacuaguggaagcauuuuccuggcugauuaaaagaaauuacucagcuauggucaucuguuccuguuagaaggcuaugcagcauauuauauacuaugcgcauguuaugaaaugcauaauaaaaaauuuuaaaaaaucuaaaagaucuaaaaaaaaaaaaaaaaaaaaaaaaaaaaaaaaaaaaaaaaaaaaaaaaaaaaaaaaaaaaaaaaugcaucccccccccccccccccccccccccccccccaaaggcucuuuucagagccaccagaauu

SEQ ID NO: 872 - RNA, 2507 nt, Artificial Sequence
  mRNA product Design d-5 comprising derived and/or modified sequence from YFV__NC_002031.1__SSIgE-prME-XX (polyprotein: aa122-788) (opt5)
gggagagggcgcuuggcuugcaaggacccugagcugcggcauugaagcacacccaacccaacucgacugaagucagccucacugaaccggaucugagaaucuucucucucugggcuugccagggcucuccgaaccuagcuagcauccucuucaauuccaacuagaaagcuuaccauggacuggaccuggauccuguuccucguggccgcugccacaagaguccacagcguuacgcuggugcggaaaaaccgcuggcuucugcucaaugugaccagcgaggaucuggggaagacauuuuccgucggaaccggcaacugcacaaccaauauucuggaagccaaauacuggugucccgacucuauggaguauaacugcccuaaucucagcccgagagaagaacccgaugacaucgauuguuggugcuacgggguggaaaacguucggguggcuuauggaaagugugacuccgccggccgcucuagacggagccgcagagcgauugaucugccuacacaugagaaucacggccuuaaaacccggcaagagaaguggaugacggggcgcaugggagaaagacagcugcagaagaucgagcggugguucguccgcaaccccuuuuucgcugugaccgcccucacaauugccuaccugguuggcuccaauaugacccagagaguggucaucgcccuucuggugcucgcuguggggccugcuuauagcgcccauugcaucggaauuacagaccgggauuuuaucgaaggcguccacgggggaaccuggguuucugcgacgcuggagcaagacaaaugugugacagugauggcccccgauaagccuucccuggacauuagccucgagaccgucgcuaucgauagaccggccgaagugcgcaaaguuugcuacaacgcugugcugacacaugucaagauuaaugacaaaugucccucuaccggcgaggcccaccuugcggaagagaacgaaggcgacaaugccugcaagcggaccuauuccgauagaggguggggaaacggcugugggcuguucggaaagggcagcaucguggcuugcgccaaauuuacaugcgcuaagucuaugucccucuucgagguugaccagacgaaaauucaguacgugauccgcgcccagcugcacgucggggccaagcaagagaauuggaacaccgauaucaaaacacuuaaguuugacgcucugagcggaucccaggaaguggaguucauuggcuacggcaaagcgacccucgaaugucagguccagacagccguggauuuugggaacucuuauaucgcugagauggaaaccgagagcuggauuguugaccggcaaugggcccaggaucugacgcugccuuggcaguccggaagcggcgggguguggagagagaugcaucaccucgucgaguucgagcccccucaugccgcuacaauccgcgugcuggcccuuggaaaucaagaaggcucucugaagaccgcgcucaccggggcuaugcggguuacaaaggacaccaacgauaauaaccuguacaaacuucacggcggacacguguccugcagagucaagcugagcgcccucacacugaaaggcacgucuuauaagauuuguaccgacaaaauguuuuucgugaagaaucccacagauaccgggcauggaacagugguuaugcaggucaaggugagcaaaggcgccccgugccgcaucccugugaucgucgcugacgaccugaccgccgcuauuaacaaggggauccucgugacgguuaaucccauugccuccaccaacgaugacgaggugcugaucgaagucaauccucccuucggagauucuuacauuaucgugggccggggagacagcagacuuacauaucaguggcacaaagagggcuccagcaucggaaagcuguuuacccagacaaugaaaggcguugagcgccucgcggugaugggggauaccgccugggacuucucuuccgcuggaggcuuuuucacgagcgucgggaaggggauucauacaguguuuggcucugccuuccaagggcuguuuggcggacugaacuggaucaccaagguuauuaugggcgcugugcuuaucugggucgggauuaauacacggaacaugaccauguccaugagcaugauccucgugggagugauuaugauguuccugucccugggcgucggggccgaucagggaugugcgaucaauuuuggcaaaugaggacuaguggaagcauuuuccuggcugauuaaaagaaauuacucagcuauggucaucuguuccuguuagaaggcuaugcagcauauuauauacuaugcgcauguuaugaaaugcauaauaaaaaauuuuaaaaaaucuaaaagaucuaaaaaaaaaaaaaaaaaaaaaaaaaaaaaaaaaaaaaaaaaaaaaaaaaaaaaaaaaaaaaaaaugcaucccccccccccccccccccccccccccccccaaaggcucuuuucagagccaccagaauu

SEQ ID NO: 873 - RNA, 2477 nt, Artificial Sequence
  mRNA product Design d-5 comprising derived and/or modified sequence from YFV__NC_002031.1__SSIgE-prME (polyprotein: aa122-778) (opt5)
gggagagggcgcuuggcuugcaaggacccugagcugcggcauugaagcacacccaacccaacucgacugaagucagccucacugaaccggaucugagaaucuucucucucugggcuugccagggcucuccgaaccuagcuagcauccucuucaauuccaacuagaaagcuuaccauggacuggaccuggauccuguuccucguggccgcugccacaagaguccacagcgugacccuggucagaaagaaccgguggcuccugcuuaauguuacaagcgaggaccugggcaaaacguucuccguggggaccggaaacugcacaaccaauauccucgaagccaaguacuggugucccgauucuauggaguauaacugcccuaaucugagcccgcgcgaggaacccgacgauauugacuguuggugcuacggcguggaaaacgucagaguggcuuaugggaaaugugauuccgccggacggucucgcagaagccggcgcgcgaucgaccuuccuacacacgagaaucauggccugaagaccagacaggagaaauggaugacagggcggaugggagaacgccaacuccagaagauugagagaugguuuguucggaaccccuucuuugcugugaccgcccugacgaucgccuaccuggucggcuccaauaugacccagcgcgugguuauugcucuccuggugcuugccgucggcccugcuuauucugcccacugcaucgggaucacagauagagacuucauugaaggagugcauggcgggaccugggugagcgcgacacuggagcaggauaagugugucaccguuauggcccccgacaaaccuucccucgauaucagccuggagacgguggcuauugaccggccggccgaagugcgcaaggucugcuacaacgcugugcuuacacacguuaaaaucaaugauaagugucccucuaccggagaggcccaucuggcggaagagaacgaaggcgacaaugccugcaaaagaacauauuccgaccggggguggggaaacggcuguggccucuuugggaagggaagcauuguggcuugcgccaaguuuaccugcgcuaaaucuaugucccuguucgaggucgaucaaaccaagauccaguacgugauuagagcccagcugcacguuggcgccaaacaggagaauuggaacacagacaucaagacgcucaaauucgaugcucugagcgggucucaagaaguggaguuuaucggauacggcaaggcgacccuugaaugucagguccagacagccguggacuucgggaacuccuauauugcugagauggaaaccgagagcuggaucgucgaucgccagugggcccaagaccugacacucccuuggcaguccggaucuggcggcguguggcgggagaugcaccaucugguugaauuugagcccccucacgccgcuaccauuagagugcuugcccuggggaaucaggaaggaagccucaaaacggcgcugacaggcgcuaugcgcgucaccaaggauaccaacgacaauaaccuguacaagcuccaugggggacacguguccugccggguuaaacugagcgcccuuacacugaagggcaccucuuauaaaaucuguacagauaagauguucuuugugaaaaaucccacggacaccgggcacggcacagucgugaugcaagugaagguuuccaagggagccccgugccgcauuccugucaucguggcugaugaccucaccgccgcuaucaacaaaggcauucuggugacagucaaucccaucgccagcaccaacgacgaugaggugcuuauugaaguuaauccucccuucggggacucuuacaucauugugggaagaggcgauagccggcugacguaucaguggcauaaggagggguccucuaucggaaaacucuucacccagacaaugaagggcgucgagagacuggcggugaugggggacaccgccugggauuuuagcuccgcuggcggauucuuuacaagcguuggcaaagggauccacaccguguucggaucugccuuucagggccuguucgggggacucaacuggauuacgaaggucaucaugggcgcugugcugauuuggguugggaucaauacacgcaacaugaccauguccaugagcaugauucuugugggcgucaucaugauguuucugucucucggagugggcgccugaggacuaguggaagcauuuuccuggcugauuaaaagaaauuacucagcuauggucaucuguuccuguuagaaggcuaugcagcauauuauauacuaugcgcauguuaugaaaugcauaauaaaaaauuuuaaaaaaucuaaaagaucuaaaaaaaaaaaaaaaaaaaaaaaaaaaaaaaaaaaaaaaaaaaaaaaaaaaaaaaaaaaaaaaaugcaucccccccccccccccccccccccccccccccaaaggcucuuuucagagccaccagaauu

SEQ ID NO: 874 - RNA, 2525 nt, Artificial Sequence
  mRNA product Design d-5 comprising derived and/or modified sequence from YFV__NC_002031.1__SSjev-prME-XX (polyprotein: aa122-788) (opt5)
gggagagggcgcuuggcuugcaaggacccugagcugcggcauugaagcacacccaacccaacucgacugaagucagccucacugaaccggaucugagaaucuucucucucugggcuugccagggcucuccgaaccuagcuagcauccucuucaauuccaacuagaaagcuuaccaugggcaagagaagcgccggguccaucauguggcuggcuucucucgccguggucauugcgugcgcuggagccguuacgcuggugcggaaaaaccgcuggcuucugcucaaugugaccagcgaggaucuggggaagacauuuuccgucggaaccggcaacugcacaaccaauauucuggaagccaaauacuggugucccgacucuauggaguauaacugcccuaaucucagcccgagagaagaacccgaugacaucgauuguuggugcuacgggguggaaaacguucggguggcuuauggaaagugugacuccgccggccgcucuagacggagccgcagagcgauugaucugccuacacaugagaaucacggccuuaaaacccggcaagagaaguggaugacggggcgcaugggagaaagacagcugcagaagaucgagcggugguucguccgcaaccccuuuuucgcugugaccgcccucacaauugccuaccugguuggcuccaauaugacccagagaguggucaucgcccuucuggugcucgcuguggggccugcuuauagcgcccauugcaucggaauuacagaccgggauuuuaucgaaggcguccacgggggaaccuggguuucugcgacgcuggagcaagacaaaugugugacagugauggcccccgauaagccuucccuggacauuagccucgagaccgucgcuaucgauagaccggccgaagugcgcaaaguuugcuacaacgcugugcugacacaugucaagauuaaugacaaaugucccucuaccggcgaggcccaccuugcggaagagaacgaaggcgacaaugccugcaagcggaccuauuccgauagaggguggggaaacggcugugggcuguucggaaagggcagcaucguggcuugcgccaaauuuacaugcgcuaagucuaugucccucuucgagguugaccagacgaaaauucaguacgugauccgcgcccagcugcacgucggggccaagcaagagaauuggaacaccgauaucaaaacacuuaaguuugacgcucugagcggaucccaggaaguggaguucauuggcuacggcaaagcgacccucgaaugucagguccagacagccguggauuuugggaacucuuauaucgcugagauggaaaccgagagcuggauuguugaccggcaaugggcccaggaucugacgcugccuuggcaguccggaagcggcgggguguggagagagaugcaucaccucgucgaguucgagcccccucaugccgcuacaauccgcgugcuggcccuuggaaaucaagaaggcucucugaagaccgcgcucaccggggcuaugcggguuacaaaggacaccaacgauaauaaccuguacaaacuucacggcggacacguguccugcagagucaagcugagcgcccucacacugaaaggcacgucuuauaagauuuguaccgacaaaauguuuuucgugaagaaucccacagauaccgggcauggaacagugguuaugcaggucaaggugagcaaaggcgccccgugccgcaucccugugaucgucgcugacgaccugaccgccgcuauuaacaaggggauccucgugacgguuaaucccauugccuccaccaacgaugacgaggugcugaucgaagucaauccucccuucggagauucuuacauuaucgugggccggggagacagcagacuuacauaucaguggcacaaagagggcuccagcaucggaaagcuguuuacccagacaaugaaaggcguugagcgccucgcggugaugggggauaccgccugggacuucucuuccgcuggaggcuuuuucacgagcgucgggaaggggauucauacaguguuuggcucugccuuccaagggcuguuuggcggacugaacuggaucaccaagguuauuaugggcgcugugcuuaucugggucgggauuaauacacggaacaugaccauguccaugagcaugauccucgugggagugauuaugauguuccugucccugggcgucggggccgaucagggaugugcgaucaauuuuggcaaaugaggacuaguggaagcauuuuccuggcugauuaaaagaaauuacucagcuauggucaucuguuccuguuagaaggcuaugcagcauauuauauacuaugcgcauguuaugaaaugcauaauaaaaaauuuuaaaaaaucuaaaagaucuaaaaaaaaaaaaaaaaaaaaaaaaaaaaaaaaaaaaaaaaaaaaaaaaaaaaaaaaaaaaaaaaugcaucccccccccccccccccccccccccccccccaaaggcucuuuucagagccaccagaauu

SEQ ID NO: 875 - RNA, 2495 nt, Artificial Sequence
  mRNA product Design d-5 comprising derived and/or modified sequence from YFV__NC_002031.1__SSjev-prME (polyprotein: aa122-778) (opt5)
gggagagggcgcuuggcuugcaaggacccugagcugcggcauugaagcacacccaacccaacucgacugaagucagccucacugaaccggaucugagaaucuucucucucugggcuugccagggcucuccgaaccuagcuagcauccucuucaauuccaacuagaaagcuuaccaugggcaagagaagcgccggguccaucauguggcuggcuucucucgccguggucauugcgugcgcuggagccgugacccuggucagaaagaaccgguggcuccugcuuaauguuacaagcgaggaccugggcaaaacguucuccguggggaccggaaacugcacaaccaauauccucgaagccaaguacuggugucccgauucuauggaguauaacugcccuaaucugagcccgcgcgaggaacccgacgauauugacuguuggugcuacggcguggaaaacgucagaguggcuuaugggaaaugugauuccgccggacggucucgcagaagccggcgcgcgaucgaccuuccuacacacgagaaucauggccugaagaccagacaggagaaauggaugacagggcggaugggagaacgccaacuccagaagauugagagaugguuuguucggaaccccuucuuugcugugaccgcccugacgaucgccuaccuggucggcuccaauaugacccagcgcgugguuauugcucuccuggugcuugccgucggcccugcuuauucugcccacugcaucgggaucacagauagagacuucauugaaggagugcauggcgggaccugggugagcgcgacacuggagcaggauaagugugucaccguuauggcccccgacaaaccuucccucgauaucagccuggagacgguggcuauugaccggccggccgaagugcgcaaggucugcuacaacgcugugcuuacacacguuaaaaucaaugauaagugucccucuaccggagaggcccaucuggcggaagagaacgaaggcgacaaugccugcaaaagaacauauuccgaccggggguggggaaacggcuguggccucuuugggaagggaagcauuguggcuugcgccaaguuuaccugcgcuaaaucuaugucccuguucgaggucgaucaaaccaagauccaguacgugauuagagcccagcugcacguuggcgccaaacaggagaauuggaacacagacaucaagacgcucaaauucgaugcucugagcgggucucaagaaguggaguuuaucggauacggcaaggcgacccuugaaugucagguccagacagccguggacuucgggaacuccuauauugcugagauggaaaccgagagcuggaucgucgaucgccagugggcccaagaccugacacucccuuggcaguccggaucuggcggcguguggcgggagaugcaccaucugguugaauuugagcccccucacgccgcuaccauuagagugcuugcccuggggaaucaggaaggaagccucaaaacggcgcugacaggcgcuaugcgcgucaccaaggauaccaacgacaauaaccuguacaagcuccaugggggacacguguccugccggguuaaacugagcgcccuuacacugaagggcaccucuuauaaaaucuguacagauaagauguucuuugugaaaaaucccacggacaccgggcacggcacagucgugaugcaagugaagguuuccaagggagccccgugccgcauuccugucaucguggcugaugaccucaccgccgcuaucaacaaaggcauucuggugacagucaaucccaucgccagcaccaacgacgaugaggugcuuauugaaguuaauccucccuucggggacucuuacaucauugugggaagaggcgauagccggcugacguaucaguggcauaaggagggguccucuaucggaaaacucuucacccagacaaugaagggcgucgagagacuggcggugaugggggacaccgccugggauuuuagcuccgcuggcggauucuuuacaagcguuggcaaagggauccacaccguguucggaucugccuuucagggccuguucgggggacucaacuggauuacgaaggucaucaugggcgcugugcugauuuggguugggaucaauacacgcaacaugaccauguccaugagcaugauucuugugggcgucaucaugauguuucugucucucggagugggcgccugaggacuaguggaagcauuuuccuggcugauuaaaagaaauuacucagcuauggucaucuguuccuguuagaaggcuaugcagcauauuauauacuaugcgcauguuaugaaaugcauaauaaaaaauuuuaaaaaaucuaaaagaucuaaaaaaaaaaaaaaaaaaaaaaaaaaaaaaaaaaaaaaaaaaaaaaaaaaaaaaaaaaaaaaaaugcaucccccccccccccccccccccccccccccccaaaggcucuuuucagagccaccagaauu

SEQ ID NO: 876 - RNA, 2543 nt, Artificial Sequence
  mRNA product Design d-5 comprising derived and/or modified sequence from YFV__NC_002031.1__X-SS-prME-XX (polyprotein: aa92-788) (opt6)
gggagagggcgcuuggcuugcaaggacccugagcugcggcauugaagcacacccaacccaacucgacugaagucagccucacugaaccggaucugagaaucuucucucucugggcuugccagggcucuccgaaccuagcuagcauccucuucaauuccaacuagaaagcuuaccaugagaggauuaucaaguagaaaaagaagaucacaugauguacuaaccgugcaauuuuugaucuuagggaugcucuuaaugacaggagguguuacauuaguaagaaagaaucgauggcugcuuuuaaaugugacaucagaggauuuagggaaaacauuuucgguaggaacaggaaauuguacuacaaauauacuugaagcaaaauauuggugcccagacucuauggaauauaauuguccaaauuuaaguccuagagaagaaccugacgauauagauuguugguguuaugguguagaaaauguaagaguagcauacggcaaaugcgauagugcaggacguucuagacguucaaggagagccauagaucugcccacucacgaaaaucacggauugaaaacacgacaagaaaaauggaugacugggcgaaugggagaaagacaacuacagaaaauugaaagaugguucguuagaaauccauucuuugccguaacagcuuuaacaauagccuauuuaguagguaguaauaugacacaaagaguaguaauagcauugcuaguguuagcaguuggaccagcuuauagugcacauugcauaggaauaacagauagagacuuuauagaaggaguacacgggggaacuuggguaagugccacuuuagaacaagauaaauguguuacagugauggcgccagauaaaccaagucuggacauaaguuuggaaacaguagcgauugauagacccgcagaaguaagaaaaguuuguuauaaugcuguucuaacccauguuaaaauaaaugauaaaugcccuagcaccggagaagcccaucuagcagaagaaaaugaaggagauaacgcauguaaacgaacauacucagauagaggauggggcaacggauguggcuuguuuggaaaagguagcauaguagcaugcgcuaaauuuacaugcgcaaagucaaugucauuauuugaaguagaucaaacaaaaauacaauauguaauaagagcucaauuacacgugggugcaaaacaagaaaauuggaauacagacauaaagacacuaaaguucgacgcauuaaguggaucacaagagguagaauuuauaggguacggaaaagcgacuuuagagugucaaguccaaacagcaguagauuucgguaacucauacauagcagaaauggaaacugaaaguuggauaguagauagacaaugggcacaagacuugacacuaccuuggcaaucaggaagcggaggaguauggagagaaaugcaucauuuaguagaauuugaaccaccucaugcagcaacaauaagaguauuagcccuaggaaaccaagaaggaaguuuaaaaacagcacuaacaggagcuaugagaguaacaaaagauacaaaugacaacaaucuauacaaauuacacggaggacauguaagcugccggguaaaguugagcgcacuaacauuaaaaggaacgaguuauaaaauaugcacagauaaaauguucuuuguuaaaaauccuacagauaccggucauggaacaguaguaaugcaaguaaaaguaaguaaaggcgcucccuguagaauaccuguaauagucgcagacgauuuaaccgcagcaauaaauaaaggaauauuagucacgguaaacccaauagcgucaacaaaugaugaugaaguauuaauagaaguuaacccaccuuuuggagacaguuauauaauagucggaaggggugauaguagacuaacauaccaauggcauaaagaaggaagcucaauaggaaaauuauuuacucaaaccaugaaagguguagaaaggcuagcuguuaugggugacacagcaugggauuuuucaagcgcaggaggguucuuuacaucaguagguaaaggaauacauacaguauuuggaagugcauuucaaggauuauuuggugguuuaaauuggauaacaaaaguaauaaugggcgcaguuuuaauauggguagguauaaacacaagaaauaugacaaugucuaugaguaugauauuggucggaguaauaaugauguuuuuaucacuaggagugggugcagaucaagguugcgcuauuaauuuuggaaaaugaggacuaguggaagcauuuuccuggcugauuaaaagaaauuacucagcuauggucaucuguuccuguuagaaggcuaugcagcauauuauauacuaugcgcauguuaugaaaugcauaauaaaaaauuuuaaaaaaucuaaaagaucuaaaaaaaaaaaaaaaaaaaaaaaaaaaaaaaaaaaaaaaaaaaaaaaaaaaaaaaaaaaaaaaaugcaucccccccccccccccccccccccccccccccaaaggcucuuuucagagccaccagaauu

SEQ ID NO: 877 - RNA, 2480 nt, Artificial Sequence
  mRNA product Design d-5 comprising derived and/or modified sequence from YFV__NC_002031.1__SS-prME (polyprotein: M,aa104-778) (opt6)
gggagagggcgcuuggcuugcaaggacccugagcugcggcauugaagcacacccaacccaacucgacugaagucagccucacugaaccggaucugagaaucuucucucucugggcuugccagggcucuccgaaccuagcuagcauccucuucaauuccaacuagaaagcuuaccauggauguucuaacaguacaauuuuuaauauuagggauguuauuaaugacaggaggcguaacauuaguacgaaagaaucgauggcuauuacuaaacguuacgucugaagauuuaggaaaaacauuuagcguaggaacaggaaauugcaccacgaauaucuuagaagcaaaauauugguguccagauaguauggaauacaauuguccaaauuuaaguccuagagaggaacccgacgauauagauugcugguguuacggaguggaaaauguaagaguagcauauggaaaaugugacagcgcagguagaaguagaagaucacgacgagcaauugaucuacccacucaugagaaccauggacuaaaaacaagacaagaaaaauggaugacagguagaaugggcgaaagacaauuacagaaaauagaaagaugguuuguacgaaauccuuucuuugcugucacugcauuaacuauagcuuauuuaguaggaaguaacaugacucaaagaguaguaauagcacuauuaguacuagcaguaggaccagcuuacagugcacacuguauagggauaacggauagagauuuuauagaaggaguacauggggguacaugggugucugccacuuuagaacaagacaaauguguuacaguuauggccccagauaaacccucuuuagacauaucauuagaaacuguagcaauagauagaccggcggaagugagaaagguauguuauaaugcaguacuaacccauguaaaaauuaaugacaaaugcccaucaacaggagaggcucaucuagcugaagaaaaugaaggagacaaugcuugcaaacguacauauucagacaggggguggggaaauggauguggauuauuugguaaagggucaauaguagcaugugcaaaauuuacaugcgcaaaaaguaugagcuuauuugaaguagaucaaacaaaaauccaauauguaauuagagcucaacuucacguaggagcaaaacaagagaauuggaacacagauauaaaaacauuaaaauuugacgcuuugucuggaagucaagaagucgaauuuauuggcuauggaaaggcaacauuagaaugccaaguucaaaccgcaguagauuuuggaaauucauacauagcagaaauggagacugaaaguuggauaguagauagacagugggcucaagaccuaacuuuaccauggcaaucaggaaguggugguguauggagagaaaugcaucauuuaguagaauuugaaccaccacaugcagcaacaauuagaguacuagcauuaggaaaucaagaagguaguuuaaagacagcgcuuaccggagcaaugagaguuacaaaagauacuaaugacaauaauuuauauaaacuucauggaggacauguuagcuguagagucaaauuaagugcauuaacacucaaaggaacaucauacaaaauauguacagauaaaauguuuuucgucaagaauccaacagauacaggacauggaacaguuguaaugcaaguaaaaguaucaaaaggagcaccuugcagaauaccaguaauaguagcagaugauuuaacagccgcaauuaauaaagggauauuaguaacaguaaacccuauagcaaguacaaaugaugaugaagucuugauagaaguaaauccaccauuuggagauucguauauaauagucggaagaggagauagucgauuaacauaucaauggcauaaagaagguucaucaauaggaaaauuauuuacacaaaccaugaaaggaguugaaagauuagcuguaaugggggacacagcuugggauuuuucuagcgcaggaggauucuuuacauccguaggaaaagguauacacacaguauuuggcucagcauuccaaggguuauuuggugguuuaaauuggauaacaaaagugauuaugggagcagugcuaaucuggguaggaauaaauacaagaaauaugacaaugaguaugagcaugauucucguaggaguaauaaugauguuccuuaguuugggaguuggcgcuugaggacuaguggaagcauuuuccuggcugauuaaaagaaauuacucagcuauggucaucuguuccuguuagaaggcuaugcagcauauuauauacuaugcgcauguuaugaaaugcauaauaaaaaauuuuaaaaaaucuaaaagaucuaaaaaaaaaaaaaaaaaaaaaaaaaaaaaaaaaaaaaaaaaaaaaaaaaaaaaaaaaaaaaaaaugcaucccccccccccccccccccccccccccccccaaaggcucuuuucagagccaccagaauu

SEQ ID NO: 878 - RNA, 2507 nt, Artificial Sequence
  mRNA product Design d-5 comprising derived and/or modified sequence from YFV__NC_002031.1__SSIgE-prME-XX (polyprotein: aa122-788) (opt6)
gggagagggcgcuuggcuugcaaggacccugagcugcggcauugaagcacacccaacccaacucgacugaagucagccucacugaaccggaucugagaaucuucucucucugggcuugccagggcucuccgaaccuagcuagcauccucuucaauuccaacuagaaagcuuaccauggacuggacauggauauuauuuuuaguagcagcagcaacaagaguacauucaguuacauuaguaagaaagaaucgauggcugcuuuuaaaugugacaucagaggauuuagggaaaacauuuucgguaggaacaggaaauuguacuacaaauauacuugaagcaaaauauuggugcccagacucuauggaauauaauuguccaaauuuaaguccuagagaagaaccugacgauauagauuguugguguuaugguguagaaaauguaagaguagcauacggcaaaugcgauagugcaggacguucuagacguucaaggagagccauagaucugcccacucacgaaaaucacggauugaaaacacgacaagaaaaauggaugacugggcgaaugggagaaagacaacuacagaaaauugaaagaugguucguuagaaauccauucuuugccguaacagcuuuaacaauagccuauuuaguagguaguaauaugacacaaagaguaguaauagcauugcuaguguuagcaguuggaccagcuuauagugcacauugcauaggaauaacagauagagacuuuauagaaggaguacacgggggaacuuggguaagugccacuuuagaacaagauaaauguguuacagugauggcgccagauaaaccaagucuggacauaaguuuggaaacaguagcgauugauagacccgcagaaguaagaaaaguuuguuauaaugcuguucuaacccauguuaaaauaaaugauaaaugcccuagcaccggagaagcccaucuagcagaagaaaaugaaggagauaacgcauguaaacgaacauacucagauagaggauggggcaacggauguggcuuguuuggaaaagguagcauaguagcaugcgcuaaauuuacaugcgcaaagucaaugucauuauuugaaguagaucaaacaaaaauacaauauguaauaagagcucaauuacacgugggugcaaaacaagaaaauuggaauacagacauaaagacacuaaaguucgacgcauuaaguggaucacaagagguagaauuuauaggguacggaaaagcgacuuuagagugucaaguccaaacagcaguagauuucgguaacucauacauagcagaaauggaaacugaaaguuggauaguagauagacaaugggcacaagacuugacacuaccuuggcaaucaggaagcggaggaguauggagagaaaugcaucauuuaguagaauuugaaccaccucaugcagcaacaauaagaguauuagcccuaggaaaccaagaaggaaguuuaaaaacagcacuaacaggagcuaugagaguaacaaaagauacaaaugacaacaaucuauacaaauuacacggaggacauguaagcugccggguaaaguugagcgcacuaacauuaaaaggaacgaguuauaaaauaugcacagauaaaauguucuuuguuaaaaauccuacagauaccggucauggaacaguaguaaugcaaguaaaaguaaguaaaggcgcucccuguagaauaccuguaauagucgcagacgauuuaaccgcagcaauaaauaaaggaauauuagucacgguaaacccaauagcgucaacaaaugaugaugaaguauuaauagaaguuaacccaccuuuuggagacaguuauauaauagucggaaggggugauaguagacuaacauaccaauggcauaaagaaggaagcucaauaggaaaauuauuuacucaaaccaugaaagguguagaaaggcuagcuguuaugggugacacagcaugggauuuuucaagcgcaggaggguucuuuacaucaguagguaaaggaauacauacaguauuuggaagugcauuucaaggauuauuuggugguuuaaauuggauaacaaaaguaauaaugggcgcaguuuuaauauggguagguauaaacacaagaaauaugacaaugucuaugaguaugauauuggucggaguaauaaugauguuuuuaucacuaggagugggugcagaucaagguugcgcuauuaauuuuggaaaaugaggacuaguggaagcauuuuccuggcugauuaaaagaaauuacucagcuauggucaucuguuccuguuagaaggcuaugcagcauauuauauacuaugcgcauguuaugaaaugcauaauaaaaaauuuuaaaaaaucuaaaagaucuaaaaaaaaaaaaaaaaaaaaaaaaaaaaaaaaaaaaaaaaaaaaaaaaaaaaaaaaaaaaaaaaugcaucccccccccccccccccccccccccccccccaaaggcucuuuucagagccaccagaauu

SEQ ID NO: 879 - RNA, 2477 nt, Artificial Sequence
  mRNA product Design d-5 comprising derived and/or modified sequence from YFV__NC_002031.1__SSIgE-prME (polyprotein: aa122-778) (opt6)
gggagagggcgcuuggcuugcaaggacccugagcugcggcauugaagcacacccaacccaacucgacugaagucagccucacugaaccggaucugagaaucuucucucucugggcuugccagggcucuccgaaccuagcuagcauccucuucaauuccaacuagaaagcuuaccauggacuggacauggauauuauuuuuaguagcagcagcaacaagaguacauucaguaacauuagucagaaagaacagaugguuauuacugaacguaacaagugaagacuuaggaaaaacauuuaguguaggcacaggaaauugcacaacaaauauacuugaagcaaaauauugguguccagauagcauggaauauaauuguccaaauuuaucaccuagagaggaacccgaugauauagauuguugguguuauggaguugaaaacgugcgaguagcauaugguaaaugugauagcgcaggaagaaguagaagaaguagaagggcaauagacuuaccaacucaugaaaaccauggauuaaaaacaagacaggaaaaauggaugacaggaagaaugggagaacgacaauuacagaaaauagaaagaugguucguaagaaauccauucuuugcaguaacagcauuaacaauagcauaucuaguuggaaguaacaugacucaaagaguaguaauagcauuguuaguacuagcaguaggaccggcuuauagcgcacauuguauagggauaacagauagagacuuuauagaaggagugcacgguggaacauggguuucagcaacgcuagagcaagauaaauguguaacgguaauggcgccggauaaaccaagccuugacauaucacuagaaacgguugcaaucgaucgaccagccgaaguaagaaaaguaugcuauaaugcggucuuaacacacguaaaaauaaaugauaaauguccuucaacgggagaagcacauuuagcagaagaaaacgaaggagacaacgcguguaaaagaacauauucagauaggggcuggggaaacggcugcgguuuauuuggaaaaggaaguauaguagcaugcgcaaaauuuacuugcgcaaaaaguaugaguuuauucgaaguugaucaaacaaagauacaauauguaauacgagcacaauuacauguaggugcaaagcaagaaaauuggaauacagacauaaaaacauugaaauuugacgcuuugaguggaucacaagaaguagaauuuauaggauacggaaaagcuacauuagaaugucaaguacaaacugcaguagauuuuggaaauucguauauagcagaaauggaaacugaaucauggauuguagauaggcaaugggcacaagauuuaaccuugccauggcaaagcggaagcggggguguauggcgggaaaugcaucauuuaguagaguucgaacccccacacgcggcuaccauaagaguacuagcauuaggaaaucaagaagggagucucaagacagcacucacaggugcaaugcgaguaacgaaagauacaaaugacaauaaucuauacaaacuacacggaggacauguaucuugcagaguaaaauuaucugcauuaacacuaaaagggacaaguuacaaaauuuguacagauaagauguucuuugucaaaaacccaacagacacgggacacggaacgguagucaugcaaguuaaaguaagcaaaggagcgccaugcagaauaccaguaaucgucgcagaugauuuaacagccgcaauaaauaaagguauauuaguaacgguaaauccaauagcgaguaccaaugaugaugaaguacuaauagaagugaacccaccauuuggugauagcuauauaauaguagggcgaggagauucaagauuaacauaucaauggcauaaagaagguaguaguauaggaaaauuauuuacacaaacuaugaaaggcguagaaagacuagcagucaugggagauacagcaugggauuucucaagugcaggcggauuuuucacaagcgucggaaaaggaauacauacaguguuugguagugcguuucaaggauuauucggaggacuaaauuggauaacgaaaguaauuaugggagcaguucucauaugggucggaauaaauacaaggaacaugacuaugaguaugagcaugauccuaguaggaguaauaaugauguuucuaagccuaggcguuggugcaugaggacuaguggaagcauuuuccuggcugauuaaaagaaauuacucagcuauggucaucuguuccuguuagaaggcuaugcagcauauuauauacuaugcgcauguuaugaaaugcauaauaaaaaauuuuaaaaaaucuaaaagaucuaaaaaaaaaaaaaaaaaaaaaaaaaaaaaaaaaaaaaaaaaaaaaaaaaaaaaaaaaaaaaaaaugcaucccccccccccccccccccccccccccccccaaaggcucuuuucagagccaccagaauu

SEQ ID NO: 880 - RNA, 2525 nt, Artificial Sequence
  mRNA product Design d-5 comprising derived and/or modified sequence from YFV__NC_002031.1__SSjev-prME-XX (polyprotein: aa122-788) (opt6)
gggagagggcgcuuggcuugcaaggacccugagcugcggcauugaagcacacccaacccaacucgacugaagucagccucacugaaccggaucugagaaucuucucucucugggcuugccagggcucuccgaaccuagcuagcauccucuucaauuccaacuagaaagcuuaccaugggaaaaagaagugcaggaaguauaaugugguuggcaaguuuagcaguaguaauagcaugugcaggagcaguuacauuaguaagaaagaaucgauggcugcuuuuaaaugugacaucagaggauuuagggaaaacauuuucgguaggaacaggaaauuguacuacaaauauacuugaagcaaaauauuggugcccagacucuauggaauauaauuguccaaauuuaaguccuagagaagaaccugacgauauagauuguugguguuaugguguagaaaauguaagaguagcauacggcaaaugcgauagugcaggacguucuagacguucaaggagagccauagaucugcccacucacgaaaaucacggauugaaaacacgacaagaaaaauggaugacugggcgaaugggagaaagacaacuacagaaaauugaaagaugguucguuagaaauccauucuuugccguaacagcuuuaacaauagccuauuuaguagguaguaauaugacacaaagaguaguaauagcauugcuaguguuagcaguuggaccagcuuauagugcacauugcauaggaauaacagauagagacuuuauagaaggaguacacgggggaacuuggguaagugccacuuuagaacaagauaaauguguuacagugauggcgccagauaaaccaagucuggacauaaguuuggaaacaguagcgauugauagacccgcagaaguaagaaaaguuuguuauaaugcuguucuaacccauguuaaaauaaaugauaaaugcccuagcaccggagaagcccaucuagcagaagaaaaugaaggagauaacgcauguaaacgaacauacucagauagaggauggggcaacggauguggcuuguuuggaaaagguagcauaguagcaugcgcuaaauuuacaugcgcaaagucaaugucauuauuugaaguagaucaaacaaaaauacaauauguaauaagagcucaauuacacgugggugcaaaacaagaaaauuggaauacagacauaaagacacuaaaguucgacgcauuaaguggaucacaagagguagaauuuauaggguacggaaaagcgacuuuagagugucaaguccaaacagcaguagauuucgguaacucauacauagcagaaauggaaacugaaaguuggauaguagauagacaaugggcacaagacuugacacuaccuuggcaaucaggaagcggaggaguauggagagaaaugcaucauuuaguagaauuugaaccaccucaugcagcaacaauaagaguauuagcccuaggaaaccaagaaggaaguuuaaaaacagcacuaacaggagcuaugagaguaacaaaagauacaaaugacaacaaucuauacaaauuacacggaggacauguaagcugccggguaaaguugagcgcacuaacauuaaaaggaacgaguuauaaaauaugcacagauaaaauguucuuuguuaaaaauccuacagauaccggucauggaacaguaguaaugcaaguaaaaguaaguaaaggcgcucccuguagaauaccuguaauagucgcagacgauuuaaccgcagcaauaaauaaaggaauauuagucacgguaaacccaauagcgucaacaaaugaugaugaaguauuaauagaaguuaacccaccuuuuggagacaguuauauaauagucggaaggggugauaguagacuaacauaccaauggcauaaagaaggaagcucaauaggaaaauuauuuacucaaaccaugaaagguguagaaaggcuagcuguuaugggugacacagcaugggauuuuucaagcgcaggaggguucuuuacaucaguagguaaaggaauacauacaguauuuggaagugcauuucaaggauuauuuggugguuuaaauuggauaacaaaaguaauaaugggcgcaguuuuaauauggguagguauaaacacaagaaauaugacaaugucuaugaguaugauauuggucggaguaauaaugauguuuuuaucacuaggagugggugcagaucaagguugcgcuauuaauuuuggaaaaugaggacuaguggaagcauuuuccuggcugauuaaaagaaauuacucagcuauggucaucuguuccuguuagaaggcuaugcagcauauuauauacuaugcgcauguuaugaaaugcauaauaaaaaauuuuaaaaaaucuaaaagaucuaaaaaaaaaaaaaaaaaaaaaaaaaaaaaaaaaaaaaaaaaaaaaaaaaaaaaaaaaaaaaaaaugcaucccccccccccccccccccccccccccccccaaaggcucuuuucagagccaccagaauu

SEQ ID NO: 881 - RNA, 2495 nt, Artificial Sequence
  mRNA product Design d-5 comprising derived and/or modified sequence from YFV__NC_002031.1__SSjev-prME (polyprotein: aa122-778) (opt6)
gggagagggcgcuuggcuugcaaggacccugagcugcggcauugaagcacacccaacccaacucgacugaagucagccucacugaaccggaucugagaaucuucucucucugggcuugccagggcucuccgaaccuagcuagcauccucuucaauuccaacuagaaagcuuaccaugggaaaaagaagugcaggaaguauaaugugguuggcaaguuuagcaguaguaauagcaugugcaggagcaguaacauuagucagaaagaacagaugguuauuacugaacguaacaagugaagacuuaggaaaaacauuuaguguaggcacaggaaauugcacaacaaauauacuugaagcaaaauauugguguccagauagcauggaauauaauuguccaaauuuaucaccuagagaggaacccgaugauauagauuguugguguuauggaguugaaaacgugcgaguagcauaugguaaaugugauagcgcaggaagaaguagaagaaguagaagggcaauagacuuaccaacucaugaaaaccauggauuaaaaacaagacaggaaaaauggaugacaggaagaaugggagaacgacaauuacagaaaauagaaagaugguucguaagaaauccauucuuugcaguaacagcauuaacaauagcauaucuaguuggaaguaacaugacucaaagaguaguaauagcauuguuaguacuagcaguaggaccggcuuauagcgcacauuguauagggauaacagauagagacuuuauagaaggagugcacgguggaacauggguuucagcaacgcuagagcaagauaaauguguaacgguaauggcgccggauaaaccaagccuugacauaucacuagaaacgguugcaaucgaucgaccagccgaaguaagaaaaguaugcuauaaugcggucuuaacacacguaaaaauaaaugauaaauguccuucaacgggagaagcacauuuagcagaagaaaacgaaggagacaacgcguguaaaagaacauauucagauaggggcuggggaaacggcugcgguuuauuuggaaaaggaaguauaguagcaugcgcaaaauuuacuugcgcaaaaaguaugaguuuauucgaaguugaucaaacaaagauacaauauguaauacgagcacaauuacauguaggugcaaagcaagaaaauuggaauacagacauaaaaacauugaaauuugacgcuuugaguggaucacaagaaguagaauuuauaggauacggaaaagcuacauuagaaugucaaguacaaacugcaguagauuuuggaaauucguauauagcagaaauggaaacugaaucauggauuguagauaggcaaugggcacaagauuuaaccuugccauggcaaagcggaagcggggguguauggcgggaaaugcaucauuuaguagaguucgaacccccacacgcggcuaccauaagaguacuagcauuaggaaaucaagaagggagucucaagacagcacucacaggugcaaugcgaguaacgaaagauacaaaugacaauaaucuauacaaacuacacggaggacauguaucuugcagaguaaaauuaucugcauuaacacuaaaagggacaaguuacaaaauuuguacagauaagauguucuuugucaaaaacccaacagacacgggacacggaacgguagucaugcaaguuaaaguaagcaaaggagcgccaugcagaauaccaguaaucgucgcagaugauuuaacagccgcaauaaauaaagguauauuaguaacgguaaauccaauagcgaguaccaaugaugaugaaguacuaauagaagugaacccaccauuuggugauagcuauauaauaguagggcgaggagauucaagauuaacauaucaauggcauaaagaagguaguaguauaggaaaauuauuuacacaaacuaugaaaggcguagaaagacuagcagucaugggagauacagcaugggauuucucaagugcaggcggauuuuucacaagcgucggaaaaggaauacauacaguguuugguagugcguuucaaggauuauucggaggacuaaauuggauaacgaaaguaauuaugggagcaguucucauaugggucggaauaaauacaaggaacaugacuaugaguaugagcaugauccuaguaggaguaauaaugauguuucuaagccuaggcguuggugcaugaggacuaguggaagcauuuuccuggcugauuaaaagaaauuacucagcuauggucaucuguuccuguuagaaggcuaugcagcauauuauauacuaugcgcauguuaugaaaugcauaauaaaaaauuuuaaaaaaucuaaaagaucuaaaaaaaaaaaaaaaaaaaaaaaaaaaaaaaaaaaaaaaaaaaaaaaaaaaaaaaaaaaaaaaaugcaucccccccccccccccccccccccccccccccaaaggcucuuuucagagccaccagaauu

SEQ ID NO: 882 - RNA, 2543 nt, Artificial Sequence
  mRNA product Design d-5 comprising derived and/or modified sequence from YFV__NC_002031.1__X-SS-prME-XX (polyprotein: aa92-788) (opt11)
gggagagggcgcuuggcuugcaaggacccugagcugcggcauugaagcacacccaacccaacucgacugaagucagccucacugaaccggaucugagaaucuucucucucugggcuugccagggcucuccgaaccuagcuagcauccucuucaauuccaacuagaaagcuuaccaugcggggacuaagcagcagaaaaagacgcagccacgaugugcucaccgugcaauuccucauacuggggaugcuccuaaugaccggaggcgugacccuaguaaggaaaaacagauggcuacuacuaaacguaaccucagaagaucuaggaaagacauuuucagucggcacaggcaacugcacaaccaacauacuagaagcaaaauauuggugcccagacagcauggaauacaacugucccaaccucagcccaagagaggaaccagacgacauagacugcugguguuacggaguagaaaacguaagaguggcauacggcaaaugcgacagcgcaggcaggagccgaagaucccgcagagccaucgacuugcccacgcacgaaaaccacggccucaaaacacgacaagaaaaauggaugacagggcgaaugggagaacgacagcuccagaaaauagaacgaugguucguccggaacccguucuucgcaguaacggcacuaacaaucgcauaccucguaggcagcaacaugacacaaagaguggucaucgcgcuacucguacuagcaguggggcccgcauacagugcacacugcauaggaaucacagaccgugacuucaucgaaggcguacacggaggaacguggguaagcgcgacacuggaacaagacaaaugcgugacaguaauggcaccagacaaaccaagccuagacauaucccuagaaacggucgccaucgaccgucccgcagaaguacgaaagguaugcuauaaugcaguccucacacacgucaaaauaaacgacaaaugccccagcacgggcgaagcacaccucgccgaagaaaacgaaggggauaacgcgugcaaacgcaccuacuccgacaggggauggggcaacggaugcggacuguucggaaaaggauccauagucgcaugcgcaaaauuuaccugcgcaaaaagcaugagcuuguucgagguagaccaaacgaagauccaauacguaauccgagcucaacuacacguuggggccaagcaagagaacuggaauacggacaucaaaacacuaaaauucgacgcacucuccggcucacaagaagucgaguucaucggcuacggcaaagcaacacuagaaugccaaguacaaacagcgguggacuucggcaacagcuacauagcagaaauggaaacagaaagcuggauaguagaccgacaaugggcacaagaccuaacucugccauggcaaagcggcucaggaggaguguggagagagaugcaccaccugguagaguucgaacccccacacgcagcaacaauaaggguacuggcacuaggcaaccaagaaggcagccuaaaaaccgcacucacaggagccaugcgcgugacgaaggacaccaacgacaacaaccucuacaaacuccacggagggcacguauccugccgcguaaaacuaucagcacuaacgcuaaaaggaacaagcuacaaaauaugcacagacaaaauguucuucgucaaaaaccccacagacacaggccacggcacagucguaaugcaagugaaggucagcaagggggcccccugccgaaucccagucauaguggcagacgaccucacggccgccaucaacaaagggauccugguaacagugaacccaauagcaucgaccaacgacgacgaaguccucauagaagugaaucccccguucggcgacagcuacaucaucguaggacgcggcgacucccgacugacguaccaauggcauaaagaaggcagcagcauuggaaaacuauucacccaaaccaugaagggcgucgaaagacucgcggugaugggagacaccgcaugggacuucucgagcgcaggcggcuucuucacaagcguaggaaaagggauucacacaguauucggauccgcauuccaaggccucuucgggggacuaaacuggauaacgaaaguaauaaugggagcaguucucauauggguaggaaucaacacacgaaacaugacaauguccaugucaaugauacucguaggcguaaucaugauguuucugucacucggagugggagcagaccaagguugcgccauaaacuucggcaagugaggacuaguggaagcauuuuccuggcugauuaaaagaaauuacucagcuauggucaucuguuccuguuagaaggcuaugcagcauauuauauacuaugcgcauguuaugaaaugcauaauaaaaaauuuuaaaaaaucuaaaagaucuaaaaaaaaaaaaaaaaaaaaaaaaaaaaaaaaaaaaaaaaaaaaaaaaaaaaaaaaaaaaaaaaugcaucccccccccccccccccccccccccccccccaaaggcucuuuucagagccaccagaauu

SEQ ID NO: 883 - RNA, 2480 nt, Artificial Sequence
  mRNA product Design d-5 comprising derived and/or modified sequence from YFV__NC_002031.1__SS-prME (polyprotein: M,aa104-778) (opt11)
gggagagggcgcuuggcuugcaaggacccugagcugcggcauugaagcacacccaacccaacucgacugaagucagccucacugaaccggaucugagaaucuucucucucugggcuugccagggcucuccgaaccuagcuagcauccucuucaauuccaacuagaaagcuuaccauggacguccuuacgguacaauuccuaauacuaggaaugcuucucaugaccgggggcgucacccuaguccggaaaaacagauggcuacugcuaaauguuacaagcgaagaccuuggcaagacauucagcguaggcacgggcaacuguacaaccaacauacuagaagcgaaauacuggugcccagacuccauggaguacaacugccccaaccuaagcccacgggaagaacccgacgacauagacugcugguguuacggggucgaaaacguccgcgucgcauacgggaaaugcgauagcgcaggccgcaguagacgcucccgccgcgccauagaccuaccaacgcacgagaaccacggccucaaaacucgccaagaaaaauggaugacagggcgaaugggugaacgccaacuacagaagaucgaaaggugguucgucaggaacccauucuucgcagugaccgcacuaacgauagccuaccuagugggaucaaacaugacgcaacgagucgugaucgcacuccuaguacuggccguaggaccggccuacuccgcgcacugcaucggcauaacggauagggacuucauugaaggaguacauggcggcacgugggucagcgcgacacucgaacaagacaaaugcguaaccgugauggcacccgacaaaccgagucuugacauaagccuggaaacgguagcgauagaucguccagccgaaguaagaaaaguaugcuacaacgcaguccuaacacacguaaaaauaaacgacaaaugcccaagcacaggggaagcccaccucgcagaagagaacgaaggcgacaacgcaugcaaacgcacauacuccgacaggggaugggggaauggcugcggacuauucgggaaaggaagcaucgucgcgugcgccaaauucacaugcgccaagagcaugagccuguucgaagucgaccaaacaaaaauccaauacguaauacgcgcgcaacugcacguaggagcgaaacaggaaaacuggaacacggacauuaaaacccucaaauucgacgcgcucucaggaucacaagaagucgaguucaucggcuacggcaaggcaacgcucgaaugccaaguacaaacagcaguagacuucggaaacagcuacauugccgagauggaaaccgagagcuggauagucgacagacaaugggcccaagaccuaacccugccauggcaaucaggcuccgggggcgucuggcgagagaugcaccaccuaguagaguucgaaccaccccacgccgccacgaucagaguacuggcccugggcaaccaagaaggcucacucaagacggcgcucacaggagcaaugagggucacgaaagacaccaacgacaacaaccucuacaaacuacacggagggcacgugagcugccggguaaaacugagcgcacucacucugaagggaacaagcuacaagauaugcaccgacaaaauguucuucgugaaaaacccaaccgacacuggacacggcacggucguuaugcaagucaagguaucaaaaggagccccaugcagaaucccaguaauaguagcggacgaccuaacagccgccauaaacaaaggaauccuagucacgguaaauccgauagcaucgaccaacgacgacgaaguacuaauagaagugaacccaccauucggcgacagcuacauaauagucgggagaggcgacucgcgacuaaccuaccaauggcacaaggaagggagcucuaucgggaaacuauucacccaaacgaugaagggcguagaaaggcucgcagucaugggcgacaccgcaugggacuucuccagcgcgggaggcuucuuuacuucagugggaaaagggauacacaccgucuucggcagcgcauuccagggccuauucggcggguuaaacuggaucacgaaagugauaaugggggcaguucucaucugggucggaauaaacacacguaacaugaccaugagcaugagcaugauccuagucggggucauaaugauguucuugagcuugggaguaggugcaugaggacuaguggaagcauuuuccuggcugauuaaaagaaauuacucagcuauggucaucuguuccuguuagaaggcuaugcagcauauuauauacuaugcgcauguuaugaaaugcauaauaaaaaauuuuaaaaaaucuaaaagaucuaaaaaaaaaaaaaaaaaaaaaaaaaaaaaaaaaaaaaaaaaaaaaaaaaaaaaaaaaaaaaaaaugcaucccccccccccccccccccccccccccccccaaaggcucuuuucagagccaccagaauu

SEQ ID NO: 884 - RNA, 2507 nt, Artificial Sequence
  mRNA product Design d-5 comprising derived and/or modified sequence from YFV__NC_002031.1__SSIgE-prME-XX (polyprotein: aa122-788) (opt11)
gggagagggcgcuuggcuugcaaggacccugagcugcggcauugaagcacacccaacccaacucgacugaagucagccucacugaaccggaucugagaaucuucucucucugggcuugccagggcucuccgaaccuagcuagcauccucuucaauuccaacuagaaagcuuaccauggauuggacguggauacucuuucucguggccgcggccacgcgcgugcacucggugacccuaguaaggaaaaacagauggcuacuacuaaacguaaccucagaagaucuaggaaagacauuuucagucggcacaggcaacugcacaaccaacauacuagaagcaaaauauuggugcccagacagcauggaauacaacugucccaaccucagcccaagagaggaaccagacgacauagacugcugguguuacggaguagaaaacguaagaguggcauacggcaaaugcgacagcgcaggcaggagccgaagaucccgcagagccaucgacuugcccacgcacgaaaaccacggccucaaaacacgacaagaaaaauggaugacagggcgaaugggagaacgacagcuccagaaaauagaacgaugguucguccggaacccguucuucgcaguaacggcacuaacaaucgcauaccucguaggcagcaacaugacacaaagaguggucaucgcgcuacucguacuagcaguggggcccgcauacagugcacacugcauaggaaucacagaccgugacuucaucgaaggcguacacggaggaacguggguaagcgcgacacuggaacaagacaaaugcgugacaguaauggcaccagacaaaccaagccuagacauaucccuagaaacggucgccaucgaccgucccgcagaaguacgaaagguaugcuauaaugcaguccucacacacgucaaaauaaacgacaaaugccccagcacgggcgaagcacaccucgccgaagaaaacgaaggggauaacgcgugcaaacgcaccuacuccgacaggggauggggcaacggaugcggacuguucggaaaaggauccauagucgcaugcgcaaaauuuaccugcgcaaaaagcaugagcuuguucgagguagaccaaacgaagauccaauacguaauccgagcucaacuacacguuggggccaagcaagagaacuggaauacggacaucaaaacacuaaaauucgacgcacucuccggcucacaagaagucgaguucaucggcuacggcaaagcaacacuagaaugccaaguacaaacagcgguggacuucggcaacagcuacauagcagaaauggaaacagaaagcuggauaguagaccgacaaugggcacaagaccuaacucugccauggcaaagcggcucaggaggaguguggagagagaugcaccaccugguagaguucgaacccccacacgcagcaacaauaaggguacuggcacuaggcaaccaagaaggcagccuaaaaaccgcacucacaggagccaugcgcgugacgaaggacaccaacgacaacaaccucuacaaacuccacggagggcacguauccugccgcguaaaacuaucagcacuaacgcuaaaaggaacaagcuacaaaauaugcacagacaaaauguucuucgucaaaaaccccacagacacaggccacggcacagucguaaugcaagugaaggucagcaagggggcccccugccgaaucccagucauaguggcagacgaccucacggccgccaucaacaaagggauccugguaacagugaacccaauagcaucgaccaacgacgacgaaguccucauagaagugaaucccccguucggcgacagcuacaucaucguaggacgcggcgacucccgacugacguaccaauggcauaaagaaggcagcagcauuggaaaacuauucacccaaaccaugaagggcgucgaaagacucgcggugaugggagacaccgcaugggacuucucgagcgcaggcggcuucuucacaagcguaggaaaagggauucacacaguauucggauccgcauuccaaggccucuucgggggacuaaacuggauaacgaaaguaauaaugggagcaguucucauauggguaggaaucaacacacgaaacaugacaauguccaugucaaugauacucguaggcguaaucaugauguuucugucacucggagugggagcagaccaagguugcgccauaaacuucggcaagugaggacuaguggaagcauuuuccuggcugauuaaaagaaauuacucagcuauggucaucuguuccuguuagaaggcuaugcagcauauuauauacuaugcgcauguuaugaaaugcauaauaaaaaauuuuaaaaaaucuaaaagaucuaaaaaaaaaaaaaaaaaaaaaaaaaaaaaaaaaaaaaaaaaaaaaaaaaaaaaaaaaaaaaaaaugcaucccccccccccccccccccccccccccccccaaaggcucuuuucagagccaccagaauu

SEQ ID NO: 885 - RNA, 2477 nt, Artificial Sequence
  mRNA product Design d-5 comprising derived and/or modified sequence from YFV__NC_002031.1__SSIgE-prME (polyprotein: aa122-778) (opt11)
gggagagggcgcuuggcuugcaaggacccugagcugcggcauugaagcacacccaacccaacucgacugaagucagccucacugaaccggaucugagaaucuucucucucugggcuugccagggcucuccgaaccuagcuagcauccucuucaauuccaacuagaaagcuuaccauggauuggacguggauacucuuucucguggccgcggccacgcgcgugcacucggugacccuaguccgcaaaaacagauggcuacuacuaaacguaacaagcgaagaccugggcaaaacauucagcguuggcacaggcaauugcacgacaaacauacucgaagcaaaauacuggugccccgacagcauggaauacaacugcccaaaucuaagcccacgcgaagaaccagacgacaucgacuguuggugcuacggagucgaaaacgugagggucgcauacgguaaaugcgacagcgcuggcagaagcagacgcucccgacgagccauugaccucccuacccacgaaaaccacggccuaaaaacccggcaggaaaaauggaugacaggccggaugggagaacgccaacuacagaaaauagagaggugguuuguaagaaacccauucuucgccguaaccgcgcucaccaucgcuuaccucguaggaucaaacaugacgcaaagaguagugaucgcgcuacucguacuagcgguaggccccgccuacagcgcacacugcaucggcaucacugacagggacuucauagaaggcguccacgggggcacguggguuagcgccacacucgaacaagacaaaugcgucacagugauggcaccagacaaacccucacuagacaucucacuagaaaccgucgcaaucgaccgcccagcagaagucaggaaagugugcuacaacgccgucuuaacccacguaaaaauaaaugauaaaugcccaagcacgggagaggcacaccuagcggaagaaaacgaaggcgacaacgcgugcaaacguaccuacagcgacagaggguggggcaacggaugcggcuuauucggaaaaggaaguaucguagcaugcgcaaaauuuaccugcgccaaaagcaugucccuauucgaaguagaucaaacaaaaauacaauacgucauccgagcccaacuacacgugggggcaaaacaagaaaacuggaacaccgacaucaaaacacucaaauucgaugcccuaagcggcucccaagaaguagaguucaucgguuacggcaaggccacgcucgagugccaaguccaaacagcaguagacuucgggaacucauacaucgccgagauggaaacggaaucauggauugucgacagacaaugggcacaagaccuaacacuaccauggcaaucaggcagcggaggggucuggcgagaaaugcaccaccuaguagaguucgaacccccacacgccgcaacaauccgaguacuagcccucggaaaccaagaaggaucacuaaaaaccgcacucaccggcgcaaugcgcguaacaaaagauacaaacgacaacaaccuauacaaacuacacggcggacacgucagcugccgcgucaaacuauccgcccuaacacuaaaaggaacaagcuacaaaauaugcacagacaaaauguucuucgucaaaaauccgacugacacgggccacggcacagucguaaugcaaguaaaagucucaaaaggcgcaccaugcagaaucccaguaaucgucgccgaugaccuaacagccgcaaucaacaagggcauccucguaacaguaaaccccauagccagcaccaacgacgacgaaguccuaaucgaagucaacccacccuucggagacagcuacauaauaguaggacgaggggacucacgccuaaccuaccaauggcacaaagaaggauccucaaucggcaaacuguucacacaaacgaugaaaggcguagaaagacucgcaguaaugggcgauacggccugggacuucucaagcgcgggcggcuucuucacgagcgucggaaaaggcauccauacaguauucggaagcgcauuccaaggccuauuuggaggccucaacuggauaacaaaagugaucaugggagcaguacugaucugggucggcaucaacacccgcaacaugacgaugagcaugucaaugauccucgugggaguaauaaugauguuccucagccugggcguaggcgcaugaggacuaguggaagcauuuuccuggcugauuaaaagaaauuacucagcuauggucaucuguuccuguuagaaggcuaugcagcauauuauauacuaugcgcauguuaugaaaugcauaauaaaaaauuuuaaaaaaucuaaaagaucuaaaaaaaaaaaaaaaaaaaaaaaaaaaaaaaaaaaaaaaaaaaaaaaaaaaaaaaaaaaaaaaaugcaucccccccccccccccccccccccccccccccaaaggcucuuuucagagccaccagaauu

SEQ ID NO: 886 - RNA, 2525 nt, Artificial Sequence
  mRNA product Design d-5 comprising derived and/or modified sequence from YFV__NC_002031.1__SSjev-prME-XX (polyprotein: aa122-788) (opt11)
gggagagggcgcuuggcuugcaaggacccugagcugcggcauugaagcacacccaacccaacucgacugaagucagccucacugaaccggaucugagaaucuucucucucugggcuugccagggcucuccgaaccuagcuagcauccucuucaauuccaacuagaaagcuuaccauggggaaaaggagcgcgggcucgauaaugugguuggccucgcucgcggucgugaucgcgugcgcgggcgcggugacccuaguaaggaaaaacagauggcuacuacuaaacguaaccucagaagaucuaggaaagacauuuucagucggcacaggcaacugcacaaccaacauacuagaagcaaaauauuggugcccagacagcauggaauacaacugucccaaccucagcccaagagaggaaccagacgacauagacugcugguguuacggaguagaaaacguaagaguggcauacggcaaaugcgacagcgcaggcaggagccgaagaucccgcagagccaucgacuugcccacgcacgaaaaccacggccucaaaacacgacaagaaaaauggaugacagggcgaaugggagaacgacagcuccagaaaauagaacgaugguucguccggaacccguucuucgcaguaacggcacuaacaaucgcauaccucguaggcagcaacaugacacaaagaguggucaucgcgcuacucguacuagcaguggggcccgcauacagugcacacugcauaggaaucacagaccgugacuucaucgaaggcguacacggaggaacguggguaagcgcgacacuggaacaagacaaaugcgugacaguaauggcaccagacaaaccaagccuagacauaucccuagaaacggucgccaucgaccgucccgcagaaguacgaaagguaugcuauaaugcaguccucacacacgucaaaauaaacgacaaaugccccagcacgggcgaagcacaccucgccgaagaaaacgaaggggauaacgcgugcaaacgcaccuacuccgacaggggauggggcaacggaugcggacuguucggaaaaggauccauagucgcaugcgcaaaauuuaccugcgcaaaaagcaugagcuuguucgagguagaccaaacgaagauccaauacguaauccgagcucaacuacacguuggggccaagcaagagaacuggaauacggacaucaaaacacuaaaauucgacgcacucuccggcucacaagaagucgaguucaucggcuacggcaaagcaacacuagaaugccaaguacaaacagcgguggacuucggcaacagcuacauagcagaaauggaaacagaaagcuggauaguagaccgacaaugggcacaagaccuaacucugccauggcaaagcggcucaggaggaguguggagagagaugcaccaccugguagaguucgaacccccacacgcagcaacaauaaggguacuggcacuaggcaaccaagaaggcagccuaaaaaccgcacucacaggagccaugcgcgugacgaaggacaccaacgacaacaaccucuacaaacuccacggagggcacguauccugccgcguaaaacuaucagcacuaacgcuaaaaggaacaagcuacaaaauaugcacagacaaaauguucuucgucaaaaaccccacagacacaggccacggcacagucguaaugcaagugaaggucagcaagggggcccccugccgaaucccagucauaguggcagacgaccucacggccgccaucaacaaagggauccugguaacagugaacccaauagcaucgaccaacgacgacgaaguccucauagaagugaaucccccguucggcgacagcuacaucaucguaggacgcggcgacucccgacugacguaccaauggcauaaagaaggcagcagcauuggaaaacuauucacccaaaccaugaagggcgucgaaagacucgcggugaugggagacaccgcaugggacuucucgagcgcaggcggcuucuucacaagcguaggaaaagggauucacacaguauucggauccgcauuccaaggccucuucgggggacuaaacuggauaacgaaaguaauaaugggagcaguucucauauggguaggaaucaacacacgaaacaugacaauguccaugucaaugauacucguaggcguaaucaugauguuucugucacucggagugggagcagaccaagguugcgccauaaacuucggcaagugaggacuaguggaagcauuuuccuggcugauuaaaagaaauuacucagcuauggucaucuguuccuguuagaaggcuaugcagcauauuauauacuaugcgcauguuaugaaaugcauaauaaaaaauuuuaaaaaaucuaaaagaucuaaaaaaaaaaaaaaaaaaaaaaaaaaaaaaaaaaaaaaaaaaaaaaaaaaaaaaaaaaaaaaaaugcaucccccccccccccccccccccccccccccccaaaggcucuuuucagagccaccagaauu

SEQ ID NO: 887 - RNA, 2495 nt, Artificial Sequence
  mRNA product Design d-5 comprising derived and/or modified sequence from YFV__NC_002031.1__SSjev-prME (polyprotein: aa122-778) (opt11)
gggagagggcgcuuggcuugcaaggacccugagcugcggcauugaagcacacccaacccaacucgacugaagucagccucacugaaccggaucugagaaucuucucucucugggcuugccagggcucuccgaaccuagcuagcauccucuucaauuccaacuagaaagcuuaccauggggaaaaggagcgcgggcucgauaaugugguuggccucgcucgcggucgugaucgcgugcgcgggcgcggugacccuaguccgcaaaaacagauggcuacuacuaaacguaacaagcgaagaccugggcaaaacauucagcguuggcacaggcaauugcacgacaaacauacucgaagcaaaauacuggugccccgacagcauggaauacaacugcccaaaucuaagcccacgcgaagaaccagacgacaucgacuguuggugcuacggagucgaaaacgugagggucgcauacgguaaaugcgacagcgcuggcagaagcagacgcucccgacgagccauugaccucccuacccacgaaaaccacggccuaaaaacccggcaggaaaaauggaugacaggccggaugggagaacgccaacuacagaaaauagagaggugguuuguaagaaacccauucuucgccguaaccgcgcucaccaucgcuuaccucguaggaucaaacaugacgcaaagaguagugaucgcgcuacucguacuagcgguaggccccgccuacagcgcacacugcaucggcaucacugacagggacuucauagaaggcguccacgggggcacguggguuagcgccacacucgaacaagacaaaugcgucacagugauggcaccagacaaacccucacuagacaucucacuagaaaccgucgcaaucgaccgcccagcagaagucaggaaagugugcuacaacgccgucuuaacccacguaaaaauaaaugauaaaugcccaagcacgggagaggcacaccuagcggaagaaaacgaaggcgacaacgcgugcaaacguaccuacagcgacagaggguggggcaacggaugcggcuuauucggaaaaggaaguaucguagcaugcgcaaaauuuaccugcgccaaaagcaugucccuauucgaaguagaucaaacaaaaauacaauacgucauccgagcccaacuacacgugggggcaaaacaagaaaacuggaacaccgacaucaaaacacucaaauucgaugcccuaagcggcucccaagaaguagaguucaucgguuacggcaaggccacgcucgagugccaaguccaaacagcaguagacuucgggaacucauacaucgccgagauggaaacggaaucauggauugucgacagacaaugggcacaagaccuaacacuaccauggcaaucaggcagcggaggggucuggcgagaaaugcaccaccuaguagaguucgaacccccacacgccgcaacaauccgaguacuagcccucggaaaccaagaaggaucacuaaaaaccgcacucaccggcgcaaugcgcguaacaaaagauacaaacgacaacaaccuauacaaacuacacggcggacacgucagcugccgcgucaaacuauccgcccuaacacuaaaaggaacaagcuacaaaauaugcacagacaaaauguucuucgucaaaaauccgacugacacgggccacggcacagucguaaugcaaguaaaagucucaaaaggcgcaccaugcagaaucccaguaaucgucgccgaugaccuaacagccgcaaucaacaagggcauccucguaacaguaaaccccauagccagcaccaacgacgacgaaguccuaaucgaagucaacccacccuucggagacagcuacauaauaguaggacgaggggacucacgccuaaccuaccaauggcacaaagaaggauccucaaucggcaaacuguucacacaaacgaugaaaggcguagaaagacucgcaguaaugggcgauacggccugggacuucucaagcgcgggcggcuucuucacgagcgucggaaaaggcauccauacaguauucggaagcgcauuccaaggccuauuuggaggccucaacuggauaacaaaagugaucaugggagcaguacugaucugggucggcaucaacacccgcaacaugacgaugagcaugucaaugauccucgugggaguaauaaugauguuccucagccugggcguaggcgcaugaggacuaguggaagcauuuuccuggcugauuaaaagaaauuacucagcuauggucaucuguuccuguuagaaggcuaugcagcauauuauauacuaugcgcauguuaugaaaugcauaauaaaaaauuuuaaaaaaucuaaaagaucuaaaaaaaaaaaaaaaaaaaaaaaaaaaaaaaaaaaaaaaaaaaaaaaaaaaaaaaaaaaaaaaaugcaucccccccccccccccccccccccccccccccaaaggcucuuuucagagccaccagaauu

SEQ ID NO: 888 - RNA, 2480 nt, Artificial Sequence
  mRNA product Design g-4 comprising derived and/or modified sequence from YFV__NC_002031.1__X-SS-prME-XX (polyprotein: aa92-788) (wt)
gggagacuccugucgggcggaaguaggaggaguagaguuuaaaaacaguacucuuuuuccgguucgggacguaguugaagcaacgacaagccggauaaccgcucuugagacaggaagcuuaccaugagaggauuguccucaaggaaacgccguucccaugauguucugacugugcaauuccuaauuuugggaaugcuguugaugacggguggagugaccuuggugcggaaaaacagaugguugcuccuaaaugugacaucugaggaccucgggaaaacauucucugugggcacaggcaacugcacaacaaacauuuuggaagccaaguacuggugcccagacucaauggaauacaacugucccaaucucaguccaagagaggagccagaugacauugauugcuggugcuaugggguggaaaacguuagagucgcauaugguaagugugacucagcaggcaggucuaggaggucaagaagggccauugacuugccuacgcaugaaaaccaugguuugaagacccggcaagaaaaauggaugacuggaagaaugggugaaaggcaacuccaaaagauugagagaugguucgugaggaaccccuuuuuugcagugacggcucugaccauugccuaccuugugggaagcaacaugacgcaacgagucgugauugcccuacuggucuuggcuguugguccggccuacucagcucacugcauuggaauuacugacagggauuucauugagggggugcauggaggaacuuggguuucagcuacccuggagcaagacaagugugucacuguuauggccccugacaagccuucauuggacaucucacuagagacaguagccauugauagaccugcugaggugaggaaaguguguuacaaugcaguucucacucaugugaagauuaaugacaagugccccagcacuggagaggcccaccuagcugaagagaacgaaggggacaaugcgugcaagcgcacuuauucugauagaggcuggggcaauggcuguggccuauuugggaaagggagcauuguggcaugcgccaaauucacuugugccaaauccaugaguuuguuugagguugaucagaccaaaauucaguaugucaucagagcacaauugcauguaggggccaagcaggaaaauuggaauaccgacauuaagacucucaaguuugaugcccugucaggcucccaggaagucgaguucauuggguauggaaaagcuacacuggaaugccaggugcaaacugcgguggacuuugguaacaguuacaucgcugagauggaaacagagagcuggauaguggacagacagugggcccaggacuugacccugccauggcagaguggaaguggcgggguguggagagagaugcaucaucuugucgaauuugaaccuccgcaugccgccacuaucagaguacuggcccugggaaaccaggaaggcuccuugaaaacagcucuuacuggcgcaaugaggguuacaaaggacacaaaugacaacaaccuuuacaaacuacaugguggacauguuucuugcagagugaaauugucagcuuugacacucaaggggacauccuacaaaauaugcacugacaaaauguuuuuugucaagaacccaacugacacuggccauggcacuguugugaugcaggugaaagugucaaaaggagcccccugcaggauuccagugauaguagcugaugaucuuacagcggcaaucaauaaaggcauuuugguuacaguuaaccccaucgccucaaccaaugaugaugaagugcugauugaggugaacccaccuuuuggagacagcuacauuaucguugggagaggagauucacgucucacuuaccaguggcacaaagagggaagcucaauaggaaaguuguucacucagaccaugaaaggcguggaacgccuggccgucaugggagacaccgccugggauuucagcuccgcuggaggguucuucacuucgguugggaaaggaauccauacgguguuuggcucugccuuucaggggcuauuuggcggcuugaacuggauaacaaaggucaucaugggggcgguacuuauauggguuggcaucaacacaagaaacaugacaauguccaugagcaugaucuugguaggagugaucaugauguuuuugucucuaggaguuggggcggaucaaggaugcgccaucaacuuuggcaaguaaggacuaguaauaaggaaacuguaugaaugucugugggcaggaagugaagagauccuucuguaaagguuuuuggaauuaugucugcugaauaauaaacuuuuuugaaauaauaaaucugguagaaaaaugagaucuaaaaaaaaaaaaaaaaaaaaaaaaaaaaaaaaaaaaaaaaaaaaaaaaaaaaaaaaaaaaaaaaugcaucccccccccccccccccccccccccccccccaaaggcucuuuucagagccaccagaauu

SEQ ID NO: 889 - RNA, 2447 nt, Artificial Sequence
  mRNA product Design g-4 comprising derived and/or modified sequence from YFV__NC_002031.1__SS-prME (polyprotein: M,aa104-778) (wt)
gggagacuccugucgggcggaaguaggaggaguagaguuuaaaaacaguacucuuuuuccgguucgggacguaguugaagcaacgacaagccggauaaccgcucuugagacaggaagcuuaccauggauguucugacugugcaauuccuaauuuugggaaugcuguugaugacggguggagugaccuuggugcggaaaaacagaugguugcuccuaaaugugacaucugaggaccucgggaaaacauucucugugggcacaggcaacugcacaacaaacauuuuggaagccaaguacuggugcccagacucaauggaauacaacugucccaaucucaguccaagagaggagccagaugacauugauugcuggugcuaugggguggaaaacguuagagucgcauaugguaagugugacucagcaggcaggucuaggaggucaagaagggccauugacuugccuacgcaugaaaaccaugguuugaagacccggcaagaaaaauggaugacuggaagaaugggugaaaggcaacuccaaaagauugagagaugguucgugaggaaccccuuuuuugcagugacggcucugaccauugccuaccuugugggaagcaacaugacgcaacgagucgugauugcccuacuggucuuggcuguugguccggccuacucagcucacugcauuggaauuacugacagggauuucauugagggggugcauggaggaacuuggguuucagcuacccuggagcaagacaagugugucacuguuauggccccugacaagccuucauuggacaucucacuagagacaguagccauugauagaccugcugaggugaggaaaguguguuacaaugcaguucucacucaugugaagauuaaugacaagugccccagcacuggagaggcccaccuagcugaagagaacgaaggggacaaugcgugcaagcgcacuuauucugauagaggcuggggcaauggcuguggccuauuugggaaagggagcauuguggcaugcgccaaauucacuugugccaaauccaugaguuuguuugagguugaucagaccaaaauucaguaugucaucagagcacaauugcauguaggggccaagcaggaaaauuggaauaccgacauuaagacucucaaguuugaugcccugucaggcucccaggaagucgaguucauuggguauggaaaagcuacacuggaaugccaggugcaaacugcgguggacuuugguaacaguuacaucgcugagauggaaacagagagcuggauaguggacagacagugggcccaggacuugacccugccauggcagaguggaaguggcgggguguggagagagaugcaucaucuugucgaauuugaaccuccgcaugccgccacuaucagaguacuggcccugggaaaccaggaaggcuccuugaaaacagcucuuacuggcgcaaugaggguuacaaaggacacaaaugacaacaaccuuuacaaacuacaugguggacauguuucuugcagagugaaauugucagcuuugacacucaaggggacauccuacaaaauaugcacugacaaaauguuuuuugucaagaacccaacugacacuggccauggcacuguugugaugcaggugaaagugucaaaaggagcccccugcaggauuccagugauaguagcugaugaucuuacagcggcaaucaauaaaggcauuuugguuacaguuaaccccaucgccucaaccaaugaugaugaagugcugauugaggugaacccaccuuuuggagacagcuacauuaucguugggagaggagauucacgucucacuuaccaguggcacaaagagggaagcucaauaggaaaguuguucacucagaccaugaaaggcguggaacgccuggccgucaugggagacaccgccugggauuucagcuccgcuggaggguucuucacuucgguugggaaaggaauccauacgguguuuggcucugccuuucaggggcuauuuggcggcuugaacuggauaacaaaggucaucaugggggcgguacuuauauggguuggcaucaacacaagaaacaugacaauguccaugagcaugaucuugguaggagugaucaugauguuuuugucucuaggaguuggggcggaucaaggaugcgccaucaacuuuggcaaguaaggacuaguaauaaggaaacuguaugaaugucugugggcaggaagugaagagauccuucuguaaagguuuuuggaauuaugucugcugaauaauaaacuuuuuugaaauaauaaaucugguagaaaaaugagaucuaaaaaaaaaaaaaaaaaaaaaaaaaaaaaaaaaaaaaaaaaaaaaaaaaaaaaaaaaaaaaaaaugcaucccccccccccccccccccccccccccccccaaaggcucuuuucagagccaccagaauu

SEQ ID NO: 890 - RNA, 2444 nt, Artificial Sequence
  mRNA product Design g-4 comprising derived and/or modified sequence from YFV__NC_002031.1__SSIgE-prME-XX (polyprotein: aa122-788) (wt)
gggagacuccugucgggcggaaguaggaggaguagaguuuaaaaacaguacucuuuuuccgguucgggacguaguugaagcaacgacaagccggauaaccgcucuugagacaggaagcuuaccauggacuggaccuggauccuguuccucguggccgccgcgacccgcguccacagcgugaccuuggugcggaaaaacagaugguugcuccuaaaugugacaucugaggaccucgggaaaacauucucugugggcacaggcaacugcacaacaaacauuuuggaagccaaguacuggugcccagacucaauggaauacaacugucccaaucucaguccaagagaggagccagaugacauugauugcuggugcuaugggguggaaaacguuagagucgcauaugguaagugugacucagcaggcaggucuaggaggucaagaagggccauugacuugccuacgcaugaaaaccaugguuugaagacccggcaagaaaaauggaugacuggaagaaugggugaaaggcaacuccaaaagauugagagaugguucgugaggaaccccuuuuuugcagugacggcucugaccauugccuaccuugugggaagcaacaugacgcaacgagucgugauugcccuacuggucuuggcuguugguccggccuacucagcucacugcauuggaauuacugacagggauuucauugagggggugcauggaggaacuuggguuucagcuacccuggagcaagacaagugugucacuguuauggccccugacaagccuucauuggacaucucacuagagacaguagccauugauagaccugcugaggugaggaaaguguguuacaaugcaguucucacucaugugaagauuaaugacaagugccccagcacuggagaggcccaccuagcugaagagaacgaaggggacaaugcgugcaagcgcacuuauucugauagaggcuggggcaauggcuguggccuauuugggaaagggagcauuguggcaugcgccaaauucacuugugccaaauccaugaguuuguuugagguugaucagaccaaaauucaguaugucaucagagcacaauugcauguaggggccaagcaggaaaauuggaauaccgacauuaagacucucaaguuugaugcccugucaggcucccaggaagucgaguucauuggguauggaaaagcuacacuggaaugccaggugcaaacugcgguggacuuugguaacaguuacaucgcugagauggaaacagagagcuggauaguggacagacagugggcccaggacuugacccugccauggcagaguggaaguggcgggguguggagagagaugcaucaucuugucgaauuugaaccuccgcaugccgccacuaucagaguacuggcccugggaaaccaggaaggcuccuugaaaacagcucuuacuggcgcaaugaggguuacaaaggacacaaaugacaacaaccuuuacaaacuacaugguggacauguuucuugcagagugaaauugucagcuuugacacucaaggggacauccuacaaaauaugcacugacaaaauguuuuuugucaagaacccaacugacacuggccauggcacuguugugaugcaggugaaagugucaaaaggagcccccugcaggauuccagugauaguagcugaugaucuuacagcggcaaucaauaaaggcauuuugguuacaguuaaccccaucgccucaaccaaugaugaugaagugcugauugaggugaacccaccuuuuggagacagcuacauuaucguugggagaggagauucacgucucacuuaccaguggcacaaagagggaagcucaauaggaaaguuguucacucagaccaugaaaggcguggaacgccuggccgucaugggagacaccgccugggauuucagcuccgcuggaggguucuucacuucgguugggaaaggaauccauacgguguuuggcucugccuuucaggggcuauuuggcggcuugaacuggauaacaaaggucaucaugggggcgguacuuauauggguuggcaucaacacaagaaacaugacaauguccaugagcaugaucuugguaggagugaucaugauguuuuugucucuaggaguuggggcggaucaaggaugcgccaucaacuuuggcaaguaaggacuaguaauaaggaaacuguaugaaugucugugggcaggaagugaagagauccuucuguaaagguuuuuggaauuaugucugcugaauaauaaacuuuuuugaaauaauaaaucugguagaaaaaugagaucuaaaaaaaaaaaaaaaaaaaaaaaaaaaaaaaaaaaaaaaaaaaaaaaaaaaaaaaaaaaaaaaaugcaucccccccccccccccccccccccccccccccaaaggcucuuuucagagccaccagaauu

SEQ ID NO: 891 - RNA, 2414 nt, Artificial Sequence
  mRNA product Design g-4 comprising derived and/or modified sequence from YFV__NC_002031.1__SSIgE-prME (polyprotein: aa122-778) (wt)
gggagacuccugucgggcggaaguaggaggaguagaguuuaaaaacaguacucuuuuuccgguucgggacguaguugaagcaacgacaagccggauaaccgcucuugagacaggaagcuuaccauggacuggaccuggauccuguuccucguggccgccgcgacccgcguccacagcgugaccuuggugcggaaaaacagaugguugcuccuaaaugugacaucugaggaccucgggaaaacauucucugugggcacaggcaacugcacaacaaacauuuuggaagccaaguacuggugcccagacucaauggaauacaacugucccaaucucaguccaagagaggagccagaugacauugauugcuggugcuaugggguggaaaacguuagagucgcauaugguaagugugacucagcaggcaggucuaggaggucaagaagggccauugacuugccuacgcaugaaaaccaugguuugaagacccggcaagaaaaauggaugacuggaagaaugggugaaaggcaacuccaaaagauugagagaugguucgugaggaaccccuuuuuugcagugacggcucugaccauugccuaccuugugggaagcaacaugacgcaacgagucgugauugcccuacuggucuuggcuguugguccggccuacucagcucacugcauuggaauuacugacagggauuucauugagggggugcauggaggaacuuggguuucagcuacccuggagcaagacaagugugucacuguuauggccccugacaagccuucauuggacaucucacuagagacaguagccauugauagaccugcugaggugaggaaaguguguuacaaugcaguucucacucaugugaagauuaaugacaagugccccagcacuggagaggcccaccuagcugaagagaacgaaggggacaaugcgugcaagcgcacuuauucugauagaggcuggggcaauggcuguggccuauuugggaaagggagcauuguggcaugcgccaaauucacuugugccaaauccaugaguuuguuugagguugaucagaccaaaauucaguaugucaucagagcacaauugcauguaggggccaagcaggaaaauuggaauaccgacauuaagacucucaaguuugaugcccugucaggcucccaggaagucgaguucauuggguauggaaaagcuacacuggaaugccaggugcaaacugcgguggacuuugguaacaguuacaucgcugagauggaaacagagagcuggauaguggacagacagugggcccaggacuugacccugccauggcagaguggaaguggcgggguguggagagagaugcaucaucuugucgaauuugaaccuccgcaugccgccacuaucagaguacuggcccugggaaaccaggaaggcuccuugaaaacagcucuuacuggcgcaaugaggguuacaaaggacacaaaugacaacaaccuuuacaaacuacaugguggacauguuucuugcagagugaaauugucagcuuugacacucaaggggacauccuacaaaauaugcacugacaaaauguuuuuugucaagaacccaacugacacuggccauggcacuguugugaugcaggugaaagugucaaaaggagcccccugcaggauuccagugauaguagcugaugaucuuacagcggcaaucaauaaaggcauuuugguuacaguuaaccccaucgccucaaccaaugaugaugaagugcugauugaggugaacccaccuuuuggagacagcuacauuaucguugggagaggagauucacgucucacuuaccaguggcacaaagagggaagcucaauaggaaaguuguucacucagaccaugaaaggcguggaacgccuggccgucaugggagacaccgccugggauuucagcuccgcuggaggguucuucacuucgguugggaaaggaauucauacgguguuuggcucugccuuucaggggcuauuuggcggcuugaacuggauaacaaaggucaucaugggggcgguacuuauauggguuggcaucaacacaagaaacaugacaauguccaugagcaugaucuugguaggagugaucaugauguuuuugucucuaggaguuggggcguaaggacuaguaauaaggaaacuguaugaaugucugugggcaggaagugaagagauccuucuguaaagguuuuuggaauuaugucugcugaauaauaaacuuuuuugaaauaauaaaucugguagaaaaaugagaucuaaaaaaaaaaaaaaaaaaaaaaaaaaaaaaaaaaaaaaaaaaaaaaaaaaaaaaaaaaaaaaaaugcaucccccccccccccccccccccccccccccccaaaggcucuuuucagagccaccagaauu

SEQ ID NO: 892 - RNA, 2462 nt, Artificial Sequence
  mRNA product Design g-4 comprising derived and/or modified sequence from YFV__NC_002031.1__SSjev-prME-XX (polyprotein: aa122-788) (wt)
gggagacuccugucgggcggaaguaggaggaguagaguuuaaaaacaguacucuuuuuccgguucgggacguaguugaagcaacgacaagccggauaaccgcucuugagacaggaagcuuaccauggguaaacggagcgcuggcucaaucauguggcucgcgagcuuggcaguugucauagcuugugcaggagccgugaccuuggugcggaaaaacagaugguugcuccuaaaugugacaucugaggaccucgggaaaacauucucugugggcacaggcaacugcacaacaaacauuuuggaagccaaguacuggugcccagacucaauggaauacaacugucccaaucucaguccaagagaggagccagaugacauugauugcuggugcuaugggguggaaaacguuagagucgcauaugguaagugugacucagcaggcaggucuaggaggucaagaagggccauugacuugccuacgcaugaaaaccaugguuugaagacccggcaagaaaaauggaugacuggaagaaugggugaaaggcaacuccaaaagauugagagaugguucgugaggaaccccuuuuuugcagugacggcucugaccauugccuaccuugugggaagcaacaugacgcaacgagucgugauugcccuacuggucuuggcuguugguccggccuacucagcucacugcauuggaauuacugacagggauuucauugagggggugcauggaggaacuuggguuucagcuacccuggagcaagacaagugugucacuguuauggccccugacaagccuucauuggacaucucacuagagacaguagccauugauagaccugcugaggugaggaaaguguguuacaaugcaguucucacucaugugaagauuaaugacaagugccccagcacuggagaggcccaccuagcugaagagaacgaaggggacaaugcgugcaagcgcacuuauucugauagaggcuggggcaauggcuguggccuauuugggaaagggagcauuguggcaugcgccaaauucacuugugccaaauccaugaguuuguuugagguugaucagaccaaaauucaguaugucaucagagcacaauugcauguaggggccaagcaggaaaauuggaauaccgacauuaagacucucaaguuugaugcccugucaggcucccaggaagucgaguucauuggguauggaaaagcuacacuggaaugccaggugcaaacugcgguggacuuugguaacaguuacaucgcugagauggaaacagagagcuggauaguggacagacagugggcccaggacuugacccugccauggcagaguggaaguggcgggguguggagagagaugcaucaucuugucgaauuugaaccuccgcaugccgccacuaucagaguacuggcccugggaaaccaggaaggcuccuugaaaacagcucuuacuggcgcaaugaggguuacaaaggacacaaaugacaacaaccuuuacaaacuacaugguggacauguuucuugcagagugaaauugucagcuuugacacucaaggggacauccuacaaaauaugcacugacaaaauguuuuuugucaagaacccaacugacacuggccauggcacuguugugaugcaggugaaagugucaaaaggagcccccugcaggauuccagugauaguagcugaugaucuuacagcggcaaucaauaaaggcauuuugguuacaguuaaccccaucgccucaaccaaugaugaugaagugcugauugaggugaacccaccuuuuggagacagcuacauuaucguugggagaggagauucacgucucacuuaccaguggcacaaagagggaagcucaauaggaaaguuguucacucagaccaugaaaggcguggaacgccuggccgucaugggagacaccgccugggauuucagcuccgcuggaggguucuucacuucgguugggaaaggaauccauacgguguuuggcucugccuuucaggggcuauuuggcggcuugaacuggauaacaaaggucaucaugggggcgguacuuauauggguuggcaucaacacaagaaacaugacaauguccaugagcaugaucuugguaggagugaucaugauguuuuugucucuaggaguuggggcggaucaaggaugcgccaucaacuuuggcaaguaaggacuaguaauaaggaaacuguaugaaugucugugggcaggaagugaagagauccuucuguaaagguuuuuggaauuaugucugcugaauaauaaacuuuuuugaaauaauaaaucugguagaaaaaugagaucuaaaaaaaaaaaaaaaaaaaaaaaaaaaaaaaaaaaaaaaaaaaaaaaaaaaaaaaaaaaaaaaaugcaucccccccccccccccccccccccccccccccaaaggcucuuuucagagccaccagaauu

SEQ ID NO: 893 - RNA, 2432 nt, Artificial Sequence
  mRNA product Design g-4 comprising derived and/or modified sequence from YFV__NC_002031.1__SSjev-prME (polyprotein: aa122-778) (wt)
gggagacuccugucgggcggaaguaggaggaguagaguuuaaaaacaguacucuuuuuccgguucgggacguaguugaagcaacgacaagccggauaaccgcucuugagacaggaagcuuaccauggguaaacggagcgcuggcucaaucauguggcucgcgagcuuggcaguugucauagcuugugcaggagccgugaccuuggugcggaaaaacagaugguugcuccuaaaugugacaucugaggaccucgggaaaacauucucugugggcacaggcaacugcacaacaaacauuuuggaagccaaguacuggugcccagacucaauggaauacaacugucccaaucucaguccaagagaggagccagaugacauugauugcuggugcuaugggguggaaaacguuagagucgcauaugguaagugugacucagcaggcaggucuaggaggucaagaagggccauugacuugccuacgcaugaaaaccaugguuugaagacccggcaagaaaaauggaugacuggaagaaugggugaaaggcaacuccaaaagauugagagaugguucgugaggaaccccuuuuuugcagugacggcucugaccauugccuaccuugugggaagcaacaugacgcaacgagucgugauugcccuacuggucuuggcuguugguccggccuacucagcucacugcauuggaauuacugacagggauuucauugagggggugcauggaggaacuuggguuucagcuacccuggagcaagacaagugugucacuguuauggccccugacaagccuucauuggacaucucacuagagacaguagccauugauagaccugcugaggugaggaaaguguguuacaaugcaguucucacucaugugaagauuaaugacaagugccccagcacuggagaggcccaccuagcugaagagaacgaaggggacaaugcgugcaagcgcacuuauucugauagaggcuggggcaauggcuguggccuauuugggaaagggagcauuguggcaugcgccaaauucacuugugccaaauccaugaguuuguuugagguugaucagaccaaaauucaguaugucaucagagcacaauugcauguaggggccaagcaggaaaauuggaauaccgacauuaagacucucaaguuugaugcccugucaggcucccaggaagucgaguucauuggguauggaaaagcuacacuggaaugccaggugcaaacugcgguggacuuugguaacaguuacaucgcugagauggaaacagagagcuggauaguggacagacagugggcccaggacuugacccugccauggcagaguggaaguggcgggguguggagagagaugcaucaucuugucgaauuugaaccuccgcaugccgccacuaucagaguacuggcccugggaaaccaggaaggcuccuugaaaacagcucuuacuggcgcaaugaggguuacaaaggacacaaaugacaacaaccuuuacaaacuacaugguggacauguuucuugcagagugaaauugucagcuuugacacucaaggggacauccuacaaaauaugcacugacaaaauguuuuuugucaagaacccaacugacacuggccauggcacuguugugaugcaggugaaagugucaaaaggagcccccugcaggauuccagugauaguagcugaugaucuuacagcggcaaucaauaaaggcauuuugguuacaguuaaccccaucgccucaaccaaugaugaugaagugcugauugaggugaacccaccuuuuggagacagcuacauuaucguugggagaggagauucacgucucacuuaccaguggcacaaagagggaagcucaauaggaaaguuguucacucagaccaugaaaggcguggaacgccuggccgucaugggagacaccgccugggauuucagcuccgcuggaggguucuucacuucgguugggaaaggaauucauacgguguuuggcucugccuuucaggggcuauuuggcggcuugaacuggauaacaaaggucaucaugggggcgguacuuauauggguuggcaucaacacaagaaacaugacaauguccaugagcaugaucuugguaggagugaucaugauguuuuugucucuaggaguuggggcguaaggacuaguaauaaggaaacuguaugaaugucugugggcaggaagugaagagauccuucuguaaagguuuuuggaauuaugucugcugaauaauaaacuuuuuugaaauaauaaaucugguagaaaaaugagaucuaaaaaaaaaaaaaaaaaaaaaaaaaaaaaaaaaaaaaaaaaaaaaaaaaaaaaaaaaaaaaaaaugcaucccccccccccccccccccccccccccccccaaaggcucuuuucagagccaccagaauu

SEQ ID NO: 894 - RNA, 2480 nt, Artificial Sequence
  mRNA product Design g-4 comprising derived and/or modified sequence from YFV__NC_002031.1__X-SS-prME-XX (polyprotein: aa92-788) (opt1)
gggagacuccugucgggcggaaguaggaggaguagaguuuaaaaacaguacucuuuuuccgguucgggacguaguugaagcaacgacaagccggauaaccgcucuugagacaggaagcuuaccaugcggggccugagcucccgcaagcggcgcagccacgacgugcucaccguccaguuccugauccuggggaugcuccugaugaccggcggggugacgcuggugcggaagaaccgcuggcuccugcugaacgucaccuccgaggaccucggcaagaccuucagcguggggaccggcaacugcacgaccaacauccuggaggccaaguacuggugccccgacuccauggaguacaacugcccgaaccugagcccccgggaggagcccgacgacaucgacugcuggugcuacggcguggagaacguccgcguggccuacgggaagugcgacuccgcgggccggagccgccggucccgccgggccaucgaccuccccacccacgagaaccacgggcugaagacccgccaggagaaguggaugacgggccggaugggggagcgccagcugcagaagaucgagcggugguucgugcgcaacccguucuucgccgucaccgcccucaccaucgccuaccuggugggcagcaacaugacccagcggguggucaucgcgcugcucgugcuggccgugggccccgccuacuccgcccacugcaucgggaucacggaccgcgacuucaucgagggcguccacgggggcaccugggugagcgcgacccuggagcaggacaagugcgugaccgucauggcccccgacaagcccucccucgacaucagccuggagacgguggccaucgaccggccggccgaggugcgcaaggucugcuacaacgccgugcugacccacgugaagaucaacgacaagugccccuccaccggcgaggcgcaccucgccgaggagaacgagggggacaacgccugcaagcggaccuacagcgaccggggcugggggaacggcugcgggcuguucggcaagggcuccaucgucgccugcgccaaguucacgugcgcgaagagcaugucccuguucgagguggaccagaccaagauccaguacgucauccgcgcccagcuccacgugggggccaagcaggagaacuggaacaccgacaucaagacccugaaguucgacgcccugagcggcagccaggagguggaguucaucggguacggcaaggccacgcucgagugccagguccagaccgcgguggacuucgggaacuccuacaucgccgagauggagaccgagagcuggaucguggaccggcagugggcccaggaccugacccugcccuggcaguccggcagcggcggggucuggcgcgagaugcaccaccucguggaguucgagcccccgcacgccgccacgauccgggugcuggcgcugggcaaccaggaggggucccucaagaccgcccugaccggcgccaugcgcgucaccaaggacacgaacgacaacaaccuguacaagcuccacgggggccacgugagcugccgggugaagcuguccgcccugacccucaagggcaccagcuacaagaucugcaccgacaagauguucuucgucaagaaccccacggacaccgggcacggcaccguggugaugcaggucaagguguccaagggggcgcccugccgcaucccggugaucgucgccgacgaccugaccgccgccaucaacaagggcauccuggugaccgugaacccgaucgccagcacgaacgacgacgagguccucaucgaggugaacccccccuucggcgacuccuacaucaucguggggcggggcgacagccgccugaccuaccaguggcacaaggagggguccagcaucggcaagcuguucacccagaccaugaagggggucgagcggcuggcggugaugggcgacacggccugggacuucuccagcgccggcggguucuucaccuccgugggcaaggggauccacaccgucuucggcagcgccuuccaggggcucuucggcggccugaacuggaucaccaaggugaucaugggggccgugcugaucugggucggcaucaacacgcgcaacaugaccauguccaugagcaugauccucgugggggugaucaugauguuccugagccugggcgucggggcggaccagggcugcgccaucaacuucggcaagugaggacuaguaauaaggaaacuguaugaaugucugugggcaggaagugaagagauccuucuguaaagguuuuuggaauuaugucugcugaauaauaaacuuuuuugaaauaauaaaucugguagaaaaaugagaucuaaaaaaaaaaaaaaaaaaaaaaaaaaaaaaaaaaaaaaaaaaaaaaaaaaaaaaaaaaaaaaaaugcaucccccccccccccccccccccccccccccccaaaggcucuuuucagagccaccagaauu

SEQ ID NO: 895 - RNA, 2417 nt, Artificial Sequence
  mRNA product Design g-4 comprising derived and/or modified sequence from YFV__NC_002031.1__SS-prME (polyprotein: M,aa104-778) (opt1)
gggagacuccugucgggcggaaguaggaggaguagaguuuaaaaacaguacucuuuuuccgguucgggacguaguugaagcaacgacaagccggauaaccgcucuugagacaggaagcuuaccauggacgugcugaccguccaguuccucauccugggcaugcugcucaugaccgggggcgugacccugguccggaagaaccgcuggcuccugcugaacgugaccagcgaggaccucggcaagacguucuccguggggaccggcaacugcaccaccaacauccuggaggccaaguacuggugccccgacagcauggaguacaacugccccaaccuguccccgcgggaggagcccgacgacaucgacugcuggugcuacggggucgagaacgugcgcguggccuacggcaagugcgacagcgcggggcggucccgccggagccgccgggccaucgaccugcccacccacgagaaccacggccucaagacccggcaggagaaguggaugacggggcgcaugggcgagcggcagcugcagaagaucgagcgcugguucgugcggaacccguucuucgccgucaccgcgcugaccaucgccuaccucguggggagcaacaugacccagcgcguggucaucgcccugcuggugcucgccgugggccccgccuacuccgcgcacugcaucgggaucacggaccgggacuucaucgagggcguccacggcgggaccugggugagcgccacccuggagcaggacaagugcgugaccgucauggcccccgacaagcccucccuggacaucagccucgagacgguggccaucgaccgcccggcggaggugcggaaggucugcuacaacgccgugcugacccacgugaagaucaacgacaagugccccuccaccggcgaggcccaccuggccgaggagaacgagggggacaacgccugcaagcgcaccuacagcgaccggggcugggggaacggcugcggccucuucgggaagggcuccaucgucgcgugcgccaaguucacgugcgccaagagcaugucccuguucgagguggaccagaccaagauccaguacgugauccgcgcccagcugcacgucggggccaagcaggagaacuggaacaccgacaucaagacccucaaguucgacgcgcugagcggcucccaggagguggaguucaucggcuacgggaaggccacgcuggagugccaggugcagaccgccgucgacuucggcaacagcuacaucgccgagauggagaccgaguccuggaucguggaccggcagugggcccaggaccucacccugcccuggcagagcggguccggcgggguguggcgcgagaugcaccaccuggucgaguucgagcccccgcacgcggccacgauccgggugcucgcccugggcaaccaggagggcagccugaagaccgcccucaccggggccaugcgcgucaccaaggacacgaacgacaacaaccuguacaagcugcacggcgggcacguguccugccgggugaagcucagcgcgcugacccugaagggcaccuccuacaagaucugcaccgacaagauguucuucgucaagaaccccacggacaccgggcacggcaccguggugaugcaggucaaggugagcaagggcgcccccugccgcaucccggugaucgucgccgacgaccucaccgccgcgaucaacaaggggauccuggugacggugaaccccaucgccagcaccaacgacgacgagguccugaucgaggugaacccgcccuucggcgacuccuacaucaucguggggcggggcgacagccgccucaccuaccaguggcacaaggagggguccagcaucggcaagcuguucacccagacgaugaagggcgucgagcggcuggccgugaugggggacaccgccugggacuucuccagcgccggcggguucuucaccuccgugggcaagggcauccacaccgucuucgggagcgcguuccagggccucuucgggggccugaacuggaucaccaaggugaucaugggggccgugcugaucugggucggcaucaacacgcgcaacaugaccauguccaugagcaugauccucgugggcgugaucaugauguuccugucccugggggucggcgccugaggacuaguaauaaggaaacuguaugaaugucugugggcaggaagugaagagauccuucuguaaagguuuuuggaauuaugucugcugaauaauaaacuuuuuugaaauaauaaaucugguagaaaaaugagaucuaaaaaaaaaaaaaaaaaaaaaaaaaaaaaaaaaaaaaaaaaaaaaaaaaaaaaaaaaaaaaaaaugcaucccccccccccccccccccccccccccccccaaaggcucuuuucagagccaccagaauu

SEQ ID NO: 896 - RNA, 2444 nt, Artificial Sequence
  mRNA product Design g-4 comprising derived and/or modified sequence from YFV__NC_002031.1__SSIgE-prME-XX (polyprotein: aa122-788) (opt1)
gggagacuccugucgggcggaaguaggaggaguagaguuuaaaaacaguacucuuuuuccgguucgggacguaguugaagcaacgacaagccggauaaccgcucuugagacaggaagcuuaccauggacuggaccuggauccuguuccucguggccgccgcgacccgcguccacagcgugacgcuggugcggaagaaccgcuggcuccugcugaacgucaccuccgaggaccucggcaagaccuucagcguggggaccggcaacugcacgaccaacauccuggaggccaaguacuggugccccgacuccauggaguacaacugcccgaaccugagcccccgggaggagcccgacgacaucgacugcuggugcuacggcguggagaacguccgcguggccuacgggaagugcgacuccgcgggccggagccgccggucccgccgggccaucgaccuccccacccacgagaaccacgggcugaagacccgccaggagaaguggaugacgggccggaugggggagcgccagcugcagaagaucgagcggugguucgugcgcaacccguucuucgccgucaccgcccucaccaucgccuaccuggugggcagcaacaugacccagcggguggucaucgcgcugcucgugcuggccgugggccccgccuacuccgcccacugcaucgggaucacggaccgcgacuucaucgagggcguccacgggggcaccugggugagcgcgacccuggagcaggacaagugcgugaccgucauggcccccgacaagcccucccucgacaucagccuggagacgguggccaucgaccggccggccgaggugcgcaaggucugcuacaacgccgugcugacccacgugaagaucaacgacaagugccccuccaccggcgaggcgcaccucgccgaggagaacgagggggacaacgccugcaagcggaccuacagcgaccggggcugggggaacggcugcgggcuguucggcaagggcuccaucgucgccugcgccaaguucacgugcgcgaagagcaugucccuguucgagguggaccagaccaagauccaguacgucauccgcgcccagcuccacgugggggccaagcaggagaacuggaacaccgacaucaagacccugaaguucgacgcccugagcggcagccaggagguggaguucaucggguacggcaaggccacgcucgagugccagguccagaccgcgguggacuucgggaacuccuacaucgccgagauggagaccgagagcuggaucguggaccggcagugggcccaggaccugacccugcccuggcaguccggcagcggcggggucuggcgcgagaugcaccaccucguggaguucgagcccccgcacgccgccacgauccgggugcuggcgcugggcaaccaggaggggucccucaagaccgcccugaccggcgccaugcgcgucaccaaggacacgaacgacaacaaccuguacaagcuccacgggggccacgugagcugccgggugaagcuguccgcccugacccucaagggcaccagcuacaagaucugcaccgacaagauguucuucgucaagaaccccacggacaccgggcacggcaccguggugaugcaggucaagguguccaagggggcgcccugccgcaucccggugaucgucgccgacgaccugaccgccgccaucaacaagggcauccuggugaccgugaacccgaucgccagcacgaacgacgacgagguccucaucgaggugaacccccccuucggcgacuccuacaucaucguggggcggggcgacagccgccugaccuaccaguggcacaaggagggguccagcaucggcaagcuguucacccagaccaugaagggggucgagcggcuggcggugaugggcgacacggccugggacuucuccagcgccggcggguucuucaccuccgugggcaaggggauccacaccgucuucggcagcgccuuccaggggcucuucggcggccugaacuggaucaccaaggugaucaugggggccgugcugaucugggucggcaucaacacgcgcaacaugaccauguccaugagcaugauccucgugggggugaucaugauguuccugagccugggcgucggggcggaccagggcugcgccaucaacuucggcaagugaggacuaguaauaaggaaacuguaugaaugucugugggcaggaagugaagagauccuucuguaaagguuuuuggaauuaugucugcugaauaauaaacuuuuuugaaauaauaaaucugguagaaaaaugagaucuaaaaaaaaaaaaaaaaaaaaaaaaaaaaaaaaaaaaaaaaaaaaaaaaaaaaaaaaaaaaaaaaugcaucccccccccccccccccccccccccccccccaaaggcucuuuucagagccaccagaauu

SEQ ID NO: 897 - RNA, 2414 nt, Artificial Sequence
  mRNA product Design g-4 comprising derived and/or modified sequence from YFV__NC_002031.1__SSIgE-prME (polyprotein: aa122-778) (opt1)
gggagacuccugucgggcggaaguaggaggaguagaguuuaaaaacaguacucuuuuuccgguucgggacguaguugaagcaacgacaagccggauaaccgcucuugagacaggaagcuuaccauggacuggaccuggauccuguuccucguggccgccgcgacccgcguccacagcgugacccugguccgcaagaaccgguggcuccugcugaacgugaccagcgaggaccucggcaagacguucuccguggggaccggcaacugcaccaccaacauccuggaggccaaguacuggugccccgacagcauggaguacaacugcccgaaccuguccccgcgcgaggagcccgacgacaucgacugcuggugcuacggggucgagaacgugcggguggccuacggcaagugcgacagcgcggggcgcucccggcgcagccggcgcgccaucgaccuccccacgcacgagaaccacggccugaagacccggcaggagaaguggaugaccggccgcaugggggagcggcagcugcagaagaucgagcgcugguucguccggaaccccuucuucgccgugaccgcccucacgaucgccuaccuggugggcuccaacaugacccagcgcgucgugaucgcgcugcucgugcuggccgucgggcccgccuacagcgcccacugcaucggcaucaccgaccgggacuucaucgagggggugcacggcggcaccuggguguccgcgacgcuggagcaggacaagugcgucaccgugauggcccccgacaagcccagccucgacaucucccuggagaccguggccaucgaccgcccggccgagguccggaaggugugcuacaacgccgugcugacccacgucaagaucaacgacaagugccccagcacgggggaggcgcaccucgccgaggagaacgagggcgacaacgccugcaagcgcaccuacuccgaccggggguggggcaacggcugcgggcuguucggcaaggggagcaucguggccugcgccaaguucaccugcgcgaaguccaugagccuguucgagguggaccagaccaagauccaguacgucauccgcgcccagcuccacgugggcgccaagcaggagaacuggaacacggacaucaagacccugaaguucgacgcccuguccgggagccaggaggucgaguucaucggcuacggcaaggccacccucgagugccaggugcagaccgcgguggacuucgggaacuccuacaucgccgagauggagacggagagcuggaucgucgaccggcagugggcccaggaccugacccugcccuggcagagcggcuccgggggcguguggcgcgagaugcaccaccucguggaguucgagcccccgcacgccgccaccauccgcguccuggcgcuggggaaccaggagggcagccucaagaccgcccugacgggcgccaugcgggugaccaaggacaccaacgacaacaaccuguacaagcuccacgggggccacguguccugccgcgucaagcugagcgcccugacccucaaggggacguccuacaagaucugcaccgacaagauguucuucgugaagaaccccaccgacaccggccacgggacgguggucaugcaggugaaggugagcaagggcgcgcccugccggauccccgucaucguggccgacgaccugaccgccgccaucaacaagggcauccuggugaccgucaacccgaucgccuccaccaacgacgacgaggugcucaucgaggugaacccgcccuucggggacagcuacaucaucgucggccgcggggacucccggcugaccuaccaguggcacaaggagggcagcuccaucggcaagcuguucacgcagaccaugaaggggguggagcgccucgcggugaugggcgacaccgccugggacuucagcuccgccgggggcuucuucaccagcgucgggaagggcauccacacgguguucggcuccgccuuccaggggcuguucggcgggcugaacuggaucaccaaggugaucaugggcgccguccucaucuggguggggaucaacacccggaacaugaccaugagcauguccaugauccuggugggcgucaucaugauguuccugagccugggcgugggggcgugaggacuaguaauaaggaaacuguaugaaugucugugggcaggaagugaagagauccuucuguaaagguuuuuggaauuaugucugcugaauaauaaacuuuuuugaaauaauaaaucugguagaaaaaugagaucuaaaaaaaaaaaaaaaaaaaaaaaaaaaaaaaaaaaaaaaaaaaaaaaaaaaaaaaaaaaaaaaaugcaucccccccccccccccccccccccccccccccaaaggcucuuuucagagccaccagaauu

SEQ ID NO: 898 - RNA, 2462 nt, Artificial Sequence
  mRNA product Design g-4 comprising derived and/or modified sequence from YFV__NC_002031.1__SSjev-prME-XX (polyprotein: aa122-788) (opt1)
gggagacuccugucgggcggaaguaggaggaguagaguuuaaaaacaguacucuuuuuccgguucgggacguaguugaagcaacgacaagccggauaaccgcucuugagacaggaagcuuaccaugggcaagcgcagcgccggguccaucauguggcuggccagccucgcgguggucaucgccugcgccggcgccgugacgcuggugcggaagaaccgcuggcuccugcugaacgucaccuccgaggaccucggcaagaccuucagcguggggaccggcaacugcacgaccaacauccuggaggccaaguacuggugccccgacuccauggaguacaacugcccgaaccugagcccccgggaggagcccgacgacaucgacugcuggugcuacggcguggagaacguccgcguggccuacgggaagugcgacuccgcgggccggagccgccggucccgccgggccaucgaccuccccacccacgagaaccacgggcugaagacccgccaggagaaguggaugacgggccggaugggggagcgccagcugcagaagaucgagcggugguucgugcgcaacccguucuucgccgucaccgcccucaccaucgccuaccuggugggcagcaacaugacccagcggguggucaucgcgcugcucgugcuggccgugggccccgccuacuccgcccacugcaucgggaucacggaccgcgacuucaucgagggcguccacgggggcaccugggugagcgcgacccuggagcaggacaagugcgugaccgucauggcccccgacaagcccucccucgacaucagccuggagacgguggccaucgaccggccggccgaggugcgcaaggucugcuacaacgccgugcugacccacgugaagaucaacgacaagugccccuccaccggcgaggcgcaccucgccgaggagaacgagggggacaacgccugcaagcggaccuacagcgaccggggcugggggaacggcugcgggcuguucggcaagggcuccaucgucgccugcgccaaguucacgugcgcgaagagcaugucccuguucgagguggaccagaccaagauccaguacgucauccgcgcccagcuccacgugggggccaagcaggagaacuggaacaccgacaucaagacccugaaguucgacgcccugagcggcagccaggagguggaguucaucggguacggcaaggccacgcucgagugccagguccagaccgcgguggacuucgggaacuccuacaucgccgagauggagaccgagagcuggaucguggaccggcagugggcccaggaccugacccugcccuggcaguccggcagcggcggggucuggcgcgagaugcaccaccucguggaguucgagcccccgcacgccgccacgauccgggugcuggcgcugggcaaccaggaggggucccucaagaccgcccugaccggcgccaugcgcgucaccaaggacacgaacgacaacaaccuguacaagcuccacgggggccacgugagcugccgggugaagcuguccgcccugacccucaagggcaccagcuacaagaucugcaccgacaagauguucuucgucaagaaccccacggacaccgggcacggcaccguggugaugcaggucaagguguccaagggggcgcccugccgcaucccggugaucgucgccgacgaccugaccgccgccaucaacaagggcauccuggugaccgugaacccgaucgccagcacgaacgacgacgagguccucaucgaggugaacccccccuucggcgacuccuacaucaucguggggcggggcgacagccgccugaccuaccaguggcacaaggagggguccagcaucggcaagcuguucacccagaccaugaagggggucgagcggcuggcggugaugggcgacacggccugggacuucuccagcgccggcggguucuucaccuccgugggcaaggggauccacaccgucuucggcagcgccuuccaggggcucuucggcggccugaacuggaucaccaaggugaucaugggggccgugcugaucugggucggcaucaacacgcgcaacaugaccauguccaugagcaugauccucgugggggugaucaugauguuccugagccugggcgucggggcggaccagggcugcgccaucaacuucggcaagugaggacuaguaauaaggaaacuguaugaaugucugugggcaggaagugaagagauccuucuguaaagguuuuuggaauuaugucugcugaauaauaaacuuuuuugaaauaauaaaucugguagaaaaaugagaucuaaaaaaaaaaaaaaaaaaaaaaaaaaaaaaaaaaaaaaaaaaaaaaaaaaaaaaaaaaaaaaaaugcaucccccccccccccccccccccccccccccccaaaggcucuuuucagagccaccagaauu

SEQ ID NO: 899 - RNA, 2432 nt, Artificial Sequence
  mRNA product Design g-4 comprising derived and/or modified sequence from YFV__NC_002031.1__SSjev-prME (polyprotein: aa122-778) (opt1)
gggagacuccugucgggcggaaguaggaggaguagaguuuaaaaacaguacucuuuuuccgguucgggacguaguugaagcaacgacaagccggauaaccgcucuugagacaggaagcuuaccaugggcaagcgcagcgccggguccaucauguggcuggccagccucgcgguggucaucgccugcgccggcgccgugacccugguccgcaagaaccgguggcuccugcugaacgugaccagcgaggaccucggcaagacguucuccguggggaccggcaacugcaccaccaacauccuggaggccaaguacuggugccccgacagcauggaguacaacugcccgaaccuguccccgcgcgaggagcccgacgacaucgacugcuggugcuacggggucgagaacgugcggguggccuacggcaagugcgacagcgcggggcgcucccggcgcagccggcgcgccaucgaccuccccacgcacgagaaccacggccugaagacccggcaggagaaguggaugaccggccgcaugggggagcggcagcugcagaagaucgagcgcugguucguccggaaccccuucuucgccgugaccgcccucacgaucgccuaccuggugggcuccaacaugacccagcgcgucgugaucgcgcugcucgugcuggccgucgggcccgccuacagcgcccacugcaucggcaucaccgaccgggacuucaucgagggggugcacggcggcaccuggguguccgcgacgcuggagcaggacaagugcgucaccgugauggcccccgacaagcccagccucgacaucucccuggagaccguggccaucgaccgcccggccgagguccggaaggugugcuacaacgccgugcugacccacgucaagaucaacgacaagugccccagcacgggggaggcgcaccucgccgaggagaacgagggcgacaacgccugcaagcgcaccuacuccgaccggggguggggcaacggcugcgggcuguucggcaaggggagcaucguggccugcgccaaguucaccugcgcgaaguccaugagccuguucgagguggaccagaccaagauccaguacgucauccgcgcccagcuccacgugggcgccaagcaggagaacuggaacacggacaucaagacccugaaguucgacgcccuguccgggagccaggaggucgaguucaucggcuacggcaaggccacccucgagugccaggugcagaccgcgguggacuucgggaacuccuacaucgccgagauggagacggagagcuggaucgucgaccggcagugggcccaggaccugacccugcccuggcagagcggcuccgggggcguguggcgcgagaugcaccaccucguggaguucgagcccccgcacgccgccaccauccgcguccuggcgcuggggaaccaggagggcagccucaagaccgcccugacgggcgccaugcgggugaccaaggacaccaacgacaacaaccuguacaagcuccacgggggccacguguccugccgcgucaagcugagcgcccugacccucaaggggacguccuacaagaucugcaccgacaagauguucuucgugaagaaccccaccgacaccggccacgggacgguggucaugcaggugaaggugagcaagggcgcgcccugccggauccccgucaucguggccgacgaccugaccgccgccaucaacaagggcauccuggugaccgucaacccgaucgccuccaccaacgacgacgaggugcucaucgaggugaacccgcccuucggggacagcuacaucaucgucggccgcggggacucccggcugaccuaccaguggcacaaggagggcagcuccaucggcaagcuguucacgcagaccaugaaggggguggagcgccucgcggugaugggcgacaccgccugggacuucagcuccgccgggggcuucuucaccagcgucgggaagggcauccacacgguguucggcuccgccuuccaggggcuguucggcgggcugaacuggaucaccaaggugaucaugggcgccguccucaucuggguggggaucaacacccggaacaugaccaugagcauguccaugauccuggugggcgucaucaugauguuccugagccugggcgugggggcgugaggacuaguaauaaggaaacuguaugaaugucugugggcaggaagugaagagauccuucuguaaagguuuuuggaauuaugucugcugaauaauaaacuuuuuugaaauaauaaaucugguagaaaaaugagaucuaaaaaaaaaaaaaaaaaaaaaaaaaaaaaaaaaaaaaaaaaaaaaaaaaaaaaaaaaaaaaaaaugcaucccccccccccccccccccccccccccccccaaaggcucuuuucagagccaccagaauu

SEQ ID NO: 900 - RNA, 2480 nt, Artificial Sequence
  mRNA product Design g-4 comprising derived and/or modified sequence from YFV__NC_002031.1__X-SS-prME-XX (polyprotein: aa92-788) (opt1)
gggagacuccugucgggcggaaguaggaggaguagaguuuaaaaacaguacucuuuuuccgguucgggacguaguugaagcaacgacaagccggauaaccgcucuugagacaggaagcuuaccaugcggggccugagcucccgcaagcggcgcagccacgacgugcucaccguccaguuccugauccuggggaugcuccugaugaccggcggggugacgcuggugcggaagaaccgcuggcuccugcugaacgucaccuccgaggaccucggcaagaccuucagcguggggaccggcaacugcacgaccaacauccuggaggccaaguacuggugccccgacuccauggaguacaacugcccgaaccugagcccccgggaggagcccgacgacaucgacugcuggugcuacggcguggagaacguccgcguggccuacgggaagugcgacuccgcgggccggagccgccggucccgccgggccaucgaccuccccacccacgagaaccacgggcugaagacccgccaggagaaguggaugacgggccggaugggggagcgccagcugcagaagaucgagcggugguucgugcgcaacccguucuucgccgucaccgcccucaccaucgccuaccuggugggcagcaacaugacccagcggguggucaucgcgcugcucgugcuggccgugggccccgccuacuccgcccacugcaucgggaucacggaccgcgacuucaucgagggcguccacgggggcaccugggugagcgcgacccuggagcaggacaagugcgugaccgucauggcccccgacaagcccucccucgacaucagccuggagacgguggccaucgaccggccggccgaggugcgcaaggucugcuacaacgccgugcugacccacgugaagaucaacgacaagugccccuccaccggcgaggcgcaccucgccgaggagaacgagggggacaacgccugcaagcggaccuacagcgaccggggcugggggaacggcugcgggcuguucggcaagggcuccaucgucgccugcgccaaguucacgugcgcgaaguccaugagccuguucgagguggaccagaccaagauccaguacgucauccgcgcccagcuccacgugggggccaagcaggagaacuggaacaccgacaucaagacccugaaguucgacgcccugagcggcagccaggagguggaguucaucggguacggcaaggccacgcucgagugccagguccagaccgcgguggacuucgggaacuccuacaucgccgagauggagaccgagagcuggaucguggaccggcagugggcccaggaccugacccugcccuggcaguccggcagcggcggggucuggcgcgagaugcaccaccucguggaguucgagcccccgcacgccgccacgauccgggugcuggcgcugggcaaccaggaggggucccucaagaccgcccugaccggcgccaugcgcgucaccaaggacacgaacgacaacaaccuguacaagcuccacgggggccacgugagcugccgggugaagcuguccgcccugacccucaagggcaccagcuacaagaucugcaccgacaagauguucuucgucaagaaccccacggacaccgggcacggcaccguggugaugcaggucaagguguccaagggggcgcccugccgcaucccggugaucgucgccgacgaccugaccgccgccaucaacaagggcauccuggugaccgugaacccgaucgccagcacgaacgacgacgagguccucaucgaggugaacccccccuucggcgacuccuacaucaucguggggcggggcgacagccgccugaccuaccaguggcacaaggagggguccagcaucggcaagcuguucacccagaccaugaagggggucgagcggcuggcggugaugggcgacacggccugggacuucuccagcgccggcggguucuucaccuccgugggcaaggggauccacaccgucuucggcagcgccuuccaggggcuguucggcggccucaacuggaucaccaaggugaucaugggggccgugcugaucugggucggcaucaacacgcgcaacaugaccauguccaugagcaugauccucgugggggugaucaugauguuccugagccugggcgucggggcggaccagggcugcgccaucaacuucggcaagugaggacuaguaauaaggaaacuguaugaaugucugugggcaggaagugaagagauccuucuguaaagguuuuuggaauuaugucugcugaauaauaaacuuuuuugaaauaauaaaucugguagaaaaaugagaucuaaaaaaaaaaaaaaaaaaaaaaaaaaaaaaaaaaaaaaaaaaaaaaaaaaaaaaaaaaaaaaaaugcaucccccccccccccccccccccccccccccccaaaggcucuuuucagagccaccagaauu

SEQ ID NO: 901 - RNA, 2417 nt, Artificial Sequence
  mRNA product Design g-4 comprising derived and/or modified sequence from YFV__NC_002031.1__SS-prME (polyprotein: M,aa104-778) (opt1)
gggagacuccugucgggcggaaguaggaggaguagaguuuaaaaacaguacucuuuuuccgguucgggacguaguugaagcaacgacaagccggauaaccgcucuugagacaggaagcuuaccauggacgugcucaccguccaguuccugauccuggggaugcuccugaugaccggcggggugacgcuggugcggaagaaccgcuggcuccugcugaacgucaccuccgaggaccucggcaagaccuucagcguggggaccggcaacugcacgaccaacauccuggaggccaaguacuggugccccgacuccauggaguacaacugcccgaaccugagcccccgggaggagcccgacgacaucgacugcuggugcuacggcguggagaacguccgcguggccuacgggaagugcgacuccgcgggccggagccgccggucccgccgggccaucgaccuccccacccacgagaaccacgggcugaagacccgccaggagaaguggaugacgggccggaugggggagcgccagcugcagaagaucgagcggugguucgugcgcaacccguucuucgccgucaccgcccucaccaucgccuaccuggugggcagcaacaugacccagcggguggucaucgcgcugcucgugcuggccgugggccccgccuacuccgcccacugcaucgggaucacggaccgcgacuucaucgagggcguccacgggggcaccugggugagcgcgacccuggagcaggacaagugcgugaccgucauggcccccgacaagcccucccucgacaucagccuggagacgguggccaucgaccggccggccgaggugcgcaaggucugcuacaacgccgugcugacccacgugaagaucaacgacaagugccccuccaccggcgaggcgcaccucgccgaggagaacgagggggacaacgccugcaagcggaccuacagcgaccggggcugggggaacggcugcgggcuguucggcaagggcuccaucgucgccugcgccaaguucacgugcgcgaaguccaugagccuguucgagguggaccagaccaagauccaguacgucauccgcgcccagcuccacgugggggccaagcaggagaacuggaacaccgacaucaagacccugaaguucgacgcccugagcggcagccaggagguggaguucaucggguacggcaaggccacgcucgagugccagguccagaccgcgguggacuucgggaacuccuacaucgccgagauggagaccgagagcuggaucguggaccggcagugggcccaggaccugacccugcccuggcaguccggcagcggcggggucuggcgcgagaugcaccaccucguggaguucgagcccccgcacgccgccacgauccgggugcuggcgcugggcaaccaggaggggucccucaagaccgcccugaccggcgccaugcgcgucaccaaggacacgaacgacaacaaccuguacaagcuccacgggggccacgugagcugccgggugaagcuguccgcccugacccucaagggcaccagcuacaagaucugcaccgacaagauguucuucgucaagaaccccacggacaccgggcacggcaccguggugaugcaggucaagguguccaagggggcgcccugccgcaucccggugaucgucgccgacgaccugaccgccgccaucaacaagggcauccuggugaccgugaacccgaucgccagcacgaacgacgacgagguccucaucgaggugaacccccccuucggcgacuccuacaucaucguggggcggggcgacagccgccugaccuaccaguggcacaaggagggguccagcaucggcaagcuguucacccagaccaugaagggggucgagcggcuggcggugaugggcgacacggccugggacuucuccagcgccggcggguucuucaccuccgugggcaaggggauccacaccgucuucggcagcgccuuccaggggcuguucggcggccucaacuggaucaccaaggugaucaugggggccgugcugaucugggucggcaucaacacgcgcaacaugaccauguccaugagcaugauccucgugggggugaucaugauguuccugagccugggcgucggggcgugaggacuaguaauaaggaaacuguaugaaugucugugggcaggaagugaagagauccuucuguaaagguuuuuggaauuaugucugcugaauaauaaacuuuuuugaaauaauaaaucugguagaaaaaugagaucuaaaaaaaaaaaaaaaaaaaaaaaaaaaaaaaaaaaaaaaaaaaaaaaaaaaaaaaaaaaaaaaaugcaucccccccccccccccccccccccccccccccaaaggcucuuuucagagccaccagaauu

SEQ ID NO: 902 - RNA, 2444 nt, Artificial Sequence
  mRNA product Design g-4 comprising derived and/or modified sequence from YFV__NC_002031.1__SSIgE-prME-XX (polyprotein: aa122-788) (opt1)
gggagacuccugucgggcggaaguaggaggaguagaguuuaaaaacaguacucuuuuuccgguucgggacguaguugaagcaacgacaagccggauaaccgcucuugagacaggaagcuuaccauggacuggaccuggauccuguuccucguggccgccgcgacccgcguccacagcgugacgcuggugcggaagaaccgcuggcuccugcugaacgucaccuccgaggaccucggcaagaccuucagcguggggaccggcaacugcacgaccaacauccuggaggccaaguacuggugccccgacuccauggaguacaacugcccgaaccugagcccccgggaggagcccgacgacaucgacugcuggugcuacggcguggagaacguccgcguggccuacgggaagugcgacuccgcgggccggagccgccggucccgccgggccaucgaccuccccacccacgagaaccacgggcugaagacccgccaggagaaguggaugacgggccggaugggggagcgccagcugcagaagaucgagcggugguucgugcgcaacccguucuucgccgucaccgcccucaccaucgccuaccuggugggcagcaacaugacccagcggguggucaucgcgcugcucgugcuggccgugggccccgccuacuccgcccacugcaucgggaucacggaccgcgacuucaucgagggcguccacgggggcaccugggugagcgcgacccuggagcaggacaagugcgugaccgucauggcccccgacaagcccucccucgacaucagccuggagacgguggccaucgaccggccggccgaggugcgcaaggucugcuacaacgccgugcugacccacgugaagaucaacgacaagugccccuccaccggcgaggcgcaccucgccgaggagaacgagggggacaacgccugcaagcggaccuacagcgaccggggcugggggaacggcugcgggcuguucggcaagggcuccaucgucgccugcgccaaguucacgugcgcgaaguccaugagccuguucgagguggaccagaccaagauccaguacgucauccgcgcccagcuccacgugggggccaagcaggagaacuggaacaccgacaucaagacccugaaguucgacgcccugagcggcagccaggagguggaguucaucggguacggcaaggccacgcucgagugccagguccagaccgcgguggacuucgggaacuccuacaucgccgagauggagaccgagagcuggaucguggaccggcagugggcccaggaccugacccugcccuggcaguccggcagcggcggggucuggcgcgagaugcaccaccucguggaguucgagcccccgcacgccgccacgauccgggugcuggcgcugggcaaccaggaggggucccucaagaccgcccugaccggcgccaugcgcgucaccaaggacacgaacgacaacaaccuguacaagcuccacgggggccacgugagcugccgggugaagcuguccgcccugacccucaagggcaccagcuacaagaucugcaccgacaagauguucuucgucaagaaccccacggacaccgggcacggcaccguggugaugcaggucaagguguccaagggggcgcccugccgcaucccggugaucgucgccgacgaccugaccgccgccaucaacaagggcauccuggugaccgugaacccgaucgccagcacgaacgacgacgagguccucaucgaggugaacccccccuucggcgacuccuacaucaucguggggcggggcgacagccgccugaccuaccaguggcacaaggagggguccagcaucggcaagcuguucacccagaccaugaagggggucgagcggcuggcggugaugggcgacacggccugggacuucuccagcgccggcggguucuucaccuccgugggcaaggggauccacaccgucuucggcagcgccuuccaggggcuguucggcggccucaacuggaucaccaaggugaucaugggggccgugcugaucugggucggcaucaacacgcgcaacaugaccauguccaugagcaugauccucgugggggugaucaugauguuccugagccugggcgucggggcggaccagggcugcgccaucaacuucggcaagugaggacuaguaauaaggaaacuguaugaaugucugugggcaggaagugaagagauccuucuguaaagguuuuuggaauuaugucugcugaauaauaaacuuuuuugaaauaauaaaucugguagaaaaaugagaucuaaaaaaaaaaaaaaaaaaaaaaaaaaaaaaaaaaaaaaaaaaaaaaaaaaaaaaaaaaaaaaaaugcaucccccccccccccccccccccccccccccccaaaggcucuuuucagagccaccagaauu

SEQ ID NO: 903 - RNA, 2414 nt, Artificial Sequence
  mRNA product Design g-4 comprising derived and/or modified sequence from YFV__NC_002031.1__SSIgE-prME (polyprotein: aa122-778) (opt1)
gggagacuccugucgggcggaaguaggaggaguagaguuuaaaaacaguacucuuuuuccgguucgggacguaguugaagcaacgacaagccggauaaccgcucuugagacaggaagcuuaccauggacuggaccuggauccuguuccucguggccgccgcgacccgcguccacagcgugacgcuggugcggaagaaccgcuggcuccugcugaacgucaccuccgaggaccucggcaagaccuucagcguggggaccggcaacugcacgaccaacauccuggaggccaaguacuggugccccgacuccauggaguacaacugcccgaaccugagcccccgggaggagcccgacgacaucgacugcuggugcuacggcguggagaacguccgcguggccuacgggaagugcgacuccgcgggccggagccgccggucccgccgggccaucgaccuccccacccacgagaaccacgggcugaagacccgccaggagaaguggaugacgggccggaugggggagcgccagcugcagaagaucgagcggugguucgugcgcaacccguucuucgccgucaccgcccucaccaucgccuaccuggugggcagcaacaugacccagcggguggucaucgcgcugcucgugcuggccgugggccccgccuacuccgcccacugcaucgggaucacggaccgcgacuucaucgagggcguccacgggggcaccugggugagcgcgacccuggagcaggacaagugcgugaccgucauggcccccgacaagcccucccucgacaucagccuggagacgguggccaucgaccggccggccgaggugcgcaaggucugcuacaacgccgugcugacccacgugaagaucaacgacaagugccccuccaccggcgaggcgcaccucgccgaggagaacgagggggacaacgccugcaagcggaccuacagcgaccggggcugggggaacggcugcgggcuguucggcaagggcuccaucgucgccugcgccaaguucacgugcgcgaaguccaugagccuguucgagguggaccagaccaagauccaguacgucauccgcgcccagcuccacgugggggccaagcaggagaacuggaacaccgacaucaagacccugaaguucgacgcccugagcggcagccaggagguggaguucaucggguacggcaaggccacgcucgagugccagguccagaccgcgguggacuucgggaacuccuacaucgccgagauggagaccgagagcuggaucguggaccggcagugggcccaggaccugacccugcccuggcaguccggcagcggcggggucuggcgcgagaugcaccaccucguggaguucgagcccccgcacgccgccacgauccgggugcuggcgcugggcaaccaggaggggucccucaagaccgcccugaccggcgccaugcgcgucaccaaggacacgaacgacaacaaccuguacaagcuccacgggggccacgugagcugccgggugaagcuguccgcccugacccucaagggcaccagcuacaagaucugcaccgacaagauguucuucgucaagaaccccacggacaccgggcacggcaccguggugaugcaggucaagguguccaagggggcgcccugccgcaucccggugaucgucgccgacgaccugaccgccgccaucaacaagggcauccuggugaccgugaacccgaucgccagcacgaacgacgacgagguccucaucgaggugaacccccccuucggcgacuccuacaucaucguggggcggggcgacagccgccugaccuaccaguggcacaaggagggguccagcaucggcaagcuguucacccagaccaugaagggggucgagcggcuggcggugaugggcgacacggccugggacuucuccagcgccggcggguucuucaccuccgugggcaaggggauccacaccgucuucggcagcgccuuccaggggcuguucggcggccucaacuggaucaccaaggugaucaugggggccgugcugaucugggucggcaucaacacgcgcaacaugaccauguccaugagcaugauccucgugggggugaucaugauguuccugagccugggcgucggggcgugaggacuaguaauaaggaaacuguaugaaugucugugggcaggaagugaagagauccuucuguaaagguuuuuggaauuaugucugcugaauaauaaacuuuuuugaaauaauaaaucugguagaaaaaugagaucuaaaaaaaaaaaaaaaaaaaaaaaaaaaaaaaaaaaaaaaaaaaaaaaaaaaaaaaaaaaaaaaaugcaucccccccccccccccccccccccccccccccaaaggcucuuuucagagccaccagaauu

SEQ ID NO: 904 - RNA, 2462 nt, Artificial Sequence
  mRNA product Design g-4 comprising derived and/or modified sequence from YFV__NC_002031.1__SSjev-prME-XX (polyprotein: aa122-788) (opt1)
gggagacuccugucgggcggaaguaggaggaguagaguuuaaaaacaguacucuuuuuccgguucgggacguaguugaagcaacgacaagccggauaaccgcucuugagacaggaagcuuaccaugggcaagcgcagcgccggguccaucauguggcuggccagccucgcgguggucaucgccugcgccggcgccgugacgcuggugcggaagaaccgcuggcuccugcugaacgucaccuccgaggaccucggcaagaccuucagcguggggaccggcaacugcacgaccaacauccuggaggccaaguacuggugccccgacuccauggaguacaacugcccgaaccugagcccccgggaggagcccgacgacaucgacugcuggugcuacggcguggagaacguccgcguggccuacgggaagugcgacuccgcgggccggagccgccggucccgccgggccaucgaccuccccacccacgagaaccacgggcugaagacccgccaggagaaguggaugacgggccggaugggggagcgccagcugcagaagaucgagcggugguucgugcgcaacccguucuucgccgucaccgcccucaccaucgccuaccuggugggcagcaacaugacccagcggguggucaucgcgcugcucgugcuggccgugggccccgccuacuccgcccacugcaucgggaucacggaccgcgacuucaucgagggcguccacgggggcaccugggugagcgcgacccuggagcaggacaagugcgugaccgucauggcccccgacaagcccucccucgacaucagccuggagacgguggccaucgaccggccggccgaggugcgcaaggucugcuacaacgccgugcugacccacgugaagaucaacgacaagugccccuccaccggcgaggcgcaccucgccgaggagaacgagggggacaacgccugcaagcggaccuacagcgaccggggcugggggaacggcugcgggcuguucggcaagggcuccaucgucgccugcgccaaguucacgugcgcgaaguccaugagccuguucgagguggaccagaccaagauccaguacgucauccgcgcccagcuccacgugggggccaagcaggagaacuggaacaccgacaucaagacccugaaguucgacgcccugagcggcagccaggagguggaguucaucggguacggcaaggccacgcucgagugccagguccagaccgcgguggacuucgggaacuccuacaucgccgagauggagaccgagagcuggaucguggaccggcagugggcccaggaccugacccugcccuggcaguccggcagcggcggggucuggcgcgagaugcaccaccucguggaguucgagcccccgcacgccgccacgauccgggugcuggcgcugggcaaccaggaggggucccucaagaccgcccugaccggcgccaugcgcgucaccaaggacacgaacgacaacaaccuguacaagcuccacgggggccacgugagcugccgggugaagcuguccgcccugacccucaagggcaccagcuacaagaucugcaccgacaagauguucuucgucaagaaccccacggacaccgggcacggcaccguggugaugcaggucaagguguccaagggggcgcccugccgcaucccggugaucgucgccgacgaccugaccgccgccaucaacaagggcauccuggugaccgugaacccgaucgccagcacgaacgacgacgagguccucaucgaggugaacccccccuucggcgacuccuacaucaucguggggcggggcgacagccgccugaccuaccaguggcacaaggagggguccagcaucggcaagcuguucacccagaccaugaagggggucgagcggcuggcggugaugggcgacacggccugggacuucuccagcgccggcggguucuucaccuccgugggcaaggggauccacaccgucuucggcagcgccuuccaggggcuguucggcggccucaacuggaucaccaaggugaucaugggggccgugcugaucugggucggcaucaacacgcgcaacaugaccauguccaugagcaugauccucgugggggugaucaugauguuccugagccugggcgucggggcggaccagggcugcgccaucaacuucggcaagugaggacuaguaauaaggaaacuguaugaaugucugugggcaggaagugaagagauccuucuguaaagguuuuuggaauuaugucugcugaauaauaaacuuuuuugaaauaauaaaucugguagaaaaaugagaucuaaaaaaaaaaaaaaaaaaaaaaaaaaaaaaaaaaaaaaaaaaaaaaaaaaaaaaaaaaaaaaaaugcaucccccccccccccccccccccccccccccccaaaggcucuuuucagagccaccagaauu

SEQ ID NO: 905 - RNA, 2432 nt, Artificial Sequence
  mRNA product Design g-4 comprising derived and/or modified sequence from YFV__NC_002031.1__SSjev-prME (polyprotein: aa122-778) (opt1)
gggagacuccugucgggcggaaguaggaggaguagaguuuaaaaacaguacucuuuuuccgguucgggacguaguugaagcaacgacaagccggauaaccgcucuugagacaggaagcuuaccaugggcaagcgcagcgccggguccaucauguggcuggccagccucgcgguggucaucgccugcgccggcgccgugacgcuggugcggaagaaccgcuggcuccugcugaacgucaccuccgaggaccucggcaagaccuucagcguggggaccggcaacugcacgaccaacauccuggaggccaaguacuggugccccgacuccauggaguacaacugcccgaaccugagcccccgggaggagcccgacgacaucgacugcuggugcuacggcguggagaacguccgcguggccuacgggaagugcgacuccgcgggccggagccgccggucccgccgggccaucgaccuccccacccacgagaaccacgggcugaagacccgccaggagaaguggaugacgggccggaugggggagcgccagcugcagaagaucgagcggugguucgugcgcaacccguucuucgccgucaccgcccucaccaucgccuaccuggugggcagcaacaugacccagcggguggucaucgcgcugcucgugcuggccgugggccccgccuacuccgcccacugcaucgggaucacggaccgcgacuucaucgagggcguccacgggggcaccugggugagcgcgacccuggagcaggacaagugcgugaccgucauggcccccgacaagcccucccucgacaucagccuggagacgguggccaucgaccggccggccgaggugcgcaaggucugcuacaacgccgugcugacccacgugaagaucaacgacaagugccccuccaccggcgaggcgcaccucgccgaggagaacgagggggacaacgccugcaagcggaccuacagcgaccggggcugggggaacggcugcgggcuguucggcaagggcuccaucgucgccugcgccaaguucacgugcgcgaaguccaugagccuguucgagguggaccagaccaagauccaguacgucauccgcgcccagcuccacgugggggccaagcaggagaacuggaacaccgacaucaagacccugaaguucgacgcccugagcggcagccaggagguggaguucaucggguacggcaaggccacgcucgagugccagguccagaccgcgguggacuucgggaacuccuacaucgccgagauggagaccgagagcuggaucguggaccggcagugggcccaggaccugacccugcccuggcaguccggcagcggcggggucuggcgcgagaugcaccaccucguggaguucgagcccccgcacgccgccacgauccgggugcuggcgcugggcaaccaggaggggucccucaagaccgcccugaccggcgccaugcgcgucaccaaggacacgaacgacaacaaccuguacaagcuccacgggggccacgugagcugccgggugaagcuguccgcccugacccucaagggcaccagcuacaagaucugcaccgacaagauguucuucgucaagaaccccacggacaccgggcacggcaccguggugaugcaggucaagguguccaagggggcgcccugccgcaucccggugaucgucgccgacgaccugaccgccgccaucaacaagggcauccuggugaccgugaacccgaucgccagcacgaacgacgacgagguccucaucgaggugaacccccccuucggcgacuccuacaucaucguggggcggggcgacagccgccugaccuaccaguggcacaaggagggguccagcaucggcaagcuguucacccagaccaugaagggggucgagcggcuggcggugaugggcgacacggccugggacuucuccagcgccggcggguucuucaccuccgugggcaaggggauccacaccgucuucggcagcgccuuccaggggcuguucggcggccucaacuggaucaccaaggugaucaugggggccgugcugaucugggucggcaucaacacgcgcaacaugaccauguccaugagcaugauccucgugggggugaucaugauguuccugagccugggcgucggggcgugaggacuaguaauaaggaaacuguaugaaugucugugggcaggaagugaagagauccuucuguaaagguuuuuggaauuaugucugcugaauaauaaacuuuuuugaaauaauaaaucugguagaaaaaugagaucuaaaaaaaaaaaaaaaaaaaaaaaaaaaaaaaaaaaaaaaaaaaaaaaaaaaaaaaaaaaaaaaaugcaucccccccccccccccccccccccccccccccaaaggcucuuuucagagccaccagaauu

SEQ ID NO: 906 - RNA, 2480 nt, Artificial Sequence
  mRNA product Design g-4 comprising derived and/or modified sequence from YFV__NC_002031.1__X-SS-prME-XX (polyprotein: aa92-788) (opt1)
gggagacuccugucgggcggaaguaggaggaguagaguuuaaaaacaguacucuuuuuccgguucgggacguaguugaagcaacgacaagccggauaaccgcucuugagacaggaagcuuaccaugcgcggccugagcucccggaagcgccggagccacgacgugcucaccguccaguuccugauccuggggaugcuccugaugaccggcggggugacgcuggugcgcaagaaccgguggcuccugcugaacgucaccuccgaggaccucggcaagaccuucagcguggggaccggcaacugcacgaccaacauccuggaggccaaguacuggugccccgacuccauggaguacaacugccccaaccugagcccccgcgaggagcccgacgacaucgacugcuggugcuacggcguggagaacguccggguggccuacgggaagugcgacuccgcgggccgcagccggcgcucccggcgcgccaucgaccuccccacccacgagaaccacgggcugaagacccggcaggagaaguggaugacgggccgcaugggggagcggcagcugcagaagaucgagcgcugguucgugcggaacccguucuucgccgucaccgcccucaccaucgccuaccuggugggcagcaacaugacccagcgcguggucaucgcgcugcucgugcuggccgugggccccgccuacuccgcccacugcaucgggaucacggaccgggacuucaucgagggcguccacgggggcaccugggugagcgcgacccuggagcaggacaagugcgugaccgucauggcccccgacaagcccucccucgacaucagccuggagacgguggccaucgaccgcccggccgaggugcggaaggucugcuacaacgccgugcugacccacgugaagaucaacgacaagugccccuccaccggcgaggcgcaccucgccgaggagaacgagggggacaacgccugcaagcgcaccuacagcgaccgcggcugggggaacggcugcgggcuguucggcaagggcuccaucgucgccugcgccaaguucacgugcgccaagagcaugucccuguucgagguggaccagaccaagauccaguacgucauccgggcgcagcuccacgugggggccaagcaggagaacuggaacaccgacaucaagacccugaaguucgacgcccugagcggcagccaggagguggaguucaucggguacggcaaggccacgcucgagugccagguccagaccgcgguggacuucgggaacuccuacaucgccgagauggagaccgagagcuggaucguggaccgccagugggcccaggaccugacccugcccuggcaguccggcagcggcggggucuggcgggagaugcaccaccucguggaguucgagcccccgcacgccgccacgauccgcgugcuggcgcugggcaaccaggaggggucccucaagaccgcccugaccggcgccaugcgggucaccaaggacacgaacgacaacaaccuguacaagcuccacgggggccacgugagcugccgcgugaagcuguccgcccugacccucaagggcaccagcuacaagaucugcaccgacaagauguucuucgucaagaaccccacggacaccgggcacggcaccguggugaugcaggucaagguguccaagggggcgcccugccggauccccgugaucgucgccgacgaccugaccgccgccaucaacaagggcauccuggugaccgugaacccgaucgccagcacgaacgacgacgagguccucaucgaggugaacccgcccuucggcgacuccuacaucaucguggggcgcggcgacagccggcugaccuaccaguggcacaaggagggguccagcaucggcaagcuguucacccagaccaugaagggggucgagcgccucgcggugaugggcgacacggccugggacuucuccagcgccggcggguucuucaccuccgugggcaaggggauccacaccgucuucggcagcgccuuccaggggcuguucggcggccugaacuggaucaccaaggugaucaugggggccgugcugaucugggucggcaucaacacgcggaacaugaccauguccaugagcaugauccucgugggggugaucaugauguuccugagccugggcgucggggcggaccagggcugcgccaucaacuucggcaagugaggacuaguaauaaggaaacuguaugaaugucugugggcaggaagugaagagauccuucuguaaagguuuuuggaauuaugucugcugaauaauaaacuuuuuugaaauaauaaaucugguagaaaaaugagaucuaaaaaaaaaaaaaaaaaaaaaaaaaaaaaaaaaaaaaaaaaaaaaaaaaaaaaaaaaaaaaaaaugcaucccccccccccccccccccccccccccccccaaaggcucuuuucagagccaccagaauu

SEQ ID NO: 907 - RNA, 2417 nt, Artificial Sequence
  mRNA product Design g-4 comprising derived and/or modified sequence from YFV__NC_002031.1__SS-prME (polyprotein: M,aa104-778) (opt1)
gggagacuccugucgggcggaaguaggaggaguagaguuuaaaaacaguacucuuuuuccgguucgggacguaguugaagcaacgacaagccggauaaccgcucuugagacaggaagcuuaccauggacgugcugaccguccaguuccucauccugggcaugcugcucaugaccgggggcgugacgcuggugcgcaagaaccgguggcugcuccugaacgucaccagcgaggaccuggggaagaccuucuccgugggcaccgggaacugcacgaccaacauccucgaggccaaguacuggugccccgacagcauggaguacaacugccccaaccugagcccccgcgaggagcccgacgacaucgacugcuggugcuacggcguggagaacguccggguggccuacggcaagugcgacuccgcggggcgcucccggcgcagccggcgcgccaucgaccugcccacccacgagaaccacggccucaagacccggcaggagaaguggaugacggggcgcaugggcgagcggcagcugcagaagaucgagcgcugguucgugcggaacccguucuucgccgucaccgcccugaccaucgccuaccucgugggguccaacaugacccagcgcguggucaucgcgcugcuggugcucgccgugggccccgccuacagcgcccacugcaucggcaucacggaccgggacuucaucgaggggguccacggcgggaccuggguguccgcgacccuggagcaggacaagugcgugaccgucauggcccccgacaagcccagccuggacaucucccucgagacgguggccaucgaccgcccggccgaggugcggaaggucugcuacaacgccgugcugacccacgugaagaucaacgacaagugccccagcaccggcgaggcgcaccuggccgaggagaacgagggcgacaacgccugcaagcgcaccuacuccgaccggggguggggcaacgggugcggccucuucgggaagggcagcaucgucgccugcgccaaguucacgugcgcgaaguccaugagccuguucgagguggaccagaccaagauccaguacgucauccgcgcccagcugcacgugggcgccaagcaggagaacuggaacaccgacaucaagacccucaaguucgacgcccuguccgggagccaggagguggaguucaucggcuacgggaaggccacgcuggagugccagguccagaccgcgguggacuucggcaacuccuacaucgccgagauggagaccgagagcuggaucguggaccggcagugggcccaggaccucacccugcccuggcagagcggguccggcggcgucuggcgcgagaugcaccaccugguggaguucgagcccccgcacgccgccacgauccgcgugcucgcgcuggggaaccaggagggcagccugaagaccgcccucaccggggccaugcgggucaccaaggacacgaacgacaacaaccuguacaagcugcacggcgggcacguguccugccgcgugaagcucagcgcccugacccugaagggcaccuccuacaagaucugcaccgacaagauguucuucgucaagaaccccacggacaccggccacgggaccguggugaugcaggucaaggugagcaagggcgcgcccugccggauccccgugaucgucgccgacgaccucaccgccgccaucaacaaggggauccuggugaccgugaacccgaucgccuccacgaacgacgacgagguccugaucgaggugaacccgcccuucggcgacagcuacaucaucgugggccgcggggacucccggcucaccuaccaguggcacaaggagggcagcuccaucgggaagcuguucacccagaccaugaagggcgucgagcgccuggcggugaugggggacacggccugggacuucagcuccgccggcggcuucuucaccagcguggggaagggcauccacaccgucuucggguccgccuuccagggccucuucgggggccugaacuggaucaccaaggugaucaugggcgccgugcugaucugggucgggaucaacacgcggaacaugaccaugagcauguccaugauccuggugggcgugaucaugauguuccucagccugggggucggcgcgugaggacuaguaauaaggaaacuguaugaaugucugugggcaggaagugaagagauccuucuguaaagguuuuuggaauuaugucugcugaauaauaaacuuuuuugaaauaauaaaucugguagaaaaaugagaucuaaaaaaaaaaaaaaaaaaaaaaaaaaaaaaaaaaaaaaaaaaaaaaaaaaaaaaaaaaaaaaaaugcaucccccccccccccccccccccccccccccccaaaggcucuuuucagagccaccagaauu

SEQ ID NO: 908 - RNA, 2444 nt, Artificial Sequence
  mRNA product Design g-4 comprising derived and/or modified sequence from YFV__NC_002031.1__SSIgE-prME-XX (polyprotein: aa122-788) (opt1)
gggagacuccugucgggcggaaguaggaggaguagaguuuaaaaacaguacucuuuuuccgguucgggacguaguugaagcaacgacaagccggauaaccgcucuugagacaggaagcuuaccauggacuggaccuggauccuguuccucguggccgccgcgacccgcguccacagcgugacgcuggugcggaagaaccgcuggcugcuccugaacgucaccuccgaggaccugggcaagaccuucagcguggggaccggcaacugcacgaccaacauccucgaggccaaguacuggugccccgacuccauggaguacaacugccccaaccugagcccccgggaggagcccgacgacaucgacugcuggugcuacgggguggagaacguccgcguggccuacggcaagugcgacuccgccgggcggagccgccggucccgccgggccaucgaccugcccacccacgagaaccacggccucaagacccgccaggagaaguggaugacgggccggaugggggagcgccagcugcagaagaucgagcggugguucgugcgcaacccguucuucgcggucaccgcccugaccaucgccuaccucgugggcagcaacaugacccagcggguggucaucgcccugcuggugcucgcgguggggcccgccuacuccgcccacugcaucggcaucacggaccgcgacuucaucgaggggguccacggcggcaccugggugagcgccacccuggagcaggacaagugcgugaccgucauggcccccgacaagcccucccuggacaucagccucgagacgguggcgaucgaccggccggccgaggugcgcaaggucugcuacaacgccgugcugacccacgugaagaucaacgacaagugccccuccaccggggaggcccaccuggccgaggagaacgagggcgacaacgcgugcaagcggaccuacagcgaccgcggguggggcaacggcugcggccucuucgggaagggguccaucgucgccugcgccaaguucacgugcgccaagagcaugucccuguucgagguggaccagaccaagauccaguacgucauccgggcccagcugcacgugggcgcgaagcaggagaacuggaacaccgacaucaagacccucaaguucgacgcccugagcgggucccaggagguggaguucaucggcuacggcaaggccacgcuggagugccagguccagaccgccguggacuucgggaacagcuacaucgccgagauggagaccgagagcuggaucguggaccgccagugggcgcaggaccucacccugcccuggcaguccggcagcgggggcgucuggcgcgagaugcaccaccugguggaguucgagcccccgcacgccgccacgauccgggugcucgcccuggggaaccaggagggcucccugaagaccgcgcucaccggcgccaugcgcgucaccaaggacacgaacgacaacaaccuguacaagcugcacgggggccacgugagcugccgggugaagcucuccgcccugacccugaaggggaccagcuacaagaucugcaccgacaagauguucuucgucaagaaccccacggacaccggccacgggaccguggugaugcaggucaagguguccaagggcgcccccugccgcauccccgugaucgucgccgacgaccucaccgcggccaucaacaagggcauccuggugaccgugaacccgaucgccagcacgaacgacgacgagguccugaucgaggugaacccgcccuucggggacuccuacaucaucgugggccgcggggacagccggcucaccuaccaguggcacaaggagggcuccagcaucggcaagcuguucacccagaccaugaagggggucgagcggcuggccgugaugggcgacacggccugggacuucuccagcgccgggggcuucuucaccuccguggggaagggcauccacaccgucuucggcagcgcguuccaggggcuguucggcgggcucaacuggaucaccaaggugaucaugggcgccgugcugaucugggucgggaucaacacgcgcaacaugaccauguccaugagcaugauccucgugggcgugaucaugauguuccugucccugggcgucggggccgaccagggcugcgccaucaacuucgggaagugaggacuaguaauaaggaaacuguaugaaugucugugggcaggaagugaagagauccuucuguaaagguuuuuggaauuaugucugcugaauaauaaacuuuuuugaaauaauaaaucugguagaaaaaugagaucuaaaaaaaaaaaaaaaaaaaaaaaaaaaaaaaaaaaaaaaaaaaaaaaaaaaaaaaaaaaaaaaaugcaucccccccccccccccccccccccccccccccaaaggcucuuuucagagccaccagaauu

SEQ ID NO: 909 - RNA, 2414 nt, Artificial Sequence
  mRNA product Design g-4 comprising derived and/or modified sequence from YFV__NC_002031.1__SSIgE-prME (polyprotein: aa122-778) (opt1)
gggagacuccugucgggcggaaguaggaggaguagaguuuaaaaacaguacucuuuuuccgguucgggacguaguugaagcaacgacaagccggauaaccgcucuugagacaggaagcuuaccauggacuggaccuggauccuguuccucguggccgccgcgacccgcguccacagcgugacgcuggugcggaagaaccgcuggcugcuccugaacgucaccuccgaggaccugggcaagaccuucagcguggggaccggcaacugcacgaccaacauccucgaggccaaguacuggugccccgacuccauggaguacaacugccccaaccugagcccccgggaggagcccgacgacaucgacugcuggugcuacgggguggagaacguccgcguggccuacggcaagugcgacuccgccgggcggagccgccggucccgccgggccaucgaccugcccacccacgagaaccacggccucaagacccgccaggagaaguggaugacgggccggaugggggagcgccagcugcagaagaucgagcggugguucgugcgcaacccguucuucgcggucaccgcccugaccaucgccuaccucgugggcagcaacaugacccagcggguggucaucgcccugcuggugcucgcgguggggcccgccuacuccgcccacugcaucggcaucacggaccgcgacuucaucgaggggguccacggcggcaccugggugagcgccacccuggagcaggacaagugcgugaccgucauggcccccgacaagcccucccuggacaucagccucgagacgguggcgaucgaccggccggccgaggugcgcaaggucugcuacaacgccgugcugacccacgugaagaucaacgacaagugccccuccaccggggaggcccaccuggccgaggagaacgagggcgacaacgcgugcaagcggaccuacagcgaccgcggguggggcaacggcugcggccucuucgggaagggguccaucgucgccugcgccaaguucacgugcgccaagagcaugucccuguucgagguggaccagaccaagauccaguacgucauccgggcccagcugcacgugggcgcgaagcaggagaacuggaacaccgacaucaagacccucaaguucgacgcccugagcgggucccaggagguggaguucaucggcuacggcaaggccacgcuggagugccagguccagaccgccguggacuucgggaacagcuacaucgccgagauggagaccgagagcuggaucguggaccgccagugggcgcaggaccucacccugcccuggcaguccggcagcgggggcgucuggcgcgagaugcaccaccugguggaguucgagcccccgcacgccgccacgauccgggugcucgcccuggggaaccaggagggcucccugaagaccgcgcucaccggcgccaugcgcgucaccaaggacacgaacgacaacaaccuguacaagcugcacgggggccacgugagcugccgggugaagcucuccgcccugacccugaaggggaccagcuacaagaucugcaccgacaagauguucuucgucaagaaccccacggacaccggccacgggaccguggugaugcaggucaagguguccaagggcgcccccugccgcauccccgugaucgucgccgacgaccucaccgcggccaucaacaagggcauccuggugaccgugaacccgaucgccagcacgaacgacgacgagguccugaucgaggugaacccgcccuucggggacuccuacaucaucgugggccgcggggacagccggcucaccuaccaguggcacaaggagggcuccagcaucggcaagcuguucacccagaccaugaagggggucgagcggcuggccgugaugggcgacacggccugggacuucuccagcgccgggggcuucuucaccuccguggggaagggcauccacaccgucuucggcagcgcguuccaggggcuguucggcgggcucaacuggaucaccaaggugaucaugggcgccgugcugaucugggucgggaucaacacgcgcaacaugaccauguccaugagcaugauccucgugggcgugaucaugauguuccugucccugggcgucggggccugaggacuaguaauaaggaaacuguaugaaugucugugggcaggaagugaagagauccuucuguaaagguuuuuggaauuaugucugcugaauaauaaacuuuuuugaaauaauaaaucugguagaaaaaugagaucuaaaaaaaaaaaaaaaaaaaaaaaaaaaaaaaaaaaaaaaaaaaaaaaaaaaaaaaaaaaaaaaaugcaucccccccccccccccccccccccccccccccaaaggcucuuuucagagccaccagaauu

SEQ ID NO: 910 - RNA, 2462 nt, Artificial Sequence
  mRNA product Design g-4 comprising derived and/or modified sequence from YFV__NC_002031.1__SSjev-prME-XX (polyprotein: aa122-788) (opt1)
gggagacuccugucgggcggaaguaggaggaguagaguuuaaaaacaguacucuuuuuccgguucgggacguaguugaagcaacgacaagccggauaaccgcucuugagacaggaagcuuaccaugggcaagcgcagcgccggguccaucauguggcuggccagccucgcgguggucaucgccugcgccggcgccgugacccuggugcggaagaaccgcuggcugcuccugaacgucaccuccgaggaccuggggaagacguucagcgugggcaccgggaacugcaccaccaacauccucgaggccaaguacuggugccccgacuccauggaguacaacugccccaaccugagcccccgggaggagcccgacgacaucgacugcuggugcuacggcguggagaacguccgcguggcguacggcaagugcgacuccgccgggcggagccgccggucccgccgggccaucgaccugcccacgcacgagaaccacggccucaagacccgccaggagaaguggaugaccgggcggaugggcgagcgccagcugcagaagaucgagcggugguucgugcgcaacccguucuucgccgucaccgcgcugacgaucgccuaccucguggggagcaacaugacccagcggguggucaucgcccugcuggugcucgccgugggccccgccuacuccgcgcacugcaucggcaucaccgaccgcgacuucaucgaggggguccacggcgggaccugggugagcgccacgcuggagcaggacaagugcgugaccgucauggcccccgacaagcccucccuggacaucagccucgagaccguggccaucgaccggccggccgaggugcgcaaggucugcuacaacgcggugcugacccacgugaagaucaacgacaagugccccuccacgggcgaggcccaccuggccgaggagaacgagggcgacaacgccugcaagcggaccuacagcgaccgcggguggggcaacgggugcggccucuucgggaagggcuccaucgucgccugcgcgaaguucacgugcgccaagagcaugucccuguucgagguggaccagaccaagauccaguacgucauccgggcccagcugcacgugggcgccaagcaggagaacuggaacaccgacaucaagacccucaaguucgacgcccugagcgggagccaggagguggaguucaucggcuacgggaaggcgacccuggagugccagguccagaccgccguggacuucggcaacuccuacaucgccgagauggagacggagagcuggaucguggaccgccagugggcccaggaccucacccugcccuggcaguccgggagcggcggcgucuggcgcgagaugcaccaccugguggaguucgagcccccgcacgcggccaccauccgggugcucgcccuggggaaccaggagggcucccugaagaccgcccucacgggggccaugcgcgucaccaaggacaccaacgacaacaaccuguacaagcugcacggcgggcacgugagcugccgggugaagcucuccgcgcugacccugaagggcacgagcuacaagaucugcaccgacaagauguucuucgucaagaaccccaccgacaccggccacgggacgguggugaugcaggucaagguguccaagggcgcccccugccgcauccccgugaucgucgccgacgaccucaccgccgccaucaacaaggggauccuggugaccgugaacccgaucgcgagcaccaacgacgacgagguccugaucgaggugaacccgcccuucggcgacuccuacaucaucgugggccgcggggacagccggcucaccuaccaguggcacaaggagggcuccagcaucgggaagcuguucacgcagaccaugaagggcgucgagcggcuggccgugaugggggacaccgccugggacuucuccagcgccggcggcuucuucaccuccguggggaagggcauccacacggucuucgggagcgccuuccagggccucuucgggggccugaacuggaucaccaaggugaucaugggcgcggugcugaucugggucgggaucaacacccgcaacaugaccauguccaugagcaugauccucgugggcgugaucaugauguuccugagccugggggucggcgccgaccaggggugcgccaucaacuucggcaagugaggacuaguaauaaggaaacuguaugaaugucugugggcaggaagugaagagauccuucuguaaagguuuuuggaauuaugucugcugaauaauaaacuuuuuugaaauaauaaaucugguagaaaaaugagaucuaaaaaaaaaaaaaaaaaaaaaaaaaaaaaaaaaaaaaaaaaaaaaaaaaaaaaaaaaaaaaaaaugcaucccccccccccccccccccccccccccccccaaaggcucuuuucagagccaccagaauu

SEQ ID NO: 911 - RNA, 2432 nt, Artificial Sequence
  mRNA product Design g-4 comprising derived and/or modified sequence from YFV__NC_002031.1__SSjev-prME (polyprotein: aa122-778) (opt1)
gggagacuccugucgggcggaaguaggaggaguagaguuuaaaaacaguacucuuuuuccgguucgggacguaguugaagcaacgacaagccggauaaccgcucuugagacaggaagcuuaccaugggcaagcgcagcgccggguccaucauguggcuggccagccucgcgguggucaucgccugcgccggcgccgugacccuggugcggaagaaccgcuggcugcuccugaacgucaccuccgaggaccuggggaagacguucagcgugggcaccgggaacugcaccaccaacauccucgaggccaaguacuggugccccgacuccauggaguacaacugccccaaccugagcccccgggaggagcccgacgacaucgacugcuggugcuacggcguggagaacguccgcguggcguacggcaagugcgacuccgccgggcggagccgccggucccgccgggccaucgaccugcccacgcacgagaaccacggccucaagacccgccaggagaaguggaugaccgggcggaugggcgagcgccagcugcagaagaucgagcggugguucgugcgcaacccguucuucgccgucaccgcgcugacgaucgccuaccucguggggagcaacaugacccagcggguggucaucgcccugcuggugcucgccgugggccccgccuacuccgcgcacugcaucggcaucaccgaccgcgacuucaucgaggggguccacggcgggaccugggugagcgccacgcuggagcaggacaagugcgugaccgucauggcccccgacaagcccucccuggacaucagccucgagaccguggccaucgaccggccggccgaggugcgcaaggucugcuacaacgcggugcugacccacgugaagaucaacgacaagugccccuccacgggcgaggcccaccuggccgaggagaacgagggcgacaacgccugcaagcggaccuacagcgaccgcggguggggcaacgggugcggccucuucgggaagggcuccaucgucgccugcgcgaaguucacgugcgccaagagcaugucccuguucgagguggaccagaccaagauccaguacgucauccgggcccagcugcacgugggcgccaagcaggagaacuggaacaccgacaucaagacccucaaguucgacgcccugagcgggagccaggagguggaguucaucggcuacgggaaggcgacccuggagugccagguccagaccgccguggacuucggcaacuccuacaucgccgagauggagacggagagcuggaucguggaccgccagugggcccaggaccucacccugcccuggcaguccgggagcggcggcgucuggcgcgagaugcaccaccugguggaguucgagcccccgcacgcggccaccauccgggugcucgcccuggggaaccaggagggcucccugaagaccgcccucacgggggccaugcgcgucaccaaggacaccaacgacaacaaccuguacaagcugcacggcgggcacgugagcugccgggugaagcucuccgcgcugacccugaagggcacgagcuacaagaucugcaccgacaagauguucuucgucaagaaccccaccgacaccggccacgggacgguggugaugcaggucaagguguccaagggcgcccccugccgcauccccgugaucgucgccgacgaccucaccgccgccaucaacaaggggauccuggugaccgugaacccgaucgcgagcaccaacgacgacgagguccugaucgaggugaacccgcccuucggcgacuccuacaucaucgugggccgcggggacagccggcucaccuaccaguggcacaaggagggcuccagcaucgggaagcuguucacgcagaccaugaagggcgucgagcggcuggccgugaugggggacaccgccugggacuucuccagcgccggcggcuucuucaccuccguggggaagggcauccacacggucuucgggagcgccuuccagggccucuucgggggccugaacuggaucaccaaggugaucaugggcgcggugcugaucugggucgggaucaacacccgcaacaugaccauguccaugagcaugauccucgugggcgugaucaugauguuccugagccugggggucggcgccugaggacuaguaauaaggaaacuguaugaaugucugugggcaggaagugaagagauccuucuguaaagguuuuuggaauuaugucugcugaauaauaaacuuuuuugaaauaauaaaucugguagaaaaaugagaucuaaaaaaaaaaaaaaaaaaaaaaaaaaaaaaaaaaaaaaaaaaaaaaaaaaaaaaaaaaaaaaaaugcaucccccccccccccccccccccccccccccccaaaggcucuuuucagagccaccagaauu

SEQ ID NO: 912 - RNA, 2480 nt, Artificial Sequence
  mRNA product Design g-4 comprising derived and/or modified sequence from YFV__NC_002031.1__X-SS-prME-XX (polyprotein: aa92-788) (opt2)
gggagacuccugucgggcggaaguaggaggaguagaguuuaaaaacaguacucuuuuuccgguucgggacguaguugaagcaacgacaagccggauaaccgcucuugagacaggaagcuuaccaugcgcggccucuccucccgcaagcgccgcucccacgacguccucaccguccaguuccucauccucggcaugcuccucaugaccggcggcgucacccucguccgcaagaaccgcuggcuccuccucaacgucaccuccgaggaccucggcaagaccuucuccgucggcaccggcaacugcaccaccaacauccucgaggccaaguacuggugccccgacuccauggaguacaacugccccaaccucuccccccgcgaggagcccgacgacaucgacugcuggugcuacggcgucgagaacguccgcgucgccuacggcaagugcgacuccgccggccgcucccgccgcucccgccgcgccaucgaccuccccacccacgagaaccacggccucaagacccgccaggagaaguggaugaccggccgcaugggcgagcgccagcuccagaagaucgagcgcugguucguccgcaaccccuucuucgccgucaccgcccucaccaucgccuaccucgucggcuccaacaugacccagcgcgucgucaucgcccuccucguccucgccgucggccccgccuacuccgcccacugcaucggcaucaccgaccgcgacuucaucgagggcguccacggcggcaccugggucuccgccacccucgagcaggacaagugcgucaccgucauggcccccgacaagcccucccucgacaucucccucgagaccgucgccaucgaccgccccgccgagguccgcaaggucugcuacaacgccguccucacccacgucaagaucaacgacaagugccccuccaccggcgaggcccaccucgccgaggagaacgagggcgacaacgccugcaagcgcaccuacuccgaccgcggcuggggcaacggcugcggccucuucggcaagggcuccaucgucgccugcgccaaguucaccugcgccaaguccaugucccucuucgaggucgaccagaccaagauccaguacgucauccgcgcccagcuccacgucggcgccaagcaggagaacuggaacaccgacaucaagacccucaaguucgacgcccucuccggcucccaggaggucgaguucaucggcuacggcaaggccacccucgagugccagguccagaccgccgucgacuucggcaacuccuacaucgccgagauggagaccgaguccuggaucgucgaccgccagugggcccaggaccucacccuccccuggcaguccggcuccggcggcgucuggcgcgagaugcaccaccucgucgaguucgagcccccccacgccgccaccauccgcguccucgcccucggcaaccaggagggcucccucaagaccgcccucaccggcgccaugcgcgucaccaaggacaccaacgacaacaaccucuacaagcuccacggcggccacgucuccugccgcgucaagcucuccgcccucacccucaagggcaccuccuacaagaucugcaccgacaagauguucuucgucaagaaccccaccgacaccggccacggcaccgucgucaugcaggucaaggucuccaagggcgcccccugccgcauccccgucaucgucgccgacgaccucaccgccgccaucaacaagggcauccucgucaccgucaaccccaucgccuccaccaacgacgacgagguccucaucgaggucaacccccccuucggcgacuccuacaucaucgucggccgcggcgacucccgccucaccuaccaguggcacaaggagggcuccuccaucggcaagcucuucacccagaccaugaagggcgucgagcgccucgccgucaugggcgacaccgccugggacuucuccuccgccggcggcuucuucaccuccgucggcaagggcauccacaccgucuucggcuccgccuuccagggccucuucggcggccucaacuggaucaccaaggucaucaugggcgccguccucaucugggucggcaucaacacccgcaacaugaccauguccauguccaugauccucgucggcgucaucaugauguuccucucccucggcgucggcgccgaccagggcugcgccaucaacuucggcaagugaggacuaguaauaaggaaacuguaugaaugucugugggcaggaagugaagagauccuucuguaaagguuuuuggaauuaugucugcugaauaauaaacuuuuuugaaauaauaaaucugguagaaaaaugagaucuaaaaaaaaaaaaaaaaaaaaaaaaaaaaaaaaaaaaaaaaaaaaaaaaaaaaaaaaaaaaaaaaugcaucccccccccccccccccccccccccccccccaaaggcucuuuucagagccaccagaauu

SEQ ID NO: 913 - RNA, 2417 nt, Artificial Sequence
  mRNA product Design g-4 comprising derived and/or modified sequence from YFV__NC_002031.1__SS-prME (polyprotein: M,aa104-778) (opt2)
gggagacuccugucgggcggaaguaggaggaguagaguuuaaaaacaguacucuuuuuccgguucgggacguaguugaagcaacgacaagccggauaaccgcucuugagacaggaagcuuaccauggacguccucaccguccaguuccucauccucggcaugcuccucaugaccggcggcgucacccucguccgcaagaaccgcuggcuccuccucaacgucaccuccgaggaccucggcaagaccuucuccgucggcaccggcaacugcaccaccaacauccucgaggccaaguacuggugccccgacuccauggaguacaacugccccaaccucuccccccgcgaggagcccgacgacaucgacugcuggugcuacggcgucgagaacguccgcgucgccuacggcaagugcgacuccgccggccgcucccgccgcucccgccgcgccaucgaccuccccacccacgagaaccacggccucaagacccgccaggagaaguggaugaccggccgcaugggcgagcgccagcuccagaagaucgagcgcugguucguccgcaaccccuucuucgccgucaccgcccucaccaucgccuaccucgucggcuccaacaugacccagcgcgucgucaucgcccuccucguccucgccgucggccccgccuacuccgcccacugcaucggcaucaccgaccgcgacuucaucgagggcguccacggcggcaccugggucuccgccacccucgagcaggacaagugcgucaccgucauggcccccgacaagcccucccucgacaucucccucgagaccgucgccaucgaccgccccgccgagguccgcaaggucugcuacaacgccguccucacccacgucaagaucaacgacaagugccccuccaccggcgaggcccaccucgccgaggagaacgagggcgacaacgccugcaagcgcaccuacuccgaccgcggcuggggcaacggcugcggccucuucggcaagggcuccaucgucgccugcgccaaguucaccugcgccaaguccaugucccucuucgaggucgaccagaccaagauccaguacgucauccgcgcccagcuccacgucggcgccaagcaggagaacuggaacaccgacaucaagacccucaaguucgacgcccucuccggcucccaggaggucgaguucaucggcuacggcaaggccacccucgagugccagguccagaccgccgucgacuucggcaacuccuacaucgccgagauggagaccgaguccuggaucgucgaccgccagugggcccaggaccucacccuccccuggcaguccggcuccggcggcgucuggcgcgagaugcaccaccucgucgaguucgagcccccccacgccgccaccauccgcguccucgcccucggcaaccaggagggcucccucaagaccgcccucaccggcgccaugcgcgucaccaaggacaccaacgacaacaaccucuacaagcuccacggcggccacgucuccugccgcgucaagcucuccgcccucacccucaagggcaccuccuacaagaucugcaccgacaagauguucuucgucaagaaccccaccgacaccggccacggcaccgucgucaugcaggucaaggucuccaagggcgcccccugccgcauccccgucaucgucgccgacgaccucaccgccgccaucaacaagggcauccucgucaccgucaaccccaucgccuccaccaacgacgacgagguccucaucgaggucaacccccccuucggcgacuccuacaucaucgucggccgcggcgacucccgccucaccuaccaguggcacaaggagggcuccuccaucggcaagcucuucacccagaccaugaagggcgucgagcgccucgccgucaugggcgacaccgccugggacuucuccuccgccggcggcuucuucaccuccgucggcaagggcauccacaccgucuucggcuccgccuuccagggccucuucggcggccucaacuggaucaccaaggucaucaugggcgccguccucaucugggucggcaucaacacccgcaacaugaccauguccauguccaugauccucgucggcgucaucaugauguuccucucccucggcgucggcgccugaggacuaguaauaaggaaacuguaugaaugucugugggcaggaagugaagagauccuucuguaaagguuuuuggaauuaugucugcugaauaauaaacuuuuuugaaauaauaaaucugguagaaaaaugagaucuaaaaaaaaaaaaaaaaaaaaaaaaaaaaaaaaaaaaaaaaaaaaaaaaaaaaaaaaaaaaaaaaugcaucccccccccccccccccccccccccccccccaaaggcucuuuucagagccaccagaauu

SEQ ID NO: 914 - RNA, 2444 nt, Artificial Sequence
  mRNA product Design g-4 comprising derived and/or modified sequence from YFV__NC_002031.1__SSIgE-prME-XX (polyprotein: aa122-788) (opt2)
gggagacuccugucgggcggaaguaggaggaguagaguuuaaaaacaguacucuuuuuccgguucgggacguaguugaagcaacgacaagccggauaaccgcucuugagacaggaagcuuaccauggacuggaccuggauccucuuccucgucgccgccgccacccgcguccacuccgucacccucguccgcaagaaccgcuggcuccuccucaacgucaccuccgaggaccucggcaagaccuucuccgucggcaccggcaacugcaccaccaacauccucgaggccaaguacuggugccccgacuccauggaguacaacugccccaaccucuccccccgcgaggagcccgacgacaucgacugcuggugcuacggcgucgagaacguccgcgucgccuacggcaagugcgacuccgccggccgcucccgccgcucccgccgcgccaucgaccuccccacccacgagaaccacggccucaagacccgccaggagaaguggaugaccggccgcaugggcgagcgccagcuccagaagaucgagcgcugguucguccgcaaccccuucuucgccgucaccgcccucaccaucgccuaccucgucggcuccaacaugacccagcgcgucgucaucgcccuccucguccucgccgucggccccgccuacuccgcccacugcaucggcaucaccgaccgcgacuucaucgagggcguccacggcggcaccugggucuccgccacccucgagcaggacaagugcgucaccgucauggcccccgacaagcccucccucgacaucucccucgagaccgucgccaucgaccgccccgccgagguccgcaaggucugcuacaacgccguccucacccacgucaagaucaacgacaagugccccuccaccggcgaggcccaccucgccgaggagaacgagggcgacaacgccugcaagcgcaccuacuccgaccgcggcuggggcaacggcugcggccucuucggcaagggcuccaucgucgccugcgccaaguucaccugcgccaaguccaugucccucuucgaggucgaccagaccaagauccaguacgucauccgcgcccagcuccacgucggcgccaagcaggagaacuggaacaccgacaucaagacccucaaguucgacgcccucuccggcucccaggaggucgaguucaucggcuacggcaaggccacccucgagugccagguccagaccgccgucgacuucggcaacuccuacaucgccgagauggagaccgaguccuggaucgucgaccgccagugggcccaggaccucacccuccccuggcaguccggcuccggcggcgucuggcgcgagaugcaccaccucgucgaguucgagcccccccacgccgccaccauccgcguccucgcccucggcaaccaggagggcucccucaagaccgcccucaccggcgccaugcgcgucaccaaggacaccaacgacaacaaccucuacaagcuccacggcggccacgucuccugccgcgucaagcucuccgcccucacccucaagggcaccuccuacaagaucugcaccgacaagauguucuucgucaagaaccccaccgacaccggccacggcaccgucgucaugcaggucaaggucuccaagggcgcccccugccgcauccccgucaucgucgccgacgaccucaccgccgccaucaacaagggcauccucgucaccgucaaccccaucgccuccaccaacgacgacgagguccucaucgaggucaacccccccuucggcgacuccuacaucaucgucggccgcggcgacucccgccucaccuaccaguggcacaaggagggcuccuccaucggcaagcucuucacccagaccaugaagggcgucgagcgccucgccgucaugggcgacaccgccugggacuucuccuccgccggcggcuucuucaccuccgucggcaagggcauccacaccgucuucggcuccgccuuccagggccucuucggcggccucaacuggaucaccaaggucaucaugggcgccguccucaucugggucggcaucaacacccgcaacaugaccauguccauguccaugauccucgucggcgucaucaugauguuccucucccucggcgucggcgccgaccagggcugcgccaucaacuucggcaagugaggacuaguaauaaggaaacuguaugaaugucugugggcaggaagugaagagauccuucuguaaagguuuuuggaauuaugucugcugaauaauaaacuuuuuugaaauaauaaaucugguagaaaaaugagaucuaaaaaaaaaaaaaaaaaaaaaaaaaaaaaaaaaaaaaaaaaaaaaaaaaaaaaaaaaaaaaaaaugcaucccccccccccccccccccccccccccccccaaaggcucuuuucagagccaccagaauu

SEQ ID NO: 915 - RNA, 2414 nt, Artificial Sequence
  mRNA product Design g-4 comprising derived and/or modified sequence from YFV__NC_002031.1__SSIgE-prME (polyprotein: aa122-778) (opt2)
gggagacuccugucgggcggaaguaggaggaguagaguuuaaaaacaguacucuuuuuccgguucgggacguaguugaagcaacgacaagccggauaaccgcucuugagacaggaagcuuaccauggacuggaccuggauccucuuccucgucgccgccgccacccgcguccacuccgucacccucguccgcaagaaccgcuggcuccuccucaacgucaccuccgaggaccucggcaagaccuucuccgucggcaccggcaacugcaccaccaacauccucgaggccaaguacuggugccccgacuccauggaguacaacugccccaaccucuccccccgcgaggagcccgacgacaucgacugcuggugcuacggcgucgagaacguccgcgucgccuacggcaagugcgacuccgccggccgcucccgccgcucccgccgcgccaucgaccuccccacccacgagaaccacggccucaagacccgccaggagaaguggaugaccggccgcaugggcgagcgccagcuccagaagaucgagcgcugguucguccgcaaccccuucuucgccgucaccgcccucaccaucgccuaccucgucggcuccaacaugacccagcgcgucgucaucgcccuccucguccucgccgucggccccgccuacuccgcccacugcaucggcaucaccgaccgcgacuucaucgagggcguccacggcggcaccugggucuccgccacccucgagcaggacaagugcgucaccgucauggcccccgacaagcccucccucgacaucucccucgagaccgucgccaucgaccgccccgccgagguccgcaaggucugcuacaacgccguccucacccacgucaagaucaacgacaagugccccuccaccggcgaggcccaccucgccgaggagaacgagggcgacaacgccugcaagcgcaccuacuccgaccgcggcuggggcaacggcugcggccucuucggcaagggcuccaucgucgccugcgccaaguucaccugcgccaaguccaugucccucuucgaggucgaccagaccaagauccaguacgucauccgcgcccagcuccacgucggcgccaagcaggagaacuggaacaccgacaucaagacccucaaguucgacgcccucuccggcucccaggaggucgaguucaucggcuacggcaaggccacccucgagugccagguccagaccgccgucgacuucggcaacuccuacaucgccgagauggagaccgaguccuggaucgucgaccgccagugggcccaggaccucacccuccccuggcaguccggcuccggcggcgucuggcgcgagaugcaccaccucgucgaguucgagcccccccacgccgccaccauccgcguccucgcccucggcaaccaggagggcucccucaagaccgcccucaccggcgccaugcgcgucaccaaggacaccaacgacaacaaccucuacaagcuccacggcggccacgucuccugccgcgucaagcucuccgcccucacccucaagggcaccuccuacaagaucugcaccgacaagauguucuucgucaagaaccccaccgacaccggccacggcaccgucgucaugcaggucaaggucuccaagggcgcccccugccgcauccccgucaucgucgccgacgaccucaccgccgccaucaacaagggcauccucgucaccgucaaccccaucgccuccaccaacgacgacgagguccucaucgaggucaacccccccuucggcgacuccuacaucaucgucggccgcggcgacucccgccucaccuaccaguggcacaaggagggcuccuccaucggcaagcucuucacccagaccaugaagggcgucgagcgccucgccgucaugggcgacaccgccugggacuucuccuccgccggcggcuucuucaccuccgucggcaagggcauccacaccgucuucggcuccgccuuccagggccucuucggcggccucaacuggaucaccaaggucaucaugggcgccguccucaucugggucggcaucaacacccgcaacaugaccauguccauguccaugauccucgucggcgucaucaugauguuccucucccucggcgucggcgccugaggacuaguaauaaggaaacuguaugaaugucugugggcaggaagugaagagauccuucuguaaagguuuuuggaauuaugucugcugaauaauaaacuuuuuugaaauaauaaaucugguagaaaaaugagaucuaaaaaaaaaaaaaaaaaaaaaaaaaaaaaaaaaaaaaaaaaaaaaaaaaaaaaaaaaaaaaaaaugcaucccccccccccccccccccccccccccccccaaaggcucuuuucagagccaccagaauu

SEQ ID NO: 916 - RNA, 2462 nt, Artificial Sequence
  mRNA product Design g-4 comprising derived and/or modified sequence from YFV__NC_002031.1__SSjev-prME-XX (polyprotein: aa122-788) (opt2)
gggagacuccugucgggcggaaguaggaggaguagaguuuaaaaacaguacucuuuuuccgguucgggacguaguugaagcaacgacaagccggauaaccgcucuugagacaggaagcuuaccaugggcaagcgcuccgccggcuccaucauguggcucgccucccucgccgucgucaucgccugcgccggcgccgucacccucguccgcaagaaccgcuggcuccuccucaacgucaccuccgaggaccucggcaagaccuucuccgucggcaccggcaacugcaccaccaacauccucgaggccaaguacuggugccccgacuccauggaguacaacugccccaaccucuccccccgcgaggagcccgacgacaucgacugcuggugcuacggcgucgagaacguccgcgucgccuacggcaagugcgacuccgccggccgcucccgccgcucccgccgcgccaucgaccuccccacccacgagaaccacggccucaagacccgccaggagaaguggaugaccggccgcaugggcgagcgccagcuccagaagaucgagcgcugguucguccgcaaccccuucuucgccgucaccgcccucaccaucgccuaccucgucggcuccaacaugacccagcgcgucgucaucgcccuccucguccucgccgucggccccgccuacuccgcccacugcaucggcaucaccgaccgcgacuucaucgagggcguccacggcggcaccugggucuccgccacccucgagcaggacaagugcgucaccgucauggcccccgacaagcccucccucgacaucucccucgagaccgucgccaucgaccgccccgccgagguccgcaaggucugcuacaacgccguccucacccacgucaagaucaacgacaagugccccuccaccggcgaggcccaccucgccgaggagaacgagggcgacaacgccugcaagcgcaccuacuccgaccgcggcuggggcaacggcugcggccucuucggcaagggcuccaucgucgccugcgccaaguucaccugcgccaaguccaugucccucuucgaggucgaccagaccaagauccaguacgucauccgcgcccagcuccacgucggcgccaagcaggagaacuggaacaccgacaucaagacccucaaguucgacgcccucuccggcucccaggaggucgaguucaucggcuacggcaaggccacccucgagugccagguccagaccgccgucgacuucggcaacuccuacaucgccgagauggagaccgaguccuggaucgucgaccgccagugggcccaggaccucacccuccccuggcaguccggcuccggcggcgucuggcgcgagaugcaccaccucgucgaguucgagcccccccacgccgccaccauccgcguccucgcccucggcaaccaggagggcucccucaagaccgcccucaccggcgccaugcgcgucaccaaggacaccaacgacaacaaccucuacaagcuccacggcggccacgucuccugccgcgucaagcucuccgcccucacccucaagggcaccuccuacaagaucugcaccgacaagauguucuucgucaagaaccccaccgacaccggccacggcaccgucgucaugcaggucaaggucuccaagggcgcccccugccgcauccccgucaucgucgccgacgaccucaccgccgccaucaacaagggcauccucgucaccgucaaccccaucgccuccaccaacgacgacgagguccucaucgaggucaacccccccuucggcgacuccuacaucaucgucggccgcggcgacucccgccucaccuaccaguggcacaaggagggcuccuccaucggcaagcucuucacccagaccaugaagggcgucgagcgccucgccgucaugggcgacaccgccugggacuucuccuccgccggcggcuucuucaccuccgucggcaagggcauccacaccgucuucggcuccgccuuccagggccucuucggcggccucaacuggaucaccaaggucaucaugggcgccguccucaucugggucggcaucaacacccgcaacaugaccauguccauguccaugauccucgucggcgucaucaugauguuccucucccucggcgucggcgccgaccagggcugcgccaucaacuucggcaagugaggacuaguaauaaggaaacuguaugaaugucugugggcaggaagugaagagauccuucuguaaagguuuuuggaauuaugucugcugaauaauaaacuuuuuugaaauaauaaaucugguagaaaaaugagaucuaaaaaaaaaaaaaaaaaaaaaaaaaaaaaaaaaaaaaaaaaaaaaaaaaaaaaaaaaaaaaaaaugcaucccccccccccccccccccccccccccccccaaaggcucuuuucagagccaccagaauu

SEQ ID NO: 917 - RNA, 2432 nt, Artificial Sequence
  mRNA product Design g-4 comprising derived and/or modified sequence from YFV__NC_002031.1__SSjev-prME (polyprotein: aa122-778) (opt2)
gggagacuccugucgggcggaaguaggaggaguagaguuuaaaaacaguacucuuuuuccgguucgggacguaguugaagcaacgacaagccggauaaccgcucuugagacaggaagcuuaccaugggcaagcgcuccgccggcuccaucauguggcucgccucccucgccgucgucaucgccugcgccggcgccgucacccucguccgcaagaaccgcuggcuccuccucaacgucaccuccgaggaccucggcaagaccuucuccgucggcaccggcaacugcaccaccaacauccucgaggccaaguacuggugccccgacuccauggaguacaacugccccaaccucuccccccgcgaggagcccgacgacaucgacugcuggugcuacggcgucgagaacguccgcgucgccuacggcaagugcgacuccgccggccgcucccgccgcucccgccgcgccaucgaccuccccacccacgagaaccacggccucaagacccgccaggagaaguggaugaccggccgcaugggcgagcgccagcuccagaagaucgagcgcugguucguccgcaaccccuucuucgccgucaccgcccucaccaucgccuaccucgucggcuccaacaugacccagcgcgucgucaucgcccuccucguccucgccgucggccccgccuacuccgcccacugcaucggcaucaccgaccgcgacuucaucgagggcguccacggcggcaccugggucuccgccacccucgagcaggacaagugcgucaccgucauggcccccgacaagcccucccucgacaucucccucgagaccgucgccaucgaccgccccgccgagguccgcaaggucugcuacaacgccguccucacccacgucaagaucaacgacaagugccccuccaccggcgaggcccaccucgccgaggagaacgagggcgacaacgccugcaagcgcaccuacuccgaccgcggcuggggcaacggcugcggccucuucggcaagggcuccaucgucgccugcgccaaguucaccugcgccaaguccaugucccucuucgaggucgaccagaccaagauccaguacgucauccgcgcccagcuccacgucggcgccaagcaggagaacuggaacaccgacaucaagacccucaaguucgacgcccucuccggcucccaggaggucgaguucaucggcuacggcaaggccacccucgagugccagguccagaccgccgucgacuucggcaacuccuacaucgccgagauggagaccgaguccuggaucgucgaccgccagugggcccaggaccucacccuccccuggcaguccggcuccggcggcgucuggcgcgagaugcaccaccucgucgaguucgagcccccccacgccgccaccauccgcguccucgcccucggcaaccaggagggcucccucaagaccgcccucaccggcgccaugcgcgucaccaaggacaccaacgacaacaaccucuacaagcuccacggcggccacgucuccugccgcgucaagcucuccgcccucacccucaagggcaccuccuacaagaucugcaccgacaagauguucuucgucaagaaccccaccgacaccggccacggcaccgucgucaugcaggucaaggucuccaagggcgcccccugccgcauccccgucaucgucgccgacgaccucaccgccgccaucaacaagggcauccucgucaccgucaaccccaucgccuccaccaacgacgacgagguccucaucgaggucaacccccccuucggcgacuccuacaucaucgucggccgcggcgacucccgccucaccuaccaguggcacaaggagggcuccuccaucggcaagcucuucacccagaccaugaagggcgucgagcgccucgccgucaugggcgacaccgccugggacuucuccuccgccggcggcuucuucaccuccgucggcaagggcauccacaccgucuucggcuccgccuuccagggccucuucggcggccucaacuggaucaccaaggucaucaugggcgccguccucaucugggucggcaucaacacccgcaacaugaccauguccauguccaugauccucgucggcgucaucaugauguuccucucccucggcgucggcgccugaggacuaguaauaaggaaacuguaugaaugucugugggcaggaagugaagagauccuucuguaaagguuuuuggaauuaugucugcugaauaauaaacuuuuuugaaauaauaaaucugguagaaaaaugagaucuaaaaaaaaaaaaaaaaaaaaaaaaaaaaaaaaaaaaaaaaaaaaaaaaaaaaaaaaaaaaaaaaugcaucccccccccccccccccccccccccccccccaaaggcucuuuucagagccaccagaauu

SEQ ID NO: 918 - RNA, 2480 nt, Artificial Sequence
  mRNA product Design g-4 comprising derived and/or modified sequence from YFV__NC_002031.1__X-SS-prME-XX (polyprotein: aa92-788) (opt3)
gggagacuccugucgggcggaaguaggaggaguagaguuuaaaaacaguacucuuuuuccgguucgggacguaguugaagcaacgacaagccggauaaccgcucuugagacaggaagcuuaccaugagaggccugagcuccaggaagcggcgcucucacgacgugcucaccguccaguuccuuauccuggggauguuguuaaugacaggagguguuacucuggugcguaaaaaccgauggcuacuccugaauguaacgucagaggaucuuggcaagaccuuuaguguggggacaggaaacugcacuaccaauauucuggaagccaaauacuggugucccgacagcauggaguauaacugcccuaauuuguccccaagagaggaaccggaugacauagauuguuggugcuacggcgucgaaaacgugaggguugcuuaugguaagugugacucugcagggcggucgcgcagaucaaggcgggccaucgaucuccccacacaugagaaucacggacugaaaacccgccaagagaaguggaugacuggccgaaugggcgaaagacagcugcagaagauugagaggugguucgugcggaacccuuucuucgcggucacagcucucaccaucgccuacuuaguggggagcaauaugacgcagcguguaguuauugcacugcuuguguuggccgucggaccagcuuauagugcacauugcaucgguauaacugaccgcgauuuuaucgaaggcgugcacgggggaaccuggguguccgccacacuggagcaagacaaaugugucacuguuauggcucccgauaagccuucucuagacauuagccucgagaccguggccaucgauagaccagcggaaguaaggaaagugugcuacaacgcaguccugacacaugugaagauuaaugacaaaugucccuccaccggcgaggcccaccuugcugaagagaacgaaggugacaaugccugcaagcggacguauucagaucgaggguggggaaacggcuguggccuguucgggaagggaaguaucguugcaugcgcuaaauuuacuugcgccaagagcaugucuuuguucgagguggaccagacaaaaauacaguacgucauucgcgcgcagcuccacgugggugccaagcaagagaauuggaacaccgauaucaaaacucugaaguuugacgcauuauccggcucacaggaaguagaguucauuggguacggaaaagcuacacuggaaugucagguucagaccgccguggauuuuggcaacagcuauaucgcugagauggaaacggagaguuggaucgucgacagacaaugggcccaggaucucacccuuccuuggcagucugguuccgggggcguguggagggagaugcaucaccuggucgaauuugagccaccgcaugcagccacaauucggguguuggcucuaggaaaucaagaaggcagccugaagacugcgcucaccggggcaaugcgcguuacaaaggacacuaacgauaauaaccuguacaaacuucacggaggucacgugucgugcagaguaaagcugucugccuugacccucaaaggcacauccuauaagauauguaccgacaaaauguuuuucgucaagaaucccacugauacggggcauggaacagugguuaugcaagugaaggucucaaaaggcgcuccuugcaggaucccagugauuguagccgacgaccugaccgcagccaucaacaaggguauauuagugacuguuaaucccauugcuaguaccaacgaugacgagguccugaucgaagugaauccuccauucggggauagcuacaucauugugggccguggagacucccggcuaacauaucaguggcacaaagagggcucuagcaucgggaagcucuuuacccagacuaugaaaggagucgagcgacuggccguuaugggugauacagcaugggacuucucaagugcgggcggguuuuucacguccgugggaaagggcauucauaccguguuugguagcgcuuuccaggggcuuuuuggcggauugaacuggauaacuaagguaaucaugggcgccguccugauuuggguggggaucaauacaagaaacaugaccaugucuaugucaaugauccucguuggagugauuaugauguuccugagucuuggcgucggugcagaucaggggugugccauaaauuuuggaaaaugaggacuaguaauaaggaaacuguaugaaugucugugggcaggaagugaagagauccuucuguaaagguuuuuggaauuaugucugcugaauaauaaacuuuuuugaaauaauaaaucugguagaaaaaugagaucuaaaaaaaaaaaaaaaaaaaaaaaaaaaaaaaaaaaaaaaaaaaaaaaaaaaaaaaaaaaaaaaaugcaucccccccccccccccccccccccccccccccaaaggcucuuuucagagccaccagaauu

SEQ ID NO: 919 - RNA, 2417 nt, Artificial Sequence
  mRNA product Design g-4 comprising derived and/or modified sequence from YFV__NC_002031.1__SS-prME (polyprotein: M,aa104-778) (opt3)
gggagacuccugucgggcggaaguaggaggaguagaguuuaaaaacaguacucuuuuuccgguucgggacguaguugaagcaacgacaagccggauaaccgcucuugagacaggaagcuuaccauggacgugcugaccguccaguuccucauccuuggcaugcuguugaugacagggggaguuacuuuagugagaaagaacagguggcugcuacucaauguaacgagcgaggaucuggguaaaaccuuuuccgugggcacagggaacugcacuaccaauauucuugaagccaaguacuggugucccgacucuauggaguauaacugcccuaaucugucaccacgggaggaaccggaugacauagauuguuggugcuacggagucgaaaacgugcgcguugcuuauggcaaaugugacagugcaggucgaagccguagauccaggcgggccaucgauuugcccacacacgagaaucaugggcucaagacccgccaagagaaauggaugacuggaagaaugggcgaaaggcagcugcagaagauugagcggugguucgugcgcaacccuuucuucgcggucacagcucugaccaucgccuaccucgugggcucuaauaugacgcagcgaguaguuauugcauuacuggugcuugccgucgggccagcuuauucggcacacugcaucggaauaacugacagagauuuuaucgaaggugugcauggcgggaccugggugucagccacauuggagcaagacaagugugucacuguuauggcucccgauaaaccuagccuggacauuagucuagagaccguggccaucgauaggccagcggaaguacggaaggugugcuacaacgcaguccucacacacgugaaaauuaaugacaagugucccuccaccggagaggcccaucuggcugaagagaacgaaggcgacaaugccugcaaacguacguauucugaucgcgguugggggaacggauguggccuuuucggcaaggggagcaucguugcaugcgcuaaguuuacuugcgccaaauccaugucacuguucgagguggaccagacaaagauacaguacgucauuagagcgcaguugcacgugggagccaaacaagagaauuggaacaccgauaucaagacucucaaauuugacgcacugagugguagccaggaaguagaguucauuggcuacgggaaggcuacauuagaaugucagguucagaccgccguggauuuuggaaacucuuauaucgcugagauggaaacggaguccuggaucgucgacaggcaaugggcccaggaucugacccucccuuggcagucaggcagcggugggguguggcgggagaugcaccaucuugucgaauuugagccaccgcacgcagccacaauucgagugcuggcuuugggcaaucaagaaggaagucuaaaaacugcgcugaccggcgcaaugcgcguuacaaaggacacuaacgauaauaaccucuacaagcugcaugggggacacgugucuugcagaguaaaacuuuccgcccugaccuugaaggguacaagcuauaaaauauguaccgacaagauguuuuucgucaaaaaucccacugauacgggccacgggacagugguuaugcaagugaaggucucgaagggagcuccuugcaggaucccagugauuguagccgacgaccucaccgcagccaucaacaaaggcauacuggugacuguuaaucccauugcuucuaccaacgaugacgaggucuuaaucgaagugaauccuccauucggugauuccuacaucauuguggggcggggcgacucacgccugacauaucaguggcauaaggagggaaguagcaucggcaaacuauuuacccagacuaugaagggggucgagagacucgccguuaugggagauacagcaugggacuucuccucugcggguggcuuuuucacgagcguggggaaaggcauucacaccguguuuggaucagcuuuccagggucuguuugggggccuuaacuggauaacuaagguaaucaugggagccgucuugauuugggugggcaucaauacaaggaacaugaccaugaguauguccaugauccugguuggggugauuaugauguuccucagccugggagucggcgcaugaggacuaguaauaaggaaacuguaugaaugucugugggcaggaagugaagagauccuucuguaaagguuuuuggaauuaugucugcugaauaauaaacuuuuuugaaauaauaaaucugguagaaaaaugagaucuaaaaaaaaaaaaaaaaaaaaaaaaaaaaaaaaaaaaaaaaaaaaaaaaaaaaaaaaaaaaaaaaugcaucccccccccccccccccccccccccccccccaaaggcucuuuucagagccaccagaauu

SEQ ID NO: 920 - RNA, 2444 nt, Artificial Sequence
  mRNA product Design g-4 comprising derived and/or modified sequence from YFV__NC_002031.1__SSIgE-prME-XX (polyprotein: aa122-788) (opt3)
gggagacuccugucgggcggaaguaggaggaguagaguuuaaaaacaguacucuuuuuccgguucgggacguaguugaagcaacgacaagccggauaaccgcucuugagacaggaagcuuaccauggacuggaccuggauccuguuccucguggccgcugcaacaagaguccacagcguuacucuggugcguaaaaaccgauggcuacuccugaauguaacgucagaggaucuuggcaagaccuuuaguguggggacaggaaacugcacuaccaauauucuggaagccaaauacuggugucccgacagcauggaguauaacugcccuaauuuguccccaagagaggaaccggaugacauagauuguuggugcuacggcgucgaaaacgugaggguugcuuaugguaagugugacucugcagggcggucgcgcagaucaaggcgggccaucgaucuccccacacaugagaaucacggacugaaaacccgccaagagaaguggaugacuggccgaaugggcgaaagacagcugcagaagauugagaggugguucgugcggaacccuuucuucgcggucacagcucucaccaucgccuacuuaguggggagcaauaugacgcagcguguaguuauugcacugcuuguguuggccgucggaccagcuuauagugcacauugcaucgguauaacugaccgcgauuuuaucgaaggcgugcacgggggaaccuggguguccgccacacuggagcaagacaaaugugucacuguuauggcucccgauaagccuucucuagacauuagccucgagaccguggccaucgauagaccagcggaaguaaggaaagugugcuacaacgcaguccugacacaugugaagauuaaugacaaaugucccuccaccggcgaggcccaccuugcugaagagaacgaaggugacaaugccugcaagcggacguauucagaucgaggguggggaaacggcuguggccuguucgggaagggaaguaucguugcaugcgcuaaauuuacuugcgccaagagcaugucuuuguucgagguggaccagacaaaaauacaguacgucauucgcgcgcagcuccacgugggugccaagcaagagaauuggaacaccgauaucaaaacucugaaguuugacgcauuauccggcucacaggaaguagaguucauuggguacggaaaagcuacacuggaaugucagguucagaccgccguggauuuuggcaacagcuauaucgcugagauggaaacggagaguuggaucgucgacagacaaugggcccaggaucucacccuuccuuggcagucugguuccgggggcguguggagggagaugcaucaccuggucgaauuugagccaccgcaugcagccacaauucggguguuggcucuaggaaaucaagaaggcagccugaagacugcgcucaccggggcaaugcgcguuacaaaggacacuaacgauaauaaccuguacaaacuucacggaggucacgugucgugcagaguaaagcugucugccuugacccucaaaggcacauccuauaagauauguaccgacaaaauguuuuucgucaagaaucccacugauacggggcauggaacagugguuaugcaagugaaggucucaaaaggcgcuccuugcaggaucccagugauuguagccgacgaccugaccgcagccaucaacaaggguauauuagugacuguuaaucccauugcuaguaccaacgaugacgagguccugaucgaagugaauccuccauucggggauagcuacaucauugugggccguggagacucccggcuaacauaucaguggcacaaagagggcucuagcaucgggaagcucuuuacccagacuaugaaaggagucgagcgacuggccguuaugggugauacagcaugggacuucucaagugcgggcggguuuuucacguccgugggaaagggcauucauaccguguuugguagcgcuuuccaggggcuuuuuggcggauugaacuggauaacuaagguaaucaugggcgccguccugauuuggguggggaucaauacaagaaacaugaccaugucuaugucaaugauccucguuggagugauuaugauguuccugagucuuggcgucggugcagaucaggggugugccauaaauuuuggaaaaugaggacuaguaauaaggaaacuguaugaaugucugugggcaggaagugaagagauccuucuguaaagguuuuuggaauuaugucugcugaauaauaaacuuuuuugaaauaauaaaucugguagaaaaaugagaucuaaaaaaaaaaaaaaaaaaaaaaaaaaaaaaaaaaaaaaaaaaaaaaaaaaaaaaaaaaaaaaaaugcaucccccccccccccccccccccccccccccccaaaggcucuuuucagagccaccagaauu

SEQ ID NO: 921 - RNA, 2414 nt, Artificial Sequence
  mRNA product Design g-4 comprising derived and/or modified sequence from YFV__NC_002031.1__SSIgE-prME (polyprotein: aa122-778) (opt3)
gggagacuccugucgggcggaaguaggaggaguagaguuuaaaaacaguacucuuuuuccgguucgggacguaguugaagcaacgacaagccggauaaccgcucuugagacaggaagcuuaccauggacuggaccuggauccuguuccucguggccgcugcaacaagaguccacagcgugacccuggucagaaagaacagguggcuccuucugaauguuacaagcgaggacuugggcaaaacuuucuccguggggacgggaaacugcaccacaaauaucuuagaagccaaguacuggugucccgauucuauggaguauaacugcccuaaucugucaccacgggaggaaccggacgauauugacuguuggugcuacgguguagaaaacgugcgcgucgcuuauggcaaaugugauagugcagggcgaagccguagauccaggcgggccauagaccuacccacucacgagaaucauggacucaagacccgccaggagaaauggaugacaggcagaaugggugaaaggcaacugcagaagaucgagcggugguuugugcgcaacccuuucuuugcgguuaccgcucuuacuauugccuaccugguggggucuaauaugacacagcgagucgugaucgcauugcucguacuggccguuggaccagcuuauucggcacacugcauuggcaucaccgauagagacuucauagaaggcgugcaugggggaacgugggucucagccacucuggagcaggauaagugugugaccgugauggcucccgacaaaccuagccucgauaucaguuuagagacagucgccauugacaggccagcggaaguucggaaggugugcuacaacgcaguacugacucacgugaaaaucaaugauaagugucccuccaccggugaggcccaucuugcugaagagaacgaaggcgacaaugccugcaaacguacauauucugaccgcggguggggaaacggcugugguuuguuugggaagggaagcauugucgcaugcgcuaaguuuaccugcgccaaauccaugucacuguucgagguggaucaaacgaagauccaguacguuauaagagcgcagcuacacgugggcgccaaacaggagaauuggaacacugacauuaagacacucaaauucgaugcacugaguggcagccaagaagucgaguuuaucggguacggaaaggcuacccuugaaugucaggugcagacugccguagacuucgguaacucuuauauugcugagauggaaacagaguccuggaucguugauaggcagugggcccaagaccugaccuugccuuggcagucaggcagcgggggaguguggcgggagaugcaccaucucgucgaauuugagccaccgcacgcagccacgauccgagugcuggcuuuaggcaaucaggaagguagucugaaaaccgcgcucacaggggcaaugcgcgucacuaaggauaccaacgacaauaaccuuuacaagcugcauggcggacacgugucuugcagaguuaaauuguccgcccuaacacugaagggcacuagcuauaaaauuuguaccgauaagauguucuuugugaaaaaucccacagacaccgggcacggaacuguagucaugcaagugaagguuucgaagggugcuccuugcaggauaccagugaucgucgccgaugaccucacggcagccauuaacaaaggcauccuggugacaguaaaucccauagcuucuaccaacgacgaugaggugcuuauugaaguuaauccuccauucggggacuccuacaucaucgucggacggggcgauucacgccugacuuaucaguggcauaaggaggguaguagcauugggaaauuguucacccagacaaugaagggcguggagagacucgccgugaugggagacaccgcaugggauuuuuccucugcgggcggguucuuuacuagcgucggaaaagguauccacacaguuuucggcucagcuuuucaggggcuguucggaggcuuaaacuggauuacgaaggugauaaugggugccgugcugaucuggguagggauuaauaccaggaacaugacuaugaguauguccaugauccuagucggcgugaucaugauguuucucagccugggaguuggcgcaugaggacuaguaauaaggaaacuguaugaaugucugugggcaggaagugaagagauccuucuguaaagguuuuuggaauuaugucugcugaauaauaaacuuuuuugaaauaauaaaucugguagaaaaaugagaucuaaaaaaaaaaaaaaaaaaaaaaaaaaaaaaaaaaaaaaaaaaaaaaaaaaaaaaaaaaaaaaaaugcaucccccccccccccccccccccccccccccccaaaggcucuuuucagagccaccagaauu

SEQ ID NO: 922 - RNA, 2462 nt, Artificial Sequence
  mRNA product Design g-4 comprising derived and/or modified sequence from YFV__NC_002031.1__SSjev-prME-XX (polyprotein: aa122-788) (opt3)
gggagacuccugucgggcggaaguaggaggaguagaguuuaaaaacaguacucuuuuuccgguucgggacguaguugaagcaacgacaagccggauaaccgcucuugagacaggaagcuuaccaugggcaagagaagcgccggguccaucauguggcuggcuucucucgcaguggucauugccugcgcgggagcuguuacucuggugcguaaaaaccgauggcuacuccugaauguaacgucagaggaucuuggcaagaccuuuaguguggggacaggaaacugcacuaccaauauucuggaagccaaauacuggugucccgacagcauggaguauaacugcccuaauuuguccccaagagaggaaccggaugacauagauuguuggugcuacggcgucgaaaacgugaggguugcuuaugguaagugugacucugcagggcggucgcgcagaucaaggcgggccaucgaucuccccacacaugagaaucacggacugaaaacccgccaagagaaguggaugacuggccgaaugggcgaaagacagcugcagaagauugagaggugguucgugcggaacccuuucuucgcggucacagcucucaccaucgccuacuuaguggggagcaauaugacgcagcguguaguuauugcacugcuuguguuggccgucggaccagcuuauagugcacauugcaucgguauaacugaccgcgauuuuaucgaaggcgugcacgggggaaccuggguguccgccacacuggagcaagacaaaugugucacuguuauggcucccgauaagccuucucuagacauuagccucgagaccguggccaucgauagaccagcggaaguaaggaaagugugcuacaacgcaguccugacacaugugaagauuaaugacaaaugucccuccaccggcgaggcccaccuugcugaagagaacgaaggugacaaugccugcaagcggacguauucagaucgaggguggggaaacggcuguggccuguucgggaagggaaguaucguugcaugcgcuaaauuuacuugcgccaagagcaugucuuuguucgagguggaccagacaaaaauacaguacgucauucgcgcgcagcuccacgugggugccaagcaagagaauuggaacaccgauaucaaaacucugaaguuugacgcauuauccggcucacaggaaguagaguucauuggguacggaaaagcuacacuggaaugucagguucagaccgccguggauuuuggcaacagcuauaucgcugagauggaaacggagaguuggaucgucgacagacaaugggcccaggaucucacccuuccuuggcagucugguuccgggggcguguggagggagaugcaucaccuggucgaauuugagccaccgcaugcagccacaauucggguguuggcucuaggaaaucaagaaggcagccugaagacugcgcucaccggggcaaugcgcguuacaaaggacacuaacgauaauaaccuguacaaacuucacggaggucacgugucgugcagaguaaagcugucugccuugacccucaaaggcacauccuauaagauauguaccgacaaaauguuuuucgucaagaaucccacugauacggggcauggaacagugguuaugcaagugaaggucucaaaaggcgcuccuugcaggaucccagugauuguagccgacgaccugaccgcagccaucaacaaggguauauuagugacuguuaaucccauugcuaguaccaacgaugacgagguccugaucgaagugaauccuccauucggggauagcuacaucauugugggccguggagacucccggcuaacauaucaguggcacaaagagggcucuagcaucgggaagcucuuuacccagacuaugaaaggagucgagcgacuggccguuaugggugauacagcaugggacuucucaagugcgggcggguuuuucacguccgugggaaagggcauucauaccguguuugguagcgcuuuccaggggcuuuuuggcggauugaacuggauaacuaagguaaucaugggcgccguccugauuuggguggggaucaauacaagaaacaugaccaugucuaugucaaugauccucguuggagugauuaugauguuccugagucuuggcgucggugcagaucaggggugugccauaaauuuuggaaaaugaggacuaguaauaaggaaacuguaugaaugucugugggcaggaagugaagagauccuucuguaaagguuuuuggaauuaugucugcugaauaauaaacuuuuuugaaauaauaaaucugguagaaaaaugagaucuaaaaaaaaaaaaaaaaaaaaaaaaaaaaaaaaaaaaaaaaaaaaaaaaaaaaaaaaaaaaaaaaugcaucccccccccccccccccccccccccccccccaaaggcucuuuucagagccaccagaauu

SEQ ID NO: 923 - RNA, 2432 nt, Artificial Sequence
  mRNA product Design g-4 comprising derived and/or modified sequence from YFV__NC_002031.1__SSjev-prME (polyprotein: aa122-778) (opt3)
gggagacuccugucgggcggaaguaggaggaguagaguuuaaaaacaguacucuuuuuccgguucgggacguaguugaagcaacgacaagccggauaaccgcucuugagacaggaagcuuaccaugggcaagagaagcgccggguccaucauguggcuggcuucucucgcaguggucauugccugcgcgggagcugugacccuggucagaaagaacagguggcuccuucugaauguuacaagcgaggacuugggcaaaacuuucuccguggggacgggaaacugcaccacaaauaucuuagaagccaaguacuggugucccgauucuauggaguauaacugcccuaaucugucaccacgggaggaaccggacgauauugacuguuggugcuacgguguagaaaacgugcgcgucgcuuauggcaaaugugauagugcagggcgaagccguagauccaggcgggccauagaccuacccacucacgagaaucauggacucaagacccgccaggagaaauggaugacaggcagaaugggugaaaggcaacugcagaagaucgagcggugguuugugcgcaacccuuucuuugcgguuaccgcucuuacuauugccuaccugguggggucuaauaugacacagcgagucgugaucgcauugcucguacuggccguuggaccagcuuauucggcacacugcauuggcaucaccgauagagacuucauagaaggcgugcaugggggaacgugggucucagccacucuggagcaggauaagugugugaccgugauggcucccgacaaaccuagccucgauaucaguuuagagacagucgccauugacaggccagcggaaguucggaaggugugcuacaacgcaguacugacucacgugaaaaucaaugauaagugucccuccaccggugaggcccaucuugcugaagagaacgaaggcgacaaugccugcaaacguacauauucugaccgcggguggggaaacggcugugguuuguuugggaagggaagcauugucgcaugcgcuaaguuuaccugcgccaaauccaugucacuguucgagguggaucaaacgaagauccaguacguuauaagagcgcagcuacacgugggcgccaaacaggagaauuggaacacugacauuaagacacucaaauucgaugcacugaguggcagccaagaagucgaguuuaucggguacggaaaggcuacccuugaaugucaggugcagacugccguagacuucgguaacucuuauauugcugagauggaaacagaguccuggaucguugauaggcagugggcccaagaccugaccuugccuuggcagucaggcagcgggggaguguggcgggagaugcaccaucucgucgaauuugagccaccgcacgcagccacgauccgagugcuggcuuuaggcaaucaggaagguagucugaaaaccgcgcucacaggggcaaugcgcgucacuaaggauaccaacgacaauaaccuuuacaagcugcauggcggacacgugucuugcagaguuaaauuguccgcccuaacacugaagggcacuagcuauaaaauuuguaccgauaagauguucuuugugaaaaaucccacagacaccgggcacggaacuguagucaugcaagugaagguuucgaagggugcuccuugcaggauaccagugaucgucgccgaugaccucacggcagccauuaacaaaggcauccuggugacaguaaaucccauagcuucuaccaacgacgaugaggugcuuauugaaguuaauccuccauucggggacuccuacaucaucgucggacggggcgauucacgccugacuuaucaguggcauaaggaggguaguagcauugggaaauuguucacccagacaaugaagggcguggagagacucgccgugaugggagacaccgcaugggauuuuuccucugcgggcggguucuuuacuagcgucggaaaagguauccacacaguuuucggcucagcuuuucaggggcuguucggaggcuuaaacuggauuacgaaggugauaaugggugccgugcugaucuggguagggauuaauaccaggaacaugacuaugaguauguccaugauccuagucggcgugaucaugauguuucucagccugggaguuggcgcaugaggacuaguaauaaggaaacuguaugaaugucugugggcaggaagugaagagauccuucuguaaagguuuuuggaauuaugucugcugaauaauaaacuuuuuugaaauaauaaaucugguagaaaaaugagaucuaaaaaaaaaaaaaaaaaaaaaaaaaaaaaaaaaaaaaaaaaaaaaaaaaaaaaaaaaaaaaaaaugcaucccccccccccccccccccccccccccccccaaaggcucuuuucagagccaccagaauu

SEQ ID NO: 924 - RNA, 2480 nt, Artificial Sequence
  mRNA product Design g-4 comprising derived and/or modified sequence from YFV__NC_002031.1__X-SS-prME-XX (polyprotein: aa92-788) (opt4)
gggagacuccugucgggcggaaguaggaggaguagaguuuaaaaacaguacucuuuuuccgguucgggacguaguugaagcaacgacaagccggauaaccgcucuugagacaggaagcuuaccaugagaggccugagcagcagaaagagaagaagccacgacgugcugaccgugcaguuccugauccugggcaugcugcugaugaccggcggcgugacccuggugagaaagaacagauggcugcugcugaacgugaccagcgaggaccugggcaagaccuucagcgugggcaccggcaacugcaccaccaacauccuggaggccaaguacuggugccccgacagcauggaguacaacugccccaaccugagccccagagaggagcccgacgacaucgacugcuggugcuacggcguggagaacgugagaguggccuacggcaagugcgacagcgccggcagaagcagaagaagcagaagagccaucgaccugcccacccacgagaaccacggccugaagaccagacaggagaaguggaugaccggcagaaugggcgagagacagcugcagaagaucgagagaugguucgugagaaaccccuucuucgccgugaccgcccugaccaucgccuaccuggugggcagcaacaugacccagagaguggugaucgcccugcuggugcuggccgugggccccgccuacagcgcccacugcaucggcaucaccgacagagacuucaucgagggcgugcacggcggcaccugggugagcgccacccuggagcaggacaagugcgugaccgugauggcccccgacaagcccagccuggacaucagccuggagaccguggccaucgacagacccgccgaggugagaaaggugugcuacaacgccgugcugacccacgugaagaucaacgacaagugccccagcaccggcgaggcccaccuggccgaggagaacgagggcgacaacgccugcaagagaaccuacagcgacagaggcuggggcaacggcugcggccuguucggcaagggcagcaucguggccugcgccaaguucaccugcgccaagagcaugagccuguucgagguggaccagaccaagauccaguacgugaucagagcccagcugcacgugggcgccaagcaggagaacuggaacaccgacaucaagacccugaaguucgacgcccugagcggcagccaggagguggaguucaucggcuacggcaaggccacccuggagugccaggugcagaccgccguggacuucggcaacagcuacaucgccgagauggagaccgagagcuggaucguggacagacagugggcccaggaccugacccugcccuggcagagcggcagcggcggcguguggagagagaugcaccaccugguggaguucgagcccccccacgccgccaccaucagagugcuggcccugggcaaccaggagggcagccugaagaccgcccugaccggcgccaugagagugaccaaggacaccaacgacaacaaccuguacaagcugcacggcggccacgugagcugcagagugaagcugagcgcccugacccugaagggcaccagcuacaagaucugcaccgacaagauguucuucgugaagaaccccaccgacaccggccacggcaccguggugaugcaggugaaggugagcaagggcgcccccugcagaauccccgugaucguggccgacgaccugaccgccgccaucaacaagggcauccuggugaccgugaaccccaucgccagcaccaacgacgacgaggugcugaucgaggugaacccccccuucggcgacagcuacaucaucgugggcagaggcgacagcagacugaccuaccaguggcacaaggagggcagcagcaucggcaagcuguucacccagaccaugaagggcguggagagacuggccgugaugggcgacaccgccugggacuucagcagcgccggcggcuucuucaccagcgugggcaagggcauccacaccguguucggcagcgccuuccagggccuguucggcggccugaacuggaucaccaaggugaucaugggcgccgugcugaucugggugggcaucaacaccagaaacaugaccaugagcaugagcaugauccuggugggcgugaucaugauguuccugagccugggcgugggcgccgaccagggcugcgccaucaacuucggcaagugaggacuaguaauaaggaaacuguaugaaugucugugggcaggaagugaagagauccuucuguaaagguuuuuggaauuaugucugcugaauaauaaacuuuuuugaaauaauaaaucugguagaaaaaugagaucuaaaaaaaaaaaaaaaaaaaaaaaaaaaaaaaaaaaaaaaaaaaaaaaaaaaaaaaaaaaaaaaaugcaucccccccccccccccccccccccccccccccaaaggcucuuuucagagccaccagaauu

SEQ ID NO: 925 - RNA, 2417 nt, Artificial Sequence
  mRNA product Design g-4 comprising derived and/or modified sequence from YFV__NC_002031.1__SS-prME (polyprotein: M,aa104-778) (opt4)
gggagacuccugucgggcggaaguaggaggaguagaguuuaaaaacaguacucuuuuuccgguucgggacguaguugaagcaacgacaagccggauaaccgcucuugagacaggaagcuuaccauggacgugcugaccgugcaguuccugauccugggcaugcugcugaugaccggcggcgugacccuggugagaaagaacagauggcugcugcugaacgugaccagcgaggaccugggcaagaccuucagcgugggcaccggcaacugcaccaccaacauccuggaggccaaguacuggugccccgacagcauggaguacaacugccccaaccugagccccagagaggagcccgacgacaucgacugcuggugcuacggcguggagaacgugagaguggccuacggcaagugcgacagcgccggcagaagcagaagaagcagaagagccaucgaccugcccacccacgagaaccacggccugaagaccagacaggagaaguggaugaccggcagaaugggcgagagacagcugcagaagaucgagagaugguucgugagaaaccccuucuucgccgugaccgcccugaccaucgccuaccuggugggcagcaacaugacccagagaguggugaucgcccugcuggugcuggccgugggccccgccuacagcgcccacugcaucggcaucaccgacagagacuucaucgagggcgugcacggcggcaccugggugagcgccacccuggagcaggacaagugcgugaccgugauggcccccgacaagcccagccuggacaucagccuggagaccguggccaucgacagacccgccgaggugagaaaggugugcuacaacgccgugcugacccacgugaagaucaacgacaagugccccagcaccggcgaggcccaccuggccgaggagaacgagggcgacaacgccugcaagagaaccuacagcgacagaggcuggggcaacggcugcggccuguucggcaagggcagcaucguggccugcgccaaguucaccugcgccaagagcaugagccuguucgagguggaccagaccaagauccaguacgugaucagagcccagcugcacgugggcgccaagcaggagaacuggaacaccgacaucaagacccugaaguucgacgcccugagcggcagccaggagguggaguucaucggcuacggcaaggccacccuggagugccaggugcagaccgccguggacuucggcaacagcuacaucgccgagauggagaccgagagcuggaucguggacagacagugggcccaggaccugacccugcccuggcagagcggcagcggcggcguguggagagagaugcaccaccugguggaguucgagcccccccacgccgccaccaucagagugcuggcccugggcaaccaggagggcagccugaagaccgcccugaccggcgccaugagagugaccaaggacaccaacgacaacaaccuguacaagcugcacggcggccacgugagcugcagagugaagcugagcgcccugacccugaagggcaccagcuacaagaucugcaccgacaagauguucuucgugaagaaccccaccgacaccggccacggcaccguggugaugcaggugaaggugagcaagggcgcccccugcagaauccccgugaucguggccgacgaccugaccgccgccaucaacaagggcauccuggugaccgugaaccccaucgccagcaccaacgacgacgaggugcugaucgaggugaacccccccuucggcgacagcuacaucaucgugggcagaggcgacagcagacugaccuaccaguggcacaaggagggcagcagcaucggcaagcuguucacccagaccaugaagggcguggagagacuggccgugaugggcgacaccgccugggacuucagcagcgccggcggcuucuucaccagcgugggcaagggcauccacaccguguucggcagcgccuuccagggccuguucggcggccugaacuggaucaccaaggugaucaugggcgccgugcugaucugggugggcaucaacaccagaaacaugaccaugagcaugagcaugauccuggugggcgugaucaugauguuccugagccugggcgugggcgccugaggacuaguaauaaggaaacuguaugaaugucugugggcaggaagugaagagauccuucuguaaagguuuuuggaauuaugucugcugaauaauaaacuuuuuugaaauaauaaaucugguagaaaaaugagaucuaaaaaaaaaaaaaaaaaaaaaaaaaaaaaaaaaaaaaaaaaaaaaaaaaaaaaaaaaaaaaaaaugcaucccccccccccccccccccccccccccccccaaaggcucuuuucagagccaccagaauu

SEQ ID NO: 926 - RNA, 2444 nt, Artificial Sequence
  mRNA product Design g-4 comprising derived and/or modified sequence from YFV__NC_002031.1__SSIgE-prME-XX (polyprotein: aa122-788) (opt4)
gggagacuccugucgggcggaaguaggaggaguagaguuuaaaaacaguacucuuuuuccgguucgggacguaguugaagcaacgacaagccggauaaccgcucuugagacaggaagcuuaccauggacuggaccuggauccuguuccugguggccgccgccaccagagugcacagcgugacccuggugagaaagaacagauggcugcugcugaacgugaccagcgaggaccugggcaagaccuucagcgugggcaccggcaacugcaccaccaacauccuggaggccaaguacuggugccccgacagcauggaguacaacugccccaaccugagccccagagaggagcccgacgacaucgacugcuggugcuacggcguggagaacgugagaguggccuacggcaagugcgacagcgccggcagaagcagaagaagcagaagagccaucgaccugcccacccacgagaaccacggccugaagaccagacaggagaaguggaugaccggcagaaugggcgagagacagcugcagaagaucgagagaugguucgugagaaaccccuucuucgccgugaccgcccugaccaucgccuaccuggugggcagcaacaugacccagagaguggugaucgcccugcuggugcuggccgugggccccgccuacagcgcccacugcaucggcaucaccgacagagacuucaucgagggcgugcacggcggcaccugggugagcgccacccuggagcaggacaagugcgugaccgugauggcccccgacaagcccagccuggacaucagccuggagaccguggccaucgacagacccgccgaggugagaaaggugugcuacaacgccgugcugacccacgugaagaucaacgacaagugccccagcaccggcgaggcccaccuggccgaggagaacgagggcgacaacgccugcaagagaaccuacagcgacagaggcuggggcaacggcugcggccuguucggcaagggcagcaucguggccugcgccaaguucaccugcgccaagagcaugagccuguucgagguggaccagaccaagauccaguacgugaucagagcccagcugcacgugggcgccaagcaggagaacuggaacaccgacaucaagacccugaaguucgacgcccugagcggcagccaggagguggaguucaucggcuacggcaaggccacccuggagugccaggugcagaccgccguggacuucggcaacagcuacaucgccgagauggagaccgagagcuggaucguggacagacagugggcccaggaccugacccugcccuggcagagcggcagcggcggcguguggagagagaugcaccaccugguggaguucgagcccccccacgccgccaccaucagagugcuggcccugggcaaccaggagggcagccugaagaccgcccugaccggcgccaugagagugaccaaggacaccaacgacaacaaccuguacaagcugcacggcggccacgugagcugcagagugaagcugagcgcccugacccugaagggcaccagcuacaagaucugcaccgacaagauguucuucgugaagaaccccaccgacaccggccacggcaccguggugaugcaggugaaggugagcaagggcgcccccugcagaauccccgugaucguggccgacgaccugaccgccgccaucaacaagggcauccuggugaccgugaaccccaucgccagcaccaacgacgacgaggugcugaucgaggugaacccccccuucggcgacagcuacaucaucgugggcagaggcgacagcagacugaccuaccaguggcacaaggagggcagcagcaucggcaagcuguucacccagaccaugaagggcguggagagacuggccgugaugggcgacaccgccugggacuucagcagcgccggcggcuucuucaccagcgugggcaagggcauccacaccguguucggcagcgccuuccagggccuguucggcggccugaacuggaucaccaaggugaucaugggcgccgugcugaucugggugggcaucaacaccagaaacaugaccaugagcaugagcaugauccuggugggcgugaucaugauguuccugagccugggcgugggcgccgaccagggcugcgccaucaacuucggcaagugaggacuaguaauaaggaaacuguaugaaugucugugggcaggaagugaagagauccuucuguaaagguuuuuggaauuaugucugcugaauaauaaacuuuuuugaaauaauaaaucugguagaaaaaugagaucuaaaaaaaaaaaaaaaaaaaaaaaaaaaaaaaaaaaaaaaaaaaaaaaaaaaaaaaaaaaaaaaaugcaucccccccccccccccccccccccccccccccaaaggcucuuuucagagccaccagaauu

SEQ ID NO: 927 - RNA, 2414 nt, Artificial Sequence
  mRNA product Design g-4 comprising derived and/or modified sequence from YFV__NC_002031.1__SSIgE-prME (polyprotein: aa122-778) (opt4)
gggagacuccugucgggcggaaguaggaggaguagaguuuaaaaacaguacucuuuuuccgguucgggacguaguugaagcaacgacaagccggauaaccgcucuugagacaggaagcuuaccauggacuggaccuggauccuguuccugguggccgccgccaccagagugcacagcgugacccuggugagaaagaacagauggcugcugcugaacgugaccagcgaggaccugggcaagaccuucagcgugggcaccggcaacugcaccaccaacauccuggaggccaaguacuggugccccgacagcauggaguacaacugccccaaccugagccccagagaggagcccgacgacaucgacugcuggugcuacggcguggagaacgugagaguggccuacggcaagugcgacagcgccggcagaagcagaagaagcagaagagccaucgaccugcccacccacgagaaccacggccugaagaccagacaggagaaguggaugaccggcagaaugggcgagagacagcugcagaagaucgagagaugguucgugagaaaccccuucuucgccgugaccgcccugaccaucgccuaccuggugggcagcaacaugacccagagaguggugaucgcccugcuggugcuggccgugggccccgccuacagcgcccacugcaucggcaucaccgacagagacuucaucgagggcgugcacggcggcaccugggugagcgccacccuggagcaggacaagugcgugaccgugauggcccccgacaagcccagccuggacaucagccuggagaccguggccaucgacagacccgccgaggugagaaaggugugcuacaacgccgugcugacccacgugaagaucaacgacaagugccccagcaccggcgaggcccaccuggccgaggagaacgagggcgacaacgccugcaagagaaccuacagcgacagaggcuggggcaacggcugcggccuguucggcaagggcagcaucguggccugcgccaaguucaccugcgccaagagcaugagccuguucgagguggaccagaccaagauccaguacgugaucagagcccagcugcacgugggcgccaagcaggagaacuggaacaccgacaucaagacccugaaguucgacgcccugagcggcagccaggagguggaguucaucggcuacggcaaggccacccuggagugccaggugcagaccgccguggacuucggcaacagcuacaucgccgagauggagaccgagagcuggaucguggacagacagugggcccaggaccugacccugcccuggcagagcggcagcggcggcguguggagagagaugcaccaccugguggaguucgagcccccccacgccgccaccaucagagugcuggcccugggcaaccaggagggcagccugaagaccgcccugaccggcgccaugagagugaccaaggacaccaacgacaacaaccuguacaagcugcacggcggccacgugagcugcagagugaagcugagcgcccugacccugaagggcaccagcuacaagaucugcaccgacaagauguucuucgugaagaaccccaccgacaccggccacggcaccguggugaugcaggugaaggugagcaagggcgcccccugcagaauccccgugaucguggccgacgaccugaccgccgccaucaacaagggcauccuggugaccgugaaccccaucgccagcaccaacgacgacgaggugcugaucgaggugaacccccccuucggcgacagcuacaucaucgugggcagaggcgacagcagacugaccuaccaguggcacaaggagggcagcagcaucggcaagcuguucacccagaccaugaagggcguggagagacuggccgugaugggcgacaccgccugggacuucagcagcgccggcggcuucuucaccagcgugggcaagggcauccacaccguguucggcagcgccuuccagggccuguucggcggccugaacuggaucaccaaggugaucaugggcgccgugcugaucugggugggcaucaacaccagaaacaugaccaugagcaugagcaugauccuggugggcgugaucaugauguuccugagccugggcgugggcgccugaggacuaguaauaaggaaacuguaugaaugucugugggcaggaagugaagagauccuucuguaaagguuuuuggaauuaugucugcugaauaauaaacuuuuuugaaauaauaaaucugguagaaaaaugagaucuaaaaaaaaaaaaaaaaaaaaaaaaaaaaaaaaaaaaaaaaaaaaaaaaaaaaaaaaaaaaaaaaugcaucccccccccccccccccccccccccccccccaaaggcucuuuucagagccaccagaauu

SEQ ID NO: 928 - RNA, 2462 nt, Artificial Sequence
  mRNA product Design g-4 comprising derived and/or modified sequence from YFV__NC_002031.1__SSjev-prME-XX (polyprotein: aa122-788) (opt4)
gggagacuccugucgggcggaaguaggaggaguagaguuuaaaaacaguacucuuuuuccgguucgggacguaguugaagcaacgacaagccggauaaccgcucuugagacaggaagcuuaccaugggcaagagaagcgccggcagcaucauguggcuggccagccuggccguggugaucgccugcgccggcgccgugacccuggugagaaagaacagauggcugcugcugaacgugaccagcgaggaccugggcaagaccuucagcgugggcaccggcaacugcaccaccaacauccuggaggccaaguacuggugccccgacagcauggaguacaacugccccaaccugagccccagagaggagcccgacgacaucgacugcuggugcuacggcguggagaacgugagaguggccuacggcaagugcgacagcgccggcagaagcagaagaagcagaagagccaucgaccugcccacccacgagaaccacggccugaagaccagacaggagaaguggaugaccggcagaaugggcgagagacagcugcagaagaucgagagaugguucgugagaaaccccuucuucgccgugaccgcccugaccaucgccuaccuggugggcagcaacaugacccagagaguggugaucgcccugcuggugcuggccgugggccccgccuacagcgcccacugcaucggcaucaccgacagagacuucaucgagggcgugcacggcggcaccugggugagcgccacccuggagcaggacaagugcgugaccgugauggcccccgacaagcccagccuggacaucagccuggagaccguggccaucgacagacccgccgaggugagaaaggugugcuacaacgccgugcugacccacgugaagaucaacgacaagugccccagcaccggcgaggcccaccuggccgaggagaacgagggcgacaacgccugcaagagaaccuacagcgacagaggcuggggcaacggcugcggccuguucggcaagggcagcaucguggccugcgccaaguucaccugcgccaagagcaugagccuguucgagguggaccagaccaagauccaguacgugaucagagcccagcugcacgugggcgccaagcaggagaacuggaacaccgacaucaagacccugaaguucgacgcccugagcggcagccaggagguggaguucaucggcuacggcaaggccacccuggagugccaggugcagaccgccguggacuucggcaacagcuacaucgccgagauggagaccgagagcuggaucguggacagacagugggcccaggaccugacccugcccuggcagagcggcagcggcggcguguggagagagaugcaccaccugguggaguucgagcccccccacgccgccaccaucagagugcuggcccugggcaaccaggagggcagccugaagaccgcccugaccggcgccaugagagugaccaaggacaccaacgacaacaaccuguacaagcugcacggcggccacgugagcugcagagugaagcugagcgcccugacccugaagggcaccagcuacaagaucugcaccgacaagauguucuucgugaagaaccccaccgacaccggccacggcaccguggugaugcaggugaaggugagcaagggcgcccccugcagaauccccgugaucguggccgacgaccugaccgccgccaucaacaagggcauccuggugaccgugaaccccaucgccagcaccaacgacgacgaggugcugaucgaggugaacccccccuucggcgacagcuacaucaucgugggcagaggcgacagcagacugaccuaccaguggcacaaggagggcagcagcaucggcaagcuguucacccagaccaugaagggcguggagagacuggccgugaugggcgacaccgccugggacuucagcagcgccggcggcuucuucaccagcgugggcaagggcauccacaccguguucggcagcgccuuccagggccuguucggcggccugaacuggaucaccaaggugaucaugggcgccgugcugaucugggugggcaucaacaccagaaacaugaccaugagcaugagcaugauccuggugggcgugaucaugauguuccugagccugggcgugggcgccgaccagggcugcgccaucaacuucggcaagugaggacuaguaauaaggaaacuguaugaaugucugugggcaggaagugaagagauccuucuguaaagguuuuuggaauuaugucugcugaauaauaaacuuuuuugaaauaauaaaucugguagaaaaaugagaucuaaaaaaaaaaaaaaaaaaaaaaaaaaaaaaaaaaaaaaaaaaaaaaaaaaaaaaaaaaaaaaaaugcaucccccccccccccccccccccccccccccccaaaggcucuuuucagagccaccagaauu

SEQ ID NO: 929 - RNA, 2432 nt, Artificial Sequence
  mRNA product Design g-4 comprising derived and/or modified sequence from YFV__NC_002031.1__SSjev-prME (polyprotein: aa122-778) (opt4)
gggagacuccugucgggcggaaguaggaggaguagaguuuaaaaacaguacucuuuuuccgguucgggacguaguugaagcaacgacaagccggauaaccgcucuugagacaggaagcuuaccaugggcaagagaagcgccggcagcaucauguggcuggccagccuggccguggugaucgccugcgccggcgccgugacccuggugagaaagaacagauggcugcugcugaacgugaccagcgaggaccugggcaagaccuucagcgugggcaccggcaacugcaccaccaacauccuggaggccaaguacuggugccccgacagcauggaguacaacugccccaaccugagccccagagaggagcccgacgacaucgacugcuggugcuacggcguggagaacgugagaguggccuacggcaagugcgacagcgccggcagaagcagaagaagcagaagagccaucgaccugcccacccacgagaaccacggccugaagaccagacaggagaaguggaugaccggcagaaugggcgagagacagcugcagaagaucgagagaugguucgugagaaaccccuucuucgccgugaccgcccugaccaucgccuaccuggugggcagcaacaugacccagagaguggugaucgcccugcuggugcuggccgugggccccgccuacagcgcccacugcaucggcaucaccgacagagacuucaucgagggcgugcacggcggcaccugggugagcgccacccuggagcaggacaagugcgugaccgugauggcccccgacaagcccagccuggacaucagccuggagaccguggccaucgacagacccgccgaggugagaaaggugugcuacaacgccgugcugacccacgugaagaucaacgacaagugccccagcaccggcgaggcccaccuggccgaggagaacgagggcgacaacgccugcaagagaaccuacagcgacagaggcuggggcaacggcugcggccuguucggcaagggcagcaucguggccugcgccaaguucaccugcgccaagagcaugagccuguucgagguggaccagaccaagauccaguacgugaucagagcccagcugcacgugggcgccaagcaggagaacuggaacaccgacaucaagacccugaaguucgacgcccugagcggcagccaggagguggaguucaucggcuacggcaaggccacccuggagugccaggugcagaccgccguggacuucggcaacagcuacaucgccgagauggagaccgagagcuggaucguggacagacagugggcccaggaccugacccugcccuggcagagcggcagcggcggcguguggagagagaugcaccaccugguggaguucgagcccccccacgccgccaccaucagagugcuggcccugggcaaccaggagggcagccugaagaccgcccugaccggcgccaugagagugaccaaggacaccaacgacaacaaccuguacaagcugcacggcggccacgugagcugcagagugaagcugagcgcccugacccugaagggcaccagcuacaagaucugcaccgacaagauguucuucgugaagaaccccaccgacaccggccacggcaccguggugaugcaggugaaggugagcaagggcgcccccugcagaauccccgugaucguggccgacgaccugaccgccgccaucaacaagggcauccuggugaccgugaaccccaucgccagcaccaacgacgacgaggugcugaucgaggugaacccccccuucggcgacagcuacaucaucgugggcagaggcgacagcagacugaccuaccaguggcacaaggagggcagcagcaucggcaagcuguucacccagaccaugaagggcguggagagacuggccgugaugggcgacaccgccugggacuucagcagcgccggcggcuucuucaccagcgugggcaagggcauccacaccguguucggcagcgccuuccagggccuguucggcggccugaacuggaucaccaaggugaucaugggcgccgugcugaucugggugggcaucaacaccagaaacaugaccaugagcaugagcaugauccuggugggcgugaucaugauguuccugagccugggcgugggcgccugaggacuaguaauaaggaaacuguaugaaugucugugggcaggaagugaagagauccuucuguaaagguuuuuggaauuaugucugcugaauaauaaacuuuuuugaaauaauaaaucugguagaaaaaugagaucuaaaaaaaaaaaaaaaaaaaaaaaaaaaaaaaaaaaaaaaaaaaaaaaaaaaaaaaaaaaaaaaaugcaucccccccccccccccccccccccccccccccaaaggcucuuuucagagccaccagaauu

SEQ ID NO: 930 - RNA, 2480 nt, Artificial Sequence
  mRNA product Design g-4 comprising derived and/or modified sequence from YFV__NC_002031.1__X-SS-prME-XX (polyprotein: aa92-788) (opt5)
gggagacuccugucgggcggaaguaggaggaguagaguuuaaaaacaguacucuuuuuccgguucgggacguaguugaagcaacgacaagccggauaaccgcucuugagacaggaagcuuaccaugagaggccugagcucccggaagcgcagaucucacgacgugcucaccguccaguuccugauccuugggaugcugcucaugacaggaggcguuacgcuggugcggaaaaaccgcuggcuucugcucaaugugaccagcgaggaucuggggaagacauuuuccgucggaaccggcaacugcacaaccaauauucuggaagccaaauacuggugucccgacucuauggaguauaacugcccuaaucucagcccgagagaagaacccgaugacaucgauuguuggugcuacgggguggaaaacguucggguggcuuauggaaagugugacuccgccggccgcucuagacggagccgcagagcgauugaucugccuacacaugagaaucacggccuuaaaacccggcaagagaaguggaugacggggcgcaugggagaaagacagcugcagaagaucgagcggugguucguccgcaaccccuuuuucgcugugaccgcccucacaauugccuaccugguuggcuccaauaugacccagagaguggucaucgcccuucuggugcucgcuguggggccugcuuauagcgcccauugcaucggaauuacagaccgggauuuuaucgaaggcguccacgggggaaccuggguuucugcgacgcuggagcaagacaaaugugugacagugauggcccccgauaagccuucccuggacauuagccucgagaccgucgcuaucgauagaccggccgaagugcgcaaaguuugcuacaacgcugugcugacacaugucaagauuaaugacaaaugucccucuaccggcgaggcccaccuugcggaagagaacgaaggcgacaaugccugcaagcggaccuauuccgauagaggguggggaaacggcugugggcuguucggaaagggcagcaucguggcuugcgccaaauuuacaugcgcuaagucuaugucccucuucgagguugaccagacgaaaauucaguacgugauccgcgcccagcugcacgucggggccaagcaagagaauuggaacaccgauaucaaaacacuuaaguuugacgcucugagcggaucccaggaaguggaguucauuggcuacggcaaagcgacccucgaaugucagguccagacagccguggauuuugggaacucuuauaucgcugagauggaaaccgagagcuggauuguugaccggcaaugggcccaggaucugacgcugccuuggcaguccggaagcggcgggguguggagagagaugcaucaccucgucgaguucgagcccccucaugccgcuacaauccgcgugcuggcccuuggaaaucaagaaggcucucugaagaccgcgcucaccggggcuaugcggguuacaaaggacaccaacgauaauaaccuguacaaacuucacggcggacacguguccugcagagucaagcugagcgcccucacacugaaaggcacgucuuauaagauuuguaccgacaaaauguuuuucgugaagaaucccacagauaccgggcauggaacagugguuaugcaggucaaggugagcaaaggcgccccgugccgcaucccugugaucgucgcugacgaccugaccgccgcuauuaacaaggggauccucgugacgguuaaucccauugccuccaccaacgaugacgaggugcugaucgaagucaauccucccuucggagauucuuacauuaucgugggccggggagacagcagacuuacauaucaguggcacaaagagggcuccagcaucggaaagcuguuuacccagacaaugaaaggcguugagcgccucgcggugaugggggauaccgccugggacuucucuuccgcuggaggcuuuuucacgagcgucgggaaggggauucauacaguguuuggcucugccuuccaagggcuguuuggcggacugaacuggaucaccaagguuauuaugggcgcugugcuuaucugggucgggauuaauacacggaacaugaccauguccaugagcaugauccucgugggagugauuaugauguuccugucccugggcgucggggccgaucagggaugugcgaucaauuuuggcaaaugaggacuaguaauaaggaaacuguaugaaugucugugggcaggaagugaagagauccuucuguaaagguuuuuggaauuaugucugcugaauaauaaacuuuuuugaaauaauaaaucugguagaaaaaugagaucuaaaaaaaaaaaaaaaaaaaaaaaaaaaaaaaaaaaaaaaaaaaaaaaaaaaaaaaaaaaaaaaaugcaucccccccccccccccccccccccccccccccaaaggcucuuuucagagccaccagaauu

SEQ ID NO: 931 - RNA, 2417 nt, Artificial Sequence
  mRNA product Design g-4 comprising derived and/or modified sequence from YFV__NC_002031.1__SS-prME (polyprotein: M,aa104-778) (opt5)
gggagacuccugucgggcggaaguaggaggaguagaguuuaaaaacaguacucuuuuuccgguucgggacguaguugaagcaacgacaagccggauaaccgcucuugagacaggaagcuuaccauggacgugcugaccguccaguuccucauccugggcaugcuucugaugacagggggaguuacgcucgugagaaagaaccgguggcugcuucugaaugugaccagcgaggaucucggcaaaacauuuuccgucgggaccggaaacugcacaaccaauauucuggaagccaaguacuggugucccgacucuauggaguauaacugcccuaaucugagcccgcgcgaagaacccgaugacaucgauuguuggugcuacggcguggaaaacguuagaguggcuuaugggaaaugugacuccgccggacggucucgcagaagccggcgcgcgauugaucucccuacacacgagaaucauggccugaagaccagacaagagaaauggaugacgggccggaugggggaacgccagcuucagaagaucgagagaugguucguccggaaccccuuuuucgcugugaccgcccugacaauugccuaccucguuggauccaauaugacccagcgcguggucaucgcucugcuugugcuggccgugggcccugcuuauucugcccacugcaucgggauuacagacagagauuuuaucgaaggaguccauggcgggaccuggguuagcgcgacgcucgagcaagacaagugugugacagugauggcccccgauaaaccuucccuggacauuagccuggagaccgucgcuaucgaucggccggccgaagugcgcaagguuugcuacaacgcugugcucacacacgucaaaauuaaugacaagugucccucuaccggagaggcccaucuggcggaagagaacgaaggcgacaaugccugcaaaagaaccuauuccgaucggggcugggggaacggauguggccuuuucgggaagggaagcaucguggcuugcgccaaguuuacaugcgcuaaaucuaugucccuguucgagguugaccagacgaagauucaguacgugaucagagcccagcuccacgucggcgccaaacaagagaauuggaacaccgauaucaagacacugaaauuugacgcucuuagcgggucucaggaaguggaguucauuggauacggcaaggcgacccuggaaugucagguccagacagccguggauuuuggcaacuccuauaucgcugagauggaaaccgagagcuggauuguugaccgccaaugggcccaggaucucacgcugccuuggcaguccgggucuggaggcguguggcgggagaugcaccaucuggucgaguucgagcccccucacgccgcuacaaucagagugcucgcccuggggaaucaagaaggaagccuuaaaaccgcgcugaccggcgcuaugcgcguuacaaaggacaccaacgauaauaaccucuacaagcugcaugggggccacguguccugccgggucaaacuuagcgcccugacacucaagggaacgucuuauaaaauuuguaccgacaagauguuuuucgugaaaaaucccacagauaccggccacgggacagugguuaugcaggucaagguguccaagggagccccgugcagaaucccugugaucgucgcugacgaccugaccgccgcuauuaacaaaggcauccuggugacgguuaaucccauugccagcaccaacgaugacgaggugcucaucgaagucaauccucccuucggggauucuuacauuaucgugggacgcggcgacagccggcugacauaucaguggcauaaggagggguccucuaucggcaaacuuuuuacccagacaaugaagggaguugagagacuggcggugaugggcgauaccgccugggacuucagcuccgcugggggauuuuucacgagcgucggcaaagggauucacacaguguuuggaucugccuuccaaggccucuuugggggccugaacuggaucaccaagguuauuaugggagcugugcugaucugggucggcauuaauacacgcaacaugaccauguccaugagcaugauccuugugggggugauuaugauguuccucucucugggagucggcgccugaggacuaguaauaaggaaacuguaugaaugucugugggcaggaagugaagagauccuucuguaaagguuuuuggaauuaugucugcugaauaauaaacuuuuuugaaauaauaaaucugguagaaaaaugagaucuaaaaaaaaaaaaaaaaaaaaaaaaaaaaaaaaaaaaaaaaaaaaaaaaaaaaaaaaaaaaaaaaugcaucccccccccccccccccccccccccccccccaaaggcucuuuucagagccaccagaauu

SEQ ID NO: 932 - RNA, 2444 nt, Artificial Sequence
  mRNA product Design g-4 comprising derived and/or modified sequence from YFV__NC_002031.1__SSIgE-prME-XX (polyprotein: aa122-788) (opt5)
gggagacuccugucgggcggaaguaggaggaguagaguuuaaaaacaguacucuuuuuccgguucgggacguaguugaagcaacgacaagccggauaaccgcucuugagacaggaagcuuaccauggacuggaccuggauccuguuccucguggccgcugccacaagaguccacagcguuacgcuggugcggaaaaaccgcuggcuucugcucaaugugaccagcgaggaucuggggaagacauuuuccgucggaaccggcaacugcacaaccaauauucuggaagccaaauacuggugucccgacucuauggaguauaacugcccuaaucucagcccgagagaagaacccgaugacaucgauuguuggugcuacgggguggaaaacguucggguggcuuauggaaagugugacuccgccggccgcucuagacggagccgcagagcgauugaucugccuacacaugagaaucacggccuuaaaacccggcaagagaaguggaugacggggcgcaugggagaaagacagcugcagaagaucgagcggugguucguccgcaaccccuuuuucgcugugaccgcccucacaauugccuaccugguuggcuccaauaugacccagagaguggucaucgcccuucuggugcucgcuguggggccugcuuauagcgcccauugcaucggaauuacagaccgggauuuuaucgaaggcguccacgggggaaccuggguuucugcgacgcuggagcaagacaaaugugugacagugauggcccccgauaagccuucccuggacauuagccucgagaccgucgcuaucgauagaccggccgaagugcgcaaaguuugcuacaacgcugugcugacacaugucaagauuaaugacaaaugucccucuaccggcgaggcccaccuugcggaagagaacgaaggcgacaaugccugcaagcggaccuauuccgauagaggguggggaaacggcugugggcuguucggaaagggcagcaucguggcuugcgccaaauuuacaugcgcuaagucuaugucccucuucgagguugaccagacgaaaauucaguacgugauccgcgcccagcugcacgucggggccaagcaagagaauuggaacaccgauaucaaaacacuuaaguuugacgcucugagcggaucccaggaaguggaguucauuggcuacggcaaagcgacccucgaaugucagguccagacagccguggauuuugggaacucuuauaucgcugagauggaaaccgagagcuggauuguugaccggcaaugggcccaggaucugacgcugccuuggcaguccggaagcggcgggguguggagagagaugcaucaccucgucgaguucgagcccccucaugccgcuacaauccgcgugcuggcccuuggaaaucaagaaggcucucugaagaccgcgcucaccggggcuaugcggguuacaaaggacaccaacgauaauaaccuguacaaacuucacggcggacacguguccugcagagucaagcugagcgcccucacacugaaaggcacgucuuauaagauuuguaccgacaaaauguuuuucgugaagaaucccacagauaccgggcauggaacagugguuaugcaggucaaggugagcaaaggcgccccgugccgcaucccugugaucgucgcugacgaccugaccgccgcuauuaacaaggggauccucgugacgguuaaucccauugccuccaccaacgaugacgaggugcugaucgaagucaauccucccuucggagauucuuacauuaucgugggccggggagacagcagacuuacauaucaguggcacaaagagggcuccagcaucggaaagcuguuuacccagacaaugaaaggcguugagcgccucgcggugaugggggauaccgccugggacuucucuuccgcuggaggcuuuuucacgagcgucgggaaggggauucauacaguguuuggcucugccuuccaagggcuguuuggcggacugaacuggaucaccaagguuauuaugggcgcugugcuuaucugggucgggauuaauacacggaacaugaccauguccaugagcaugauccucgugggagugauuaugauguuccugucccugggcgucggggccgaucagggaugugcgaucaauuuuggcaaaugaggacuaguaauaaggaaacuguaugaaugucugugggcaggaagugaagagauccuucuguaaagguuuuuggaauuaugucugcugaauaauaaacuuuuuugaaauaauaaaucugguagaaaaaugagaucuaaaaaaaaaaaaaaaaaaaaaaaaaaaaaaaaaaaaaaaaaaaaaaaaaaaaaaaaaaaaaaaaugcaucccccccccccccccccccccccccccccccaaaggcucuuuucagagccaccagaauu

SEQ ID NO: 933 - RNA, 2414 nt, Artificial Sequence
  mRNA product Design g-4 comprising derived and/or modified sequence from YFV__NC_002031.1__SSIgE-prME (polyprotein: aa122-778) (opt5)
gggagacuccugucgggcggaaguaggaggaguagaguuuaaaaacaguacucuuuuuccgguucgggacguaguugaagcaacgacaagccggauaaccgcucuugagacaggaagcuuaccauggacuggaccuggauccuguuccucguggccgcugccacaagaguccacagcgugacccuggucagaaagaaccgguggcuccugcuuaauguuacaagcgaggaccugggcaaaacguucuccguggggaccggaaacugcacaaccaauauccucgaagccaaguacuggugucccgauucuauggaguauaacugcccuaaucugagcccgcgcgaggaacccgacgauauugacuguuggugcuacggcguggaaaacgucagaguggcuuaugggaaaugugauuccgccggacggucucgcagaagccggcgcgcgaucgaccuuccuacacacgagaaucauggccugaagaccagacaggagaaauggaugacagggcggaugggagaacgccaacuccagaagauugagagaugguuuguucggaaccccuucuuugcugugaccgcccugacgaucgccuaccuggucggcuccaauaugacccagcgcgugguuauugcucuccuggugcuugccgucggcccugcuuauucugcccacugcaucgggaucacagauagagacuucauugaaggagugcauggcgggaccugggugagcgcgacacuggagcaggauaagugugucaccguuauggcccccgacaaaccuucccucgauaucagccuggagacgguggcuauugaccggccggccgaagugcgcaaggucugcuacaacgcugugcuuacacacguuaaaaucaaugauaagugucccucuaccggagaggcccaucuggcggaagagaacgaaggcgacaaugccugcaaaagaacauauuccgaccggggguggggaaacggcuguggccucuuugggaagggaagcauuguggcuugcgccaaguuuaccugcgcuaaaucuaugucccuguucgaggucgaucaaaccaagauccaguacgugauuagagcccagcugcacguuggcgccaaacaggagaauuggaacacagacaucaagacgcucaaauucgaugcucugagcgggucucaagaaguggaguuuaucggauacggcaaggcgacccuugaaugucagguccagacagccguggacuucgggaacuccuauauugcugagauggaaaccgagagcuggaucgucgaucgccagugggcccaagaccugacacucccuuggcaguccggaucuggcggcguguggcgggagaugcaccaucugguugaauuugagcccccucacgccgcuaccauuagagugcuugcccuggggaaucaggaaggaagccucaaaacggcgcugacaggcgcuaugcgcgucaccaaggauaccaacgacaauaaccuguacaagcuccaugggggacacguguccugccggguuaaacugagcgcccuuacacugaagggcaccucuuauaaaaucuguacagauaagauguucuuugugaaaaaucccacggacaccgggcacggcacagucgugaugcaagugaagguuuccaagggagccccgugccgcauuccugucaucguggcugaugaccucaccgccgcuaucaacaaaggcauucuggugacagucaaucccaucgccagcaccaacgacgaugaggugcuuauugaaguuaauccucccuucggggacucuuacaucauugugggaagaggcgauagccggcugacguaucaguggcauaaggagggguccucuaucggaaaacucuucacccagacaaugaagggcgucgagagacuggcggugaugggggacaccgccugggauuuuagcuccgcuggcggauucuuuacaagcguuggcaaagggauccacaccguguucggaucugccuuucagggccuguucgggggacucaacuggauuacgaaggucaucaugggcgcugugcugauuuggguugggaucaauacacgcaacaugaccauguccaugagcaugauucuugugggcgucaucaugauguuucugucucucggagugggcgccugaggacuaguaauaaggaaacuguaugaaugucugugggcaggaagugaagagauccuucuguaaagguuuuuggaauuaugucugcugaauaauaaacuuuuuugaaauaauaaaucugguagaaaaaugagaucuaaaaaaaaaaaaaaaaaaaaaaaaaaaaaaaaaaaaaaaaaaaaaaaaaaaaaaaaaaaaaaaaugcaucccccccccccccccccccccccccccccccaaaggcucuuuucagagccaccagaauu

SEQ ID NO: 934 - RNA, 2462 nt, Artificial Sequence
  mRNA product Design g-4 comprising derived and/or modified sequence from YFV__NC_002031.1__SSjev-prME-XX (polyprotein: aa122-788) (opt5)
gggagacuccugucgggcggaaguaggaggaguagaguuuaaaaacaguacucuuuuuccgguucgggacguaguugaagcaacgacaagccggauaaccgcucuugagacaggaagcuuaccaugggcaagagaagcgccggguccaucauguggcuggcuucucucgccguggucauugcgugcgcuggagccguuacgcuggugcggaaaaaccgcuggcuucugcucaaugugaccagcgaggaucuggggaagacauuuuccgucggaaccggcaacugcacaaccaauauucuggaagccaaauacuggugucccgacucuauggaguauaacugcccuaaucucagcccgagagaagaacccgaugacaucgauuguuggugcuacgggguggaaaacguucggguggcuuauggaaagugugacuccgccggccgcucuagacggagccgcagagcgauugaucugccuacacaugagaaucacggccuuaaaacccggcaagagaaguggaugacggggcgcaugggagaaagacagcugcagaagaucgagcggugguucguccgcaaccccuuuuucgcugugaccgcccucacaauugccuaccugguuggcuccaauaugacccagagaguggucaucgcccuucuggugcucgcuguggggccugcuuauagcgcccauugcaucggaauuacagaccgggauuuuaucgaaggcguccacgggggaaccuggguuucugcgacgcuggagcaagacaaaugugugacagugauggcccccgauaagccuucccuggacauuagccucgagaccgucgcuaucgauagaccggccgaagugcgcaaaguuugcuacaacgcugugcugacacaugucaagauuaaugacaaaugucccucuaccggcgaggcccaccuugcggaagagaacgaaggcgacaaugccugcaagcggaccuauuccgauagaggguggggaaacggcugugggcuguucggaaagggcagcaucguggcuugcgccaaauuuacaugcgcuaagucuaugucccucuucgagguugaccagacgaaaauucaguacgugauccgcgcccagcugcacgucggggccaagcaagagaauuggaacaccgauaucaaaacacuuaaguuugacgcucugagcggaucccaggaaguggaguucauuggcuacggcaaagcgacccucgaaugucagguccagacagccguggauuuugggaacucuuauaucgcugagauggaaaccgagagcuggauuguugaccggcaaugggcccaggaucugacgcugccuuggcaguccggaagcggcgggguguggagagagaugcaucaccucgucgaguucgagcccccucaugccgcuacaauccgcgugcuggcccuuggaaaucaagaaggcucucugaagaccgcgcucaccggggcuaugcggguuacaaaggacaccaacgauaauaaccuguacaaacuucacggcggacacguguccugcagagucaagcugagcgcccucacacugaaaggcacgucuuauaagauuuguaccgacaaaauguuuuucgugaagaaucccacagauaccgggcauggaacagugguuaugcaggucaaggugagcaaaggcgccccgugccgcaucccugugaucgucgcugacgaccugaccgccgcuauuaacaaggggauccucgugacgguuaaucccauugccuccaccaacgaugacgaggugcugaucgaagucaauccucccuucggagauucuuacauuaucgugggccggggagacagcagacuuacauaucaguggcacaaagagggcuccagcaucggaaagcuguuuacccagacaaugaaaggcguugagcgccucgcggugaugggggauaccgccugggacuucucuuccgcuggaggcuuuuucacgagcgucgggaaggggauucauacaguguuuggcucugccuuccaagggcuguuuggcggacugaacuggaucaccaagguuauuaugggcgcugugcuuaucugggucgggauuaauacacggaacaugaccauguccaugagcaugauccucgugggagugauuaugauguuccugucccugggcgucggggccgaucagggaugugcgaucaauuuuggcaaaugaggacuaguaauaaggaaacuguaugaaugucugugggcaggaagugaagagauccuucuguaaagguuuuuggaauuaugucugcugaauaauaaacuuuuuugaaauaauaaaucugguagaaaaaugagaucuaaaaaaaaaaaaaaaaaaaaaaaaaaaaaaaaaaaaaaaaaaaaaaaaaaaaaaaaaaaaaaaaugcaucccccccccccccccccccccccccccccccaaaggcucuuuucagagccaccagaauu

SEQ ID NO: 935 - RNA, 2432 nt, Artificial Sequence
  mRNA product Design g-4 comprising derived and/or modified sequence from YFV__NC_002031.1__SSjev-prME (polyprotein: aa122-778) (opt5)
gggagacuccugucgggcggaaguaggaggaguagaguuuaaaaacaguacucuuuuuccgguucgggacguaguugaagcaacgacaagccggauaaccgcucuugagacaggaagcuuaccaugggcaagagaagcgccggguccaucauguggcuggcuucucucgccguggucauugcgugcgcuggagccgugacccuggucagaaagaaccgguggcuccugcuuaauguuacaagcgaggaccugggcaaaacguucuccguggggaccggaaacugcacaaccaauauccucgaagccaaguacuggugucccgauucuauggaguauaacugcccuaaucugagcccgcgcgaggaacccgacgauauugacuguuggugcuacggcguggaaaacgucagaguggcuuaugggaaaugugauuccgccggacggucucgcagaagccggcgcgcgaucgaccuuccuacacacgagaaucauggccugaagaccagacaggagaaauggaugacagggcggaugggagaacgccaacuccagaagauugagagaugguuuguucggaaccccuucuuugcugugaccgcccugacgaucgccuaccuggucggcuccaauaugacccagcgcgugguuauugcucuccuggugcuugccgucggcccugcuuauucugcccacugcaucgggaucacagauagagacuucauugaaggagugcauggcgggaccugggugagcgcgacacuggagcaggauaagugugucaccguuauggcccccgacaaaccuucccucgauaucagccuggagacgguggcuauugaccggccggccgaagugcgcaaggucugcuacaacgcugugcuuacacacguuaaaaucaaugauaagugucccucuaccggagaggcccaucuggcggaagagaacgaaggcgacaaugccugcaaaagaacauauuccgaccggggguggggaaacggcuguggccucuuugggaagggaagcauuguggcuugcgccaaguuuaccugcgcuaaaucuaugucccuguucgaggucgaucaaaccaagauccaguacgugauuagagcccagcugcacguuggcgccaaacaggagaauuggaacacagacaucaagacgcucaaauucgaugcucugagcgggucucaagaaguggaguuuaucggauacggcaaggcgacccuugaaugucagguccagacagccguggacuucgggaacuccuauauugcugagauggaaaccgagagcuggaucgucgaucgccagugggcccaagaccugacacucccuuggcaguccggaucuggcggcguguggcgggagaugcaccaucugguugaauuugagcccccucacgccgcuaccauuagagugcuugcccuggggaaucaggaaggaagccucaaaacggcgcugacaggcgcuaugcgcgucaccaaggauaccaacgacaauaaccuguacaagcuccaugggggacacguguccugccggguuaaacugagcgcccuuacacugaagggcaccucuuauaaaaucuguacagauaagauguucuuugugaaaaaucccacggacaccgggcacggcacagucgugaugcaagugaagguuuccaagggagccccgugccgcauuccugucaucguggcugaugaccucaccgccgcuaucaacaaaggcauucuggugacagucaaucccaucgccagcaccaacgacgaugaggugcuuauugaaguuaauccucccuucggggacucuuacaucauugugggaagaggcgauagccggcugacguaucaguggcauaaggagggguccucuaucggaaaacucuucacccagacaaugaagggcgucgagagacuggcggugaugggggacaccgccugggauuuuagcuccgcuggcggauucuuuacaagcguuggcaaagggauccacaccguguucggaucugccuuucagggccuguucgggggacucaacuggauuacgaaggucaucaugggcgcugugcugauuuggguugggaucaauacacgcaacaugaccauguccaugagcaugauucuugugggcgucaucaugauguuucugucucucggagugggcgccugaggacuaguaauaaggaaacuguaugaaugucugugggcaggaagugaagagauccuucuguaaagguuuuuggaauuaugucugcugaauaauaaacuuuuuugaaauaauaaaucugguagaaaaaugagaucuaaaaaaaaaaaaaaaaaaaaaaaaaaaaaaaaaaaaaaaaaaaaaaaaaaaaaaaaaaaaaaaaugcaucccccccccccccccccccccccccccccccaaaggcucuuuucagagccaccagaauu

SEQ ID NO: 936 - RNA, 2480 nt, Artificial Sequence
  mRNA product Design g-4 comprising derived and/or modified sequence from YFV__NC_002031.1__X-SS-prME-XX (polyprotein: aa92-788) (opt6)
gggagacuccugucgggcggaaguaggaggaguagaguuuaaaaacaguacucuuuuuccgguucgggacguaguugaagcaacgacaagccggauaaccgcucuugagacaggaagcuuaccaugagaggauuaucaaguagaaaaagaagaucacaugauguacuaaccgugcaauuuuugaucuuagggaugcucuuaaugacaggagguguuacauuaguaagaaagaaucgauggcugcuuuuaaaugugacaucagaggauuuagggaaaacauuuucgguaggaacaggaaauuguacuacaaauauacuugaagcaaaauauuggugcccagacucuauggaauauaauuguccaaauuuaaguccuagagaagaaccugacgauauagauuguugguguuaugguguagaaaauguaagaguagcauacggcaaaugcgauagugcaggacguucuagacguucaaggagagccauagaucugcccacucacgaaaaucacggauugaaaacacgacaagaaaaauggaugacugggcgaaugggagaaagacaacuacagaaaauugaaagaugguucguuagaaauccauucuuugccguaacagcuuuaacaauagccuauuuaguagguaguaauaugacacaaagaguaguaauagcauugcuaguguuagcaguuggaccagcuuauagugcacauugcauaggaauaacagauagagacuuuauagaaggaguacacgggggaacuuggguaagugccacuuuagaacaagauaaauguguuacagugauggcgccagauaaaccaagucuggacauaaguuuggaaacaguagcgauugauagacccgcagaaguaagaaaaguuuguuauaaugcuguucuaacccauguuaaaauaaaugauaaaugcccuagcaccggagaagcccaucuagcagaagaaaaugaaggagauaacgcauguaaacgaacauacucagauagaggauggggcaacggauguggcuuguuuggaaaagguagcauaguagcaugcgcuaaauuuacaugcgcaaagucaaugucauuauuugaaguagaucaaacaaaaauacaauauguaauaagagcucaauuacacgugggugcaaaacaagaaaauuggaauacagacauaaagacacuaaaguucgacgcauuaaguggaucacaagagguagaauuuauaggguacggaaaagcgacuuuagagugucaaguccaaacagcaguagauuucgguaacucauacauagcagaaauggaaacugaaaguuggauaguagauagacaaugggcacaagacuugacacuaccuuggcaaucaggaagcggaggaguauggagagaaaugcaucauuuaguagaauuugaaccaccucaugcagcaacaauaagaguauuagcccuaggaaaccaagaaggaaguuuaaaaacagcacuaacaggagcuaugagaguaacaaaagauacaaaugacaacaaucuauacaaauuacacggaggacauguaagcugccggguaaaguugagcgcacuaacauuaaaaggaacgaguuauaaaauaugcacagauaaaauguucuuuguuaaaaauccuacagauaccggucauggaacaguaguaaugcaaguaaaaguaaguaaaggcgcucccuguagaauaccuguaauagucgcagacgauuuaaccgcagcaauaaauaaaggaauauuagucacgguaaacccaauagcgucaacaaaugaugaugaaguauuaauagaaguuaacccaccuuuuggagacaguuauauaauagucggaaggggugauaguagacuaacauaccaauggcauaaagaaggaagcucaauaggaaaauuauuuacucaaaccaugaaagguguagaaaggcuagcuguuaugggugacacagcaugggauuuuucaagcgcaggaggguucuuuacaucaguagguaaaggaauacauacaguauuuggaagugcauuucaaggauuauuuggugguuuaaauuggauaacaaaaguaauaaugggcgcaguuuuaauauggguagguauaaacacaagaaauaugacaaugucuaugaguaugauauuggucggaguaauaaugauguuuuuaucacuaggagugggugcagaucaagguugcgcuauuaauuuuggaaaaugaggacuaguaauaaggaaacuguaugaaugucugugggcaggaagugaagagauccuucuguaaagguuuuuggaauuaugucugcugaauaauaaacuuuuuugaaauaauaaaucugguagaaaaaugagaucuaaaaaaaaaaaaaaaaaaaaaaaaaaaaaaaaaaaaaaaaaaaaaaaaaaaaaaaaaaaaaaaaugcaucccccccccccccccccccccccccccccccaaaggcucuuuucagagccaccagaauu

SEQ ID NO: 937 - RNA, 2417 nt, Artificial Sequence
  mRNA product Design g-4 comprising derived and/or modified sequence from YFV__NC_002031.1__SS-prME (polyprotein: M,aa104-778) (opt6)
gggagacuccugucgggcggaaguaggaggaguagaguuuaaaaacaguacucuuuuuccgguucgggacguaguugaagcaacgacaagccggauaaccgcucuugagacaggaagcuuaccauggauguucuaacaguacaauuuuuaauauuagggauguuauuaaugacaggaggcguaacauuaguacgaaagaaucgauggcuauuacuaaacguuacgucugaagauuuaggaaaaacauuuagcguaggaacaggaaauugcaccacgaauaucuuagaagcaaaauauugguguccagauaguauggaauacaauuguccaaauuuaaguccuagagaggaacccgacgauauagauugcugguguuacggaguggaaaauguaagaguagcauauggaaaaugugacagcgcagguagaaguagaagaucacgacgagcaauugaucuacccacucaugagaaccauggacuaaaaacaagacaagaaaaauggaugacagguagaaugggcgaaagacaauuacagaaaauagaaagaugguuuguacgaaauccuuucuuugcugucacugcauuaacuauagcuuauuuaguaggaaguaacaugacucaaagaguaguaauagcacuauuaguacuagcaguaggaccagcuuacagugcacacuguauagggauaacggauagagauuuuauagaaggaguacauggggguacaugggugucugccacuuuagaacaagacaaauguguuacaguuauggccccagauaaacccucuuuagacauaucauuagaaacuguagcaauagauagaccggcggaagugagaaagguauguuauaaugcaguacuaacccauguaaaaauuaaugacaaaugcccaucaacaggagaggcucaucuagcugaagaaaaugaaggagacaaugcuugcaaacguacauauucagacaggggguggggaaauggauguggauuauuugguaaagggucaauaguagcaugugcaaaauuuacaugcgcaaaaaguaugagcuuauuugaaguagaucaaacaaaaauccaauauguaauuagagcucaacuucacguaggagcaaaacaagagaauuggaacacagauauaaaaacauuaaaauuugacgcuuugucuggaagucaagaagucgaauuuauuggcuauggaaaggcaacauuagaaugccaaguucaaaccgcaguagauuuuggaaauucauacauagcagaaauggagacugaaaguuggauaguagauagacagugggcucaagaccuaacuuuaccauggcaaucaggaaguggugguguauggagagaaaugcaucauuuaguagaauuugaaccaccacaugcagcaacaauuagaguacuagcauuaggaaaucaagaagguaguuuaaagacagcgcuuaccggagcaaugagaguuacaaaagauacuaaugacaauaauuuauauaaacuucauggaggacauguuagcuguagagucaaauuaagugcauuaacacucaaaggaacaucauacaaaauauguacagauaaaauguuuuucgucaagaauccaacagauacaggacauggaacaguuguaaugcaaguaaaaguaucaaaaggagcaccuugcagaauaccaguaauaguagcagaugauuuaacagccgcaauuaauaaagggauauuaguaacaguaaacccuauagcaaguacaaaugaugaugaagucuugauagaaguaaauccaccauuuggagauucguauauaauagucggaagaggagauagucgauuaacauaucaauggcauaaagaagguucaucaauaggaaaauuauuuacacaaaccaugaaaggaguugaaagauuagcuguaaugggggacacagcuugggauuuuucuagcgcaggaggauucuuuacauccguaggaaaagguauacacacaguauuuggcucagcauuccaaggguuauuuggugguuuaaauuggauaacaaaagugauuaugggagcagugcuaaucuggguaggaauaaauacaagaaauaugacaaugaguaugagcaugauucucguaggaguaauaaugauguuccuuaguuugggaguuggcgcuugaggacuaguaauaaggaaacuguaugaaugucugugggcaggaagugaagagauccuucuguaaagguuuuuggaauuaugucugcugaauaauaaacuuuuuugaaauaauaaaucugguagaaaaaugagaucuaaaaaaaaaaaaaaaaaaaaaaaaaaaaaaaaaaaaaaaaaaaaaaaaaaaaaaaaaaaaaaaaugcaucccccccccccccccccccccccccccccccaaaggcucuuuucagagccaccagaauu

SEQ ID NO: 938 - RNA, 2444 nt, Artificial Sequence
  mRNA product Design g-4 comprising derived and/or modified sequence from YFV__NC_002031.1__SSIgE-prME-XX (polyprotein: aa122-788) (opt6)
gggagacuccugucgggcggaaguaggaggaguagaguuuaaaaacaguacucuuuuuccgguucgggacguaguugaagcaacgacaagccggauaaccgcucuugagacaggaagcuuaccauggacuggacauggauauuauuuuuaguagcagcagcaacaagaguacauucaguuacauuaguaagaaagaaucgauggcugcuuuuaaaugugacaucagaggauuuagggaaaacauuuucgguaggaacaggaaauuguacuacaaauauacuugaagcaaaauauuggugcccagacucuauggaauauaauuguccaaauuuaaguccuagagaagaaccugacgauauagauuguugguguuaugguguagaaaauguaagaguagcauacggcaaaugcgauagugcaggacguucuagacguucaaggagagccauagaucugcccacucacgaaaaucacggauugaaaacacgacaagaaaaauggaugacugggcgaaugggagaaagacaacuacagaaaauugaaagaugguucguuagaaauccauucuuugccguaacagcuuuaacaauagccuauuuaguagguaguaauaugacacaaagaguaguaauagcauugcuaguguuagcaguuggaccagcuuauagugcacauugcauaggaauaacagauagagacuuuauagaaggaguacacgggggaacuuggguaagugccacuuuagaacaagauaaauguguuacagugauggcgccagauaaaccaagucuggacauaaguuuggaaacaguagcgauugauagacccgcagaaguaagaaaaguuuguuauaaugcuguucuaacccauguuaaaauaaaugauaaaugcccuagcaccggagaagcccaucuagcagaagaaaaugaaggagauaacgcauguaaacgaacauacucagauagaggauggggcaacggauguggcuuguuuggaaaagguagcauaguagcaugcgcuaaauuuacaugcgcaaagucaaugucauuauuugaaguagaucaaacaaaaauacaauauguaauaagagcucaauuacacgugggugcaaaacaagaaaauuggaauacagacauaaagacacuaaaguucgacgcauuaaguggaucacaagagguagaauuuauaggguacggaaaagcgacuuuagagugucaaguccaaacagcaguagauuucgguaacucauacauagcagaaauggaaacugaaaguuggauaguagauagacaaugggcacaagacuugacacuaccuuggcaaucaggaagcggaggaguauggagagaaaugcaucauuuaguagaauuugaaccaccucaugcagcaacaauaagaguauuagcccuaggaaaccaagaaggaaguuuaaaaacagcacuaacaggagcuaugagaguaacaaaagauacaaaugacaacaaucuauacaaauuacacggaggacauguaagcugccggguaaaguugagcgcacuaacauuaaaaggaacgaguuauaaaauaugcacagauaaaauguucuuuguuaaaaauccuacagauaccggucauggaacaguaguaaugcaaguaaaaguaaguaaaggcgcucccuguagaauaccuguaauagucgcagacgauuuaaccgcagcaauaaauaaaggaauauuagucacgguaaacccaauagcgucaacaaaugaugaugaaguauuaauagaaguuaacccaccuuuuggagacaguuauauaauagucggaaggggugauaguagacuaacauaccaauggcauaaagaaggaagcucaauaggaaaauuauuuacucaaaccaugaaagguguagaaaggcuagcuguuaugggugacacagcaugggauuuuucaagcgcaggaggguucuuuacaucaguagguaaaggaauacauacaguauuuggaagugcauuucaaggauuauuuggugguuuaaauuggauaacaaaaguaauaaugggcgcaguuuuaauauggguagguauaaacacaagaaauaugacaaugucuaugaguaugauauuggucggaguaauaaugauguuuuuaucacuaggagugggugcagaucaagguugcgcuauuaauuuuggaaaaugaggacuaguaauaaggaaacuguaugaaugucugugggcaggaagugaagagauccuucuguaaagguuuuuggaauuaugucugcugaauaauaaacuuuuuugaaauaauaaaucugguagaaaaaugagaucuaaaaaaaaaaaaaaaaaaaaaaaaaaaaaaaaaaaaaaaaaaaaaaaaaaaaaaaaaaaaaaaaugcaucccccccccccccccccccccccccccccccaaaggcucuuuucagagccaccagaauu

SEQ ID NO: 939 - RNA, 2414 nt, Artificial Sequence
  mRNA product Design g-4 comprising derived and/or modified sequence from YFV__NC_002031.1__SSIgE-prME (polyprotein: aa122-778) (opt6)
gggagacuccugucgggcggaaguaggaggaguagaguuuaaaaacaguacucuuuuuccgguucgggacguaguugaagcaacgacaagccggauaaccgcucuugagacaggaagcuuaccauggacuggacauggauauuauuuuuaguagcagcagcaacaagaguacauucaguaacauuagucagaaagaacagaugguuauuacugaacguaacaagugaagacuuaggaaaaacauuuaguguaggcacaggaaauugcacaacaaauauacuugaagcaaaauauugguguccagauagcauggaauauaauuguccaaauuuaucaccuagagaggaacccgaugauauagauuguugguguuauggaguugaaaacgugcgaguagcauaugguaaaugugauagcgcaggaagaaguagaagaaguagaagggcaauagacuuaccaacucaugaaaaccauggauuaaaaacaagacaggaaaaauggaugacaggaagaaugggagaacgacaauuacagaaaauagaaagaugguucguaagaaauccauucuuugcaguaacagcauuaacaauagcauaucuaguuggaaguaacaugacucaaagaguaguaauagcauuguuaguacuagcaguaggaccggcuuauagcgcacauuguauagggauaacagauagagacuuuauagaaggagugcacgguggaacauggguuucagcaacgcuagagcaagauaaauguguaacgguaauggcgccggauaaaccaagccuugacauaucacuagaaacgguugcaaucgaucgaccagccgaaguaagaaaaguaugcuauaaugcggucuuaacacacguaaaaauaaaugauaaauguccuucaacgggagaagcacauuuagcagaagaaaacgaaggagacaacgcguguaaaagaacauauucagauaggggcuggggaaacggcugcgguuuauuuggaaaaggaaguauaguagcaugcgcaaaauuuacuugcgcaaaaaguaugaguuuauucgaaguugaucaaacaaagauacaauauguaauacgagcacaauuacauguaggugcaaagcaagaaaauuggaauacagacauaaaaacauugaaauuugacgcuuugaguggaucacaagaaguagaauuuauaggauacggaaaagcuacauuagaaugucaaguacaaacugcaguagauuuuggaaauucguauauagcagaaauggaaacugaaucauggauuguagauaggcaaugggcacaagauuuaaccuugccauggcaaagcggaagcggggguguauggcgggaaaugcaucauuuaguagaguucgaacccccacacgcggcuaccauaagaguacuagcauuaggaaaucaagaagggagucucaagacagcacucacaggugcaaugcgaguaacgaaagauacaaaugacaauaaucuauacaaacuacacggaggacauguaucuugcagaguaaaauuaucugcauuaacacuaaaagggacaaguuacaaaauuuguacagauaagauguucuuugucaaaaacccaacagacacgggacacggaacgguagucaugcaaguuaaaguaagcaaaggagcgccaugcagaauaccaguaaucgucgcagaugauuuaacagccgcaauaaauaaagguauauuaguaacgguaaauccaauagcgaguaccaaugaugaugaaguacuaauagaagugaacccaccauuuggugauagcuauauaauaguagggcgaggagauucaagauuaacauaucaauggcauaaagaagguaguaguauaggaaaauuauuuacacaaacuaugaaaggcguagaaagacuagcagucaugggagauacagcaugggauuucucaagugcaggcggauuuuucacaagcgucggaaaaggaauacauacaguguuugguagugcguuucaaggauuauucggaggacuaaauuggauaacgaaaguaauuaugggagcaguucucauaugggucggaauaaauacaaggaacaugacuaugaguaugagcaugauccuaguaggaguaauaaugauguuucuaagccuaggcguuggugcaugaggacuaguaauaaggaaacuguaugaaugucugugggcaggaagugaagagauccuucuguaaagguuuuuggaauuaugucugcugaauaauaaacuuuuuugaaauaauaaaucugguagaaaaaugagaucuaaaaaaaaaaaaaaaaaaaaaaaaaaaaaaaaaaaaaaaaaaaaaaaaaaaaaaaaaaaaaaaaugcaucccccccccccccccccccccccccccccccaaaggcucuuuucagagccaccagaauu

SEQ ID NO: 940 - RNA, 2462 nt, Artificial Sequence
  mRNA product Design g-4 comprising derived and/or modified sequence from YFV__NC_002031.1__SSjev-prME-XX (polyprotein: aa122-788) (opt6)
gggagacuccugucgggcggaaguaggaggaguagaguuuaaaaacaguacucuuuuuccgguucgggacguaguugaagcaacgacaagccggauaaccgcucuugagacaggaagcuuaccaugggaaaaagaagugcaggaaguauaaugugguuggcaaguuuagcaguaguaauagcaugugcaggagcaguuacauuaguaagaaagaaucgauggcugcuuuuaaaugugacaucagaggauuuagggaaaacauuuucgguaggaacaggaaauuguacuacaaauauacuugaagcaaaauauuggugcccagacucuauggaauauaauuguccaaauuuaaguccuagagaagaaccugacgauauagauuguugguguuaugguguagaaaauguaagaguagcauacggcaaaugcgauagugcaggacguucuagacguucaaggagagccauagaucugcccacucacgaaaaucacggauugaaaacacgacaagaaaaauggaugacugggcgaaugggagaaagacaacuacagaaaauugaaagaugguucguuagaaauccauucuuugccguaacagcuuuaacaauagccuauuuaguagguaguaauaugacacaaagaguaguaauagcauugcuaguguuagcaguuggaccagcuuauagugcacauugcauaggaauaacagauagagacuuuauagaaggaguacacgggggaacuuggguaagugccacuuuagaacaagauaaauguguuacagugauggcgccagauaaaccaagucuggacauaaguuuggaaacaguagcgauugauagacccgcagaaguaagaaaaguuuguuauaaugcuguucuaacccauguuaaaauaaaugauaaaugcccuagcaccggagaagcccaucuagcagaagaaaaugaaggagauaacgcauguaaacgaacauacucagauagaggauggggcaacggauguggcuuguuuggaaaagguagcauaguagcaugcgcuaaauuuacaugcgcaaagucaaugucauuauuugaaguagaucaaacaaaaauacaauauguaauaagagcucaauuacacgugggugcaaaacaagaaaauuggaauacagacauaaagacacuaaaguucgacgcauuaaguggaucacaagagguagaauuuauaggguacggaaaagcgacuuuagagugucaaguccaaacagcaguagauuucgguaacucauacauagcagaaauggaaacugaaaguuggauaguagauagacaaugggcacaagacuugacacuaccuuggcaaucaggaagcggaggaguauggagagaaaugcaucauuuaguagaauuugaaccaccucaugcagcaacaauaagaguauuagcccuaggaaaccaagaaggaaguuuaaaaacagcacuaacaggagcuaugagaguaacaaaagauacaaaugacaacaaucuauacaaauuacacggaggacauguaagcugccggguaaaguugagcgcacuaacauuaaaaggaacgaguuauaaaauaugcacagauaaaauguucuuuguuaaaaauccuacagauaccggucauggaacaguaguaaugcaaguaaaaguaaguaaaggcgcucccuguagaauaccuguaauagucgcagacgauuuaaccgcagcaauaaauaaaggaauauuagucacgguaaacccaauagcgucaacaaaugaugaugaaguauuaauagaaguuaacccaccuuuuggagacaguuauauaauagucggaaggggugauaguagacuaacauaccaauggcauaaagaaggaagcucaauaggaaaauuauuuacucaaaccaugaaagguguagaaaggcuagcuguuaugggugacacagcaugggauuuuucaagcgcaggaggguucuuuacaucaguagguaaaggaauacauacaguauuuggaagugcauuucaaggauuauuuggugguuuaaauuggauaacaaaaguaauaaugggcgcaguuuuaauauggguagguauaaacacaagaaauaugacaaugucuaugaguaugauauuggucggaguaauaaugauguuuuuaucacuaggagugggugcagaucaagguugcgcuauuaauuuuggaaaaugaggacuaguaauaaggaaacuguaugaaugucugugggcaggaagugaagagauccuucuguaaagguuuuuggaauuaugucugcugaauaauaaacuuuuuugaaauaauaaaucugguagaaaaaugagaucuaaaaaaaaaaaaaaaaaaaaaaaaaaaaaaaaaaaaaaaaaaaaaaaaaaaaaaaaaaaaaaaaugcaucccccccccccccccccccccccccccccccaaaggcucuuuucagagccaccagaauu

SEQ ID NO: 941 - RNA, 2432 nt, Artificial Sequence
  mRNA product Design g-4 comprising derived and/or modified sequence from YFV__NC_002031.1__SSjev-prME (polyprotein: aa122-778) (opt6)
gggagacuccugucgggcggaaguaggaggaguagaguuuaaaaacaguacucuuuuuccgguucgggacguaguugaagcaacgacaagccggauaaccgcucuugagacaggaagcuuaccaugggaaaaagaagugcaggaaguauaaugugguuggcaaguuuagcaguaguaauagcaugugcaggagcaguaacauuagucagaaagaacagaugguuauuacugaacguaacaagugaagacuuaggaaaaacauuuaguguaggcacaggaaauugcacaacaaauauacuugaagcaaaauauugguguccagauagcauggaauauaauuguccaaauuuaucaccuagagaggaacccgaugauauagauuguugguguuauggaguugaaaacgugcgaguagcauaugguaaaugugauagcgcaggaagaaguagaagaaguagaagggcaauagacuuaccaacucaugaaaaccauggauuaaaaacaagacaggaaaaauggaugacaggaagaaugggagaacgacaauuacagaaaauagaaagaugguucguaagaaauccauucuuugcaguaacagcauuaacaauagcauaucuaguuggaaguaacaugacucaaagaguaguaauagcauuguuaguacuagcaguaggaccggcuuauagcgcacauuguauagggauaacagauagagacuuuauagaaggagugcacgguggaacauggguuucagcaacgcuagagcaagauaaauguguaacgguaauggcgccggauaaaccaagccuugacauaucacuagaaacgguugcaaucgaucgaccagccgaaguaagaaaaguaugcuauaaugcggucuuaacacacguaaaaauaaaugauaaauguccuucaacgggagaagcacauuuagcagaagaaaacgaaggagacaacgcguguaaaagaacauauucagauaggggcuggggaaacggcugcgguuuauuuggaaaaggaaguauaguagcaugcgcaaaauuuacuugcgcaaaaaguaugaguuuauucgaaguugaucaaacaaagauacaauauguaauacgagcacaauuacauguaggugcaaagcaagaaaauuggaauacagacauaaaaacauugaaauuugacgcuuugaguggaucacaagaaguagaauuuauaggauacggaaaagcuacauuagaaugucaaguacaaacugcaguagauuuuggaaauucguauauagcagaaauggaaacugaaucauggauuguagauaggcaaugggcacaagauuuaaccuugccauggcaaagcggaagcggggguguauggcgggaaaugcaucauuuaguagaguucgaacccccacacgcggcuaccauaagaguacuagcauuaggaaaucaagaagggagucucaagacagcacucacaggugcaaugcgaguaacgaaagauacaaaugacaauaaucuauacaaacuacacggaggacauguaucuugcagaguaaaauuaucugcauuaacacuaaaagggacaaguuacaaaauuuguacagauaagauguucuuugucaaaaacccaacagacacgggacacggaacgguagucaugcaaguuaaaguaagcaaaggagcgccaugcagaauaccaguaaucgucgcagaugauuuaacagccgcaauaaauaaagguauauuaguaacgguaaauccaauagcgaguaccaaugaugaugaaguacuaauagaagugaacccaccauuuggugauagcuauauaauaguagggcgaggagauucaagauuaacauaucaauggcauaaagaagguaguaguauaggaaaauuauuuacacaaacuaugaaaggcguagaaagacuagcagucaugggagauacagcaugggauuucucaagugcaggcggauuuuucacaagcgucggaaaaggaauacauacaguguuugguagugcguuucaaggauuauucggaggacuaaauuggauaacgaaaguaauuaugggagcaguucucauaugggucggaauaaauacaaggaacaugacuaugaguaugagcaugauccuaguaggaguaauaaugauguuucuaagccuaggcguuggugcaugaggacuaguaauaaggaaacuguaugaaugucugugggcaggaagugaagagauccuucuguaaagguuuuuggaauuaugucugcugaauaauaaacuuuuuugaaauaauaaaucugguagaaaaaugagaucuaaaaaaaaaaaaaaaaaaaaaaaaaaaaaaaaaaaaaaaaaaaaaaaaaaaaaaaaaaaaaaaaugcaucccccccccccccccccccccccccccccccaaaggcucuuuucagagccaccagaauu

SEQ ID NO: 942 - RNA, 2480 nt, Artificial Sequence
  mRNA product Design g-4 comprising derived and/or modified sequence from YFV__NC_002031.1__X-SS-prME-XX (polyprotein: aa92-788) (opt11)
gggagacuccugucgggcggaaguaggaggaguagaguuuaaaaacaguacucuuuuuccgguucgggacguaguugaagcaacgacaagccggauaaccgcucuugagacaggaagcuuaccaugcggggacuaagcagcagaaaaagacgcagccacgaugugcucaccgugcaauuccucauacuggggaugcuccuaaugaccggaggcgugacccuaguaaggaaaaacagauggcuacuacuaaacguaaccucagaagaucuaggaaagacauuuucagucggcacaggcaacugcacaaccaacauacuagaagcaaaauauuggugcccagacagcauggaauacaacugucccaaccucagcccaagagaggaaccagacgacauagacugcugguguuacggaguagaaaacguaagaguggcauacggcaaaugcgacagcgcaggcaggagccgaagaucccgcagagccaucgacuugcccacgcacgaaaaccacggccucaaaacacgacaagaaaaauggaugacagggcgaaugggagaacgacagcuccagaaaauagaacgaugguucguccggaacccguucuucgcaguaacggcacuaacaaucgcauaccucguaggcagcaacaugacacaaagaguggucaucgcgcuacucguacuagcaguggggcccgcauacagugcacacugcauaggaaucacagaccgugacuucaucgaaggcguacacggaggaacguggguaagcgcgacacuggaacaagacaaaugcgugacaguaauggcaccagacaaaccaagccuagacauaucccuagaaacggucgccaucgaccgucccgcagaaguacgaaagguaugcuauaaugcaguccucacacacgucaaaauaaacgacaaaugccccagcacgggcgaagcacaccucgccgaagaaaacgaaggggauaacgcgugcaaacgcaccuacuccgacaggggauggggcaacggaugcggacuguucggaaaaggauccauagucgcaugcgcaaaauuuaccugcgcaaaaagcaugagcuuguucgagguagaccaaacgaagauccaauacguaauccgagcucaacuacacguuggggccaagcaagagaacuggaauacggacaucaaaacacuaaaauucgacgcacucuccggcucacaagaagucgaguucaucggcuacggcaaagcaacacuagaaugccaaguacaaacagcgguggacuucggcaacagcuacauagcagaaauggaaacagaaagcuggauaguagaccgacaaugggcacaagaccuaacucugccauggcaaagcggcucaggaggaguguggagagagaugcaccaccugguagaguucgaacccccacacgcagcaacaauaaggguacuggcacuaggcaaccaagaaggcagccuaaaaaccgcacucacaggagccaugcgcgugacgaaggacaccaacgacaacaaccucuacaaacuccacggagggcacguauccugccgcguaaaacuaucagcacuaacgcuaaaaggaacaagcuacaaaauaugcacagacaaaauguucuucgucaaaaaccccacagacacaggccacggcacagucguaaugcaagugaaggucagcaagggggcccccugccgaaucccagucauaguggcagacgaccucacggccgccaucaacaaagggauccugguaacagugaacccaauagcaucgaccaacgacgacgaaguccucauagaagugaaucccccguucggcgacagcuacaucaucguaggacgcggcgacucccgacugacguaccaauggcauaaagaaggcagcagcauuggaaaacuauucacccaaaccaugaagggcgucgaaagacucgcggugaugggagacaccgcaugggacuucucgagcgcaggcggcuucuucacaagcguaggaaaagggauucacacaguauucggauccgcauuccaaggccucuucgggggacuaaacuggauaacgaaaguaauaaugggagcaguucucauauggguaggaaucaacacacgaaacaugacaauguccaugucaaugauacucguaggcguaaucaugauguuucugucacucggagugggagcagaccaagguugcgccauaaacuucggcaagugaggacuaguaauaaggaaacuguaugaaugucugugggcaggaagugaagagauccuucuguaaagguuuuuggaauuaugucugcugaauaauaaacuuuuuugaaauaauaaaucugguagaaaaaugagaucuaaaaaaaaaaaaaaaaaaaaaaaaaaaaaaaaaaaaaaaaaaaaaaaaaaaaaaaaaaaaaaaaugcaucccccccccccccccccccccccccccccccaaaggcucuuuucagagccaccagaauu

SEQ ID NO: 943 - RNA, 2417 nt, Artificial Sequence
  mRNA product Design g-4 comprising derived and/or modified sequence from YFV__NC_002031.1__SS-prME (polyprotein: M,aa104-778) (opt11)
gggagacuccugucgggcggaaguaggaggaguagaguuuaaaaacaguacucuuuuuccgguucgggacguaguugaagcaacgacaagccggauaaccgcucuugagacaggaagcuuaccauggacguccuuacgguacaauuccuaauacuaggaaugcuucucaugaccgggggcgucacccuaguccggaaaaacagauggcuacugcuaaauguuacaagcgaagaccuuggcaagacauucagcguaggcacgggcaacuguacaaccaacauacuagaagcgaaauacuggugcccagacuccauggaguacaacugccccaaccuaagcccacgggaagaacccgacgacauagacugcugguguuacggggucgaaaacguccgcgucgcauacgggaaaugcgauagcgcaggccgcaguagacgcucccgccgcgccauagaccuaccaacgcacgagaaccacggccucaaaacucgccaagaaaaauggaugacagggcgaaugggugaacgccaacuacagaagaucgaaaggugguucgucaggaacccauucuucgcagugaccgcacuaacgauagccuaccuagugggaucaaacaugacgcaacgagucgugaucgcacuccuaguacuggccguaggaccggccuacuccgcgcacugcaucggcauaacggauagggacuucauugaaggaguacauggcggcacgugggucagcgcgacacucgaacaagacaaaugcguaaccgugauggcacccgacaaaccgagucuugacauaagccuggaaacgguagcgauagaucguccagccgaaguaagaaaaguaugcuacaacgcaguccuaacacacguaaaaauaaacgacaaaugcccaagcacaggggaagcccaccucgcagaagagaacgaaggcgacaacgcaugcaaacgcacauacuccgacaggggaugggggaauggcugcggacuauucgggaaaggaagcaucgucgcgugcgccaaauucacaugcgccaagagcaugagccuguucgaagucgaccaaacaaaaauccaauacguaauacgcgcgcaacugcacguaggagcgaaacaggaaaacuggaacacggacauuaaaacccucaaauucgacgcgcucucaggaucacaagaagucgaguucaucggcuacggcaaggcaacgcucgaaugccaaguacaaacagcaguagacuucggaaacagcuacauugccgagauggaaaccgagagcuggauagucgacagacaaugggcccaagaccuaacccugccauggcaaucaggcuccgggggcgucuggcgagagaugcaccaccuaguagaguucgaaccaccccacgccgccacgaucagaguacuggcccugggcaaccaagaaggcucacucaagacggcgcucacaggagcaaugagggucacgaaagacaccaacgacaacaaccucuacaaacuacacggagggcacgugagcugccggguaaaacugagcgcacucacucugaagggaacaagcuacaagauaugcaccgacaaaauguucuucgugaaaaacccaaccgacacuggacacggcacggucguuaugcaagucaagguaucaaaaggagccccaugcagaaucccaguaauaguagcggacgaccuaacagccgccauaaacaaaggaauccuagucacgguaaauccgauagcaucgaccaacgacgacgaaguacuaauagaagugaacccaccauucggcgacagcuacauaauagucgggagaggcgacucgcgacuaaccuaccaauggcacaaggaagggagcucuaucgggaaacuauucacccaaacgaugaagggcguagaaaggcucgcagucaugggcgacaccgcaugggacuucuccagcgcgggaggcuucuuuacuucagugggaaaagggauacacaccgucuucggcagcgcauuccagggccuauucggcggguuaaacuggaucacgaaagugauaaugggggcaguucucaucugggucggaauaaacacacguaacaugaccaugagcaugagcaugauccuagucggggucauaaugauguucuugagcuugggaguaggugcaugaggacuaguaauaaggaaacuguaugaaugucugugggcaggaagugaagagauccuucuguaaagguuuuuggaauuaugucugcugaauaauaaacuuuuuugaaauaauaaaucugguagaaaaaugagaucuaaaaaaaaaaaaaaaaaaaaaaaaaaaaaaaaaaaaaaaaaaaaaaaaaaaaaaaaaaaaaaaaugcaucccccccccccccccccccccccccccccccaaaggcucuuuucagagccaccagaauu

SEQ ID NO: 944 - RNA, 2444 nt, Artificial Sequence
  mRNA product Design g-4 comprising derived and/or modified sequence from YFV__NC_002031.1__SSIgE-prME-XX (polyprotein: aa122-788) (opt11)
gggagacuccugucgggcggaaguaggaggaguagaguuuaaaaacaguacucuuuuuccgguucgggacguaguugaagcaacgacaagccggauaaccgcucuugagacaggaagcuuaccauggauuggacguggauacucuuucucguggccgcggccacgcgcgugcacucggugacccuaguaaggaaaaacagauggcuacuacuaaacguaaccucagaagaucuaggaaagacauuuucagucggcacaggcaacugcacaaccaacauacuagaagcaaaauauuggugcccagacagcauggaauacaacugucccaaccucagcccaagagaggaaccagacgacauagacugcugguguuacggaguagaaaacguaagaguggcauacggcaaaugcgacagcgcaggcaggagccgaagaucccgcagagccaucgacuugcccacgcacgaaaaccacggccucaaaacacgacaagaaaaauggaugacagggcgaaugggagaacgacagcuccagaaaauagaacgaugguucguccggaacccguucuucgcaguaacggcacuaacaaucgcauaccucguaggcagcaacaugacacaaagaguggucaucgcgcuacucguacuagcaguggggcccgcauacagugcacacugcauaggaaucacagaccgugacuucaucgaaggcguacacggaggaacguggguaagcgcgacacuggaacaagacaaaugcgugacaguaauggcaccagacaaaccaagccuagacauaucccuagaaacggucgccaucgaccgucccgcagaaguacgaaagguaugcuauaaugcaguccucacacacgucaaaauaaacgacaaaugccccagcacgggcgaagcacaccucgccgaagaaaacgaaggggauaacgcgugcaaacgcaccuacuccgacaggggauggggcaacggaugcggacuguucggaaaaggauccauagucgcaugcgcaaaauuuaccugcgcaaaaagcaugagcuuguucgagguagaccaaacgaagauccaauacguaauccgagcucaacuacacguuggggccaagcaagagaacuggaauacggacaucaaaacacuaaaauucgacgcacucuccggcucacaagaagucgaguucaucggcuacggcaaagcaacacuagaaugccaaguacaaacagcgguggacuucggcaacagcuacauagcagaaauggaaacagaaagcuggauaguagaccgacaaugggcacaagaccuaacucugccauggcaaagcggcucaggaggaguguggagagagaugcaccaccugguagaguucgaacccccacacgcagcaacaauaaggguacuggcacuaggcaaccaagaaggcagccuaaaaaccgcacucacaggagccaugcgcgugacgaaggacaccaacgacaacaaccucuacaaacuccacggagggcacguauccugccgcguaaaacuaucagcacuaacgcuaaaaggaacaagcuacaaaauaugcacagacaaaauguucuucgucaaaaaccccacagacacaggccacggcacagucguaaugcaagugaaggucagcaagggggcccccugccgaaucccagucauaguggcagacgaccucacggccgccaucaacaaagggauccugguaacagugaacccaauagcaucgaccaacgacgacgaaguccucauagaagugaaucccccguucggcgacagcuacaucaucguaggacgcggcgacucccgacugacguaccaauggcauaaagaaggcagcagcauuggaaaacuauucacccaaaccaugaagggcgucgaaagacucgcggugaugggagacaccgcaugggacuucucgagcgcaggcggcuucuucacaagcguaggaaaagggauucacacaguauucggauccgcauuccaaggccucuucgggggacuaaacuggauaacgaaaguaauaaugggagcaguucucauauggguaggaaucaacacacgaaacaugacaauguccaugucaaugauacucguaggcguaaucaugauguuucugucacucggagugggagcagaccaagguugcgccauaaacuucggcaagugaggacuaguaauaaggaaacuguaugaaugucugugggcaggaagugaagagauccuucuguaaagguuuuuggaauuaugucugcugaauaauaaacuuuuuugaaauaauaaaucugguagaaaaaugagaucuaaaaaaaaaaaaaaaaaaaaaaaaaaaaaaaaaaaaaaaaaaaaaaaaaaaaaaaaaaaaaaaaugcaucccccccccccccccccccccccccccccccaaaggcucuuuucagagccaccagaauu

SEQ ID NO: 945 - RNA, 2414 nt, Artificial Sequence
  mRNA product Design g-4 comprising derived and/or modified sequence from YFV__NC_002031.1__SSIgE-prME (polyprotein: aa122-778) (opt11)
gggagacuccugucgggcggaaguaggaggaguagaguuuaaaaacaguacucuuuuuccgguucgggacguaguugaagcaacgacaagccggauaaccgcucuugagacaggaagcuuaccauggauuggacguggauacucuuucucguggccgcggccacgcgcgugcacucggugacccuaguccgcaaaaacagauggcuacuacuaaacguaacaagcgaagaccugggcaaaacauucagcguuggcacaggcaauugcacgacaaacauacucgaagcaaaauacuggugccccgacagcauggaauacaacugcccaaaucuaagcccacgcgaagaaccagacgacaucgacuguuggugcuacggagucgaaaacgugagggucgcauacgguaaaugcgacagcgcuggcagaagcagacgcucccgacgagccauugaccucccuacccacgaaaaccacggccuaaaaacccggcaggaaaaauggaugacaggccggaugggagaacgccaacuacagaaaauagagaggugguuuguaagaaacccauucuucgccguaaccgcgcucaccaucgcuuaccucguaggaucaaacaugacgcaaagaguagugaucgcgcuacucguacuagcgguaggccccgccuacagcgcacacugcaucggcaucacugacagggacuucauagaaggcguccacgggggcacguggguuagcgccacacucgaacaagacaaaugcgucacagugauggcaccagacaaacccucacuagacaucucacuagaaaccgucgcaaucgaccgcccagcagaagucaggaaagugugcuacaacgccgucuuaacccacguaaaaauaaaugauaaaugcccaagcacgggagaggcacaccuagcggaagaaaacgaaggcgacaacgcgugcaaacguaccuacagcgacagaggguggggcaacggaugcggcuuauucggaaaaggaaguaucguagcaugcgcaaaauuuaccugcgccaaaagcaugucccuauucgaaguagaucaaacaaaaauacaauacgucauccgagcccaacuacacgugggggcaaaacaagaaaacuggaacaccgacaucaaaacacucaaauucgaugcccuaagcggcucccaagaaguagaguucaucgguuacggcaaggccacgcucgagugccaaguccaaacagcaguagacuucgggaacucauacaucgccgagauggaaacggaaucauggauugucgacagacaaugggcacaagaccuaacacuaccauggcaaucaggcagcggaggggucuggcgagaaaugcaccaccuaguagaguucgaacccccacacgccgcaacaauccgaguacuagcccucggaaaccaagaaggaucacuaaaaaccgcacucaccggcgcaaugcgcguaacaaaagauacaaacgacaacaaccuauacaaacuacacggcggacacgucagcugccgcgucaaacuauccgcccuaacacuaaaaggaacaagcuacaaaauaugcacagacaaaauguucuucgucaaaaauccgacugacacgggccacggcacagucguaaugcaaguaaaagucucaaaaggcgcaccaugcagaaucccaguaaucgucgccgaugaccuaacagccgcaaucaacaagggcauccucguaacaguaaaccccauagccagcaccaacgacgacgaaguccuaaucgaagucaacccacccuucggagacagcuacauaauaguaggacgaggggacucacgccuaaccuaccaauggcacaaagaaggauccucaaucggcaaacuguucacacaaacgaugaaaggcguagaaagacucgcaguaaugggcgauacggccugggacuucucaagcgcgggcggcuucuucacgagcgucggaaaaggcauccauacaguauucggaagcgcauuccaaggccuauuuggaggccucaacuggauaacaaaagugaucaugggagcaguacugaucugggucggcaucaacacccgcaacaugacgaugagcaugucaaugauccucgugggaguaauaaugauguuccucagccugggcguaggcgcaugaggacuaguaauaaggaaacuguaugaaugucugugggcaggaagugaagagauccuucuguaaagguuuuuggaauuaugucugcugaauaauaaacuuuuuugaaauaauaaaucugguagaaaaaugagaucuaaaaaaaaaaaaaaaaaaaaaaaaaaaaaaaaaaaaaaaaaaaaaaaaaaaaaaaaaaaaaaaaugcaucccccccccccccccccccccccccccccccaaaggcucuuuucagagccaccagaauu

SEQ ID NO: 946 - RNA, 2462 nt, Artificial Sequence
  mRNA product Design g-4 comprising derived and/or modified sequence from YFV__NC_002031.1__SSjev-prME-XX (polyprotein: aa122-788) (opt11)
gggagacuccugucgggcggaaguaggaggaguagaguuuaaaaacaguacucuuuuuccgguucgggacguaguugaagcaacgacaagccggauaaccgcucuugagacaggaagcuuaccauggggaaaaggagcgcgggcucgauaaugugguuggccucgcucgcggucgugaucgcgugcgcgggcgcggugacccuaguaaggaaaaacagauggcuacuacuaaacguaaccucagaagaucuaggaaagacauuuucagucggcacaggcaacugcacaaccaacauacuagaagcaaaauauuggugcccagacagcauggaauacaacugucccaaccucagcccaagagaggaaccagacgacauagacugcugguguuacggaguagaaaacguaagaguggcauacggcaaaugcgacagcgcaggcaggagccgaagaucccgcagagccaucgacuugcccacgcacgaaaaccacggccucaaaacacgacaagaaaaauggaugacagggcgaaugggagaacgacagcuccagaaaauagaacgaugguucguccggaacccguucuucgcaguaacggcacuaacaaucgcauaccucguaggcagcaacaugacacaaagaguggucaucgcgcuacucguacuagcaguggggcccgcauacagugcacacugcauaggaaucacagaccgugacuucaucgaaggcguacacggaggaacguggguaagcgcgacacuggaacaagacaaaugcgugacaguaauggcaccagacaaaccaagccuagacauaucccuagaaacggucgccaucgaccgucccgcagaaguacgaaagguaugcuauaaugcaguccucacacacgucaaaauaaacgacaaaugccccagcacgggcgaagcacaccucgccgaagaaaacgaaggggauaacgcgugcaaacgcaccuacuccgacaggggauggggcaacggaugcggacuguucggaaaaggauccauagucgcaugcgcaaaauuuaccugcgcaaaaagcaugagcuuguucgagguagaccaaacgaagauccaauacguaauccgagcucaacuacacguuggggccaagcaagagaacuggaauacggacaucaaaacacuaaaauucgacgcacucuccggcucacaagaagucgaguucaucggcuacggcaaagcaacacuagaaugccaaguacaaacagcgguggacuucggcaacagcuacauagcagaaauggaaacagaaagcuggauaguagaccgacaaugggcacaagaccuaacucugccauggcaaagcggcucaggaggaguguggagagagaugcaccaccugguagaguucgaacccccacacgcagcaacaauaaggguacuggcacuaggcaaccaagaaggcagccuaaaaaccgcacucacaggagccaugcgcgugacgaaggacaccaacgacaacaaccucuacaaacuccacggagggcacguauccugccgcguaaaacuaucagcacuaacgcuaaaaggaacaagcuacaaaauaugcacagacaaaauguucuucgucaaaaaccccacagacacaggccacggcacagucguaaugcaagugaaggucagcaagggggcccccugccgaaucccagucauaguggcagacgaccucacggccgccaucaacaaagggauccugguaacagugaacccaauagcaucgaccaacgacgacgaaguccucauagaagugaaucccccguucggcgacagcuacaucaucguaggacgcggcgacucccgacugacguaccaauggcauaaagaaggcagcagcauuggaaaacuauucacccaaaccaugaagggcgucgaaagacucgcggugaugggagacaccgcaugggacuucucgagcgcaggcggcuucuucacaagcguaggaaaagggauucacacaguauucggauccgcauuccaaggccucuucgggggacuaaacuggauaacgaaaguaauaaugggagcaguucucauauggguaggaaucaacacacgaaacaugacaauguccaugucaaugauacucguaggcguaaucaugauguuucugucacucggagugggagcagaccaagguugcgccauaaacuucggcaagugaggacuaguaauaaggaaacuguaugaaugucugugggcaggaagugaagagauccuucuguaaagguuuuuggaauuaugucugcugaauaauaaacuuuuuugaaauaauaaaucugguagaaaaaugagaucuaaaaaaaaaaaaaaaaaaaaaaaaaaaaaaaaaaaaaaaaaaaaaaaaaaaaaaaaaaaaaaaaugcaucccccccccccccccccccccccccccccccaaaggcucuuuucagagccaccagaauu

SEQ ID NO: 947 - RNA, 2432 nt, Artificial Sequence
  mRNA product Design g-4 comprising derived and/or modified sequence from YFV__NC_002031.1__SSjev-prME (polyprotein: aa122-778) (opt11)
gggagacuccugucgggcggaaguaggaggaguagaguuuaaaaacaguacucuuuuuccgguucgggacguaguugaagcaacgacaagccggauaaccgcucuugagacaggaagcuuaccauggggaaaaggagcgcgggcucgauaaugugguuggccucgcucgcggucgugaucgcgugcgcgggcgcggugacccuaguccgcaaaaacagauggcuacuacuaaacguaacaagcgaagaccugggcaaaacauucagcguuggcacaggcaauugcacgacaaacauacucgaagcaaaauacuggugccccgacagcauggaauacaacugcccaaaucuaagcccacgcgaagaaccagacgacaucgacuguuggugcuacggagucgaaaacgugagggucgcauacgguaaaugcgacagcgcuggcagaagcagacgcucccgacgagccauugaccucccuacccacgaaaaccacggccuaaaaacccggcaggaaaaauggaugacaggccggaugggagaacgccaacuacagaaaauagagaggugguuuguaagaaacccauucuucgccguaaccgcgcucaccaucgcuuaccucguaggaucaaacaugacgcaaagaguagugaucgcgcuacucguacuagcgguaggccccgccuacagcgcacacugcaucggcaucacugacagggacuucauagaaggcguccacgggggcacguggguuagcgccacacucgaacaagacaaaugcgucacagugauggcaccagacaaacccucacuagacaucucacuagaaaccgucgcaaucgaccgcccagcagaagucaggaaagugugcuacaacgccgucuuaacccacguaaaaauaaaugauaaaugcccaagcacgggagaggcacaccuagcggaagaaaacgaaggcgacaacgcgugcaaacguaccuacagcgacagaggguggggcaacggaugcggcuuauucggaaaaggaaguaucguagcaugcgcaaaauuuaccugcgccaaaagcaugucccuauucgaaguagaucaaacaaaaauacaauacgucauccgagcccaacuacacgugggggcaaaacaagaaaacuggaacaccgacaucaaaacacucaaauucgaugcccuaagcggcucccaagaaguagaguucaucgguuacggcaaggccacgcucgagugccaaguccaaacagcaguagacuucgggaacucauacaucgccgagauggaaacggaaucauggauugucgacagacaaugggcacaagaccuaacacuaccauggcaaucaggcagcggaggggucuggcgagaaaugcaccaccuaguagaguucgaacccccacacgccgcaacaauccgaguacuagcccucggaaaccaagaaggaucacuaaaaaccgcacucaccggcgcaaugcgcguaacaaaagauacaaacgacaacaaccuauacaaacuacacggcggacacgucagcugccgcgucaaacuauccgcccuaacacuaaaaggaacaagcuacaaaauaugcacagacaaaauguucuucgucaaaaauccgacugacacgggccacggcacagucguaaugcaaguaaaagucucaaaaggcgcaccaugcagaaucccaguaaucgucgccgaugaccuaacagccgcaaucaacaagggcauccucguaacaguaaaccccauagccagcaccaacgacgacgaaguccuaaucgaagucaacccacccuucggagacagcuacauaauaguaggacgaggggacucacgccuaaccuaccaauggcacaaagaaggauccucaaucggcaaacuguucacacaaacgaugaaaggcguagaaagacucgcaguaaugggcgauacggccugggacuucucaagcgcgggcggcuucuucacgagcgucggaaaaggcauccauacaguauucggaagcgcauuccaaggccuauuuggaggccucaacuggauaacaaaagugaucaugggagcaguacugaucugggucggcaucaacacccgcaacaugacgaugagcaugucaaugauccucgugggaguaauaaugauguuccucagccugggcguaggcgcaugaggacuaguaauaaggaaacuguaugaaugucugugggcaggaagugaagagauccuucuguaaagguuuuuggaauuaugucugcugaauaauaaacuuuuuugaaauaauaaaucugguagaaaaaugagaucuaaaaaaaaaaaaaaaaaaaaaaaaaaaaaaaaaaaaaaaaaaaaaaaaaaaaaaaaaaaaaaaaugcaucccccccccccccccccccccccccccccccaaaggcucuuuucagagccaccagaauu

SEQ ID NO: 948 - RNA, 2531 nt, Artificial Sequence
  mRNA product Design h-4 comprising derived and/or modified sequence from YFV__NC_002031.1__X-SS-prME-XX (polyprotein: aa92-788) (wt)
gggagagggcgcuuggcuugcaaggacccugagcugcggcauugaagcacacccaacccaacucgacugaagucagccucacugaaccggaucugagaaucuucucucucugggcuugccagggcucuccgaaccuagcuagcauccucuucaauuccaacuagaaagcuuaccaugagaggauuguccucaaggaaacgccguucccaugauguucugacugugcaauuccuaauuuugggaaugcuguugaugacggguggagugaccuuggugcggaaaaacagaugguugcuccuaaaugugacaucugaggaccucgggaaaacauucucugugggcacaggcaacugcacaacaaacauuuuggaagccaaguacuggugcccagacucaauggaauacaacugucccaaucucaguccaagagaggagccagaugacauugauugcuggugcuaugggguggaaaacguuagagucgcauaugguaagugugacucagcaggcaggucuaggaggucaagaagggccauugacuugccuacgcaugaaaaccaugguuugaagacccggcaagaaaaauggaugacuggaagaaugggugaaaggcaacuccaaaagauugagagaugguucgugaggaaccccuuuuuugcagugacggcucugaccauugccuaccuugugggaagcaacaugacgcaacgagucgugauugcccuacuggucuuggcuguugguccggccuacucagcucacugcauuggaauuacugacagggauuucauugagggggugcauggaggaacuuggguuucagcuacccuggagcaagacaagugugucacuguuauggccccugacaagccuucauuggacaucucacuagagacaguagccauugauagaccugcugaggugaggaaaguguguuacaaugcaguucucacucaugugaagauuaaugacaagugccccagcacuggagaggcccaccuagcugaagagaacgaaggggacaaugcgugcaagcgcacuuauucugauagaggcuggggcaauggcuguggccuauuugggaaagggagcauuguggcaugcgccaaauucacuugugccaaauccaugaguuuguuugagguugaucagaccaaaauucaguaugucaucagagcacaauugcauguaggggccaagcaggaaaauuggaauaccgacauuaagacucucaaguuugaugcccugucaggcucccaggaagucgaguucauuggguauggaaaagcuacacuggaaugccaggugcaaacugcgguggacuuugguaacaguuacaucgcugagauggaaacagagagcuggauaguggacagacagugggcccaggacuugacccugccauggcagaguggaaguggcgggguguggagagagaugcaucaucuugucgaauuugaaccuccgcaugccgccacuaucagaguacuggcccugggaaaccaggaaggcuccuugaaaacagcucuuacuggcgcaaugaggguuacaaaggacacaaaugacaacaaccuuuacaaacuacaugguggacauguuucuugcagagugaaauugucagcuuugacacucaaggggacauccuacaaaauaugcacugacaaaauguuuuuugucaagaacccaacugacacuggccauggcacuguugugaugcaggugaaagugucaaaaggagcccccugcaggauuccagugauaguagcugaugaucuuacagcggcaaucaauaaaggcauuuugguuacaguuaaccccaucgccucaaccaaugaugaugaagugcugauugaggugaacccaccuuuuggagacagcuacauuaucguugggagaggagauucacgucucacuuaccaguggcacaaagagggaagcucaauaggaaaguuguucacucagaccaugaaaggcguggaacgccuggccgucaugggagacaccgccugggauuucagcuccgcuggaggguucuucacuucgguugggaaaggaauccauacgguguuuggcucugccuuucaggggcuauuuggcggcuugaacuggauaacaaaggucaucaugggggcgguacuuauauggguuggcaucaacacaagaaacaugacaauguccaugagcaugaucuugguaggagugaucaugauguuuuugucucuaggaguuggggcggaucaaggaugcgccaucaacuuuggcaaguaaggacuaguaauaaggaaacuguaugaaugucugugggcaggaagugaagagauccuucuguaaagguuuuuggaauuaugucugcugaauaauaaacuuuuuugaaauaauaaaucugguagaaaaaugagaucuaaaaaaaaaaaaaaaaaaaaaaaaaaaaaaaaaaaaaaaaaaaaaaaaaaaaaaaaaaaaaaaaugcaucccccccccccccccccccccccccccccccaaaggcucuuuucagagccaccagaauu

SEQ ID NO: 949 - RNA, 2498 nt, Artificial Sequence
  mRNA product Design h-4 comprising derived and/or modified sequence from YFV__NC_002031.1__SS-prME (polyprotein: M,aa104-778) (wt)
gggagagggcgcuuggcuugcaaggacccugagcugcggcauugaagcacacccaacccaacucgacugaagucagccucacugaaccggaucugagaaucuucucucucugggcuugccagggcucuccgaaccuagcuagcauccucuucaauuccaacuagaaagcuuaccauggauguucugacugugcaauuccuaauuuugggaaugcuguugaugacggguggagugaccuuggugcggaaaaacagaugguugcuccuaaaugugacaucugaggaccucgggaaaacauucucugugggcacaggcaacugcacaacaaacauuuuggaagccaaguacuggugcccagacucaauggaauacaacugucccaaucucaguccaagagaggagccagaugacauugauugcuggugcuaugggguggaaaacguuagagucgcauaugguaagugugacucagcaggcaggucuaggaggucaagaagggccauugacuugccuacgcaugaaaaccaugguuugaagacccggcaagaaaaauggaugacuggaagaaugggugaaaggcaacuccaaaagauugagagaugguucgugaggaaccccuuuuuugcagugacggcucugaccauugccuaccuugugggaagcaacaugacgcaacgagucgugauugcccuacuggucuuggcuguugguccggccuacucagcucacugcauuggaauuacugacagggauuucauugagggggugcauggaggaacuuggguuucagcuacccuggagcaagacaagugugucacuguuauggccccugacaagccuucauuggacaucucacuagagacaguagccauugauagaccugcugaggugaggaaaguguguuacaaugcaguucucacucaugugaagauuaaugacaagugccccagcacuggagaggcccaccuagcugaagagaacgaaggggacaaugcgugcaagcgcacuuauucugauagaggcuggggcaauggcuguggccuauuugggaaagggagcauuguggcaugcgccaaauucacuugugccaaauccaugaguuuguuugagguugaucagaccaaaauucaguaugucaucagagcacaauugcauguaggggccaagcaggaaaauuggaauaccgacauuaagacucucaaguuugaugcccugucaggcucccaggaagucgaguucauuggguauggaaaagcuacacuggaaugccaggugcaaacugcgguggacuuugguaacaguuacaucgcugagauggaaacagagagcuggauaguggacagacagugggcccaggacuugacccugccauggcagaguggaaguggcgggguguggagagagaugcaucaucuugucgaauuugaaccuccgcaugccgccacuaucagaguacuggcccugggaaaccaggaaggcuccuugaaaacagcucuuacuggcgcaaugaggguuacaaaggacacaaaugacaacaaccuuuacaaacuacaugguggacauguuucuugcagagugaaauugucagcuuugacacucaaggggacauccuacaaaauaugcacugacaaaauguuuuuugucaagaacccaacugacacuggccauggcacuguugugaugcaggugaaagugucaaaaggagcccccugcaggauuccagugauaguagcugaugaucuuacagcggcaaucaauaaaggcauuuugguuacaguuaaccccaucgccucaaccaaugaugaugaagugcugauugaggugaacccaccuuuuggagacagcuacauuaucguugggagaggagauucacgucucacuuaccaguggcacaaagagggaagcucaauaggaaaguuguucacucagaccaugaaaggcguggaacgccuggccgucaugggagacaccgccugggauuucagcuccgcuggaggguucuucacuucgguugggaaaggaauccauacgguguuuggcucugccuuucaggggcuauuuggcggcuugaacuggauaacaaaggucaucaugggggcgguacuuauauggguuggcaucaacacaagaaacaugacaauguccaugagcaugaucuugguaggagugaucaugauguuuuugucucuaggaguuggggcggaucaaggaugcgccaucaacuuuggcaaguaaggacuaguaauaaggaaacuguaugaaugucugugggcaggaagugaagagauccuucuguaaagguuuuuggaauuaugucugcugaauaauaaacuuuuuugaaauaauaaaucugguagaaaaaugagaucuaaaaaaaaaaaaaaaaaaaaaaaaaaaaaaaaaaaaaaaaaaaaaaaaaaaaaaaaaaaaaaaaugcaucccccccccccccccccccccccccccccccaaaggcucuuuucagagccaccagaauu

SEQ ID NO: 950 - RNA, 2495 nt, Artificial Sequence
  mRNA product Design h-4 comprising derived and/or modified sequence from YFV__NC_002031.1__SSIgE-prME-XX (polyprotein: aa122-788) (wt)
gggagagggcgcuuggcuugcaaggacccugagcugcggcauugaagcacacccaacccaacucgacugaagucagccucacugaaccggaucugagaaucuucucucucugggcuugccagggcucuccgaaccuagcuagcauccucuucaauuccaacuagaaagcuuaccauggacuggaccuggauccuguuccucguggccgccgcgacccgcguccacagcgugaccuuggugcggaaaaacagaugguugcuccuaaaugugacaucugaggaccucgggaaaacauucucugugggcacaggcaacugcacaacaaacauuuuggaagccaaguacuggugcccagacucaauggaauacaacugucccaaucucaguccaagagaggagccagaugacauugauugcuggugcuaugggguggaaaacguuagagucgcauaugguaagugugacucagcaggcaggucuaggaggucaagaagggccauugacuugccuacgcaugaaaaccaugguuugaagacccggcaagaaaaauggaugacuggaagaaugggugaaaggcaacuccaaaagauugagagaugguucgugaggaaccccuuuuuugcagugacggcucugaccauugccuaccuugugggaagcaacaugacgcaacgagucgugauugcccuacuggucuuggcuguugguccggccuacucagcucacugcauuggaauuacugacagggauuucauugagggggugcauggaggaacuuggguuucagcuacccuggagcaagacaagugugucacuguuauggccccugacaagccuucauuggacaucucacuagagacaguagccauugauagaccugcugaggugaggaaaguguguuacaaugcaguucucacucaugugaagauuaaugacaagugccccagcacuggagaggcccaccuagcugaagagaacgaaggggacaaugcgugcaagcgcacuuauucugauagaggcuggggcaauggcuguggccuauuugggaaagggagcauuguggcaugcgccaaauucacuugugccaaauccaugaguuuguuugagguugaucagaccaaaauucaguaugucaucagagcacaauugcauguaggggccaagcaggaaaauuggaauaccgacauuaagacucucaaguuugaugcccugucaggcucccaggaagucgaguucauuggguauggaaaagcuacacuggaaugccaggugcaaacugcgguggacuuugguaacaguuacaucgcugagauggaaacagagagcuggauaguggacagacagugggcccaggacuugacccugccauggcagaguggaaguggcgggguguggagagagaugcaucaucuugucgaauuugaaccuccgcaugccgccacuaucagaguacuggcccugggaaaccaggaaggcuccuugaaaacagcucuuacuggcgcaaugaggguuacaaaggacacaaaugacaacaaccuuuacaaacuacaugguggacauguuucuugcagagugaaauugucagcuuugacacucaaggggacauccuacaaaauaugcacugacaaaauguuuuuugucaagaacccaacugacacuggccauggcacuguugugaugcaggugaaagugucaaaaggagcccccugcaggauuccagugauaguagcugaugaucuuacagcggcaaucaauaaaggcauuuugguuacaguuaaccccaucgccucaaccaaugaugaugaagugcugauugaggugaacccaccuuuuggagacagcuacauuaucguugggagaggagauucacgucucacuuaccaguggcacaaagagggaagcucaauaggaaaguuguucacucagaccaugaaaggcguggaacgccuggccgucaugggagacaccgccugggauuucagcuccgcuggaggguucuucacuucgguugggaaaggaauccauacgguguuuggcucugccuuucaggggcuauuuggcggcuugaacuggauaacaaaggucaucaugggggcgguacuuauauggguuggcaucaacacaagaaacaugacaauguccaugagcaugaucuugguaggagugaucaugauguuuuugucucuaggaguuggggcggaucaaggaugcgccaucaacuuuggcaaguaaggacuaguaauaaggaaacuguaugaaugucugugggcaggaagugaagagauccuucuguaaagguuuuuggaauuaugucugcugaauaauaaacuuuuuugaaauaauaaaucugguagaaaaaugagaucuaaaaaaaaaaaaaaaaaaaaaaaaaaaaaaaaaaaaaaaaaaaaaaaaaaaaaaaaaaaaaaaaugcaucccccccccccccccccccccccccccccccaaaggcucuuuucagagccaccagaauu

SEQ ID NO: 951 - RNA, 2465 nt, Artificial Sequence
  mRNA product Design h-4 comprising derived and/or modified sequence from YFV__NC_002031.1__SSIgE-prME (polyprotein: aa122-778) (wt)
gggagagggcgcuuggcuugcaaggacccugagcugcggcauugaagcacacccaacccaacucgacugaagucagccucacugaaccggaucugagaaucuucucucucugggcuugccagggcucuccgaaccuagcuagcauccucuucaauuccaacuagaaagcuuaccauggacuggaccuggauccuguuccucguggccgccgcgacccgcguccacagcgugaccuuggugcggaaaaacagaugguugcuccuaaaugugacaucugaggaccucgggaaaacauucucugugggcacaggcaacugcacaacaaacauuuuggaagccaaguacuggugcccagacucaauggaauacaacugucccaaucucaguccaagagaggagccagaugacauugauugcuggugcuaugggguggaaaacguuagagucgcauaugguaagugugacucagcaggcaggucuaggaggucaagaagggccauugacuugccuacgcaugaaaaccaugguuugaagacccggcaagaaaaauggaugacuggaagaaugggugaaaggcaacuccaaaagauugagagaugguucgugaggaaccccuuuuuugcagugacggcucugaccauugccuaccuugugggaagcaacaugacgcaacgagucgugauugcccuacuggucuuggcuguugguccggccuacucagcucacugcauuggaauuacugacagggauuucauugagggggugcauggaggaacuuggguuucagcuacccuggagcaagacaagugugucacuguuauggccccugacaagccuucauuggacaucucacuagagacaguagccauugauagaccugcugaggugaggaaaguguguuacaaugcaguucucacucaugugaagauuaaugacaagugccccagcacuggagaggcccaccuagcugaagagaacgaaggggacaaugcgugcaagcgcacuuauucugauagaggcuggggcaauggcuguggccuauuugggaaagggagcauuguggcaugcgccaaauucacuugugccaaauccaugaguuuguuugagguugaucagaccaaaauucaguaugucaucagagcacaauugcauguaggggccaagcaggaaaauuggaauaccgacauuaagacucucaaguuugaugcccugucaggcucccaggaagucgaguucauuggguauggaaaagcuacacuggaaugccaggugcaaacugcgguggacuuugguaacaguuacaucgcugagauggaaacagagagcuggauaguggacagacagugggcccaggacuugacccugccauggcagaguggaaguggcgggguguggagagagaugcaucaucuugucgaauuugaaccuccgcaugccgccacuaucagaguacuggcccugggaaaccaggaaggcuccuugaaaacagcucuuacuggcgcaaugaggguuacaaaggacacaaaugacaacaaccuuuacaaacuacaugguggacauguuucuugcagagugaaauugucagcuuugacacucaaggggacauccuacaaaauaugcacugacaaaauguuuuuugucaagaacccaacugacacuggccauggcacuguugugaugcaggugaaagugucaaaaggagcccccugcaggauuccagugauaguagcugaugaucuuacagcggcaaucaauaaaggcauuuugguuacaguuaaccccaucgccucaaccaaugaugaugaagugcugauugaggugaacccaccuuuuggagacagcuacauuaucguugggagaggagauucacgucucacuuaccaguggcacaaagagggaagcucaauaggaaaguuguucacucagaccaugaaaggcguggaacgccuggccgucaugggagacaccgccugggauuucagcuccgcuggaggguucuucacuucgguugggaaaggaauucauacgguguuuggcucugccuuucaggggcuauuuggcggcuugaacuggauaacaaaggucaucaugggggcgguacuuauauggguuggcaucaacacaagaaacaugacaauguccaugagcaugaucuugguaggagugaucaugauguuuuugucucuaggaguuggggcguaaggacuaguaauaaggaaacuguaugaaugucugugggcaggaagugaagagauccuucuguaaagguuuuuggaauuaugucugcugaauaauaaacuuuuuugaaauaauaaaucugguagaaaaaugagaucuaaaaaaaaaaaaaaaaaaaaaaaaaaaaaaaaaaaaaaaaaaaaaaaaaaaaaaaaaaaaaaaaugcaucccccccccccccccccccccccccccccccaaaggcucuuuucagagccaccagaauu

SEQ ID NO: 952 - RNA, 2513 nt, Artificial Sequence
  mRNA product Design h-4 comprising derived and/or modified sequence from YFV__NC_002031.1__SSjev-prME-XX (polyprotein: aa122-788) (wt)
gggagagggcgcuuggcuugcaaggacccugagcugcggcauugaagcacacccaacccaacucgacugaagucagccucacugaaccggaucugagaaucuucucucucugggcuugccagggcucuccgaaccuagcuagcauccucuucaauuccaacuagaaagcuuaccauggguaaacggagcgcuggcucaaucauguggcucgcgagcuuggcaguugucauagcuugugcaggagccgugaccuuggugcggaaaaacagaugguugcuccuaaaugugacaucugaggaccucgggaaaacauucucugugggcacaggcaacugcacaacaaacauuuuggaagccaaguacuggugcccagacucaauggaauacaacugucccaaucucaguccaagagaggagccagaugacauugauugcuggugcuaugggguggaaaacguuagagucgcauaugguaagugugacucagcaggcaggucuaggaggucaagaagggccauugacuugccuacgcaugaaaaccaugguuugaagacccggcaagaaaaauggaugacuggaagaaugggugaaaggcaacuccaaaagauugagagaugguucgugaggaaccccuuuuuugcagugacggcucugaccauugccuaccuugugggaagcaacaugacgcaacgagucgugauugcccuacuggucuuggcuguugguccggccuacucagcucacugcauuggaauuacugacagggauuucauugagggggugcauggaggaacuuggguuucagcuacccuggagcaagacaagugugucacuguuauggccccugacaagccuucauuggacaucucacuagagacaguagccauugauagaccugcugaggugaggaaaguguguuacaaugcaguucucacucaugugaagauuaaugacaagugccccagcacuggagaggcccaccuagcugaagagaacgaaggggacaaugcgugcaagcgcacuuauucugauagaggcuggggcaauggcuguggccuauuugggaaagggagcauuguggcaugcgccaaauucacuugugccaaauccaugaguuuguuugagguugaucagaccaaaauucaguaugucaucagagcacaauugcauguaggggccaagcaggaaaauuggaauaccgacauuaagacucucaaguuugaugcccugucaggcucccaggaagucgaguucauuggguauggaaaagcuacacuggaaugccaggugcaaacugcgguggacuuugguaacaguuacaucgcugagauggaaacagagagcuggauaguggacagacagugggcccaggacuugacccugccauggcagaguggaaguggcgggguguggagagagaugcaucaucuugucgaauuugaaccuccgcaugccgccacuaucagaguacuggcccugggaaaccaggaaggcuccuugaaaacagcucuuacuggcgcaaugaggguuacaaaggacacaaaugacaacaaccuuuacaaacuacaugguggacauguuucuugcagagugaaauugucagcuuugacacucaaggggacauccuacaaaauaugcacugacaaaauguuuuuugucaagaacccaacugacacuggccauggcacuguugugaugcaggugaaagugucaaaaggagcccccugcaggauuccagugauaguagcugaugaucuuacagcggcaaucaauaaaggcauuuugguuacaguuaaccccaucgccucaaccaaugaugaugaagugcugauugaggugaacccaccuuuuggagacagcuacauuaucguugggagaggagauucacgucucacuuaccaguggcacaaagagggaagcucaauaggaaaguuguucacucagaccaugaaaggcguggaacgccuggccgucaugggagacaccgccugggauuucagcuccgcuggaggguucuucacuucgguugggaaaggaauccauacgguguuuggcucugccuuucaggggcuauuuggcggcuugaacuggauaacaaaggucaucaugggggcgguacuuauauggguuggcaucaacacaagaaacaugacaauguccaugagcaugaucuugguaggagugaucaugauguuuuugucucuaggaguuggggcggaucaaggaugcgccaucaacuuuggcaaguaaggacuaguaauaaggaaacuguaugaaugucugugggcaggaagugaagagauccuucuguaaagguuuuuggaauuaugucugcugaauaauaaacuuuuuugaaauaauaaaucugguagaaaaaugagaucuaaaaaaaaaaaaaaaaaaaaaaaaaaaaaaaaaaaaaaaaaaaaaaaaaaaaaaaaaaaaaaaaugcaucccccccccccccccccccccccccccccccaaaggcucuuuucagagccaccagaauu

SEQ ID NO: 953 - RNA, 2483 nt, Artificial Sequence
  mRNA product Design h-4 comprising derived and/or modified sequence from YFV__NC_002031.1__SSjev-prME (polyprotein: aa122-778) (wt)
gggagagggcgcuuggcuugcaaggacccugagcugcggcauugaagcacacccaacccaacucgacugaagucagccucacugaaccggaucugagaaucuucucucucugggcuugccagggcucuccgaaccuagcuagcauccucuucaauuccaacuagaaagcuuaccauggguaaacggagcgcuggcucaaucauguggcucgcgagcuuggcaguugucauagcuugugcaggagccgugaccuuggugcggaaaaacagaugguugcuccuaaaugugacaucugaggaccucgggaaaacauucucugugggcacaggcaacugcacaacaaacauuuuggaagccaaguacuggugcccagacucaauggaauacaacugucccaaucucaguccaagagaggagccagaugacauugauugcuggugcuaugggguggaaaacguuagagucgcauaugguaagugugacucagcaggcaggucuaggaggucaagaagggccauugacuugccuacgcaugaaaaccaugguuugaagacccggcaagaaaaauggaugacuggaagaaugggugaaaggcaacuccaaaagauugagagaugguucgugaggaaccccuuuuuugcagugacggcucugaccauugccuaccuugugggaagcaacaugacgcaacgagucgugauugcccuacuggucuuggcuguugguccggccuacucagcucacugcauuggaauuacugacagggauuucauugagggggugcauggaggaacuuggguuucagcuacccuggagcaagacaagugugucacuguuauggccccugacaagccuucauuggacaucucacuagagacaguagccauugauagaccugcugaggugaggaaaguguguuacaaugcaguucucacucaugugaagauuaaugacaagugccccagcacuggagaggcccaccuagcugaagagaacgaaggggacaaugcgugcaagcgcacuuauucugauagaggcuggggcaauggcuguggccuauuugggaaagggagcauuguggcaugcgccaaauucacuugugccaaauccaugaguuuguuugagguugaucagaccaaaauucaguaugucaucagagcacaauugcauguaggggccaagcaggaaaauuggaauaccgacauuaagacucucaaguuugaugcccugucaggcucccaggaagucgaguucauuggguauggaaaagcuacacuggaaugccaggugcaaacugcgguggacuuugguaacaguuacaucgcugagauggaaacagagagcuggauaguggacagacagugggcccaggacuugacccugccauggcagaguggaaguggcgggguguggagagagaugcaucaucuugucgaauuugaaccuccgcaugccgccacuaucagaguacuggcccugggaaaccaggaaggcuccuugaaaacagcucuuacuggcgcaaugaggguuacaaaggacacaaaugacaacaaccuuuacaaacuacaugguggacauguuucuugcagagugaaauugucagcuuugacacucaaggggacauccuacaaaauaugcacugacaaaauguuuuuugucaagaacccaacugacacuggccauggcacuguugugaugcaggugaaagugucaaaaggagcccccugcaggauuccagugauaguagcugaugaucuuacagcggcaaucaauaaaggcauuuugguuacaguuaaccccaucgccucaaccaaugaugaugaagugcugauugaggugaacccaccuuuuggagacagcuacauuaucguugggagaggagauucacgucucacuuaccaguggcacaaagagggaagcucaauaggaaaguuguucacucagaccaugaaaggcguggaacgccuggccgucaugggagacaccgccugggauuucagcuccgcuggaggguucuucacuucgguugggaaaggaauucauacgguguuuggcucugccuuucaggggcuauuuggcggcuugaacuggauaacaaaggucaucaugggggcgguacuuauauggguuggcaucaacacaagaaacaugacaauguccaugagcaugaucuugguaggagugaucaugauguuuuugucucuaggaguuggggcguaaggacuaguaauaaggaaacuguaugaaugucugugggcaggaagugaagagauccuucuguaaagguuuuuggaauuaugucugcugaauaauaaacuuuuuugaaauaauaaaucugguagaaaaaugagaucuaaaaaaaaaaaaaaaaaaaaaaaaaaaaaaaaaaaaaaaaaaaaaaaaaaaaaaaaaaaaaaaaugcaucccccccccccccccccccccccccccccccaaaggcucuuuucagagccaccagaauu

SEQ ID NO: 954 - RNA, 2531 nt, Artificial Sequence
  mRNA product Design h-4 comprising derived and/or modified sequence from YFV__NC_002031.1__X-SS-prME-XX (polyprotein: aa92-788) (opt1)
gggagagggcgcuuggcuugcaaggacccugagcugcggcauugaagcacacccaacccaacucgacugaagucagccucacugaaccggaucugagaaucuucucucucugggcuugccagggcucuccgaaccuagcuagcauccucuucaauuccaacuagaaagcuuaccaugcggggccugagcucccgcaagcggcgcagccacgacgugcucaccguccaguuccugauccuggggaugcuccugaugaccggcggggugacgcuggugcggaagaaccgcuggcuccugcugaacgucaccuccgaggaccucggcaagaccuucagcguggggaccggcaacugcacgaccaacauccuggaggccaaguacuggugccccgacuccauggaguacaacugcccgaaccugagcccccgggaggagcccgacgacaucgacugcuggugcuacggcguggagaacguccgcguggccuacgggaagugcgacuccgcgggccggagccgccggucccgccgggccaucgaccuccccacccacgagaaccacgggcugaagacccgccaggagaaguggaugacgggccggaugggggagcgccagcugcagaagaucgagcggugguucgugcgcaacccguucuucgccgucaccgcccucaccaucgccuaccuggugggcagcaacaugacccagcggguggucaucgcgcugcucgugcuggccgugggccccgccuacuccgcccacugcaucgggaucacggaccgcgacuucaucgagggcguccacgggggcaccugggugagcgcgacccuggagcaggacaagugcgugaccgucauggcccccgacaagcccucccucgacaucagccuggagacgguggccaucgaccggccggccgaggugcgcaaggucugcuacaacgccgugcugacccacgugaagaucaacgacaagugccccuccaccggcgaggcgcaccucgccgaggagaacgagggggacaacgccugcaagcggaccuacagcgaccggggcugggggaacggcugcgggcuguucggcaagggcuccaucgucgccugcgccaaguucacgugcgcgaagagcaugucccuguucgagguggaccagaccaagauccaguacgucauccgcgcccagcuccacgugggggccaagcaggagaacuggaacaccgacaucaagacccugaaguucgacgcccugagcggcagccaggagguggaguucaucggguacggcaaggccacgcucgagugccagguccagaccgcgguggacuucgggaacuccuacaucgccgagauggagaccgagagcuggaucguggaccggcagugggcccaggaccugacccugcccuggcaguccggcagcggcggggucuggcgcgagaugcaccaccucguggaguucgagcccccgcacgccgccacgauccgggugcuggcgcugggcaaccaggaggggucccucaagaccgcccugaccggcgccaugcgcgucaccaaggacacgaacgacaacaaccuguacaagcuccacgggggccacgugagcugccgggugaagcuguccgcccugacccucaagggcaccagcuacaagaucugcaccgacaagauguucuucgucaagaaccccacggacaccgggcacggcaccguggugaugcaggucaagguguccaagggggcgcccugccgcaucccggugaucgucgccgacgaccugaccgccgccaucaacaagggcauccuggugaccgugaacccgaucgccagcacgaacgacgacgagguccucaucgaggugaacccccccuucggcgacuccuacaucaucguggggcggggcgacagccgccugaccuaccaguggcacaaggagggguccagcaucggcaagcuguucacccagaccaugaagggggucgagcggcuggcggugaugggcgacacggccugggacuucuccagcgccggcggguucuucaccuccgugggcaaggggauccacaccgucuucggcagcgccuuccaggggcucuucggcggccugaacuggaucaccaaggugaucaugggggccgugcugaucugggucggcaucaacacgcgcaacaugaccauguccaugagcaugauccucgugggggugaucaugauguuccugagccugggcgucggggcggaccagggcugcgccaucaacuucggcaagugaggacuaguaauaaggaaacuguaugaaugucugugggcaggaagugaagagauccuucuguaaagguuuuuggaauuaugucugcugaauaauaaacuuuuuugaaauaauaaaucugguagaaaaaugagaucuaaaaaaaaaaaaaaaaaaaaaaaaaaaaaaaaaaaaaaaaaaaaaaaaaaaaaaaaaaaaaaaaugcaucccccccccccccccccccccccccccccccaaaggcucuuuucagagccaccagaauu

SEQ ID NO: 955 - RNA, 2468 nt, Artificial Sequence
  mRNA product Design h-4 comprising derived and/or modified sequence from YFV__NC_002031.1__SS-prME (polyprotein: M,aa104-778) (opt1)
gggagagggcgcuuggcuugcaaggacccugagcugcggcauugaagcacacccaacccaacucgacugaagucagccucacugaaccggaucugagaaucuucucucucugggcuugccagggcucuccgaaccuagcuagcauccucuucaauuccaacuagaaagcuuaccauggacgugcugaccguccaguuccucauccugggcaugcugcucaugaccgggggcgugacccugguccggaagaaccgcuggcuccugcugaacgugaccagcgaggaccucggcaagacguucuccguggggaccggcaacugcaccaccaacauccuggaggccaaguacuggugccccgacagcauggaguacaacugccccaaccuguccccgcgggaggagcccgacgacaucgacugcuggugcuacggggucgagaacgugcgcguggccuacggcaagugcgacagcgcggggcggucccgccggagccgccgggccaucgaccugcccacccacgagaaccacggccucaagacccggcaggagaaguggaugacggggcgcaugggcgagcggcagcugcagaagaucgagcgcugguucgugcggaacccguucuucgccgucaccgcgcugaccaucgccuaccucguggggagcaacaugacccagcgcguggucaucgcccugcuggugcucgccgugggccccgccuacuccgcgcacugcaucgggaucacggaccgggacuucaucgagggcguccacggcgggaccugggugagcgccacccuggagcaggacaagugcgugaccgucauggcccccgacaagcccucccuggacaucagccucgagacgguggccaucgaccgcccggcggaggugcggaaggucugcuacaacgccgugcugacccacgugaagaucaacgacaagugccccuccaccggcgaggcccaccuggccgaggagaacgagggggacaacgccugcaagcgcaccuacagcgaccggggcugggggaacggcugcggccucuucgggaagggcuccaucgucgcgugcgccaaguucacgugcgccaagagcaugucccuguucgagguggaccagaccaagauccaguacgugauccgcgcccagcugcacgucggggccaagcaggagaacuggaacaccgacaucaagacccucaaguucgacgcgcugagcggcucccaggagguggaguucaucggcuacgggaaggccacgcuggagugccaggugcagaccgccgucgacuucggcaacagcuacaucgccgagauggagaccgaguccuggaucguggaccggcagugggcccaggaccucacccugcccuggcagagcggguccggcgggguguggcgcgagaugcaccaccuggucgaguucgagcccccgcacgcggccacgauccgggugcucgcccugggcaaccaggagggcagccugaagaccgcccucaccggggccaugcgcgucaccaaggacacgaacgacaacaaccuguacaagcugcacggcgggcacguguccugccgggugaagcucagcgcgcugacccugaagggcaccuccuacaagaucugcaccgacaagauguucuucgucaagaaccccacggacaccgggcacggcaccguggugaugcaggucaaggugagcaagggcgcccccugccgcaucccggugaucgucgccgacgaccucaccgccgcgaucaacaaggggauccuggugacggugaaccccaucgccagcaccaacgacgacgagguccugaucgaggugaacccgcccuucggcgacuccuacaucaucguggggcggggcgacagccgccucaccuaccaguggcacaaggagggguccagcaucggcaagcuguucacccagacgaugaagggcgucgagcggcuggccgugaugggggacaccgccugggacuucuccagcgccggcggguucuucaccuccgugggcaagggcauccacaccgucuucgggagcgcguuccagggccucuucgggggccugaacuggaucaccaaggugaucaugggggccgugcugaucugggucggcaucaacacgcgcaacaugaccauguccaugagcaugauccucgugggcgugaucaugauguuccugucccugggggucggcgccugaggacuaguaauaaggaaacuguaugaaugucugugggcaggaagugaagagauccuucuguaaagguuuuuggaauuaugucugcugaauaauaaacuuuuuugaaauaauaaaucugguagaaaaaugagaucuaaaaaaaaaaaaaaaaaaaaaaaaaaaaaaaaaaaaaaaaaaaaaaaaaaaaaaaaaaaaaaaaugcaucccccccccccccccccccccccccccccccaaaggcucuuuucagagccaccagaauu

SEQ ID NO: 956 - RNA, 2495 nt, Artificial Sequence
  mRNA product Design h-4 comprising derived and/or modified sequence from YFV__NC_002031.1__SSIgE-prME-XX (polyprotein: aa122-788) (opt1)
gggagagggcgcuuggcuugcaaggacccugagcugcggcauugaagcacacccaacccaacucgacugaagucagccucacugaaccggaucugagaaucuucucucucugggcuugccagggcucuccgaaccuagcuagcauccucuucaauuccaacuagaaagcuuaccauggacuggaccuggauccuguuccucguggccgccgcgacccgcguccacagcgugacgcuggugcggaagaaccgcuggcuccugcugaacgucaccuccgaggaccucggcaagaccuucagcguggggaccggcaacugcacgaccaacauccuggaggccaaguacuggugccccgacuccauggaguacaacugcccgaaccugagcccccgggaggagcccgacgacaucgacugcuggugcuacggcguggagaacguccgcguggccuacgggaagugcgacuccgcgggccggagccgccggucccgccgggccaucgaccuccccacccacgagaaccacgggcugaagacccgccaggagaaguggaugacgggccggaugggggagcgccagcugcagaagaucgagcggugguucgugcgcaacccguucuucgccgucaccgcccucaccaucgccuaccuggugggcagcaacaugacccagcggguggucaucgcgcugcucgugcuggccgugggccccgccuacuccgcccacugcaucgggaucacggaccgcgacuucaucgagggcguccacgggggcaccugggugagcgcgacccuggagcaggacaagugcgugaccgucauggcccccgacaagcccucccucgacaucagccuggagacgguggccaucgaccggccggccgaggugcgcaaggucugcuacaacgccgugcugacccacgugaagaucaacgacaagugccccuccaccggcgaggcgcaccucgccgaggagaacgagggggacaacgccugcaagcggaccuacagcgaccggggcugggggaacggcugcgggcuguucggcaagggcuccaucgucgccugcgccaaguucacgugcgcgaagagcaugucccuguucgagguggaccagaccaagauccaguacgucauccgcgcccagcuccacgugggggccaagcaggagaacuggaacaccgacaucaagacccugaaguucgacgcccugagcggcagccaggagguggaguucaucggguacggcaaggccacgcucgagugccagguccagaccgcgguggacuucgggaacuccuacaucgccgagauggagaccgagagcuggaucguggaccggcagugggcccaggaccugacccugcccuggcaguccggcagcggcggggucuggcgcgagaugcaccaccucguggaguucgagcccccgcacgccgccacgauccgggugcuggcgcugggcaaccaggaggggucccucaagaccgcccugaccggcgccaugcgcgucaccaaggacacgaacgacaacaaccuguacaagcuccacgggggccacgugagcugccgggugaagcuguccgcccugacccucaagggcaccagcuacaagaucugcaccgacaagauguucuucgucaagaaccccacggacaccgggcacggcaccguggugaugcaggucaagguguccaagggggcgcccugccgcaucccggugaucgucgccgacgaccugaccgccgccaucaacaagggcauccuggugaccgugaacccgaucgccagcacgaacgacgacgagguccucaucgaggugaacccccccuucggcgacuccuacaucaucguggggcggggcgacagccgccugaccuaccaguggcacaaggagggguccagcaucggcaagcuguucacccagaccaugaagggggucgagcggcuggcggugaugggcgacacggccugggacuucuccagcgccggcggguucuucaccuccgugggcaaggggauccacaccgucuucggcagcgccuuccaggggcucuucggcggccugaacuggaucaccaaggugaucaugggggccgugcugaucugggucggcaucaacacgcgcaacaugaccauguccaugagcaugauccucgugggggugaucaugauguuccugagccugggcgucggggcggaccagggcugcgccaucaacuucggcaagugaggacuaguaauaaggaaacuguaugaaugucugugggcaggaagugaagagauccuucuguaaagguuuuuggaauuaugucugcugaauaauaaacuuuuuugaaauaauaaaucugguagaaaaaugagaucuaaaaaaaaaaaaaaaaaaaaaaaaaaaaaaaaaaaaaaaaaaaaaaaaaaaaaaaaaaaaaaaaugcaucccccccccccccccccccccccccccccccaaaggcucuuuucagagccaccagaauu

SEQ ID NO: 957 - RNA, 2465 nt, Artificial Sequence
  mRNA product Design h-4 comprising derived and/or modified sequence from YFV__NC_002031.1__SSIgE-prME (polyprotein: aa122-778) (opt1)
gggagagggcgcuuggcuugcaaggacccugagcugcggcauugaagcacacccaacccaacucgacugaagucagccucacugaaccggaucugagaaucuucucucucugggcuugccagggcucuccgaaccuagcuagcauccucuucaauuccaacuagaaagcuuaccauggacuggaccuggauccuguuccucguggccgccgcgacccgcguccacagcgugacccugguccgcaagaaccgguggcuccugcugaacgugaccagcgaggaccucggcaagacguucuccguggggaccggcaacugcaccaccaacauccuggaggccaaguacuggugccccgacagcauggaguacaacugcccgaaccuguccccgcgcgaggagcccgacgacaucgacugcuggugcuacggggucgagaacgugcggguggccuacggcaagugcgacagcgcggggcgcucccggcgcagccggcgcgccaucgaccuccccacgcacgagaaccacggccugaagacccggcaggagaaguggaugaccggccgcaugggggagcggcagcugcagaagaucgagcgcugguucguccggaaccccuucuucgccgugaccgcccucacgaucgccuaccuggugggcuccaacaugacccagcgcgucgugaucgcgcugcucgugcuggccgucgggcccgccuacagcgcccacugcaucggcaucaccgaccgggacuucaucgagggggugcacggcggcaccuggguguccgcgacgcuggagcaggacaagugcgucaccgugauggcccccgacaagcccagccucgacaucucccuggagaccguggccaucgaccgcccggccgagguccggaaggugugcuacaacgccgugcugacccacgucaagaucaacgacaagugccccagcacgggggaggcgcaccucgccgaggagaacgagggcgacaacgccugcaagcgcaccuacuccgaccggggguggggcaacggcugcgggcuguucggcaaggggagcaucguggccugcgccaaguucaccugcgcgaaguccaugagccuguucgagguggaccagaccaagauccaguacgucauccgcgcccagcuccacgugggcgccaagcaggagaacuggaacacggacaucaagacccugaaguucgacgcccuguccgggagccaggaggucgaguucaucggcuacggcaaggccacccucgagugccaggugcagaccgcgguggacuucgggaacuccuacaucgccgagauggagacggagagcuggaucgucgaccggcagugggcccaggaccugacccugcccuggcagagcggcuccgggggcguguggcgcgagaugcaccaccucguggaguucgagcccccgcacgccgccaccauccgcguccuggcgcuggggaaccaggagggcagccucaagaccgcccugacgggcgccaugcgggugaccaaggacaccaacgacaacaaccuguacaagcuccacgggggccacguguccugccgcgucaagcugagcgcccugacccucaaggggacguccuacaagaucugcaccgacaagauguucuucgugaagaaccccaccgacaccggccacgggacgguggucaugcaggugaaggugagcaagggcgcgcccugccggauccccgucaucguggccgacgaccugaccgccgccaucaacaagggcauccuggugaccgucaacccgaucgccuccaccaacgacgacgaggugcucaucgaggugaacccgcccuucggggacagcuacaucaucgucggccgcggggacucccggcugaccuaccaguggcacaaggagggcagcuccaucggcaagcuguucacgcagaccaugaaggggguggagcgccucgcggugaugggcgacaccgccugggacuucagcuccgccgggggcuucuucaccagcgucgggaagggcauccacacgguguucggcuccgccuuccaggggcuguucggcgggcugaacuggaucaccaaggugaucaugggcgccguccucaucuggguggggaucaacacccggaacaugaccaugagcauguccaugauccuggugggcgucaucaugauguuccugagccugggcgugggggcgugaggacuaguaauaaggaaacuguaugaaugucugugggcaggaagugaagagauccuucuguaaagguuuuuggaauuaugucugcugaauaauaaacuuuuuugaaauaauaaaucugguagaaaaaugagaucuaaaaaaaaaaaaaaaaaaaaaaaaaaaaaaaaaaaaaaaaaaaaaaaaaaaaaaaaaaaaaaaaugcaucccccccccccccccccccccccccccccccaaaggcucuuuucagagccaccagaauu

SEQ ID NO: 958 - RNA, 2513 nt, Artificial Sequence
  mRNA product Design h-4 comprising derived and/or modified sequence from YFV__NC_002031.1__SSjev-prME-XX (polyprotein: aa122-788) (opt1)
gggagagggcgcuuggcuugcaaggacccugagcugcggcauugaagcacacccaacccaacucgacugaagucagccucacugaaccggaucugagaaucuucucucucugggcuugccagggcucuccgaaccuagcuagcauccucuucaauuccaacuagaaagcuuaccaugggcaagcgcagcgccggguccaucauguggcuggccagccucgcgguggucaucgccugcgccggcgccgugacgcuggugcggaagaaccgcuggcuccugcugaacgucaccuccgaggaccucggcaagaccuucagcguggggaccggcaacugcacgaccaacauccuggaggccaaguacuggugccccgacuccauggaguacaacugcccgaaccugagcccccgggaggagcccgacgacaucgacugcuggugcuacggcguggagaacguccgcguggccuacgggaagugcgacuccgcgggccggagccgccggucccgccgggccaucgaccuccccacccacgagaaccacgggcugaagacccgccaggagaaguggaugacgggccggaugggggagcgccagcugcagaagaucgagcggugguucgugcgcaacccguucuucgccgucaccgcccucaccaucgccuaccuggugggcagcaacaugacccagcggguggucaucgcgcugcucgugcuggccgugggccccgccuacuccgcccacugcaucgggaucacggaccgcgacuucaucgagggcguccacgggggcaccugggugagcgcgacccuggagcaggacaagugcgugaccgucauggcccccgacaagcccucccucgacaucagccuggagacgguggccaucgaccggccggccgaggugcgcaaggucugcuacaacgccgugcugacccacgugaagaucaacgacaagugccccuccaccggcgaggcgcaccucgccgaggagaacgagggggacaacgccugcaagcggaccuacagcgaccggggcugggggaacggcugcgggcuguucggcaagggcuccaucgucgccugcgccaaguucacgugcgcgaagagcaugucccuguucgagguggaccagaccaagauccaguacgucauccgcgcccagcuccacgugggggccaagcaggagaacuggaacaccgacaucaagacccugaaguucgacgcccugagcggcagccaggagguggaguucaucggguacggcaaggccacgcucgagugccagguccagaccgcgguggacuucgggaacuccuacaucgccgagauggagaccgagagcuggaucguggaccggcagugggcccaggaccugacccugcccuggcaguccggcagcggcggggucuggcgcgagaugcaccaccucguggaguucgagcccccgcacgccgccacgauccgggugcuggcgcugggcaaccaggaggggucccucaagaccgcccugaccggcgccaugcgcgucaccaaggacacgaacgacaacaaccuguacaagcuccacgggggccacgugagcugccgggugaagcuguccgcccugacccucaagggcaccagcuacaagaucugcaccgacaagauguucuucgucaagaaccccacggacaccgggcacggcaccguggugaugcaggucaagguguccaagggggcgcccugccgcaucccggugaucgucgccgacgaccugaccgccgccaucaacaagggcauccuggugaccgugaacccgaucgccagcacgaacgacgacgagguccucaucgaggugaacccccccuucggcgacuccuacaucaucguggggcggggcgacagccgccugaccuaccaguggcacaaggagggguccagcaucggcaagcuguucacccagaccaugaagggggucgagcggcuggcggugaugggcgacacggccugggacuucuccagcgccggcggguucuucaccuccgugggcaaggggauccacaccgucuucggcagcgccuuccaggggcucuucggcggccugaacuggaucaccaaggugaucaugggggccgugcugaucugggucggcaucaacacgcgcaacaugaccauguccaugagcaugauccucgugggggugaucaugauguuccugagccugggcgucggggcggaccagggcugcgccaucaacuucggcaagugaggacuaguaauaaggaaacuguaugaaugucugugggcaggaagugaagagauccuucuguaaagguuuuuggaauuaugucugcugaauaauaaacuuuuuugaaauaauaaaucugguagaaaaaugagaucuaaaaaaaaaaaaaaaaaaaaaaaaaaaaaaaaaaaaaaaaaaaaaaaaaaaaaaaaaaaaaaaaugcaucccccccccccccccccccccccccccccccaaaggcucuuuucagagccaccagaauu

SEQ ID NO: 959 - RNA, 2483 nt, Artificial Sequence
  mRNA product Design h-4 comprising derived and/or modified sequence from YFV__NC_002031.1__SSjev-prME (polyprotein: aa122-778) (opt1)
gggagagggcgcuuggcuugcaaggacccugagcugcggcauugaagcacacccaacccaacucgacugaagucagccucacugaaccggaucugagaaucuucucucucugggcuugccagggcucuccgaaccuagcuagcauccucuucaauuccaacuagaaagcuuaccaugggcaagcgcagcgccggguccaucauguggcuggccagccucgcgguggucaucgccugcgccggcgccgugacccugguccgcaagaaccgguggcuccugcugaacgugaccagcgaggaccucggcaagacguucuccguggggaccggcaacugcaccaccaacauccuggaggccaaguacuggugccccgacagcauggaguacaacugcccgaaccuguccccgcgcgaggagcccgacgacaucgacugcuggugcuacggggucgagaacgugcggguggccuacggcaagugcgacagcgcggggcgcucccggcgcagccggcgcgccaucgaccuccccacgcacgagaaccacggccugaagacccggcaggagaaguggaugaccggccgcaugggggagcggcagcugcagaagaucgagcgcugguucguccggaaccccuucuucgccgugaccgcccucacgaucgccuaccuggugggcuccaacaugacccagcgcgucgugaucgcgcugcucgugcuggccgucgggcccgccuacagcgcccacugcaucggcaucaccgaccgggacuucaucgagggggugcacggcggcaccuggguguccgcgacgcuggagcaggacaagugcgucaccgugauggcccccgacaagcccagccucgacaucucccuggagaccguggccaucgaccgcccggccgagguccggaaggugugcuacaacgccgugcugacccacgucaagaucaacgacaagugccccagcacgggggaggcgcaccucgccgaggagaacgagggcgacaacgccugcaagcgcaccuacuccgaccggggguggggcaacggcugcgggcuguucggcaaggggagcaucguggccugcgccaaguucaccugcgcgaaguccaugagccuguucgagguggaccagaccaagauccaguacgucauccgcgcccagcuccacgugggcgccaagcaggagaacuggaacacggacaucaagacccugaaguucgacgcccuguccgggagccaggaggucgaguucaucggcuacggcaaggccacccucgagugccaggugcagaccgcgguggacuucgggaacuccuacaucgccgagauggagacggagagcuggaucgucgaccggcagugggcccaggaccugacccugcccuggcagagcggcuccgggggcguguggcgcgagaugcaccaccucguggaguucgagcccccgcacgccgccaccauccgcguccuggcgcuggggaaccaggagggcagccucaagaccgcccugacgggcgccaugcgggugaccaaggacaccaacgacaacaaccuguacaagcuccacgggggccacguguccugccgcgucaagcugagcgcccugacccucaaggggacguccuacaagaucugcaccgacaagauguucuucgugaagaaccccaccgacaccggccacgggacgguggucaugcaggugaaggugagcaagggcgcgcccugccggauccccgucaucguggccgacgaccugaccgccgccaucaacaagggcauccuggugaccgucaacccgaucgccuccaccaacgacgacgaggugcucaucgaggugaacccgcccuucggggacagcuacaucaucgucggccgcggggacucccggcugaccuaccaguggcacaaggagggcagcuccaucggcaagcuguucacgcagaccaugaaggggguggagcgccucgcggugaugggcgacaccgccugggacuucagcuccgccgggggcuucuucaccagcgucgggaagggcauccacacgguguucggcuccgccuuccaggggcuguucggcgggcugaacuggaucaccaaggugaucaugggcgccguccucaucuggguggggaucaacacccggaacaugaccaugagcauguccaugauccuggugggcgucaucaugauguuccugagccugggcgugggggcgugaggacuaguaauaaggaaacuguaugaaugucugugggcaggaagugaagagauccuucuguaaagguuuuuggaauuaugucugcugaauaauaaacuuuuuugaaauaauaaaucugguagaaaaaugagaucuaaaaaaaaaaaaaaaaaaaaaaaaaaaaaaaaaaaaaaaaaaaaaaaaaaaaaaaaaaaaaaaaugcaucccccccccccccccccccccccccccccccaaaggcucuuuucagagccaccagaauu

SEQ ID NO: 960 - RNA, 2531 nt, Artificial Sequence
  mRNA product Design h-4 comprising derived and/or modified sequence from YFV__NC_002031.1__X-SS-prME-XX (polyprotein: aa92-788) (opt1)
gggagagggcgcuuggcuugcaaggacccugagcugcggcauugaagcacacccaacccaacucgacugaagucagccucacugaaccggaucugagaaucuucucucucugggcuugccagggcucuccgaaccuagcuagcauccucuucaauuccaacuagaaagcuuaccaugcggggccugagcucccgcaagcggcgcagccacgacgugcucaccguccaguuccugauccuggggaugcuccugaugaccggcggggugacgcuggugcggaagaaccgcuggcuccugcugaacgucaccuccgaggaccucggcaagaccuucagcguggggaccggcaacugcacgaccaacauccuggaggccaaguacuggugccccgacuccauggaguacaacugcccgaaccugagcccccgggaggagcccgacgacaucgacugcuggugcuacggcguggagaacguccgcguggccuacgggaagugcgacuccgcgggccggagccgccggucccgccgggccaucgaccuccccacccacgagaaccacgggcugaagacccgccaggagaaguggaugacgggccggaugggggagcgccagcugcagaagaucgagcggugguucgugcgcaacccguucuucgccgucaccgcccucaccaucgccuaccuggugggcagcaacaugacccagcggguggucaucgcgcugcucgugcuggccgugggccccgccuacuccgcccacugcaucgggaucacggaccgcgacuucaucgagggcguccacgggggcaccugggugagcgcgacccuggagcaggacaagugcgugaccgucauggcccccgacaagcccucccucgacaucagccuggagacgguggccaucgaccggccggccgaggugcgcaaggucugcuacaacgccgugcugacccacgugaagaucaacgacaagugccccuccaccggcgaggcgcaccucgccgaggagaacgagggggacaacgccugcaagcggaccuacagcgaccggggcugggggaacggcugcgggcuguucggcaagggcuccaucgucgccugcgccaaguucacgugcgcgaaguccaugagccuguucgagguggaccagaccaagauccaguacgucauccgcgcccagcuccacgugggggccaagcaggagaacuggaacaccgacaucaagacccugaaguucgacgcccugagcggcagccaggagguggaguucaucggguacggcaaggccacgcucgagugccagguccagaccgcgguggacuucgggaacuccuacaucgccgagauggagaccgagagcuggaucguggaccggcagugggcccaggaccugacccugcccuggcaguccggcagcggcggggucuggcgcgagaugcaccaccucguggaguucgagcccccgcacgccgccacgauccgggugcuggcgcugggcaaccaggaggggucccucaagaccgcccugaccggcgccaugcgcgucaccaaggacacgaacgacaacaaccuguacaagcuccacgggggccacgugagcugccgggugaagcuguccgcccugacccucaagggcaccagcuacaagaucugcaccgacaagauguucuucgucaagaaccccacggacaccgggcacggcaccguggugaugcaggucaagguguccaagggggcgcccugccgcaucccggugaucgucgccgacgaccugaccgccgccaucaacaagggcauccuggugaccgugaacccgaucgccagcacgaacgacgacgagguccucaucgaggugaacccccccuucggcgacuccuacaucaucguggggcggggcgacagccgccugaccuaccaguggcacaaggagggguccagcaucggcaagcuguucacccagaccaugaagggggucgagcggcuggcggugaugggcgacacggccugggacuucuccagcgccggcggguucuucaccuccgugggcaaggggauccacaccgucuucggcagcgccuuccaggggcuguucggcggccucaacuggaucaccaaggugaucaugggggccgugcugaucugggucggcaucaacacgcgcaacaugaccauguccaugagcaugauccucgugggggugaucaugauguuccugagccugggcgucggggcggaccagggcugcgccaucaacuucggcaagugaggacuaguaauaaggaaacuguaugaaugucugugggcaggaagugaagagauccuucuguaaagguuuuuggaauuaugucugcugaauaauaaacuuuuuugaaauaauaaaucugguagaaaaaugagaucuaaaaaaaaaaaaaaaaaaaaaaaaaaaaaaaaaaaaaaaaaaaaaaaaaaaaaaaaaaaaaaaaugcaucccccccccccccccccccccccccccccccaaaggcucuuuucagagccaccagaauu

SEQ ID NO: 961 - RNA, 2468 nt, Artificial Sequence
  mRNA product Design h-4 comprising derived and/or modified sequence from YFV__NC_002031.1__SS-prME (polyprotein: M,aa104-778) (opt1)
gggagagggcgcuuggcuugcaaggacccugagcugcggcauugaagcacacccaacccaacucgacugaagucagccucacugaaccggaucugagaaucuucucucucugggcuugccagggcucuccgaaccuagcuagcauccucuucaauuccaacuagaaagcuuaccauggacgugcucaccguccaguuccugauccuggggaugcuccugaugaccggcggggugacgcuggugcggaagaaccgcuggcuccugcugaacgucaccuccgaggaccucggcaagaccuucagcguggggaccggcaacugcacgaccaacauccuggaggccaaguacuggugccccgacuccauggaguacaacugcccgaaccugagcccccgggaggagcccgacgacaucgacugcuggugcuacggcguggagaacguccgcguggccuacgggaagugcgacuccgcgggccggagccgccggucccgccgggccaucgaccuccccacccacgagaaccacgggcugaagacccgccaggagaaguggaugacgggccggaugggggagcgccagcugcagaagaucgagcggugguucgugcgcaacccguucuucgccgucaccgcccucaccaucgccuaccuggugggcagcaacaugacccagcggguggucaucgcgcugcucgugcuggccgugggccccgccuacuccgcccacugcaucgggaucacggaccgcgacuucaucgagggcguccacgggggcaccugggugagcgcgacccuggagcaggacaagugcgugaccgucauggcccccgacaagcccucccucgacaucagccuggagacgguggccaucgaccggccggccgaggugcgcaaggucugcuacaacgccgugcugacccacgugaagaucaacgacaagugccccuccaccggcgaggcgcaccucgccgaggagaacgagggggacaacgccugcaagcggaccuacagcgaccggggcugggggaacggcugcgggcuguucggcaagggcuccaucgucgccugcgccaaguucacgugcgcgaaguccaugagccuguucgagguggaccagaccaagauccaguacgucauccgcgcccagcuccacgugggggccaagcaggagaacuggaacaccgacaucaagacccugaaguucgacgcccugagcggcagccaggagguggaguucaucggguacggcaaggccacgcucgagugccagguccagaccgcgguggacuucgggaacuccuacaucgccgagauggagaccgagagcuggaucguggaccggcagugggcccaggaccugacccugcccuggcaguccggcagcggcggggucuggcgcgagaugcaccaccucguggaguucgagcccccgcacgccgccacgauccgggugcuggcgcugggcaaccaggaggggucccucaagaccgcccugaccggcgccaugcgcgucaccaaggacacgaacgacaacaaccuguacaagcuccacgggggccacgugagcugccgggugaagcuguccgcccugacccucaagggcaccagcuacaagaucugcaccgacaagauguucuucgucaagaaccccacggacaccgggcacggcaccguggugaugcaggucaagguguccaagggggcgcccugccgcaucccggugaucgucgccgacgaccugaccgccgccaucaacaagggcauccuggugaccgugaacccgaucgccagcacgaacgacgacgagguccucaucgaggugaacccccccuucggcgacuccuacaucaucguggggcggggcgacagccgccugaccuaccaguggcacaaggagggguccagcaucggcaagcuguucacccagaccaugaagggggucgagcggcuggcggugaugggcgacacggccugggacuucuccagcgccggcggguucuucaccuccgugggcaaggggauccacaccgucuucggcagcgccuuccaggggcuguucggcggccucaacuggaucaccaaggugaucaugggggccgugcugaucugggucggcaucaacacgcgcaacaugaccauguccaugagcaugauccucgugggggugaucaugauguuccugagccugggcgucggggcgugaggacuaguaauaaggaaacuguaugaaugucugugggcaggaagugaagagauccuucuguaaagguuuuuggaauuaugucugcugaauaauaaacuuuuuugaaauaauaaaucugguagaaaaaugagaucuaaaaaaaaaaaaaaaaaaaaaaaaaaaaaaaaaaaaaaaaaaaaaaaaaaaaaaaaaaaaaaaaugcaucccccccccccccccccccccccccccccccaaaggcucuuuucagagccaccagaauu

SEQ ID NO: 962 - RNA, 2495 nt, Artificial Sequence
  mRNA product Design h-4 comprising derived and/or modified sequence from YFV__NC_002031.1__SSIgE-prME-XX (polyprotein: aa122-788) (opt1)
gggagagggcgcuuggcuugcaaggacccugagcugcggcauugaagcacacccaacccaacucgacugaagucagccucacugaaccggaucugagaaucuucucucucugggcuugccagggcucuccgaaccuagcuagcauccucuucaauuccaacuagaaagcuuaccauggacuggaccuggauccuguuccucguggccgccgcgacccgcguccacagcgugacgcuggugcggaagaaccgcuggcuccugcugaacgucaccuccgaggaccucggcaagaccuucagcguggggaccggcaacugcacgaccaacauccuggaggccaaguacuggugccccgacuccauggaguacaacugcccgaaccugagcccccgggaggagcccgacgacaucgacugcuggugcuacggcguggagaacguccgcguggccuacgggaagugcgacuccgcgggccggagccgccggucccgccgggccaucgaccuccccacccacgagaaccacgggcugaagacccgccaggagaaguggaugacgggccggaugggggagcgccagcugcagaagaucgagcggugguucgugcgcaacccguucuucgccgucaccgcccucaccaucgccuaccuggugggcagcaacaugacccagcggguggucaucgcgcugcucgugcuggccgugggccccgccuacuccgcccacugcaucgggaucacggaccgcgacuucaucgagggcguccacgggggcaccugggugagcgcgacccuggagcaggacaagugcgugaccgucauggcccccgacaagcccucccucgacaucagccuggagacgguggccaucgaccggccggccgaggugcgcaaggucugcuacaacgccgugcugacccacgugaagaucaacgacaagugccccuccaccggcgaggcgcaccucgccgaggagaacgagggggacaacgccugcaagcggaccuacagcgaccggggcugggggaacggcugcgggcuguucggcaagggcuccaucgucgccugcgccaaguucacgugcgcgaaguccaugagccuguucgagguggaccagaccaagauccaguacgucauccgcgcccagcuccacgugggggccaagcaggagaacuggaacaccgacaucaagacccugaaguucgacgcccugagcggcagccaggagguggaguucaucggguacggcaaggccacgcucgagugccagguccagaccgcgguggacuucgggaacuccuacaucgccgagauggagaccgagagcuggaucguggaccggcagugggcccaggaccugacccugcccuggcaguccggcagcggcggggucuggcgcgagaugcaccaccucguggaguucgagcccccgcacgccgccacgauccgggugcuggcgcugggcaaccaggaggggucccucaagaccgcccugaccggcgccaugcgcgucaccaaggacacgaacgacaacaaccuguacaagcuccacgggggccacgugagcugccgggugaagcuguccgcccugacccucaagggcaccagcuacaagaucugcaccgacaagauguucuucgucaagaaccccacggacaccgggcacggcaccguggugaugcaggucaagguguccaagggggcgcccugccgcaucccggugaucgucgccgacgaccugaccgccgccaucaacaagggcauccuggugaccgugaacccgaucgccagcacgaacgacgacgagguccucaucgaggugaacccccccuucggcgacuccuacaucaucguggggcggggcgacagccgccugaccuaccaguggcacaaggagggguccagcaucggcaagcuguucacccagaccaugaagggggucgagcggcuggcggugaugggcgacacggccugggacuucuccagcgccggcggguucuucaccuccgugggcaaggggauccacaccgucuucggcagcgccuuccaggggcuguucggcggccucaacuggaucaccaaggugaucaugggggccgugcugaucugggucggcaucaacacgcgcaacaugaccauguccaugagcaugauccucgugggggugaucaugauguuccugagccugggcgucggggcggaccagggcugcgccaucaacuucggcaagugaggacuaguaauaaggaaacuguaugaaugucugugggcaggaagugaagagauccuucuguaaagguuuuuggaauuaugucugcugaauaauaaacuuuuuugaaauaauaaaucugguagaaaaaugagaucuaaaaaaaaaaaaaaaaaaaaaaaaaaaaaaaaaaaaaaaaaaaaaaaaaaaaaaaaaaaaaaaaugcaucccccccccccccccccccccccccccccccaaaggcucuuuucagagccaccagaauu

SEQ ID NO: 963 - RNA, 2465 nt, Artificial Sequence
  mRNA product Design h-4 comprising derived and/or modified sequence from YFV__NC_002031.1__SSIgE-prME (polyprotein: aa122-778) (opt1)
gggagagggcgcuuggcuugcaaggacccugagcugcggcauugaagcacacccaacccaacucgacugaagucagccucacugaaccggaucugagaaucuucucucucugggcuugccagggcucuccgaaccuagcuagcauccucuucaauuccaacuagaaagcuuaccauggacuggaccuggauccuguuccucguggccgccgcgacccgcguccacagcgugacgcuggugcggaagaaccgcuggcuccugcugaacgucaccuccgaggaccucggcaagaccuucagcguggggaccggcaacugcacgaccaacauccuggaggccaaguacuggugccccgacuccauggaguacaacugcccgaaccugagcccccgggaggagcccgacgacaucgacugcuggugcuacggcguggagaacguccgcguggccuacgggaagugcgacuccgcgggccggagccgccggucccgccgggccaucgaccuccccacccacgagaaccacgggcugaagacccgccaggagaaguggaugacgggccggaugggggagcgccagcugcagaagaucgagcggugguucgugcgcaacccguucuucgccgucaccgcccucaccaucgccuaccuggugggcagcaacaugacccagcggguggucaucgcgcugcucgugcuggccgugggccccgccuacuccgcccacugcaucgggaucacggaccgcgacuucaucgagggcguccacgggggcaccugggugagcgcgacccuggagcaggacaagugcgugaccgucauggcccccgacaagcccucccucgacaucagccuggagacgguggccaucgaccggccggccgaggugcgcaaggucugcuacaacgccgugcugacccacgugaagaucaacgacaagugccccuccaccggcgaggcgcaccucgccgaggagaacgagggggacaacgccugcaagcggaccuacagcgaccggggcugggggaacggcugcgggcuguucggcaagggcuccaucgucgccugcgccaaguucacgugcgcgaaguccaugagccuguucgagguggaccagaccaagauccaguacgucauccgcgcccagcuccacgugggggccaagcaggagaacuggaacaccgacaucaagacccugaaguucgacgcccugagcggcagccaggagguggaguucaucggguacggcaaggccacgcucgagugccagguccagaccgcgguggacuucgggaacuccuacaucgccgagauggagaccgagagcuggaucguggaccggcagugggcccaggaccugacccugcccuggcaguccggcagcggcggggucuggcgcgagaugcaccaccucguggaguucgagcccccgcacgccgccacgauccgggugcuggcgcugggcaaccaggaggggucccucaagaccgcccugaccggcgccaugcgcgucaccaaggacacgaacgacaacaaccuguacaagcuccacgggggccacgugagcugccgggugaagcuguccgcccugacccucaagggcaccagcuacaagaucugcaccgacaagauguucuucgucaagaaccccacggacaccgggcacggcaccguggugaugcaggucaagguguccaagggggcgcccugccgcaucccggugaucgucgccgacgaccugaccgccgccaucaacaagggcauccuggugaccgugaacccgaucgccagcacgaacgacgacgagguccucaucgaggugaacccccccuucggcgacuccuacaucaucguggggcggggcgacagccgccugaccuaccaguggcacaaggagggguccagcaucggcaagcuguucacccagaccaugaagggggucgagcggcuggcggugaugggcgacacggccugggacuucuccagcgccggcggguucuucaccuccgugggcaaggggauccacaccgucuucggcagcgccuuccaggggcuguucggcggccucaacuggaucaccaaggugaucaugggggccgugcugaucugggucggcaucaacacgcgcaacaugaccauguccaugagcaugauccucgugggggugaucaugauguuccugagccugggcgucggggcgugaggacuaguaauaaggaaacuguaugaaugucugugggcaggaagugaagagauccuucuguaaagguuuuuggaauuaugucugcugaauaauaaacuuuuuugaaauaauaaaucugguagaaaaaugagaucuaaaaaaaaaaaaaaaaaaaaaaaaaaaaaaaaaaaaaaaaaaaaaaaaaaaaaaaaaaaaaaaaugcaucccccccccccccccccccccccccccccccaaaggcucuuuucagagccaccagaauu

SEQ ID NO: 964 - RNA, 2513 nt, Artificial Sequence
  mRNA product Design h-4 comprising derived and/or modified sequence from YFV__NC_002031.1__SSjev-prME-XX (polyprotein: aa122-788) (opt1)
gggagagggcgcuuggcuugcaaggacccugagcugcggcauugaagcacacccaacccaacucgacugaagucagccucacugaaccggaucugagaaucuucucucucugggcuugccagggcucuccgaaccuagcuagcauccucuucaauuccaacuagaaagcuuaccaugggcaagcgcagcgccggguccaucauguggcuggccagccucgcgguggucaucgccugcgccggcgccgugacgcuggugcggaagaaccgcuggcuccugcugaacgucaccuccgaggaccucggcaagaccuucagcguggggaccggcaacugcacgaccaacauccuggaggccaaguacuggugccccgacuccauggaguacaacugcccgaaccugagcccccgggaggagcccgacgacaucgacugcuggugcuacggcguggagaacguccgcguggccuacgggaagugcgacuccgcgggccggagccgccggucccgccgggccaucgaccuccccacccacgagaaccacgggcugaagacccgccaggagaaguggaugacgggccggaugggggagcgccagcugcagaagaucgagcggugguucgugcgcaacccguucuucgccgucaccgcccucaccaucgccuaccuggugggcagcaacaugacccagcggguggucaucgcgcugcucgugcuggccgugggccccgccuacuccgcccacugcaucgggaucacggaccgcgacuucaucgagggcguccacgggggcaccugggugagcgcgacccuggagcaggacaagugcgugaccgucauggcccccgacaagcccucccucgacaucagccuggagacgguggccaucgaccggccggccgaggugcgcaaggucugcuacaacgccgugcugacccacgugaagaucaacgacaagugccccuccaccggcgaggcgcaccucgccgaggagaacgagggggacaacgccugcaagcggaccuacagcgaccggggcugggggaacggcugcgggcuguucggcaagggcuccaucgucgccugcgccaaguucacgugcgcgaaguccaugagccuguucgagguggaccagaccaagauccaguacgucauccgcgcccagcuccacgugggggccaagcaggagaacuggaacaccgacaucaagacccugaaguucgacgcccugagcggcagccaggagguggaguucaucggguacggcaaggccacgcucgagugccagguccagaccgcgguggacuucgggaacuccuacaucgccgagauggagaccgagagcuggaucguggaccggcagugggcccaggaccugacccugcccuggcaguccggcagcggcggggucuggcgcgagaugcaccaccucguggaguucgagcccccgcacgccgccacgauccgggugcuggcgcugggcaaccaggaggggucccucaagaccgcccugaccggcgccaugcgcgucaccaaggacacgaacgacaacaaccuguacaagcuccacgggggccacgugagcugccgggugaagcuguccgcccugacccucaagggcaccagcuacaagaucugcaccgacaagauguucuucgucaagaaccccacggacaccgggcacggcaccguggugaugcaggucaagguguccaagggggcgcccugccgcaucccggugaucgucgccgacgaccugaccgccgccaucaacaagggcauccuggugaccgugaacccgaucgccagcacgaacgacgacgagguccucaucgaggugaacccccccuucggcgacuccuacaucaucguggggcggggcgacagccgccugaccuaccaguggcacaaggagggguccagcaucggcaagcuguucacccagaccaugaagggggucgagcggcuggcggugaugggcgacacggccugggacuucuccagcgccggcggguucuucaccuccgugggcaaggggauccacaccgucuucggcagcgccuuccaggggcuguucggcggccucaacuggaucaccaaggugaucaugggggccgugcugaucugggucggcaucaacacgcgcaacaugaccauguccaugagcaugauccucgugggggugaucaugauguuccugagccugggcgucggggcggaccagggcugcgccaucaacuucggcaagugaggacuaguaauaaggaaacuguaugaaugucugugggcaggaagugaagagauccuucuguaaagguuuuuggaauuaugucugcugaauaauaaacuuuuuugaaauaauaaaucugguagaaaaaugagaucuaaaaaaaaaaaaaaaaaaaaaaaaaaaaaaaaaaaaaaaaaaaaaaaaaaaaaaaaaaaaaaaaugcaucccccccccccccccccccccccccccccccaaaggcucuuuucagagccaccagaauu

SEQ ID NO: 965 - RNA, 2483 nt, Artificial Sequence
  mRNA product Design h-4 comprising derived and/or modified sequence from YFV__NC_002031.1__SSjev-prME (polyprotein: aa122-778) (opt1)
gggagagggcgcuuggcuugcaaggacccugagcugcggcauugaagcacacccaacccaacucgacugaagucagccucacugaaccggaucugagaaucuucucucucugggcuugccagggcucuccgaaccuagcuagcauccucuucaauuccaacuagaaagcuuaccaugggcaagcgcagcgccggguccaucauguggcuggccagccucgcgguggucaucgccugcgccggcgccgugacgcuggugcggaagaaccgcuggcuccugcugaacgucaccuccgaggaccucggcaagaccuucagcguggggaccggcaacugcacgaccaacauccuggaggccaaguacuggugccccgacuccauggaguacaacugcccgaaccugagcccccgggaggagcccgacgacaucgacugcuggugcuacggcguggagaacguccgcguggccuacgggaagugcgacuccgcgggccggagccgccggucccgccgggccaucgaccuccccacccacgagaaccacgggcugaagacccgccaggagaaguggaugacgggccggaugggggagcgccagcugcagaagaucgagcggugguucgugcgcaacccguucuucgccgucaccgcccucaccaucgccuaccuggugggcagcaacaugacccagcggguggucaucgcgcugcucgugcuggccgugggccccgccuacuccgcccacugcaucgggaucacggaccgcgacuucaucgagggcguccacgggggcaccugggugagcgcgacccuggagcaggacaagugcgugaccgucauggcccccgacaagcccucccucgacaucagccuggagacgguggccaucgaccggccggccgaggugcgcaaggucugcuacaacgccgugcugacccacgugaagaucaacgacaagugccccuccaccggcgaggcgcaccucgccgaggagaacgagggggacaacgccugcaagcggaccuacagcgaccggggcugggggaacggcugcgggcuguucggcaagggcuccaucgucgccugcgccaaguucacgugcgcgaaguccaugagccuguucgagguggaccagaccaagauccaguacgucauccgcgcccagcuccacgugggggccaagcaggagaacuggaacaccgacaucaagacccugaaguucgacgcccugagcggcagccaggagguggaguucaucggguacggcaaggccacgcucgagugccagguccagaccgcgguggacuucgggaacuccuacaucgccgagauggagaccgagagcuggaucguggaccggcagugggcccaggaccugacccugcccuggcaguccggcagcggcggggucuggcgcgagaugcaccaccucguggaguucgagcccccgcacgccgccacgauccgggugcuggcgcugggcaaccaggaggggucccucaagaccgcccugaccggcgccaugcgcgucaccaaggacacgaacgacaacaaccuguacaagcuccacgggggccacgugagcugccgggugaagcuguccgcccugacccucaagggcaccagcuacaagaucugcaccgacaagauguucuucgucaagaaccccacggacaccgggcacggcaccguggugaugcaggucaagguguccaagggggcgcccugccgcaucccggugaucgucgccgacgaccugaccgccgccaucaacaagggcauccuggugaccgugaacccgaucgccagcacgaacgacgacgagguccucaucgaggugaacccccccuucggcgacuccuacaucaucguggggcggggcgacagccgccugaccuaccaguggcacaaggagggguccagcaucggcaagcuguucacccagaccaugaagggggucgagcggcuggcggugaugggcgacacggccugggacuucuccagcgccggcggguucuucaccuccgugggcaaggggauccacaccgucuucggcagcgccuuccaggggcuguucggcggccucaacuggaucaccaaggugaucaugggggccgugcugaucugggucggcaucaacacgcgcaacaugaccauguccaugagcaugauccucgugggggugaucaugauguuccugagccugggcgucggggcgugaggacuaguaauaaggaaacuguaugaaugucugugggcaggaagugaagagauccuucuguaaagguuuuuggaauuaugucugcugaauaauaaacuuuuuugaaauaauaaaucugguagaaaaaugagaucuaaaaaaaaaaaaaaaaaaaaaaaaaaaaaaaaaaaaaaaaaaaaaaaaaaaaaaaaaaaaaaaaugcaucccccccccccccccccccccccccccccccaaaggcucuuuucagagccaccagaauu

SEQ ID NO: 966 - RNA, 2531 nt, Artificial Sequence
  mRNA product Design h-4 comprising derived and/or modified sequence from YFV__NC_002031.1__X-SS-prME-XX (polyprotein: aa92-788) (opt1)
gggagagggcgcuuggcuugcaaggacccugagcugcggcauugaagcacacccaacccaacucgacugaagucagccucacugaaccggaucugagaaucuucucucucugggcuugccagggcucuccgaaccuagcuagcauccucuucaauuccaacuagaaagcuuaccaugcgcggccugagcucccggaagcgccggagccacgacgugcucaccguccaguuccugauccuggggaugcuccugaugaccggcggggugacgcuggugcgcaagaaccgguggcuccugcugaacgucaccuccgaggaccucggcaagaccuucagcguggggaccggcaacugcacgaccaacauccuggaggccaaguacuggugccccgacuccauggaguacaacugccccaaccugagcccccgcgaggagcccgacgacaucgacugcuggugcuacggcguggagaacguccggguggccuacgggaagugcgacuccgcgggccgcagccggcgcucccggcgcgccaucgaccuccccacccacgagaaccacgggcugaagacccggcaggagaaguggaugacgggccgcaugggggagcggcagcugcagaagaucgagcgcugguucgugcggaacccguucuucgccgucaccgcccucaccaucgccuaccuggugggcagcaacaugacccagcgcguggucaucgcgcugcucgugcuggccgugggccccgccuacuccgcccacugcaucgggaucacggaccgggacuucaucgagggcguccacgggggcaccugggugagcgcgacccuggagcaggacaagugcgugaccgucauggcccccgacaagcccucccucgacaucagccuggagacgguggccaucgaccgcccggccgaggugcggaaggucugcuacaacgccgugcugacccacgugaagaucaacgacaagugccccuccaccggcgaggcgcaccucgccgaggagaacgagggggacaacgccugcaagcgcaccuacagcgaccgcggcugggggaacggcugcgggcuguucggcaagggcuccaucgucgccugcgccaaguucacgugcgccaagagcaugucccuguucgagguggaccagaccaagauccaguacgucauccgggcgcagcuccacgugggggccaagcaggagaacuggaacaccgacaucaagacccugaaguucgacgcccugagcggcagccaggagguggaguucaucggguacggcaaggccacgcucgagugccagguccagaccgcgguggacuucgggaacuccuacaucgccgagauggagaccgagagcuggaucguggaccgccagugggcccaggaccugacccugcccuggcaguccggcagcggcggggucuggcgggagaugcaccaccucguggaguucgagcccccgcacgccgccacgauccgcgugcuggcgcugggcaaccaggaggggucccucaagaccgcccugaccggcgccaugcgggucaccaaggacacgaacgacaacaaccuguacaagcuccacgggggccacgugagcugccgcgugaagcuguccgcccugacccucaagggcaccagcuacaagaucugcaccgacaagauguucuucgucaagaaccccacggacaccgggcacggcaccguggugaugcaggucaagguguccaagggggcgcccugccggauccccgugaucgucgccgacgaccugaccgccgccaucaacaagggcauccuggugaccgugaacccgaucgccagcacgaacgacgacgagguccucaucgaggugaacccgcccuucggcgacuccuacaucaucguggggcgcggcgacagccggcugaccuaccaguggcacaaggagggguccagcaucggcaagcuguucacccagaccaugaagggggucgagcgccucgcggugaugggcgacacggccugggacuucuccagcgccggcggguucuucaccuccgugggcaaggggauccacaccgucuucggcagcgccuuccaggggcuguucggcggccugaacuggaucaccaaggugaucaugggggccgugcugaucugggucggcaucaacacgcggaacaugaccauguccaugagcaugauccucgugggggugaucaugauguuccugagccugggcgucggggcggaccagggcugcgccaucaacuucggcaagugaggacuaguaauaaggaaacuguaugaaugucugugggcaggaagugaagagauccuucuguaaagguuuuuggaauuaugucugcugaauaauaaacuuuuuugaaauaauaaaucugguagaaaaaugagaucuaaaaaaaaaaaaaaaaaaaaaaaaaaaaaaaaaaaaaaaaaaaaaaaaaaaaaaaaaaaaaaaaugcaucccccccccccccccccccccccccccccccaaaggcucuuuucagagccaccagaauu

SEQ ID NO: 967 - RNA, 2468 nt, Artificial Sequence
  mRNA product Design h-4 comprising derived and/or modified sequence from YFV__NC_002031.1__SS-prME (polyprotein: M,aa104-778) (opt1)
gggagagggcgcuuggcuugcaaggacccugagcugcggcauugaagcacacccaacccaacucgacugaagucagccucacugaaccggaucugagaaucuucucucucugggcuugccagggcucuccgaaccuagcuagcauccucuucaauuccaacuagaaagcuuaccauggacgugcugaccguccaguuccucauccugggcaugcugcucaugaccgggggcgugacgcuggugcgcaagaaccgguggcugcuccugaacgucaccagcgaggaccuggggaagaccuucuccgugggcaccgggaacugcacgaccaacauccucgaggccaaguacuggugccccgacagcauggaguacaacugccccaaccugagcccccgcgaggagcccgacgacaucgacugcuggugcuacggcguggagaacguccggguggccuacggcaagugcgacuccgcggggcgcucccggcgcagccggcgcgccaucgaccugcccacccacgagaaccacggccucaagacccggcaggagaaguggaugacggggcgcaugggcgagcggcagcugcagaagaucgagcgcugguucgugcggaacccguucuucgccgucaccgcccugaccaucgccuaccucgugggguccaacaugacccagcgcguggucaucgcgcugcuggugcucgccgugggccccgccuacagcgcccacugcaucggcaucacggaccgggacuucaucgaggggguccacggcgggaccuggguguccgcgacccuggagcaggacaagugcgugaccgucauggcccccgacaagcccagccuggacaucucccucgagacgguggccaucgaccgcccggccgaggugcggaaggucugcuacaacgccgugcugacccacgugaagaucaacgacaagugccccagcaccggcgaggcgcaccuggccgaggagaacgagggcgacaacgccugcaagcgcaccuacuccgaccggggguggggcaacgggugcggccucuucgggaagggcagcaucgucgccugcgccaaguucacgugcgcgaaguccaugagccuguucgagguggaccagaccaagauccaguacgucauccgcgcccagcugcacgugggcgccaagcaggagaacuggaacaccgacaucaagacccucaaguucgacgcccuguccgggagccaggagguggaguucaucggcuacgggaaggccacgcuggagugccagguccagaccgcgguggacuucggcaacuccuacaucgccgagauggagaccgagagcuggaucguggaccggcagugggcccaggaccucacccugcccuggcagagcggguccggcggcgucuggcgcgagaugcaccaccugguggaguucgagcccccgcacgccgccacgauccgcgugcucgcgcuggggaaccaggagggcagccugaagaccgcccucaccggggccaugcgggucaccaaggacacgaacgacaacaaccuguacaagcugcacggcgggcacguguccugccgcgugaagcucagcgcccugacccugaagggcaccuccuacaagaucugcaccgacaagauguucuucgucaagaaccccacggacaccggccacgggaccguggugaugcaggucaaggugagcaagggcgcgcccugccggauccccgugaucgucgccgacgaccucaccgccgccaucaacaaggggauccuggugaccgugaacccgaucgccuccacgaacgacgacgagguccugaucgaggugaacccgcccuucggcgacagcuacaucaucgugggccgcggggacucccggcucaccuaccaguggcacaaggagggcagcuccaucgggaagcuguucacccagaccaugaagggcgucgagcgccuggcggugaugggggacacggccugggacuucagcuccgccggcggcuucuucaccagcguggggaagggcauccacaccgucuucggguccgccuuccagggccucuucgggggccugaacuggaucaccaaggugaucaugggcgccgugcugaucugggucgggaucaacacgcggaacaugaccaugagcauguccaugauccuggugggcgugaucaugauguuccucagccugggggucggcgcgugaggacuaguaauaaggaaacuguaugaaugucugugggcaggaagugaagagauccuucuguaaagguuuuuggaauuaugucugcugaauaauaaacuuuuuugaaauaauaaaucugguagaaaaaugagaucuaaaaaaaaaaaaaaaaaaaaaaaaaaaaaaaaaaaaaaaaaaaaaaaaaaaaaaaaaaaaaaaaugcaucccccccccccccccccccccccccccccccaaaggcucuuuucagagccaccagaauu

SEQ ID NO: 968 - RNA, 2495 nt, Artificial Sequence
  mRNA product Design h-4 comprising derived and/or modified sequence from YFV__NC_002031.1__SSIgE-prME-XX (polyprotein: aa122-788) (opt1)
gggagagggcgcuuggcuugcaaggacccugagcugcggcauugaagcacacccaacccaacucgacugaagucagccucacugaaccggaucugagaaucuucucucucugggcuugccagggcucuccgaaccuagcuagcauccucuucaauuccaacuagaaagcuuaccauggacuggaccuggauccuguuccucguggccgccgcgacccgcguccacagcgugacgcuggugcggaagaaccgcuggcugcuccugaacgucaccuccgaggaccugggcaagaccuucagcguggggaccggcaacugcacgaccaacauccucgaggccaaguacuggugccccgacuccauggaguacaacugccccaaccugagcccccgggaggagcccgacgacaucgacugcuggugcuacgggguggagaacguccgcguggccuacggcaagugcgacuccgccgggcggagccgccggucccgccgggccaucgaccugcccacccacgagaaccacggccucaagacccgccaggagaaguggaugacgggccggaugggggagcgccagcugcagaagaucgagcggugguucgugcgcaacccguucuucgcggucaccgcccugaccaucgccuaccucgugggcagcaacaugacccagcggguggucaucgcccugcuggugcucgcgguggggcccgccuacuccgcccacugcaucggcaucacggaccgcgacuucaucgaggggguccacggcggcaccugggugagcgccacccuggagcaggacaagugcgugaccgucauggcccccgacaagcccucccuggacaucagccucgagacgguggcgaucgaccggccggccgaggugcgcaaggucugcuacaacgccgugcugacccacgugaagaucaacgacaagugccccuccaccggggaggcccaccuggccgaggagaacgagggcgacaacgcgugcaagcggaccuacagcgaccgcggguggggcaacggcugcggccucuucgggaagggguccaucgucgccugcgccaaguucacgugcgccaagagcaugucccuguucgagguggaccagaccaagauccaguacgucauccgggcccagcugcacgugggcgcgaagcaggagaacuggaacaccgacaucaagacccucaaguucgacgcccugagcgggucccaggagguggaguucaucggcuacggcaaggccacgcuggagugccagguccagaccgccguggacuucgggaacagcuacaucgccgagauggagaccgagagcuggaucguggaccgccagugggcgcaggaccucacccugcccuggcaguccggcagcgggggcgucuggcgcgagaugcaccaccugguggaguucgagcccccgcacgccgccacgauccgggugcucgcccuggggaaccaggagggcucccugaagaccgcgcucaccggcgccaugcgcgucaccaaggacacgaacgacaacaaccuguacaagcugcacgggggccacgugagcugccgggugaagcucuccgcccugacccugaaggggaccagcuacaagaucugcaccgacaagauguucuucgucaagaaccccacggacaccggccacgggaccguggugaugcaggucaagguguccaagggcgcccccugccgcauccccgugaucgucgccgacgaccucaccgcggccaucaacaagggcauccuggugaccgugaacccgaucgccagcacgaacgacgacgagguccugaucgaggugaacccgcccuucggggacuccuacaucaucgugggccgcggggacagccggcucaccuaccaguggcacaaggagggcuccagcaucggcaagcuguucacccagaccaugaagggggucgagcggcuggccgugaugggcgacacggccugggacuucuccagcgccgggggcuucuucaccuccguggggaagggcauccacaccgucuucggcagcgcguuccaggggcuguucggcgggcucaacuggaucaccaaggugaucaugggcgccgugcugaucugggucgggaucaacacgcgcaacaugaccauguccaugagcaugauccucgugggcgugaucaugauguuccugucccugggcgucggggccgaccagggcugcgccaucaacuucgggaagugaggacuaguaauaaggaaacuguaugaaugucugugggcaggaagugaagagauccuucuguaaagguuuuuggaauuaugucugcugaauaauaaacuuuuuugaaauaauaaaucugguagaaaaaugagaucuaaaaaaaaaaaaaaaaaaaaaaaaaaaaaaaaaaaaaaaaaaaaaaaaaaaaaaaaaaaaaaaaugcaucccccccccccccccccccccccccccccccaaaggcucuuuucagagccaccagaauu

SEQ ID NO: 969 - RNA, 2465 nt, Artificial Sequence
  mRNA product Design h-4 comprising derived and/or modified sequence from YFV__NC_002031.1__SSIgE-prME (polyprotein: aa122-778) (opt1)
gggagagggcgcuuggcuugcaaggacccugagcugcggcauugaagcacacccaacccaacucgacugaagucagccucacugaaccggaucugagaaucuucucucucugggcuugccagggcucuccgaaccuagcuagcauccucuucaauuccaacuagaaagcuuaccauggacuggaccuggauccuguuccucguggccgccgcgacccgcguccacagcgugacgcuggugcggaagaaccgcuggcugcuccugaacgucaccuccgaggaccugggcaagaccuucagcguggggaccggcaacugcacgaccaacauccucgaggccaaguacuggugccccgacuccauggaguacaacugccccaaccugagcccccgggaggagcccgacgacaucgacugcuggugcuacgggguggagaacguccgcguggccuacggcaagugcgacuccgccgggcggagccgccggucccgccgggccaucgaccugcccacccacgagaaccacggccucaagacccgccaggagaaguggaugacgggccggaugggggagcgccagcugcagaagaucgagcggugguucgugcgcaacccguucuucgcggucaccgcccugaccaucgccuaccucgugggcagcaacaugacccagcggguggucaucgcccugcuggugcucgcgguggggcccgccuacuccgcccacugcaucggcaucacggaccgcgacuucaucgaggggguccacggcggcaccugggugagcgccacccuggagcaggacaagugcgugaccgucauggcccccgacaagcccucccuggacaucagccucgagacgguggcgaucgaccggccggccgaggugcgcaaggucugcuacaacgccgugcugacccacgugaagaucaacgacaagugccccuccaccggggaggcccaccuggccgaggagaacgagggcgacaacgcgugcaagcggaccuacagcgaccgcggguggggcaacggcugcggccucuucgggaagggguccaucgucgccugcgccaaguucacgugcgccaagagcaugucccuguucgagguggaccagaccaagauccaguacgucauccgggcccagcugcacgugggcgcgaagcaggagaacuggaacaccgacaucaagacccucaaguucgacgcccugagcgggucccaggagguggaguucaucggcuacggcaaggccacgcuggagugccagguccagaccgccguggacuucgggaacagcuacaucgccgagauggagaccgagagcuggaucguggaccgccagugggcgcaggaccucacccugcccuggcaguccggcagcgggggcgucuggcgcgagaugcaccaccugguggaguucgagcccccgcacgccgccacgauccgggugcucgcccuggggaaccaggagggcucccugaagaccgcgcucaccggcgccaugcgcgucaccaaggacacgaacgacaacaaccuguacaagcugcacgggggccacgugagcugccgggugaagcucuccgcccugacccugaaggggaccagcuacaagaucugcaccgacaagauguucuucgucaagaaccccacggacaccggccacgggaccguggugaugcaggucaagguguccaagggcgcccccugccgcauccccgugaucgucgccgacgaccucaccgcggccaucaacaagggcauccuggugaccgugaacccgaucgccagcacgaacgacgacgagguccugaucgaggugaacccgcccuucggggacuccuacaucaucgugggccgcggggacagccggcucaccuaccaguggcacaaggagggcuccagcaucggcaagcuguucacccagaccaugaagggggucgagcggcuggccgugaugggcgacacggccugggacuucuccagcgccgggggcuucuucaccuccguggggaagggcauccacaccgucuucggcagcgcguuccaggggcuguucggcgggcucaacuggaucaccaaggugaucaugggcgccgugcugaucugggucgggaucaacacgcgcaacaugaccauguccaugagcaugauccucgugggcgugaucaugauguuccugucccugggcgucggggccugaggacuaguaauaaggaaacuguaugaaugucugugggcaggaagugaagagauccuucuguaaagguuuuuggaauuaugucugcugaauaauaaacuuuuuugaaauaauaaaucugguagaaaaaugagaucuaaaaaaaaaaaaaaaaaaaaaaaaaaaaaaaaaaaaaaaaaaaaaaaaaaaaaaaaaaaaaaaaugcaucccccccccccccccccccccccccccccccaaaggcucuuuucagagccaccagaauu

SEQ ID NO: 970 - RNA, 2513 nt, Artificial Sequence
  mRNA product Design h-4 comprising derived and/or modified sequence from YFV__NC_002031.1__SSjev-prME-XX (polyprotein: aa122-788) (opt1)
gggagagggcgcuuggcuugcaaggacccugagcugcggcauugaagcacacccaacccaacucgacugaagucagccucacugaaccggaucugagaaucuucucucucugggcuugccagggcucuccgaaccuagcuagcauccucuucaauuccaacuagaaagcuuaccaugggcaagcgcagcgccggguccaucauguggcuggccagccucgcgguggucaucgccugcgccggcgccgugacccuggugcggaagaaccgcuggcugcuccugaacgucaccuccgaggaccuggggaagacguucagcgugggcaccgggaacugcaccaccaacauccucgaggccaaguacuggugccccgacuccauggaguacaacugccccaaccugagcccccgggaggagcccgacgacaucgacugcuggugcuacggcguggagaacguccgcguggcguacggcaagugcgacuccgccgggcggagccgccggucccgccgggccaucgaccugcccacgcacgagaaccacggccucaagacccgccaggagaaguggaugaccgggcggaugggcgagcgccagcugcagaagaucgagcggugguucgugcgcaacccguucuucgccgucaccgcgcugacgaucgccuaccucguggggagcaacaugacccagcggguggucaucgcccugcuggugcucgccgugggccccgccuacuccgcgcacugcaucggcaucaccgaccgcgacuucaucgaggggguccacggcgggaccugggugagcgccacgcuggagcaggacaagugcgugaccgucauggcccccgacaagcccucccuggacaucagccucgagaccguggccaucgaccggccggccgaggugcgcaaggucugcuacaacgcggugcugacccacgugaagaucaacgacaagugccccuccacgggcgaggcccaccuggccgaggagaacgagggcgacaacgccugcaagcggaccuacagcgaccgcggguggggcaacgggugcggccucuucgggaagggcuccaucgucgccugcgcgaaguucacgugcgccaagagcaugucccuguucgagguggaccagaccaagauccaguacgucauccgggcccagcugcacgugggcgccaagcaggagaacuggaacaccgacaucaagacccucaaguucgacgcccugagcgggagccaggagguggaguucaucggcuacgggaaggcgacccuggagugccagguccagaccgccguggacuucggcaacuccuacaucgccgagauggagacggagagcuggaucguggaccgccagugggcccaggaccucacccugcccuggcaguccgggagcggcggcgucuggcgcgagaugcaccaccugguggaguucgagcccccgcacgcggccaccauccgggugcucgcccuggggaaccaggagggcucccugaagaccgcccucacgggggccaugcgcgucaccaaggacaccaacgacaacaaccuguacaagcugcacggcgggcacgugagcugccgggugaagcucuccgcgcugacccugaagggcacgagcuacaagaucugcaccgacaagauguucuucgucaagaaccccaccgacaccggccacgggacgguggugaugcaggucaagguguccaagggcgcccccugccgcauccccgugaucgucgccgacgaccucaccgccgccaucaacaaggggauccuggugaccgugaacccgaucgcgagcaccaacgacgacgagguccugaucgaggugaacccgcccuucggcgacuccuacaucaucgugggccgcggggacagccggcucaccuaccaguggcacaaggagggcuccagcaucgggaagcuguucacgcagaccaugaagggcgucgagcggcuggccgugaugggggacaccgccugggacuucuccagcgccggcggcuucuucaccuccguggggaagggcauccacacggucuucgggagcgccuuccagggccucuucgggggccugaacuggaucaccaaggugaucaugggcgcggugcugaucugggucgggaucaacacccgcaacaugaccauguccaugagcaugauccucgugggcgugaucaugauguuccugagccugggggucggcgccgaccaggggugcgccaucaacuucggcaagugaggacuaguaauaaggaaacuguaugaaugucugugggcaggaagugaagagauccuucuguaaagguuuuuggaauuaugucugcugaauaauaaacuuuuuugaaauaauaaaucugguagaaaaaugagaucuaaaaaaaaaaaaaaaaaaaaaaaaaaaaaaaaaaaaaaaaaaaaaaaaaaaaaaaaaaaaaaaaugcaucccccccccccccccccccccccccccccccaaaggcucuuuucagagccaccagaauu

SEQ ID NO: 971 - RNA, 2483 nt, Artificial Sequence
  mRNA product Design h-4 comprising derived and/or modified sequence from YFV__NC_002031.1__SSjev-prME (polyprotein: aa122-778) (opt1)
gggagagggcgcuuggcuugcaaggacccugagcugcggcauugaagcacacccaacccaacucgacugaagucagccucacugaaccggaucugagaaucuucucucucugggcuugccagggcucuccgaaccuagcuagcauccucuucaauuccaacuagaaagcuuaccaugggcaagcgcagcgccggguccaucauguggcuggccagccucgcgguggucaucgccugcgccggcgccgugacccuggugcggaagaaccgcuggcugcuccugaacgucaccuccgaggaccuggggaagacguucagcgugggcaccgggaacugcaccaccaacauccucgaggccaaguacuggugccccgacuccauggaguacaacugccccaaccugagcccccgggaggagcccgacgacaucgacugcuggugcuacggcguggagaacguccgcguggcguacggcaagugcgacuccgccgggcggagccgccggucccgccgggccaucgaccugcccacgcacgagaaccacggccucaagacccgccaggagaaguggaugaccgggcggaugggcgagcgccagcugcagaagaucgagcggugguucgugcgcaacccguucuucgccgucaccgcgcugacgaucgccuaccucguggggagcaacaugacccagcggguggucaucgcccugcuggugcucgccgugggccccgccuacuccgcgcacugcaucggcaucaccgaccgcgacuucaucgaggggguccacggcgggaccugggugagcgccacgcuggagcaggacaagugcgugaccgucauggcccccgacaagcccucccuggacaucagccucgagaccguggccaucgaccggccggccgaggugcgcaaggucugcuacaacgcggugcugacccacgugaagaucaacgacaagugccccuccacgggcgaggcccaccuggccgaggagaacgagggcgacaacgccugcaagcggaccuacagcgaccgcggguggggcaacgggugcggccucuucgggaagggcuccaucgucgccugcgcgaaguucacgugcgccaagagcaugucccuguucgagguggaccagaccaagauccaguacgucauccgggcccagcugcacgugggcgccaagcaggagaacuggaacaccgacaucaagacccucaaguucgacgcccugagcgggagccaggagguggaguucaucggcuacgggaaggcgacccuggagugccagguccagaccgccguggacuucggcaacuccuacaucgccgagauggagacggagagcuggaucguggaccgccagugggcccaggaccucacccugcccuggcaguccgggagcggcggcgucuggcgcgagaugcaccaccugguggaguucgagcccccgcacgcggccaccauccgggugcucgcccuggggaaccaggagggcucccugaagaccgcccucacgggggccaugcgcgucaccaaggacaccaacgacaacaaccuguacaagcugcacggcgggcacgugagcugccgggugaagcucuccgcgcugacccugaagggcacgagcuacaagaucugcaccgacaagauguucuucgucaagaaccccaccgacaccggccacgggacgguggugaugcaggucaagguguccaagggcgcccccugccgcauccccgugaucgucgccgacgaccucaccgccgccaucaacaaggggauccuggugaccgugaacccgaucgcgagcaccaacgacgacgagguccugaucgaggugaacccgcccuucggcgacuccuacaucaucgugggccgcggggacagccggcucaccuaccaguggcacaaggagggcuccagcaucgggaagcuguucacgcagaccaugaagggcgucgagcggcuggccgugaugggggacaccgccugggacuucuccagcgccggcggcuucuucaccuccguggggaagggcauccacacggucuucgggagcgccuuccagggccucuucgggggccugaacuggaucaccaaggugaucaugggcgcggugcugaucugggucgggaucaacacccgcaacaugaccauguccaugagcaugauccucgugggcgugaucaugauguuccugagccugggggucggcgccugaggacuaguaauaaggaaacuguaugaaugucugugggcaggaagugaagagauccuucuguaaagguuuuuggaauuaugucugcugaauaauaaacuuuuuugaaauaauaaaucugguagaaaaaugagaucuaaaaaaaaaaaaaaaaaaaaaaaaaaaaaaaaaaaaaaaaaaaaaaaaaaaaaaaaaaaaaaaaugcaucccccccccccccccccccccccccccccccaaaggcucuuuucagagccaccagaauu

SEQ ID NO: 972 - RNA, 2531 nt, Artificial Sequence
  mRNA product Design h-4 comprising derived and/or modified sequence from YFV__NC_002031.1__X-SS-prME-XX (polyprotein: aa92-788) (opt2)
gggagagggcgcuuggcuugcaaggacccugagcugcggcauugaagcacacccaacccaacucgacugaagucagccucacugaaccggaucugagaaucuucucucucugggcuugccagggcucuccgaaccuagcuagcauccucuucaauuccaacuagaaagcuuaccaugcgcggccucuccucccgcaagcgccgcucccacgacguccucaccguccaguuccucauccucggcaugcuccucaugaccggcggcgucacccucguccgcaagaaccgcuggcuccuccucaacgucaccuccgaggaccucggcaagaccuucuccgucggcaccggcaacugcaccaccaacauccucgaggccaaguacuggugccccgacuccauggaguacaacugccccaaccucuccccccgcgaggagcccgacgacaucgacugcuggugcuacggcgucgagaacguccgcgucgccuacggcaagugcgacuccgccggccgcucccgccgcucccgccgcgccaucgaccuccccacccacgagaaccacggccucaagacccgccaggagaaguggaugaccggccgcaugggcgagcgccagcuccagaagaucgagcgcugguucguccgcaaccccuucuucgccgucaccgcccucaccaucgccuaccucgucggcuccaacaugacccagcgcgucgucaucgcccuccucguccucgccgucggccccgccuacuccgcccacugcaucggcaucaccgaccgcgacuucaucgagggcguccacggcggcaccugggucuccgccacccucgagcaggacaagugcgucaccgucauggcccccgacaagcccucccucgacaucucccucgagaccgucgccaucgaccgccccgccgagguccgcaaggucugcuacaacgccguccucacccacgucaagaucaacgacaagugccccuccaccggcgaggcccaccucgccgaggagaacgagggcgacaacgccugcaagcgcaccuacuccgaccgcggcuggggcaacggcugcggccucuucggcaagggcuccaucgucgccugcgccaaguucaccugcgccaaguccaugucccucuucgaggucgaccagaccaagauccaguacgucauccgcgcccagcuccacgucggcgccaagcaggagaacuggaacaccgacaucaagacccucaaguucgacgcccucuccggcucccaggaggucgaguucaucggcuacggcaaggccacccucgagugccagguccagaccgccgucgacuucggcaacuccuacaucgccgagauggagaccgaguccuggaucgucgaccgccagugggcccaggaccucacccuccccuggcaguccggcuccggcggcgucuggcgcgagaugcaccaccucgucgaguucgagcccccccacgccgccaccauccgcguccucgcccucggcaaccaggagggcucccucaagaccgcccucaccggcgccaugcgcgucaccaaggacaccaacgacaacaaccucuacaagcuccacggcggccacgucuccugccgcgucaagcucuccgcccucacccucaagggcaccuccuacaagaucugcaccgacaagauguucuucgucaagaaccccaccgacaccggccacggcaccgucgucaugcaggucaaggucuccaagggcgcccccugccgcauccccgucaucgucgccgacgaccucaccgccgccaucaacaagggcauccucgucaccgucaaccccaucgccuccaccaacgacgacgagguccucaucgaggucaacccccccuucggcgacuccuacaucaucgucggccgcggcgacucccgccucaccuaccaguggcacaaggagggcuccuccaucggcaagcucuucacccagaccaugaagggcgucgagcgccucgccgucaugggcgacaccgccugggacuucuccuccgccggcggcuucuucaccuccgucggcaagggcauccacaccgucuucggcuccgccuuccagggccucuucggcggccucaacuggaucaccaaggucaucaugggcgccguccucaucugggucggcaucaacacccgcaacaugaccauguccauguccaugauccucgucggcgucaucaugauguuccucucccucggcgucggcgccgaccagggcugcgccaucaacuucggcaagugaggacuaguaauaaggaaacuguaugaaugucugugggcaggaagugaagagauccuucuguaaagguuuuuggaauuaugucugcugaauaauaaacuuuuuugaaauaauaaaucugguagaaaaaugagaucuaaaaaaaaaaaaaaaaaaaaaaaaaaaaaaaaaaaaaaaaaaaaaaaaaaaaaaaaaaaaaaaaugcaucccccccccccccccccccccccccccccccaaaggcucuuuucagagccaccagaauu

SEQ ID NO: 973 - RNA, 2468 nt, Artificial Sequence
  mRNA product Design h-4 comprising derived and/or modified sequence from YFV__NC_002031.1__SS-prME (polyprotein: M,aa104-778) (opt2)
gggagagggcgcuuggcuugcaaggacccugagcugcggcauugaagcacacccaacccaacucgacugaagucagccucacugaaccggaucugagaaucuucucucucugggcuugccagggcucuccgaaccuagcuagcauccucuucaauuccaacuagaaagcuuaccauggacguccucaccguccaguuccucauccucggcaugcuccucaugaccggcggcgucacccucguccgcaagaaccgcuggcuccuccucaacgucaccuccgaggaccucggcaagaccuucuccgucggcaccggcaacugcaccaccaacauccucgaggccaaguacuggugccccgacuccauggaguacaacugccccaaccucuccccccgcgaggagcccgacgacaucgacugcuggugcuacggcgucgagaacguccgcgucgccuacggcaagugcgacuccgccggccgcucccgccgcucccgccgcgccaucgaccuccccacccacgagaaccacggccucaagacccgccaggagaaguggaugaccggccgcaugggcgagcgccagcuccagaagaucgagcgcugguucguccgcaaccccuucuucgccgucaccgcccucaccaucgccuaccucgucggcuccaacaugacccagcgcgucgucaucgcccuccucguccucgccgucggccccgccuacuccgcccacugcaucggcaucaccgaccgcgacuucaucgagggcguccacggcggcaccugggucuccgccacccucgagcaggacaagugcgucaccgucauggcccccgacaagcccucccucgacaucucccucgagaccgucgccaucgaccgccccgccgagguccgcaaggucugcuacaacgccguccucacccacgucaagaucaacgacaagugccccuccaccggcgaggcccaccucgccgaggagaacgagggcgacaacgccugcaagcgcaccuacuccgaccgcggcuggggcaacggcugcggccucuucggcaagggcuccaucgucgccugcgccaaguucaccugcgccaaguccaugucccucuucgaggucgaccagaccaagauccaguacgucauccgcgcccagcuccacgucggcgccaagcaggagaacuggaacaccgacaucaagacccucaaguucgacgcccucuccggcucccaggaggucgaguucaucggcuacggcaaggccacccucgagugccagguccagaccgccgucgacuucggcaacuccuacaucgccgagauggagaccgaguccuggaucgucgaccgccagugggcccaggaccucacccuccccuggcaguccggcuccggcggcgucuggcgcgagaugcaccaccucgucgaguucgagcccccccacgccgccaccauccgcguccucgcccucggcaaccaggagggcucccucaagaccgcccucaccggcgccaugcgcgucaccaaggacaccaacgacaacaaccucuacaagcuccacggcggccacgucuccugccgcgucaagcucuccgcccucacccucaagggcaccuccuacaagaucugcaccgacaagauguucuucgucaagaaccccaccgacaccggccacggcaccgucgucaugcaggucaaggucuccaagggcgcccccugccgcauccccgucaucgucgccgacgaccucaccgccgccaucaacaagggcauccucgucaccgucaaccccaucgccuccaccaacgacgacgagguccucaucgaggucaacccccccuucggcgacuccuacaucaucgucggccgcggcgacucccgccucaccuaccaguggcacaaggagggcuccuccaucggcaagcucuucacccagaccaugaagggcgucgagcgccucgccgucaugggcgacaccgccugggacuucuccuccgccggcggcuucuucaccuccgucggcaagggcauccacaccgucuucggcuccgccuuccagggccucuucggcggccucaacuggaucaccaaggucaucaugggcgccguccucaucugggucggcaucaacacccgcaacaugaccauguccauguccaugauccucgucggcgucaucaugauguuccucucccucggcgucggcgccugaggacuaguaauaaggaaacuguaugaaugucugugggcaggaagugaagagauccuucuguaaagguuuuuggaauuaugucugcugaauaauaaacuuuuuugaaauaauaaaucugguagaaaaaugagaucuaaaaaaaaaaaaaaaaaaaaaaaaaaaaaaaaaaaaaaaaaaaaaaaaaaaaaaaaaaaaaaaaugcaucccccccccccccccccccccccccccccccaaaggcucuuuucagagccaccagaauu

SEQ ID NO: 974 - RNA, 2495 nt, Artificial Sequence
  mRNA product Design h-4 comprising derived and/or modified sequence from YFV__NC_002031.1__SSIgE-prME-XX (polyprotein: aa122-788) (opt2)
gggagagggcgcuuggcuugcaaggacccugagcugcggcauugaagcacacccaacccaacucgacugaagucagccucacugaaccggaucugagaaucuucucucucugggcuugccagggcucuccgaaccuagcuagcauccucuucaauuccaacuagaaagcuuaccauggacuggaccuggauccucuuccucgucgccgccgccacccgcguccacuccgucacccucguccgcaagaaccgcuggcuccuccucaacgucaccuccgaggaccucggcaagaccuucuccgucggcaccggcaacugcaccaccaacauccucgaggccaaguacuggugccccgacuccauggaguacaacugccccaaccucuccccccgcgaggagcccgacgacaucgacugcuggugcuacggcgucgagaacguccgcgucgccuacggcaagugcgacuccgccggccgcucccgccgcucccgccgcgccaucgaccuccccacccacgagaaccacggccucaagacccgccaggagaaguggaugaccggccgcaugggcgagcgccagcuccagaagaucgagcgcugguucguccgcaaccccuucuucgccgucaccgcccucaccaucgccuaccucgucggcuccaacaugacccagcgcgucgucaucgcccuccucguccucgccgucggccccgccuacuccgcccacugcaucggcaucaccgaccgcgacuucaucgagggcguccacggcggcaccugggucuccgccacccucgagcaggacaagugcgucaccgucauggcccccgacaagcccucccucgacaucucccucgagaccgucgccaucgaccgccccgccgagguccgcaaggucugcuacaacgccguccucacccacgucaagaucaacgacaagugccccuccaccggcgaggcccaccucgccgaggagaacgagggcgacaacgccugcaagcgcaccuacuccgaccgcggcuggggcaacggcugcggccucuucggcaagggcuccaucgucgccugcgccaaguucaccugcgccaaguccaugucccucuucgaggucgaccagaccaagauccaguacgucauccgcgcccagcuccacgucggcgccaagcaggagaacuggaacaccgacaucaagacccucaaguucgacgcccucuccggcucccaggaggucgaguucaucggcuacggcaaggccacccucgagugccagguccagaccgccgucgacuucggcaacuccuacaucgccgagauggagaccgaguccuggaucgucgaccgccagugggcccaggaccucacccuccccuggcaguccggcuccggcggcgucuggcgcgagaugcaccaccucgucgaguucgagcccccccacgccgccaccauccgcguccucgcccucggcaaccaggagggcucccucaagaccgcccucaccggcgccaugcgcgucaccaaggacaccaacgacaacaaccucuacaagcuccacggcggccacgucuccugccgcgucaagcucuccgcccucacccucaagggcaccuccuacaagaucugcaccgacaagauguucuucgucaagaaccccaccgacaccggccacggcaccgucgucaugcaggucaaggucuccaagggcgcccccugccgcauccccgucaucgucgccgacgaccucaccgccgccaucaacaagggcauccucgucaccgucaaccccaucgccuccaccaacgacgacgagguccucaucgaggucaacccccccuucggcgacuccuacaucaucgucggccgcggcgacucccgccucaccuaccaguggcacaaggagggcuccuccaucggcaagcucuucacccagaccaugaagggcgucgagcgccucgccgucaugggcgacaccgccugggacuucuccuccgccggcggcuucuucaccuccgucggcaagggcauccacaccgucuucggcuccgccuuccagggccucuucggcggccucaacuggaucaccaaggucaucaugggcgccguccucaucugggucggcaucaacacccgcaacaugaccauguccauguccaugauccucgucggcgucaucaugauguuccucucccucggcgucggcgccgaccagggcugcgccaucaacuucggcaagugaggacuaguaauaaggaaacuguaugaaugucugugggcaggaagugaagagauccuucuguaaagguuuuuggaauuaugucugcugaauaauaaacuuuuuugaaauaauaaaucugguagaaaaaugagaucuaaaaaaaaaaaaaaaaaaaaaaaaaaaaaaaaaaaaaaaaaaaaaaaaaaaaaaaaaaaaaaaaugcaucccccccccccccccccccccccccccccccaaaggcucuuuucagagccaccagaauu

SEQ ID NO: 975 - RNA, 2465 nt, Artificial Sequence
  mRNA product Design h-4 comprising derived and/or modified sequence from YFV__NC_002031.1__SSIgE-prME (polyprotein: aa122-778) (opt2)
gggagagggcgcuuggcuugcaaggacccugagcugcggcauugaagcacacccaacccaacucgacugaagucagccucacugaaccggaucugagaaucuucucucucugggcuugccagggcucuccgaaccuagcuagcauccucuucaauuccaacuagaaagcuuaccauggacuggaccuggauccucuuccucgucgccgccgccacccgcguccacuccgucacccucguccgcaagaaccgcuggcuccuccucaacgucaccuccgaggaccucggcaagaccuucuccgucggcaccggcaacugcaccaccaacauccucgaggccaaguacuggugccccgacuccauggaguacaacugccccaaccucuccccccgcgaggagcccgacgacaucgacugcuggugcuacggcgucgagaacguccgcgucgccuacggcaagugcgacuccgccggccgcucccgccgcucccgccgcgccaucgaccuccccacccacgagaaccacggccucaagacccgccaggagaaguggaugaccggccgcaugggcgagcgccagcuccagaagaucgagcgcugguucguccgcaaccccuucuucgccgucaccgcccucaccaucgccuaccucgucggcuccaacaugacccagcgcgucgucaucgcccuccucguccucgccgucggccccgccuacuccgcccacugcaucggcaucaccgaccgcgacuucaucgagggcguccacggcggcaccugggucuccgccacccucgagcaggacaagugcgucaccgucauggcccccgacaagcccucccucgacaucucccucgagaccgucgccaucgaccgccccgccgagguccgcaaggucugcuacaacgccguccucacccacgucaagaucaacgacaagugccccuccaccggcgaggcccaccucgccgaggagaacgagggcgacaacgccugcaagcgcaccuacuccgaccgcggcuggggcaacggcugcggccucuucggcaagggcuccaucgucgccugcgccaaguucaccugcgccaaguccaugucccucuucgaggucgaccagaccaagauccaguacgucauccgcgcccagcuccacgucggcgccaagcaggagaacuggaacaccgacaucaagacccucaaguucgacgcccucuccggcucccaggaggucgaguucaucggcuacggcaaggccacccucgagugccagguccagaccgccgucgacuucggcaacuccuacaucgccgagauggagaccgaguccuggaucgucgaccgccagugggcccaggaccucacccuccccuggcaguccggcuccggcggcgucuggcgcgagaugcaccaccucgucgaguucgagcccccccacgccgccaccauccgcguccucgcccucggcaaccaggagggcucccucaagaccgcccucaccggcgccaugcgcgucaccaaggacaccaacgacaacaaccucuacaagcuccacggcggccacgucuccugccgcgucaagcucuccgcccucacccucaagggcaccuccuacaagaucugcaccgacaagauguucuucgucaagaaccccaccgacaccggccacggcaccgucgucaugcaggucaaggucuccaagggcgcccccugccgcauccccgucaucgucgccgacgaccucaccgccgccaucaacaagggcauccucgucaccgucaaccccaucgccuccaccaacgacgacgagguccucaucgaggucaacccccccuucggcgacuccuacaucaucgucggccgcggcgacucccgccucaccuaccaguggcacaaggagggcuccuccaucggcaagcucuucacccagaccaugaagggcgucgagcgccucgccgucaugggcgacaccgccugggacuucuccuccgccggcggcuucuucaccuccgucggcaagggcauccacaccgucuucggcuccgccuuccagggccucuucggcggccucaacuggaucaccaaggucaucaugggcgccguccucaucugggucggcaucaacacccgcaacaugaccauguccauguccaugauccucgucggcgucaucaugauguuccucucccucggcgucggcgccugaggacuaguaauaaggaaacuguaugaaugucugugggcaggaagugaagagauccuucuguaaagguuuuuggaauuaugucugcugaauaauaaacuuuuuugaaauaauaaaucugguagaaaaaugagaucuaaaaaaaaaaaaaaaaaaaaaaaaaaaaaaaaaaaaaaaaaaaaaaaaaaaaaaaaaaaaaaaaugcaucccccccccccccccccccccccccccccccaaaggcucuuuucagagccaccagaauu

SEQ ID NO: 976 - RNA, 2513 nt, Artificial Sequence
  mRNA product Design h-4 comprising derived and/or modified sequence from YFV__NC_002031.1__SSjev-prME-XX (polyprotein: aa122-788) (opt2)
gggagagggcgcuuggcuugcaaggacccugagcugcggcauugaagcacacccaacccaacucgacugaagucagccucacugaaccggaucugagaaucuucucucucugggcuugccagggcucuccgaaccuagcuagcauccucuucaauuccaacuagaaagcuuaccaugggcaagcgcuccgccggcuccaucauguggcucgccucccucgccgucgucaucgccugcgccggcgccgucacccucguccgcaagaaccgcuggcuccuccucaacgucaccuccgaggaccucggcaagaccuucuccgucggcaccggcaacugcaccaccaacauccucgaggccaaguacuggugccccgacuccauggaguacaacugccccaaccucuccccccgcgaggagcccgacgacaucgacugcuggugcuacggcgucgagaacguccgcgucgccuacggcaagugcgacuccgccggccgcucccgccgcucccgccgcgccaucgaccuccccacccacgagaaccacggccucaagacccgccaggagaaguggaugaccggccgcaugggcgagcgccagcuccagaagaucgagcgcugguucguccgcaaccccuucuucgccgucaccgcccucaccaucgccuaccucgucggcuccaacaugacccagcgcgucgucaucgcccuccucguccucgccgucggccccgccuacuccgcccacugcaucggcaucaccgaccgcgacuucaucgagggcguccacggcggcaccugggucuccgccacccucgagcaggacaagugcgucaccgucauggcccccgacaagcccucccucgacaucucccucgagaccgucgccaucgaccgccccgccgagguccgcaaggucugcuacaacgccguccucacccacgucaagaucaacgacaagugccccuccaccggcgaggcccaccucgccgaggagaacgagggcgacaacgccugcaagcgcaccuacuccgaccgcggcuggggcaacggcugcggccucuucggcaagggcuccaucgucgccugcgccaaguucaccugcgccaaguccaugucccucuucgaggucgaccagaccaagauccaguacgucauccgcgcccagcuccacgucggcgccaagcaggagaacuggaacaccgacaucaagacccucaaguucgacgcccucuccggcucccaggaggucgaguucaucggcuacggcaaggccacccucgagugccagguccagaccgccgucgacuucggcaacuccuacaucgccgagauggagaccgaguccuggaucgucgaccgccagugggcccaggaccucacccuccccuggcaguccggcuccggcggcgucuggcgcgagaugcaccaccucgucgaguucgagcccccccacgccgccaccauccgcguccucgcccucggcaaccaggagggcucccucaagaccgcccucaccggcgccaugcgcgucaccaaggacaccaacgacaacaaccucuacaagcuccacggcggccacgucuccugccgcgucaagcucuccgcccucacccucaagggcaccuccuacaagaucugcaccgacaagauguucuucgucaagaaccccaccgacaccggccacggcaccgucgucaugcaggucaaggucuccaagggcgcccccugccgcauccccgucaucgucgccgacgaccucaccgccgccaucaacaagggcauccucgucaccgucaaccccaucgccuccaccaacgacgacgagguccucaucgaggucaacccccccuucggcgacuccuacaucaucgucggccgcggcgacucccgccucaccuaccaguggcacaaggagggcuccuccaucggcaagcucuucacccagaccaugaagggcgucgagcgccucgccgucaugggcgacaccgccugggacuucuccuccgccggcggcuucuucaccuccgucggcaagggcauccacaccgucuucggcuccgccuuccagggccucuucggcggccucaacuggaucaccaaggucaucaugggcgccguccucaucugggucggcaucaacacccgcaacaugaccauguccauguccaugauccucgucggcgucaucaugauguuccucucccucggcgucggcgccgaccagggcugcgccaucaacuucggcaagugaggacuaguaauaaggaaacuguaugaaugucugugggcaggaagugaagagauccuucuguaaagguuuuuggaauuaugucugcugaauaauaaacuuuuuugaaauaauaaaucugguagaaaaaugagaucuaaaaaaaaaaaaaaaaaaaaaaaaaaaaaaaaaaaaaaaaaaaaaaaaaaaaaaaaaaaaaaaaugcaucccccccccccccccccccccccccccccccaaaggcucuuuucagagccaccagaauu

SEQ ID NO: 977 - RNA, 2483 nt, Artificial Sequence
  mRNA product Design h-4 comprising derived and/or modified sequence from YFV__NC_002031.1__SSjev-prME (polyprotein: aa122-778) (opt2)
gggagagggcgcuuggcuugcaaggacccugagcugcggcauugaagcacacccaacccaacucgacugaagucagccucacugaaccggaucugagaaucuucucucucugggcuugccagggcucuccgaaccuagcuagcauccucuucaauuccaacuagaaagcuuaccaugggcaagcgcuccgccggcuccaucauguggcucgccucccucgccgucgucaucgccugcgccggcgccgucacccucguccgcaagaaccgcuggcuccuccucaacgucaccuccgaggaccucggcaagaccuucuccgucggcaccggcaacugcaccaccaacauccucgaggccaaguacuggugccccgacuccauggaguacaacugccccaaccucuccccccgcgaggagcccgacgacaucgacugcuggugcuacggcgucgagaacguccgcgucgccuacggcaagugcgacuccgccggccgcucccgccgcucccgccgcgccaucgaccuccccacccacgagaaccacggccucaagacccgccaggagaaguggaugaccggccgcaugggcgagcgccagcuccagaagaucgagcgcugguucguccgcaaccccuucuucgccgucaccgcccucaccaucgccuaccucgucggcuccaacaugacccagcgcgucgucaucgcccuccucguccucgccgucggccccgccuacuccgcccacugcaucggcaucaccgaccgcgacuucaucgagggcguccacggcggcaccugggucuccgccacccucgagcaggacaagugcgucaccgucauggcccccgacaagcccucccucgacaucucccucgagaccgucgccaucgaccgccccgccgagguccgcaaggucugcuacaacgccguccucacccacgucaagaucaacgacaagugccccuccaccggcgaggcccaccucgccgaggagaacgagggcgacaacgccugcaagcgcaccuacuccgaccgcggcuggggcaacggcugcggccucuucggcaagggcuccaucgucgccugcgccaaguucaccugcgccaaguccaugucccucuucgaggucgaccagaccaagauccaguacgucauccgcgcccagcuccacgucggcgccaagcaggagaacuggaacaccgacaucaagacccucaaguucgacgcccucuccggcucccaggaggucgaguucaucggcuacggcaaggccacccucgagugccagguccagaccgccgucgacuucggcaacuccuacaucgccgagauggagaccgaguccuggaucgucgaccgccagugggcccaggaccucacccuccccuggcaguccggcuccggcggcgucuggcgcgagaugcaccaccucgucgaguucgagcccccccacgccgccaccauccgcguccucgcccucggcaaccaggagggcucccucaagaccgcccucaccggcgccaugcgcgucaccaaggacaccaacgacaacaaccucuacaagcuccacggcggccacgucuccugccgcgucaagcucuccgcccucacccucaagggcaccuccuacaagaucugcaccgacaagauguucuucgucaagaaccccaccgacaccggccacggcaccgucgucaugcaggucaaggucuccaagggcgcccccugccgcauccccgucaucgucgccgacgaccucaccgccgccaucaacaagggcauccucgucaccgucaaccccaucgccuccaccaacgacgacgagguccucaucgaggucaacccccccuucggcgacuccuacaucaucgucggccgcggcgacucccgccucaccuaccaguggcacaaggagggcuccuccaucggcaagcucuucacccagaccaugaagggcgucgagcgccucgccgucaugggcgacaccgccugggacuucuccuccgccggcggcuucuucaccuccgucggcaagggcauccacaccgucuucggcuccgccuuccagggccucuucggcggccucaacuggaucaccaaggucaucaugggcgccguccucaucugggucggcaucaacacccgcaacaugaccauguccauguccaugauccucgucggcgucaucaugauguuccucucccucggcgucggcgccugaggacuaguaauaaggaaacuguaugaaugucugugggcaggaagugaagagauccuucuguaaagguuuuuggaauuaugucugcugaauaauaaacuuuuuugaaauaauaaaucugguagaaaaaugagaucuaaaaaaaaaaaaaaaaaaaaaaaaaaaaaaaaaaaaaaaaaaaaaaaaaaaaaaaaaaaaaaaaugcaucccccccccccccccccccccccccccccccaaaggcucuuuucagagccaccagaauu

SEQ ID NO: 978 - RNA, 2531 nt, Artificial Sequence
  mRNA product Design h-4 comprising derived and/or modified sequence from YFV__NC_002031.1__X-SS-prME-XX (polyprotein: aa92-788) (opt3)
gggagagggcgcuuggcuugcaaggacccugagcugcggcauugaagcacacccaacccaacucgacugaagucagccucacugaaccggaucugagaaucuucucucucugggcuugccagggcucuccgaaccuagcuagcauccucuucaauuccaacuagaaagcuuaccaugagaggccugagcuccaggaagcggcgcucucacgacgugcucaccguccaguuccuuauccuggggauguuguuaaugacaggagguguuacucuggugcguaaaaaccgauggcuacuccugaauguaacgucagaggaucuuggcaagaccuuuaguguggggacaggaaacugcacuaccaauauucuggaagccaaauacuggugucccgacagcauggaguauaacugcccuaauuuguccccaagagaggaaccggaugacauagauuguuggugcuacggcgucgaaaacgugaggguugcuuaugguaagugugacucugcagggcggucgcgcagaucaaggcgggccaucgaucuccccacacaugagaaucacggacugaaaacccgccaagagaaguggaugacuggccgaaugggcgaaagacagcugcagaagauugagaggugguucgugcggaacccuuucuucgcggucacagcucucaccaucgccuacuuaguggggagcaauaugacgcagcguguaguuauugcacugcuuguguuggccgucggaccagcuuauagugcacauugcaucgguauaacugaccgcgauuuuaucgaaggcgugcacgggggaaccuggguguccgccacacuggagcaagacaaaugugucacuguuauggcucccgauaagccuucucuagacauuagccucgagaccguggccaucgauagaccagcggaaguaaggaaagugugcuacaacgcaguccugacacaugugaagauuaaugacaaaugucccuccaccggcgaggcccaccuugcugaagagaacgaaggugacaaugccugcaagcggacguauucagaucgaggguggggaaacggcuguggccuguucgggaagggaaguaucguugcaugcgcuaaauuuacuugcgccaagagcaugucuuuguucgagguggaccagacaaaaauacaguacgucauucgcgcgcagcuccacgugggugccaagcaagagaauuggaacaccgauaucaaaacucugaaguuugacgcauuauccggcucacaggaaguagaguucauuggguacggaaaagcuacacuggaaugucagguucagaccgccguggauuuuggcaacagcuauaucgcugagauggaaacggagaguuggaucgucgacagacaaugggcccaggaucucacccuuccuuggcagucugguuccgggggcguguggagggagaugcaucaccuggucgaauuugagccaccgcaugcagccacaauucggguguuggcucuaggaaaucaagaaggcagccugaagacugcgcucaccggggcaaugcgcguuacaaaggacacuaacgauaauaaccuguacaaacuucacggaggucacgugucgugcagaguaaagcugucugccuugacccucaaaggcacauccuauaagauauguaccgacaaaauguuuuucgucaagaaucccacugauacggggcauggaacagugguuaugcaagugaaggucucaaaaggcgcuccuugcaggaucccagugauuguagccgacgaccugaccgcagccaucaacaaggguauauuagugacuguuaaucccauugcuaguaccaacgaugacgagguccugaucgaagugaauccuccauucggggauagcuacaucauugugggccguggagacucccggcuaacauaucaguggcacaaagagggcucuagcaucgggaagcucuuuacccagacuaugaaaggagucgagcgacuggccguuaugggugauacagcaugggacuucucaagugcgggcggguuuuucacguccgugggaaagggcauucauaccguguuugguagcgcuuuccaggggcuuuuuggcggauugaacuggauaacuaagguaaucaugggcgccguccugauuuggguggggaucaauacaagaaacaugaccaugucuaugucaaugauccucguuggagugauuaugauguuccugagucuuggcgucggugcagaucaggggugugccauaaauuuuggaaaaugaggacuaguaauaaggaaacuguaugaaugucugugggcaggaagugaagagauccuucuguaaagguuuuuggaauuaugucugcugaauaauaaacuuuuuugaaauaauaaaucugguagaaaaaugagaucuaaaaaaaaaaaaaaaaaaaaaaaaaaaaaaaaaaaaaaaaaaaaaaaaaaaaaaaaaaaaaaaaugcaucccccccccccccccccccccccccccccccaaaggcucuuuucagagccaccagaauu

SEQ ID NO: 979 - RNA, 2468 nt, Artificial Sequence
  mRNA product Design h-4 comprising derived and/or modified sequence from YFV__NC_002031.1__SS-prME (polyprotein: M,aa104-778) (opt3)
gggagagggcgcuuggcuugcaaggacccugagcugcggcauugaagcacacccaacccaacucgacugaagucagccucacugaaccggaucugagaaucuucucucucugggcuugccagggcucuccgaaccuagcuagcauccucuucaauuccaacuagaaagcuuaccauggacgugcugaccguccaguuccucauccuuggcaugcuguugaugacagggggaguuacuuuagugagaaagaacagguggcugcuacucaauguaacgagcgaggaucuggguaaaaccuuuuccgugggcacagggaacugcacuaccaauauucuugaagccaaguacuggugucccgacucuauggaguauaacugcccuaaucugucaccacgggaggaaccggaugacauagauuguuggugcuacggagucgaaaacgugcgcguugcuuauggcaaaugugacagugcaggucgaagccguagauccaggcgggccaucgauuugcccacacacgagaaucaugggcucaagacccgccaagagaaauggaugacuggaagaaugggcgaaaggcagcugcagaagauugagcggugguucgugcgcaacccuuucuucgcggucacagcucugaccaucgccuaccucgugggcucuaauaugacgcagcgaguaguuauugcauuacuggugcuugccgucgggccagcuuauucggcacacugcaucggaauaacugacagagauuuuaucgaaggugugcauggcgggaccugggugucagccacauuggagcaagacaagugugucacuguuauggcucccgauaaaccuagccuggacauuagucuagagaccguggccaucgauaggccagcggaaguacggaaggugugcuacaacgcaguccucacacacgugaaaauuaaugacaagugucccuccaccggagaggcccaucuggcugaagagaacgaaggcgacaaugccugcaaacguacguauucugaucgcgguugggggaacggauguggccuuuucggcaaggggagcaucguugcaugcgcuaaguuuacuugcgccaaauccaugucacuguucgagguggaccagacaaagauacaguacgucauuagagcgcaguugcacgugggagccaaacaagagaauuggaacaccgauaucaagacucucaaauuugacgcacugagugguagccaggaaguagaguucauuggcuacgggaaggcuacauuagaaugucagguucagaccgccguggauuuuggaaacucuuauaucgcugagauggaaacggaguccuggaucgucgacaggcaaugggcccaggaucugacccucccuuggcagucaggcagcggugggguguggcgggagaugcaccaucuugucgaauuugagccaccgcacgcagccacaauucgagugcuggcuuugggcaaucaagaaggaagucuaaaaacugcgcugaccggcgcaaugcgcguuacaaaggacacuaacgauaauaaccucuacaagcugcaugggggacacgugucuugcagaguaaaacuuuccgcccugaccuugaaggguacaagcuauaaaauauguaccgacaagauguuuuucgucaaaaaucccacugauacgggccacgggacagugguuaugcaagugaaggucucgaagggagcuccuugcaggaucccagugauuguagccgacgaccucaccgcagccaucaacaaaggcauacuggugacuguuaaucccauugcuucuaccaacgaugacgaggucuuaaucgaagugaauccuccauucggugauuccuacaucauuguggggcggggcgacucacgccugacauaucaguggcauaaggagggaaguagcaucggcaaacuauuuacccagacuaugaagggggucgagagacucgccguuaugggagauacagcaugggacuucuccucugcggguggcuuuuucacgagcguggggaaaggcauucacaccguguuuggaucagcuuuccagggucuguuugggggccuuaacuggauaacuaagguaaucaugggagccgucuugauuugggugggcaucaauacaaggaacaugaccaugaguauguccaugauccugguuggggugauuaugauguuccucagccugggagucggcgcaugaggacuaguaauaaggaaacuguaugaaugucugugggcaggaagugaagagauccuucuguaaagguuuuuggaauuaugucugcugaauaauaaacuuuuuugaaauaauaaaucugguagaaaaaugagaucuaaaaaaaaaaaaaaaaaaaaaaaaaaaaaaaaaaaaaaaaaaaaaaaaaaaaaaaaaaaaaaaaugcaucccccccccccccccccccccccccccccccaaaggcucuuuucagagccaccagaauu

SEQ ID NO: 980 - RNA, 2495 nt, Artificial Sequence
  mRNA product Design h-4 comprising derived and/or modified sequence from YFV__NC_002031.1__SSIgE-prME-XX (polyprotein: aa122-788) (opt3)
gggagagggcgcuuggcuugcaaggacccugagcugcggcauugaagcacacccaacccaacucgacugaagucagccucacugaaccggaucugagaaucuucucucucugggcuugccagggcucuccgaaccuagcuagcauccucuucaauuccaacuagaaagcuuaccauggacuggaccuggauccuguuccucguggccgcugcaacaagaguccacagcguuacucuggugcguaaaaaccgauggcuacuccugaauguaacgucagaggaucuuggcaagaccuuuaguguggggacaggaaacugcacuaccaauauucuggaagccaaauacuggugucccgacagcauggaguauaacugcccuaauuuguccccaagagaggaaccggaugacauagauuguuggugcuacggcgucgaaaacgugaggguugcuuaugguaagugugacucugcagggcggucgcgcagaucaaggcgggccaucgaucuccccacacaugagaaucacggacugaaaacccgccaagagaaguggaugacuggccgaaugggcgaaagacagcugcagaagauugagaggugguucgugcggaacccuuucuucgcggucacagcucucaccaucgccuacuuaguggggagcaauaugacgcagcguguaguuauugcacugcuuguguuggccgucggaccagcuuauagugcacauugcaucgguauaacugaccgcgauuuuaucgaaggcgugcacgggggaaccuggguguccgccacacuggagcaagacaaaugugucacuguuauggcucccgauaagccuucucuagacauuagccucgagaccguggccaucgauagaccagcggaaguaaggaaagugugcuacaacgcaguccugacacaugugaagauuaaugacaaaugucccuccaccggcgaggcccaccuugcugaagagaacgaaggugacaaugccugcaagcggacguauucagaucgaggguggggaaacggcuguggccuguucgggaagggaaguaucguugcaugcgcuaaauuuacuugcgccaagagcaugucuuuguucgagguggaccagacaaaaauacaguacgucauucgcgcgcagcuccacgugggugccaagcaagagaauuggaacaccgauaucaaaacucugaaguuugacgcauuauccggcucacaggaaguagaguucauuggguacggaaaagcuacacuggaaugucagguucagaccgccguggauuuuggcaacagcuauaucgcugagauggaaacggagaguuggaucgucgacagacaaugggcccaggaucucacccuuccuuggcagucugguuccgggggcguguggagggagaugcaucaccuggucgaauuugagccaccgcaugcagccacaauucggguguuggcucuaggaaaucaagaaggcagccugaagacugcgcucaccggggcaaugcgcguuacaaaggacacuaacgauaauaaccuguacaaacuucacggaggucacgugucgugcagaguaaagcugucugccuugacccucaaaggcacauccuauaagauauguaccgacaaaauguuuuucgucaagaaucccacugauacggggcauggaacagugguuaugcaagugaaggucucaaaaggcgcuccuugcaggaucccagugauuguagccgacgaccugaccgcagccaucaacaaggguauauuagugacuguuaaucccauugcuaguaccaacgaugacgagguccugaucgaagugaauccuccauucggggauagcuacaucauugugggccguggagacucccggcuaacauaucaguggcacaaagagggcucuagcaucgggaagcucuuuacccagacuaugaaaggagucgagcgacuggccguuaugggugauacagcaugggacuucucaagugcgggcggguuuuucacguccgugggaaagggcauucauaccguguuugguagcgcuuuccaggggcuuuuuggcggauugaacuggauaacuaagguaaucaugggcgccguccugauuuggguggggaucaauacaagaaacaugaccaugucuaugucaaugauccucguuggagugauuaugauguuccugagucuuggcgucggugcagaucaggggugugccauaaauuuuggaaaaugaggacuaguaauaaggaaacuguaugaaugucugugggcaggaagugaagagauccuucuguaaagguuuuuggaauuaugucugcugaauaauaaacuuuuuugaaauaauaaaucugguagaaaaaugagaucuaaaaaaaaaaaaaaaaaaaaaaaaaaaaaaaaaaaaaaaaaaaaaaaaaaaaaaaaaaaaaaaaugcaucccccccccccccccccccccccccccccccaaaggcucuuuucagagccaccagaauu

SEQ ID NO: 981 - RNA, 2465 nt, Artificial Sequence
  mRNA product Design h-4 comprising derived and/or modified sequence from YFV__NC_002031.1__SSIgE-prME (polyprotein: aa122-778) (opt3)
gggagagggcgcuuggcuugcaaggacccugagcugcggcauugaagcacacccaacccaacucgacugaagucagccucacugaaccggaucugagaaucuucucucucugggcuugccagggcucuccgaaccuagcuagcauccucuucaauuccaacuagaaagcuuaccauggacuggaccuggauccuguuccucguggccgcugcaacaagaguccacagcgugacccuggucagaaagaacagguggcuccuucugaauguuacaagcgaggacuugggcaaaacuuucuccguggggacgggaaacugcaccacaaauaucuuagaagccaaguacuggugucccgauucuauggaguauaacugcccuaaucugucaccacgggaggaaccggacgauauugacuguuggugcuacgguguagaaaacgugcgcgucgcuuauggcaaaugugauagugcagggcgaagccguagauccaggcgggccauagaccuacccacucacgagaaucauggacucaagacccgccaggagaaauggaugacaggcagaaugggugaaaggcaacugcagaagaucgagcggugguuugugcgcaacccuuucuuugcgguuaccgcucuuacuauugccuaccugguggggucuaauaugacacagcgagucgugaucgcauugcucguacuggccguuggaccagcuuauucggcacacugcauuggcaucaccgauagagacuucauagaaggcgugcaugggggaacgugggucucagccacucuggagcaggauaagugugugaccgugauggcucccgacaaaccuagccucgauaucaguuuagagacagucgccauugacaggccagcggaaguucggaaggugugcuacaacgcaguacugacucacgugaaaaucaaugauaagugucccuccaccggugaggcccaucuugcugaagagaacgaaggcgacaaugccugcaaacguacauauucugaccgcggguggggaaacggcugugguuuguuugggaagggaagcauugucgcaugcgcuaaguuuaccugcgccaaauccaugucacuguucgagguggaucaaacgaagauccaguacguuauaagagcgcagcuacacgugggcgccaaacaggagaauuggaacacugacauuaagacacucaaauucgaugcacugaguggcagccaagaagucgaguuuaucggguacggaaaggcuacccuugaaugucaggugcagacugccguagacuucgguaacucuuauauugcugagauggaaacagaguccuggaucguugauaggcagugggcccaagaccugaccuugccuuggcagucaggcagcgggggaguguggcgggagaugcaccaucucgucgaauuugagccaccgcacgcagccacgauccgagugcuggcuuuaggcaaucaggaagguagucugaaaaccgcgcucacaggggcaaugcgcgucacuaaggauaccaacgacaauaaccuuuacaagcugcauggcggacacgugucuugcagaguuaaauuguccgcccuaacacugaagggcacuagcuauaaaauuuguaccgauaagauguucuuugugaaaaaucccacagacaccgggcacggaacuguagucaugcaagugaagguuucgaagggugcuccuugcaggauaccagugaucgucgccgaugaccucacggcagccauuaacaaaggcauccuggugacaguaaaucccauagcuucuaccaacgacgaugaggugcuuauugaaguuaauccuccauucggggacuccuacaucaucgucggacggggcgauucacgccugacuuaucaguggcauaaggaggguaguagcauugggaaauuguucacccagacaaugaagggcguggagagacucgccgugaugggagacaccgcaugggauuuuuccucugcgggcggguucuuuacuagcgucggaaaagguauccacacaguuuucggcucagcuuuucaggggcuguucggaggcuuaaacuggauuacgaaggugauaaugggugccgugcugaucuggguagggauuaauaccaggaacaugacuaugaguauguccaugauccuagucggcgugaucaugauguuucucagccugggaguuggcgcaugaggacuaguaauaaggaaacuguaugaaugucugugggcaggaagugaagagauccuucuguaaagguuuuuggaauuaugucugcugaauaauaaacuuuuuugaaauaauaaaucugguagaaaaaugagaucuaaaaaaaaaaaaaaaaaaaaaaaaaaaaaaaaaaaaaaaaaaaaaaaaaaaaaaaaaaaaaaaaugcaucccccccccccccccccccccccccccccccaaaggcucuuuucagagccaccagaauu

SEQ ID NO: 982 - RNA, 2513 nt, Artificial Sequence
  mRNA product Design h-4 comprising derived and/or modified sequence from YFV__NC_002031.1__SSjev-prME-XX (polyprotein: aa122-788) (opt3)
gggagagggcgcuuggcuugcaaggacccugagcugcggcauugaagcacacccaacccaacucgacugaagucagccucacugaaccggaucugagaaucuucucucucugggcuugccagggcucuccgaaccuagcuagcauccucuucaauuccaacuagaaagcuuaccaugggcaagagaagcgccggguccaucauguggcuggcuucucucgcaguggucauugccugcgcgggagcuguuacucuggugcguaaaaaccgauggcuacuccugaauguaacgucagaggaucuuggcaagaccuuuaguguggggacaggaaacugcacuaccaauauucuggaagccaaauacuggugucccgacagcauggaguauaacugcccuaauuuguccccaagagaggaaccggaugacauagauuguuggugcuacggcgucgaaaacgugaggguugcuuaugguaagugugacucugcagggcggucgcgcagaucaaggcgggccaucgaucuccccacacaugagaaucacggacugaaaacccgccaagagaaguggaugacuggccgaaugggcgaaagacagcugcagaagauugagaggugguucgugcggaacccuuucuucgcggucacagcucucaccaucgccuacuuaguggggagcaauaugacgcagcguguaguuauugcacugcuuguguuggccgucggaccagcuuauagugcacauugcaucgguauaacugaccgcgauuuuaucgaaggcgugcacgggggaaccuggguguccgccacacuggagcaagacaaaugugucacuguuauggcucccgauaagccuucucuagacauuagccucgagaccguggccaucgauagaccagcggaaguaaggaaagugugcuacaacgcaguccugacacaugugaagauuaaugacaaaugucccuccaccggcgaggcccaccuugcugaagagaacgaaggugacaaugccugcaagcggacguauucagaucgaggguggggaaacggcuguggccuguucgggaagggaaguaucguugcaugcgcuaaauuuacuugcgccaagagcaugucuuuguucgagguggaccagacaaaaauacaguacgucauucgcgcgcagcuccacgugggugccaagcaagagaauuggaacaccgauaucaaaacucugaaguuugacgcauuauccggcucacaggaaguagaguucauuggguacggaaaagcuacacuggaaugucagguucagaccgccguggauuuuggcaacagcuauaucgcugagauggaaacggagaguuggaucgucgacagacaaugggcccaggaucucacccuuccuuggcagucugguuccgggggcguguggagggagaugcaucaccuggucgaauuugagccaccgcaugcagccacaauucggguguuggcucuaggaaaucaagaaggcagccugaagacugcgcucaccggggcaaugcgcguuacaaaggacacuaacgauaauaaccuguacaaacuucacggaggucacgugucgugcagaguaaagcugucugccuugacccucaaaggcacauccuauaagauauguaccgacaaaauguuuuucgucaagaaucccacugauacggggcauggaacagugguuaugcaagugaaggucucaaaaggcgcuccuugcaggaucccagugauuguagccgacgaccugaccgcagccaucaacaaggguauauuagugacuguuaaucccauugcuaguaccaacgaugacgagguccugaucgaagugaauccuccauucggggauagcuacaucauugugggccguggagacucccggcuaacauaucaguggcacaaagagggcucuagcaucgggaagcucuuuacccagacuaugaaaggagucgagcgacuggccguuaugggugauacagcaugggacuucucaagugcgggcggguuuuucacguccgugggaaagggcauucauaccguguuugguagcgcuuuccaggggcuuuuuggcggauugaacuggauaacuaagguaaucaugggcgccguccugauuuggguggggaucaauacaagaaacaugaccaugucuaugucaaugauccucguuggagugauuaugauguuccugagucuuggcgucggugcagaucaggggugugccauaaauuuuggaaaaugaggacuaguaauaaggaaacuguaugaaugucugugggcaggaagugaagagauccuucuguaaagguuuuuggaauuaugucugcugaauaauaaacuuuuuugaaauaauaaaucugguagaaaaaugagaucuaaaaaaaaaaaaaaaaaaaaaaaaaaaaaaaaaaaaaaaaaaaaaaaaaaaaaaaaaaaaaaaaugcaucccccccccccccccccccccccccccccccaaaggcucuuuucagagccaccagaauu

SEQ ID NO: 983 - RNA, 2483 nt, Artificial Sequence
  mRNA product Design h-4 comprising derived and/or modified sequence from YFV__NC_002031.1__SSjev-prME (polyprotein: aa122-778) (opt3)
gggagagggcgcuuggcuugcaaggacccugagcugcggcauugaagcacacccaacccaacucgacugaagucagccucacugaaccggaucugagaaucuucucucucugggcuugccagggcucuccgaaccuagcuagcauccucuucaauuccaacuagaaagcuuaccaugggcaagagaagcgccggguccaucauguggcuggcuucucucgcaguggucauugccugcgcgggagcugugacccuggucagaaagaacagguggcuccuucugaauguuacaagcgaggacuugggcaaaacuuucuccguggggacgggaaacugcaccacaaauaucuuagaagccaaguacuggugucccgauucuauggaguauaacugcccuaaucugucaccacgggaggaaccggacgauauugacuguuggugcuacgguguagaaaacgugcgcgucgcuuauggcaaaugugauagugcagggcgaagccguagauccaggcgggccauagaccuacccacucacgagaaucauggacucaagacccgccaggagaaauggaugacaggcagaaugggugaaaggcaacugcagaagaucgagcggugguuugugcgcaacccuuucuuugcgguuaccgcucuuacuauugccuaccugguggggucuaauaugacacagcgagucgugaucgcauugcucguacuggccguuggaccagcuuauucggcacacugcauuggcaucaccgauagagacuucauagaaggcgugcaugggggaacgugggucucagccacucuggagcaggauaagugugugaccgugauggcucccgacaaaccuagccucgauaucaguuuagagacagucgccauugacaggccagcggaaguucggaaggugugcuacaacgcaguacugacucacgugaaaaucaaugauaagugucccuccaccggugaggcccaucuugcugaagagaacgaaggcgacaaugccugcaaacguacauauucugaccgcggguggggaaacggcugugguuuguuugggaagggaagcauugucgcaugcgcuaaguuuaccugcgccaaauccaugucacuguucgagguggaucaaacgaagauccaguacguuauaagagcgcagcuacacgugggcgccaaacaggagaauuggaacacugacauuaagacacucaaauucgaugcacugaguggcagccaagaagucgaguuuaucggguacggaaaggcuacccuugaaugucaggugcagacugccguagacuucgguaacucuuauauugcugagauggaaacagaguccuggaucguugauaggcagugggcccaagaccugaccuugccuuggcagucaggcagcgggggaguguggcgggagaugcaccaucucgucgaauuugagccaccgcacgcagccacgauccgagugcuggcuuuaggcaaucaggaagguagucugaaaaccgcgcucacaggggcaaugcgcgucacuaaggauaccaacgacaauaaccuuuacaagcugcauggcggacacgugucuugcagaguuaaauuguccgcccuaacacugaagggcacuagcuauaaaauuuguaccgauaagauguucuuugugaaaaaucccacagacaccgggcacggaacuguagucaugcaagugaagguuucgaagggugcuccuugcaggauaccagugaucgucgccgaugaccucacggcagccauuaacaaaggcauccuggugacaguaaaucccauagcuucuaccaacgacgaugaggugcuuauugaaguuaauccuccauucggggacuccuacaucaucgucggacggggcgauucacgccugacuuaucaguggcauaaggaggguaguagcauugggaaauuguucacccagacaaugaagggcguggagagacucgccgugaugggagacaccgcaugggauuuuuccucugcgggcggguucuuuacuagcgucggaaaagguauccacacaguuuucggcucagcuuuucaggggcuguucggaggcuuaaacuggauuacgaaggugauaaugggugccgugcugaucuggguagggauuaauaccaggaacaugacuaugaguauguccaugauccuagucggcgugaucaugauguuucucagccugggaguuggcgcaugaggacuaguaauaaggaaacuguaugaaugucugugggcaggaagugaagagauccuucuguaaagguuuuuggaauuaugucugcugaauaauaaacuuuuuugaaauaauaaaucugguagaaaaaugagaucuaaaaaaaaaaaaaaaaaaaaaaaaaaaaaaaaaaaaaaaaaaaaaaaaaaaaaaaaaaaaaaaaugcaucccccccccccccccccccccccccccccccaaaggcucuuuucagagccaccagaauu

SEQ ID NO: 984 - RNA, 2531 nt, Artificial Sequence
  mRNA product Design h-4 comprising derived and/or modified sequence from YFV__NC_002031.1__X-SS-prME-XX (polyprotein: aa92-788) (opt4)
gggagagggcgcuuggcuugcaaggacccugagcugcggcauugaagcacacccaacccaacucgacugaagucagccucacugaaccggaucugagaaucuucucucucugggcuugccagggcucuccgaaccuagcuagcauccucuucaauuccaacuagaaagcuuaccaugagaggccugagcagcagaaagagaagaagccacgacgugcugaccgugcaguuccugauccugggcaugcugcugaugaccggcggcgugacccuggugagaaagaacagauggcugcugcugaacgugaccagcgaggaccugggcaagaccuucagcgugggcaccggcaacugcaccaccaacauccuggaggccaaguacuggugccccgacagcauggaguacaacugccccaaccugagccccagagaggagcccgacgacaucgacugcuggugcuacggcguggagaacgugagaguggccuacggcaagugcgacagcgccggcagaagcagaagaagcagaagagccaucgaccugcccacccacgagaaccacggccugaagaccagacaggagaaguggaugaccggcagaaugggcgagagacagcugcagaagaucgagagaugguucgugagaaaccccuucuucgccgugaccgcccugaccaucgccuaccuggugggcagcaacaugacccagagaguggugaucgcccugcuggugcuggccgugggccccgccuacagcgcccacugcaucggcaucaccgacagagacuucaucgagggcgugcacggcggcaccugggugagcgccacccuggagcaggacaagugcgugaccgugauggcccccgacaagcccagccuggacaucagccuggagaccguggccaucgacagacccgccgaggugagaaaggugugcuacaacgccgugcugacccacgugaagaucaacgacaagugccccagcaccggcgaggcccaccuggccgaggagaacgagggcgacaacgccugcaagagaaccuacagcgacagaggcuggggcaacggcugcggccuguucggcaagggcagcaucguggccugcgccaaguucaccugcgccaagagcaugagccuguucgagguggaccagaccaagauccaguacgugaucagagcccagcugcacgugggcgccaagcaggagaacuggaacaccgacaucaagacccugaaguucgacgcccugagcggcagccaggagguggaguucaucggcuacggcaaggccacccuggagugccaggugcagaccgccguggacuucggcaacagcuacaucgccgagauggagaccgagagcuggaucguggacagacagugggcccaggaccugacccugcccuggcagagcggcagcggcggcguguggagagagaugcaccaccugguggaguucgagcccccccacgccgccaccaucagagugcuggcccugggcaaccaggagggcagccugaagaccgcccugaccggcgccaugagagugaccaaggacaccaacgacaacaaccuguacaagcugcacggcggccacgugagcugcagagugaagcugagcgcccugacccugaagggcaccagcuacaagaucugcaccgacaagauguucuucgugaagaaccccaccgacaccggccacggcaccguggugaugcaggugaaggugagcaagggcgcccccugcagaauccccgugaucguggccgacgaccugaccgccgccaucaacaagggcauccuggugaccgugaaccccaucgccagcaccaacgacgacgaggugcugaucgaggugaacccccccuucggcgacagcuacaucaucgugggcagaggcgacagcagacugaccuaccaguggcacaaggagggcagcagcaucggcaagcuguucacccagaccaugaagggcguggagagacuggccgugaugggcgacaccgccugggacuucagcagcgccggcggcuucuucaccagcgugggcaagggcauccacaccguguucggcagcgccuuccagggccuguucggcggccugaacuggaucaccaaggugaucaugggcgccgugcugaucugggugggcaucaacaccagaaacaugaccaugagcaugagcaugauccuggugggcgugaucaugauguuccugagccugggcgugggcgccgaccagggcugcgccaucaacuucggcaagugaggacuaguaauaaggaaacuguaugaaugucugugggcaggaagugaagagauccuucuguaaagguuuuuggaauuaugucugcugaauaauaaacuuuuuugaaauaauaaaucugguagaaaaaugagaucuaaaaaaaaaaaaaaaaaaaaaaaaaaaaaaaaaaaaaaaaaaaaaaaaaaaaaaaaaaaaaaaaugcaucccccccccccccccccccccccccccccccaaaggcucuuuucagagccaccagaauu

SEQ ID NO: 985 - RNA, 2468 nt, Artificial Sequence
  mRNA product Design h-4 comprising derived and/or modified sequence from YFV__NC_002031.1__SS-prME (polyprotein: M,aa104-778) (opt4)
gggagagggcgcuuggcuugcaaggacccugagcugcggcauugaagcacacccaacccaacucgacugaagucagccucacugaaccggaucugagaaucuucucucucugggcuugccagggcucuccgaaccuagcuagcauccucuucaauuccaacuagaaagcuuaccauggacgugcugaccgugcaguuccugauccugggcaugcugcugaugaccggcggcgugacccuggugagaaagaacagauggcugcugcugaacgugaccagcgaggaccugggcaagaccuucagcgugggcaccggcaacugcaccaccaacauccuggaggccaaguacuggugccccgacagcauggaguacaacugccccaaccugagccccagagaggagcccgacgacaucgacugcuggugcuacggcguggagaacgugagaguggccuacggcaagugcgacagcgccggcagaagcagaagaagcagaagagccaucgaccugcccacccacgagaaccacggccugaagaccagacaggagaaguggaugaccggcagaaugggcgagagacagcugcagaagaucgagagaugguucgugagaaaccccuucuucgccgugaccgcccugaccaucgccuaccuggugggcagcaacaugacccagagaguggugaucgcccugcuggugcuggccgugggccccgccuacagcgcccacugcaucggcaucaccgacagagacuucaucgagggcgugcacggcggcaccugggugagcgccacccuggagcaggacaagugcgugaccgugauggcccccgacaagcccagccuggacaucagccuggagaccguggccaucgacagacccgccgaggugagaaaggugugcuacaacgccgugcugacccacgugaagaucaacgacaagugccccagcaccggcgaggcccaccuggccgaggagaacgagggcgacaacgccugcaagagaaccuacagcgacagaggcuggggcaacggcugcggccuguucggcaagggcagcaucguggccugcgccaaguucaccugcgccaagagcaugagccuguucgagguggaccagaccaagauccaguacgugaucagagcccagcugcacgugggcgccaagcaggagaacuggaacaccgacaucaagacccugaaguucgacgcccugagcggcagccaggagguggaguucaucggcuacggcaaggccacccuggagugccaggugcagaccgccguggacuucggcaacagcuacaucgccgagauggagaccgagagcuggaucguggacagacagugggcccaggaccugacccugcccuggcagagcggcagcggcggcguguggagagagaugcaccaccugguggaguucgagcccccccacgccgccaccaucagagugcuggcccugggcaaccaggagggcagccugaagaccgcccugaccggcgccaugagagugaccaaggacaccaacgacaacaaccuguacaagcugcacggcggccacgugagcugcagagugaagcugagcgcccugacccugaagggcaccagcuacaagaucugcaccgacaagauguucuucgugaagaaccccaccgacaccggccacggcaccguggugaugcaggugaaggugagcaagggcgcccccugcagaauccccgugaucguggccgacgaccugaccgccgccaucaacaagggcauccuggugaccgugaaccccaucgccagcaccaacgacgacgaggugcugaucgaggugaacccccccuucggcgacagcuacaucaucgugggcagaggcgacagcagacugaccuaccaguggcacaaggagggcagcagcaucggcaagcuguucacccagaccaugaagggcguggagagacuggccgugaugggcgacaccgccugggacuucagcagcgccggcggcuucuucaccagcgugggcaagggcauccacaccguguucggcagcgccuuccagggccuguucggcggccugaacuggaucaccaaggugaucaugggcgccgugcugaucugggugggcaucaacaccagaaacaugaccaugagcaugagcaugauccuggugggcgugaucaugauguuccugagccugggcgugggcgccugaggacuaguaauaaggaaacuguaugaaugucugugggcaggaagugaagagauccuucuguaaagguuuuuggaauuaugucugcugaauaauaaacuuuuuugaaauaauaaaucugguagaaaaaugagaucuaaaaaaaaaaaaaaaaaaaaaaaaaaaaaaaaaaaaaaaaaaaaaaaaaaaaaaaaaaaaaaaaugcaucccccccccccccccccccccccccccccccaaaggcucuuuucagagccaccagaauu

SEQ ID NO: 986 - RNA, 2495 nt, Artificial Sequence
  mRNA product Design h-4 comprising derived and/or modified sequence from YFV__NC_002031.1__SSIgE-prME-XX (polyprotein: aa122-788) (opt4)
gggagagggcgcuuggcuugcaaggacccugagcugcggcauugaagcacacccaacccaacucgacugaagucagccucacugaaccggaucugagaaucuucucucucugggcuugccagggcucuccgaaccuagcuagcauccucuucaauuccaacuagaaagcuuaccauggacuggaccuggauccuguuccugguggccgccgccaccagagugcacagcgugacccuggugagaaagaacagauggcugcugcugaacgugaccagcgaggaccugggcaagaccuucagcgugggcaccggcaacugcaccaccaacauccuggaggccaaguacuggugccccgacagcauggaguacaacugccccaaccugagccccagagaggagcccgacgacaucgacugcuggugcuacggcguggagaacgugagaguggccuacggcaagugcgacagcgccggcagaagcagaagaagcagaagagccaucgaccugcccacccacgagaaccacggccugaagaccagacaggagaaguggaugaccggcagaaugggcgagagacagcugcagaagaucgagagaugguucgugagaaaccccuucuucgccgugaccgcccugaccaucgccuaccuggugggcagcaacaugacccagagaguggugaucgcccugcuggugcuggccgugggccccgccuacagcgcccacugcaucggcaucaccgacagagacuucaucgagggcgugcacggcggcaccugggugagcgccacccuggagcaggacaagugcgugaccgugauggcccccgacaagcccagccuggacaucagccuggagaccguggccaucgacagacccgccgaggugagaaaggugugcuacaacgccgugcugacccacgugaagaucaacgacaagugccccagcaccggcgaggcccaccuggccgaggagaacgagggcgacaacgccugcaagagaaccuacagcgacagaggcuggggcaacggcugcggccuguucggcaagggcagcaucguggccugcgccaaguucaccugcgccaagagcaugagccuguucgagguggaccagaccaagauccaguacgugaucagagcccagcugcacgugggcgccaagcaggagaacuggaacaccgacaucaagacccugaaguucgacgcccugagcggcagccaggagguggaguucaucggcuacggcaaggccacccuggagugccaggugcagaccgccguggacuucggcaacagcuacaucgccgagauggagaccgagagcuggaucguggacagacagugggcccaggaccugacccugcccuggcagagcggcagcggcggcguguggagagagaugcaccaccugguggaguucgagcccccccacgccgccaccaucagagugcuggcccugggcaaccaggagggcagccugaagaccgcccugaccggcgccaugagagugaccaaggacaccaacgacaacaaccuguacaagcugcacggcggccacgugagcugcagagugaagcugagcgcccugacccugaagggcaccagcuacaagaucugcaccgacaagauguucuucgugaagaaccccaccgacaccggccacggcaccguggugaugcaggugaaggugagcaagggcgcccccugcagaauccccgugaucguggccgacgaccugaccgccgccaucaacaagggcauccuggugaccgugaaccccaucgccagcaccaacgacgacgaggugcugaucgaggugaacccccccuucggcgacagcuacaucaucgugggcagaggcgacagcagacugaccuaccaguggcacaaggagggcagcagcaucggcaagcuguucacccagaccaugaagggcguggagagacuggccgugaugggcgacaccgccugggacuucagcagcgccggcggcuucuucaccagcgugggcaagggcauccacaccguguucggcagcgccuuccagggccuguucggcggccugaacuggaucaccaaggugaucaugggcgccgugcugaucugggugggcaucaacaccagaaacaugaccaugagcaugagcaugauccuggugggcgugaucaugauguuccugagccugggcgugggcgccgaccagggcugcgccaucaacuucggcaagugaggacuaguaauaaggaaacuguaugaaugucugugggcaggaagugaagagauccuucuguaaagguuuuuggaauuaugucugcugaauaauaaacuuuuuugaaauaauaaaucugguagaaaaaugagaucuaaaaaaaaaaaaaaaaaaaaaaaaaaaaaaaaaaaaaaaaaaaaaaaaaaaaaaaaaaaaaaaaugcaucccccccccccccccccccccccccccccccaaaggcucuuuucagagccaccagaauu

SEQ ID NO: 987 - RNA, 2465 nt, Artificial Sequence
  mRNA product Design h-4 comprising derived and/or modified sequence from YFV__NC_002031.1__SSIgE-prME (polyprotein: aa122-778) (opt4)
gggagagggcgcuuggcuugcaaggacccugagcugcggcauugaagcacacccaacccaacucgacugaagucagccucacugaaccggaucugagaaucuucucucucugggcuugccagggcucuccgaaccuagcuagcauccucuucaauuccaacuagaaagcuuaccauggacuggaccuggauccuguuccugguggccgccgccaccagagugcacagcgugacccuggugagaaagaacagauggcugcugcugaacgugaccagcgaggaccugggcaagaccuucagcgugggcaccggcaacugcaccaccaacauccuggaggccaaguacuggugccccgacagcauggaguacaacugccccaaccugagccccagagaggagcccgacgacaucgacugcuggugcuacggcguggagaacgugagaguggccuacggcaagugcgacagcgccggcagaagcagaagaagcagaagagccaucgaccugcccacccacgagaaccacggccugaagaccagacaggagaaguggaugaccggcagaaugggcgagagacagcugcagaagaucgagagaugguucgugagaaaccccuucuucgccgugaccgcccugaccaucgccuaccuggugggcagcaacaugacccagagaguggugaucgcccugcuggugcuggccgugggccccgccuacagcgcccacugcaucggcaucaccgacagagacuucaucgagggcgugcacggcggcaccugggugagcgccacccuggagcaggacaagugcgugaccgugauggcccccgacaagcccagccuggacaucagccuggagaccguggccaucgacagacccgccgaggugagaaaggugugcuacaacgccgugcugacccacgugaagaucaacgacaagugccccagcaccggcgaggcccaccuggccgaggagaacgagggcgacaacgccugcaagagaaccuacagcgacagaggcuggggcaacggcugcggccuguucggcaagggcagcaucguggccugcgccaaguucaccugcgccaagagcaugagccuguucgagguggaccagaccaagauccaguacgugaucagagcccagcugcacgugggcgccaagcaggagaacuggaacaccgacaucaagacccugaaguucgacgcccugagcggcagccaggagguggaguucaucggcuacggcaaggccacccuggagugccaggugcagaccgccguggacuucggcaacagcuacaucgccgagauggagaccgagagcuggaucguggacagacagugggcccaggaccugacccugcccuggcagagcggcagcggcggcguguggagagagaugcaccaccugguggaguucgagcccccccacgccgccaccaucagagugcuggcccugggcaaccaggagggcagccugaagaccgcccugaccggcgccaugagagugaccaaggacaccaacgacaacaaccuguacaagcugcacggcggccacgugagcugcagagugaagcugagcgcccugacccugaagggcaccagcuacaagaucugcaccgacaagauguucuucgugaagaaccccaccgacaccggccacggcaccguggugaugcaggugaaggugagcaagggcgcccccugcagaauccccgugaucguggccgacgaccugaccgccgccaucaacaagggcauccuggugaccgugaaccccaucgccagcaccaacgacgacgaggugcugaucgaggugaacccccccuucggcgacagcuacaucaucgugggcagaggcgacagcagacugaccuaccaguggcacaaggagggcagcagcaucggcaagcuguucacccagaccaugaagggcguggagagacuggccgugaugggcgacaccgccugggacuucagcagcgccggcggcuucuucaccagcgugggcaagggcauccacaccguguucggcagcgccuuccagggccuguucggcggccugaacuggaucaccaaggugaucaugggcgccgugcugaucugggugggcaucaacaccagaaacaugaccaugagcaugagcaugauccuggugggcgugaucaugauguuccugagccugggcgugggcgccugaggacuaguaauaaggaaacuguaugaaugucugugggcaggaagugaagagauccuucuguaaagguuuuuggaauuaugucugcugaauaauaaacuuuuuugaaauaauaaaucugguagaaaaaugagaucuaaaaaaaaaaaaaaaaaaaaaaaaaaaaaaaaaaaaaaaaaaaaaaaaaaaaaaaaaaaaaaaaugcaucccccccccccccccccccccccccccccccaaaggcucuuuucagagccaccagaauu

SEQ ID NO: 988 - RNA, 2513 nt, Artificial Sequence
  mRNA product Design h-4 comprising derived and/or modified sequence from YFV__NC_002031.1__SSjev-prME-XX (polyprotein: aa122-788) (opt4)
gggagagggcgcuuggcuugcaaggacccugagcugcggcauugaagcacacccaacccaacucgacugaagucagccucacugaaccggaucugagaaucuucucucucugggcuugccagggcucuccgaaccuagcuagcauccucuucaauuccaacuagaaagcuuaccaugggcaagagaagcgccggcagcaucauguggcuggccagccuggccguggugaucgccugcgccggcgccgugacccuggugagaaagaacagauggcugcugcugaacgugaccagcgaggaccugggcaagaccuucagcgugggcaccggcaacugcaccaccaacauccuggaggccaaguacuggugccccgacagcauggaguacaacugccccaaccugagccccagagaggagcccgacgacaucgacugcuggugcuacggcguggagaacgugagaguggccuacggcaagugcgacagcgccggcagaagcagaagaagcagaagagccaucgaccugcccacccacgagaaccacggccugaagaccagacaggagaaguggaugaccggcagaaugggcgagagacagcugcagaagaucgagagaugguucgugagaaaccccuucuucgccgugaccgcccugaccaucgccuaccuggugggcagcaacaugacccagagaguggugaucgcccugcuggugcuggccgugggccccgccuacagcgcccacugcaucggcaucaccgacagagacuucaucgagggcgugcacggcggcaccugggugagcgccacccuggagcaggacaagugcgugaccgugauggcccccgacaagcccagccuggacaucagccuggagaccguggccaucgacagacccgccgaggugagaaaggugugcuacaacgccgugcugacccacgugaagaucaacgacaagugccccagcaccggcgaggcccaccuggccgaggagaacgagggcgacaacgccugcaagagaaccuacagcgacagaggcuggggcaacggcugcggccuguucggcaagggcagcaucguggccugcgccaaguucaccugcgccaagagcaugagccuguucgagguggaccagaccaagauccaguacgugaucagagcccagcugcacgugggcgccaagcaggagaacuggaacaccgacaucaagacccugaaguucgacgcccugagcggcagccaggagguggaguucaucggcuacggcaaggccacccuggagugccaggugcagaccgccguggacuucggcaacagcuacaucgccgagauggagaccgagagcuggaucguggacagacagugggcccaggaccugacccugcccuggcagagcggcagcggcggcguguggagagagaugcaccaccugguggaguucgagcccccccacgccgccaccaucagagugcuggcccugggcaaccaggagggcagccugaagaccgcccugaccggcgccaugagagugaccaaggacaccaacgacaacaaccuguacaagcugcacggcggccacgugagcugcagagugaagcugagcgcccugacccugaagggcaccagcuacaagaucugcaccgacaagauguucuucgugaagaaccccaccgacaccggccacggcaccguggugaugcaggugaaggugagcaagggcgcccccugcagaauccccgugaucguggccgacgaccugaccgccgccaucaacaagggcauccuggugaccgugaaccccaucgccagcaccaacgacgacgaggugcugaucgaggugaacccccccuucggcgacagcuacaucaucgugggcagaggcgacagcagacugaccuaccaguggcacaaggagggcagcagcaucggcaagcuguucacccagaccaugaagggcguggagagacuggccgugaugggcgacaccgccugggacuucagcagcgccggcggcuucuucaccagcgugggcaagggcauccacaccguguucggcagcgccuuccagggccuguucggcggccugaacuggaucaccaaggugaucaugggcgccgugcugaucugggugggcaucaacaccagaaacaugaccaugagcaugagcaugauccuggugggcgugaucaugauguuccugagccugggcgugggcgccgaccagggcugcgccaucaacuucggcaagugaggacuaguaauaaggaaacuguaugaaugucugugggcaggaagugaagagauccuucuguaaagguuuuuggaauuaugucugcugaauaauaaacuuuuuugaaauaauaaaucugguagaaaaaugagaucuaaaaaaaaaaaaaaaaaaaaaaaaaaaaaaaaaaaaaaaaaaaaaaaaaaaaaaaaaaaaaaaaugcaucccccccccccccccccccccccccccccccaaaggcucuuuucagagccaccagaauu

SEQ ID NO: 989 - RNA, 2483 nt, Artificial Sequence
  mRNA product Design h-4 comprising derived and/or modified sequence from YFV__NC_002031.1__SSjev-prME (polyprotein: aa122-778) (opt4)
gggagagggcgcuuggcuugcaaggacccugagcugcggcauugaagcacacccaacccaacucgacugaagucagccucacugaaccggaucugagaaucuucucucucugggcuugccagggcucuccgaaccuagcuagcauccucuucaauuccaacuagaaagcuuaccaugggcaagagaagcgccggcagcaucauguggcuggccagccuggccguggugaucgccugcgccggcgccgugacccuggugagaaagaacagauggcugcugcugaacgugaccagcgaggaccugggcaagaccuucagcgugggcaccggcaacugcaccaccaacauccuggaggccaaguacuggugccccgacagcauggaguacaacugccccaaccugagccccagagaggagcccgacgacaucgacugcuggugcuacggcguggagaacgugagaguggccuacggcaagugcgacagcgccggcagaagcagaagaagcagaagagccaucgaccugcccacccacgagaaccacggccugaagaccagacaggagaaguggaugaccggcagaaugggcgagagacagcugcagaagaucgagagaugguucgugagaaaccccuucuucgccgugaccgcccugaccaucgccuaccuggugggcagcaacaugacccagagaguggugaucgcccugcuggugcuggccgugggccccgccuacagcgcccacugcaucggcaucaccgacagagacuucaucgagggcgugcacggcggcaccugggugagcgccacccuggagcaggacaagugcgugaccgugauggcccccgacaagcccagccuggacaucagccuggagaccguggccaucgacagacccgccgaggugagaaaggugugcuacaacgccgugcugacccacgugaagaucaacgacaagugccccagcaccggcgaggcccaccuggccgaggagaacgagggcgacaacgccugcaagagaaccuacagcgacagaggcuggggcaacggcugcggccuguucggcaagggcagcaucguggccugcgccaaguucaccugcgccaagagcaugagccuguucgagguggaccagaccaagauccaguacgugaucagagcccagcugcacgugggcgccaagcaggagaacuggaacaccgacaucaagacccugaaguucgacgcccugagcggcagccaggagguggaguucaucggcuacggcaaggccacccuggagugccaggugcagaccgccguggacuucggcaacagcuacaucgccgagauggagaccgagagcuggaucguggacagacagugggcccaggaccugacccugcccuggcagagcggcagcggcggcguguggagagagaugcaccaccugguggaguucgagcccccccacgccgccaccaucagagugcuggcccugggcaaccaggagggcagccugaagaccgcccugaccggcgccaugagagugaccaaggacaccaacgacaacaaccuguacaagcugcacggcggccacgugagcugcagagugaagcugagcgcccugacccugaagggcaccagcuacaagaucugcaccgacaagauguucuucgugaagaaccccaccgacaccggccacggcaccguggugaugcaggugaaggugagcaagggcgcccccugcagaauccccgugaucguggccgacgaccugaccgccgccaucaacaagggcauccuggugaccgugaaccccaucgccagcaccaacgacgacgaggugcugaucgaggugaacccccccuucggcgacagcuacaucaucgugggcagaggcgacagcagacugaccuaccaguggcacaaggagggcagcagcaucggcaagcuguucacccagaccaugaagggcguggagagacuggccgugaugggcgacaccgccugggacuucagcagcgccggcggcuucuucaccagcgugggcaagggcauccacaccguguucggcagcgccuuccagggccuguucggcggccugaacuggaucaccaaggugaucaugggcgccgugcugaucugggugggcaucaacaccagaaacaugaccaugagcaugagcaugauccuggugggcgugaucaugauguuccugagccugggcgugggcgccugaggacuaguaauaaggaaacuguaugaaugucugugggcaggaagugaagagauccuucuguaaagguuuuuggaauuaugucugcugaauaauaaacuuuuuugaaauaauaaaucugguagaaaaaugagaucuaaaaaaaaaaaaaaaaaaaaaaaaaaaaaaaaaaaaaaaaaaaaaaaaaaaaaaaaaaaaaaaaugcaucccccccccccccccccccccccccccccccaaaggcucuuuucagagccaccagaauu

SEQ ID NO: 990 - RNA, 2531 nt, Artificial Sequence
  mRNA product Design h-4 comprising derived and/or modified sequence from YFV__NC_002031.1__X-SS-prME-XX (polyprotein: aa92-788) (opt5)
gggagagggcgcuuggcuugcaaggacccugagcugcggcauugaagcacacccaacccaacucgacugaagucagccucacugaaccggaucugagaaucuucucucucugggcuugccagggcucuccgaaccuagcuagcauccucuucaauuccaacuagaaagcuuaccaugagaggccugagcucccggaagcgcagaucucacgacgugcucaccguccaguuccugauccuugggaugcugcucaugacaggaggcguuacgcuggugcggaaaaaccgcuggcuucugcucaaugugaccagcgaggaucuggggaagacauuuuccgucggaaccggcaacugcacaaccaauauucuggaagccaaauacuggugucccgacucuauggaguauaacugcccuaaucucagcccgagagaagaacccgaugacaucgauuguuggugcuacgggguggaaaacguucggguggcuuauggaaagugugacuccgccggccgcucuagacggagccgcagagcgauugaucugccuacacaugagaaucacggccuuaaaacccggcaagagaaguggaugacggggcgcaugggagaaagacagcugcagaagaucgagcggugguucguccgcaaccccuuuuucgcugugaccgcccucacaauugccuaccugguuggcuccaauaugacccagagaguggucaucgcccuucuggugcucgcuguggggccugcuuauagcgcccauugcaucggaauuacagaccgggauuuuaucgaaggcguccacgggggaaccuggguuucugcgacgcuggagcaagacaaaugugugacagugauggcccccgauaagccuucccuggacauuagccucgagaccgucgcuaucgauagaccggccgaagugcgcaaaguuugcuacaacgcugugcugacacaugucaagauuaaugacaaaugucccucuaccggcgaggcccaccuugcggaagagaacgaaggcgacaaugccugcaagcggaccuauuccgauagaggguggggaaacggcugugggcuguucggaaagggcagcaucguggcuugcgccaaauuuacaugcgcuaagucuaugucccucuucgagguugaccagacgaaaauucaguacgugauccgcgcccagcugcacgucggggccaagcaagagaauuggaacaccgauaucaaaacacuuaaguuugacgcucugagcggaucccaggaaguggaguucauuggcuacggcaaagcgacccucgaaugucagguccagacagccguggauuuugggaacucuuauaucgcugagauggaaaccgagagcuggauuguugaccggcaaugggcccaggaucugacgcugccuuggcaguccggaagcggcgggguguggagagagaugcaucaccucgucgaguucgagcccccucaugccgcuacaauccgcgugcuggcccuuggaaaucaagaaggcucucugaagaccgcgcucaccggggcuaugcggguuacaaaggacaccaacgauaauaaccuguacaaacuucacggcggacacguguccugcagagucaagcugagcgcccucacacugaaaggcacgucuuauaagauuuguaccgacaaaauguuuuucgugaagaaucccacagauaccgggcauggaacagugguuaugcaggucaaggugagcaaaggcgccccgugccgcaucccugugaucgucgcugacgaccugaccgccgcuauuaacaaggggauccucgugacgguuaaucccauugccuccaccaacgaugacgaggugcugaucgaagucaauccucccuucggagauucuuacauuaucgugggccggggagacagcagacuuacauaucaguggcacaaagagggcuccagcaucggaaagcuguuuacccagacaaugaaaggcguugagcgccucgcggugaugggggauaccgccugggacuucucuuccgcuggaggcuuuuucacgagcgucgggaaggggauucauacaguguuuggcucugccuuccaagggcuguuuggcggacugaacuggaucaccaagguuauuaugggcgcugugcuuaucugggucgggauuaauacacggaacaugaccauguccaugagcaugauccucgugggagugauuaugauguuccugucccugggcgucggggccgaucagggaugugcgaucaauuuuggcaaaugaggacuaguaauaaggaaacuguaugaaugucugugggcaggaagugaagagauccuucuguaaagguuuuuggaauuaugucugcugaauaauaaacuuuuuugaaauaauaaaucugguagaaaaaugagaucuaaaaaaaaaaaaaaaaaaaaaaaaaaaaaaaaaaaaaaaaaaaaaaaaaaaaaaaaaaaaaaaaugcaucccccccccccccccccccccccccccccccaaaggcucuuuucagagccaccagaauu

SEQ ID NO: 991 - RNA, 2468 nt, Artificial Sequence
  mRNA product Design h-4 comprising derived and/or modified sequence from YFV__NC_002031.1__SS-prME (polyprotein: M,aa104-778) (opt5)
gggagagggcgcuuggcuugcaaggacccugagcugcggcauugaagcacacccaacccaacucgacugaagucagccucacugaaccggaucugagaaucuucucucucugggcuugccagggcucuccgaaccuagcuagcauccucuucaauuccaacuagaaagcuuaccauggacgugcugaccguccaguuccucauccugggcaugcuucugaugacagggggaguuacgcucgugagaaagaaccgguggcugcuucugaaugugaccagcgaggaucucggcaaaacauuuuccgucgggaccggaaacugcacaaccaauauucuggaagccaaguacuggugucccgacucuauggaguauaacugcccuaaucugagcccgcgcgaagaacccgaugacaucgauuguuggugcuacggcguggaaaacguuagaguggcuuaugggaaaugugacuccgccggacggucucgcagaagccggcgcgcgauugaucucccuacacacgagaaucauggccugaagaccagacaagagaaauggaugacgggccggaugggggaacgccagcuucagaagaucgagagaugguucguccggaaccccuuuuucgcugugaccgcccugacaauugccuaccucguuggauccaauaugacccagcgcguggucaucgcucugcuugugcuggccgugggcccugcuuauucugcccacugcaucgggauuacagacagagauuuuaucgaaggaguccauggcgggaccuggguuagcgcgacgcucgagcaagacaagugugugacagugauggcccccgauaaaccuucccuggacauuagccuggagaccgucgcuaucgaucggccggccgaagugcgcaagguuugcuacaacgcugugcucacacacgucaaaauuaaugacaagugucccucuaccggagaggcccaucuggcggaagagaacgaaggcgacaaugccugcaaaagaaccuauuccgaucggggcugggggaacggauguggccuuuucgggaagggaagcaucguggcuugcgccaaguuuacaugcgcuaaaucuaugucccuguucgagguugaccagacgaagauucaguacgugaucagagcccagcuccacgucggcgccaaacaagagaauuggaacaccgauaucaagacacugaaauuugacgcucuuagcgggucucaggaaguggaguucauuggauacggcaaggcgacccuggaaugucagguccagacagccguggauuuuggcaacuccuauaucgcugagauggaaaccgagagcuggauuguugaccgccaaugggcccaggaucucacgcugccuuggcaguccgggucuggaggcguguggcgggagaugcaccaucuggucgaguucgagcccccucacgccgcuacaaucagagugcucgcccuggggaaucaagaaggaagccuuaaaaccgcgcugaccggcgcuaugcgcguuacaaaggacaccaacgauaauaaccucuacaagcugcaugggggccacguguccugccgggucaaacuuagcgcccugacacucaagggaacgucuuauaaaauuuguaccgacaagauguuuuucgugaaaaaucccacagauaccggccacgggacagugguuaugcaggucaagguguccaagggagccccgugcagaaucccugugaucgucgcugacgaccugaccgccgcuauuaacaaaggcauccuggugacgguuaaucccauugccagcaccaacgaugacgaggugcucaucgaagucaauccucccuucggggauucuuacauuaucgugggacgcggcgacagccggcugacauaucaguggcauaaggagggguccucuaucggcaaacuuuuuacccagacaaugaagggaguugagagacuggcggugaugggcgauaccgccugggacuucagcuccgcugggggauuuuucacgagcgucggcaaagggauucacacaguguuuggaucugccuuccaaggccucuuugggggccugaacuggaucaccaagguuauuaugggagcugugcugaucugggucggcauuaauacacgcaacaugaccauguccaugagcaugauccuugugggggugauuaugauguuccucucucugggagucggcgccugaggacuaguaauaaggaaacuguaugaaugucugugggcaggaagugaagagauccuucuguaaagguuuuuggaauuaugucugcugaauaauaaacuuuuuugaaauaauaaaucugguagaaaaaugagaucuaaaaaaaaaaaaaaaaaaaaaaaaaaaaaaaaaaaaaaaaaaaaaaaaaaaaaaaaaaaaaaaaugcaucccccccccccccccccccccccccccccccaaaggcucuuuucagagccaccagaauu

SEQ ID NO: 992 - RNA, 2495 nt, Artificial Sequence
  mRNA product Design h-4 comprising derived and/or modified sequence from YFV__NC_002031.1__SSIgE-prME-XX (polyprotein: aa122-788) (opt5)
gggagagggcgcuuggcuugcaaggacccugagcugcggcauugaagcacacccaacccaacucgacugaagucagccucacugaaccggaucugagaaucuucucucucugggcuugccagggcucuccgaaccuagcuagcauccucuucaauuccaacuagaaagcuuaccauggacuggaccuggauccuguuccucguggccgcugccacaagaguccacagcguuacgcuggugcggaaaaaccgcuggcuucugcucaaugugaccagcgaggaucuggggaagacauuuuccgucggaaccggcaacugcacaaccaauauucuggaagccaaauacuggugucccgacucuauggaguauaacugcccuaaucucagcccgagagaagaacccgaugacaucgauuguuggugcuacgggguggaaaacguucggguggcuuauggaaagugugacuccgccggccgcucuagacggagccgcagagcgauugaucugccuacacaugagaaucacggccuuaaaacccggcaagagaaguggaugacggggcgcaugggagaaagacagcugcagaagaucgagcggugguucguccgcaaccccuuuuucgcugugaccgcccucacaauugccuaccugguuggcuccaauaugacccagagaguggucaucgcccuucuggugcucgcuguggggccugcuuauagcgcccauugcaucggaauuacagaccgggauuuuaucgaaggcguccacgggggaaccuggguuucugcgacgcuggagcaagacaaaugugugacagugauggcccccgauaagccuucccuggacauuagccucgagaccgucgcuaucgauagaccggccgaagugcgcaaaguuugcuacaacgcugugcugacacaugucaagauuaaugacaaaugucccucuaccggcgaggcccaccuugcggaagagaacgaaggcgacaaugccugcaagcggaccuauuccgauagaggguggggaaacggcugugggcuguucggaaagggcagcaucguggcuugcgccaaauuuacaugcgcuaagucuaugucccucuucgagguugaccagacgaaaauucaguacgugauccgcgcccagcugcacgucggggccaagcaagagaauuggaacaccgauaucaaaacacuuaaguuugacgcucugagcggaucccaggaaguggaguucauuggcuacggcaaagcgacccucgaaugucagguccagacagccguggauuuugggaacucuuauaucgcugagauggaaaccgagagcuggauuguugaccggcaaugggcccaggaucugacgcugccuuggcaguccggaagcggcgggguguggagagagaugcaucaccucgucgaguucgagcccccucaugccgcuacaauccgcgugcuggcccuuggaaaucaagaaggcucucugaagaccgcgcucaccggggcuaugcggguuacaaaggacaccaacgauaauaaccuguacaaacuucacggcggacacguguccugcagagucaagcugagcgcccucacacugaaaggcacgucuuauaagauuuguaccgacaaaauguuuuucgugaagaaucccacagauaccgggcauggaacagugguuaugcaggucaaggugagcaaaggcgccccgugccgcaucccugugaucgucgcugacgaccugaccgccgcuauuaacaaggggauccucgugacgguuaaucccauugccuccaccaacgaugacgaggugcugaucgaagucaauccucccuucggagauucuuacauuaucgugggccggggagacagcagacuuacauaucaguggcacaaagagggcuccagcaucggaaagcuguuuacccagacaaugaaaggcguugagcgccucgcggugaugggggauaccgccugggacuucucuuccgcuggaggcuuuuucacgagcgucgggaaggggauucauacaguguuuggcucugccuuccaagggcuguuuggcggacugaacuggaucaccaagguuauuaugggcgcugugcuuaucugggucgggauuaauacacggaacaugaccauguccaugagcaugauccucgugggagugauuaugauguuccugucccugggcgucggggccgaucagggaugugcgaucaauuuuggcaaaugaggacuaguaauaaggaaacuguaugaaugucugugggcaggaagugaagagauccuucuguaaagguuuuuggaauuaugucugcugaauaauaaacuuuuuugaaauaauaaaucugguagaaaaaugagaucuaaaaaaaaaaaaaaaaaaaaaaaaaaaaaaaaaaaaaaaaaaaaaaaaaaaaaaaaaaaaaaaaugcaucccccccccccccccccccccccccccccccaaaggcucuuuucagagccaccagaauu

SEQ ID NO: 993 - RNA, 2465 nt, Artificial Sequence
  mRNA product Design h-4 comprising derived and/or modified sequence from YFV__NC_002031.1__SSIgE-prME (polyprotein: aa122-778) (opt5)
gggagagggcgcuuggcuugcaaggacccugagcugcggcauugaagcacacccaacccaacucgacugaagucagccucacugaaccggaucugagaaucuucucucucugggcuugccagggcucuccgaaccuagcuagcauccucuucaauuccaacuagaaagcuuaccauggacuggaccuggauccuguuccucguggccgcugccacaagaguccacagcgugacccuggucagaaagaaccgguggcuccugcuuaauguuacaagcgaggaccugggcaaaacguucuccguggggaccggaaacugcacaaccaauauccucgaagccaaguacuggugucccgauucuauggaguauaacugcccuaaucugagcccgcgcgaggaacccgacgauauugacuguuggugcuacggcguggaaaacgucagaguggcuuaugggaaaugugauuccgccggacggucucgcagaagccggcgcgcgaucgaccuuccuacacacgagaaucauggccugaagaccagacaggagaaauggaugacagggcggaugggagaacgccaacuccagaagauugagagaugguuuguucggaaccccuucuuugcugugaccgcccugacgaucgccuaccuggucggcuccaauaugacccagcgcgugguuauugcucuccuggugcuugccgucggcccugcuuauucugcccacugcaucgggaucacagauagagacuucauugaaggagugcauggcgggaccugggugagcgcgacacuggagcaggauaagugugucaccguuauggcccccgacaaaccuucccucgauaucagccuggagacgguggcuauugaccggccggccgaagugcgcaaggucugcuacaacgcugugcuuacacacguuaaaaucaaugauaagugucccucuaccggagaggcccaucuggcggaagagaacgaaggcgacaaugccugcaaaagaacauauuccgaccggggguggggaaacggcuguggccucuuugggaagggaagcauuguggcuugcgccaaguuuaccugcgcuaaaucuaugucccuguucgaggucgaucaaaccaagauccaguacgugauuagagcccagcugcacguuggcgccaaacaggagaauuggaacacagacaucaagacgcucaaauucgaugcucugagcgggucucaagaaguggaguuuaucggauacggcaaggcgacccuugaaugucagguccagacagccguggacuucgggaacuccuauauugcugagauggaaaccgagagcuggaucgucgaucgccagugggcccaagaccugacacucccuuggcaguccggaucuggcggcguguggcgggagaugcaccaucugguugaauuugagcccccucacgccgcuaccauuagagugcuugcccuggggaaucaggaaggaagccucaaaacggcgcugacaggcgcuaugcgcgucaccaaggauaccaacgacaauaaccuguacaagcuccaugggggacacguguccugccggguuaaacugagcgcccuuacacugaagggcaccucuuauaaaaucuguacagauaagauguucuuugugaaaaaucccacggacaccgggcacggcacagucgugaugcaagugaagguuuccaagggagccccgugccgcauuccugucaucguggcugaugaccucaccgccgcuaucaacaaaggcauucuggugacagucaaucccaucgccagcaccaacgacgaugaggugcuuauugaaguuaauccucccuucggggacucuuacaucauugugggaagaggcgauagccggcugacguaucaguggcauaaggagggguccucuaucggaaaacucuucacccagacaaugaagggcgucgagagacuggcggugaugggggacaccgccugggauuuuagcuccgcuggcggauucuuuacaagcguuggcaaagggauccacaccguguucggaucugccuuucagggccuguucgggggacucaacuggauuacgaaggucaucaugggcgcugugcugauuuggguugggaucaauacacgcaacaugaccauguccaugagcaugauucuugugggcgucaucaugauguuucugucucucggagugggcgccugaggacuaguaauaaggaaacuguaugaaugucugugggcaggaagugaagagauccuucuguaaagguuuuuggaauuaugucugcugaauaauaaacuuuuuugaaauaauaaaucugguagaaaaaugagaucuaaaaaaaaaaaaaaaaaaaaaaaaaaaaaaaaaaaaaaaaaaaaaaaaaaaaaaaaaaaaaaaaugcaucccccccccccccccccccccccccccccccaaaggcucuuuucagagccaccagaauu

SEQ ID NO: 994 - RNA, 2513 nt, Artificial Sequence
  mRNA product Design h-4 comprising derived and/or modified sequence from YFV__NC_002031.1__SSjev-prME-XX (polyprotein: aa122-788) (opt5)
gggagagggcgcuuggcuugcaaggacccugagcugcggcauugaagcacacccaacccaacucgacugaagucagccucacugaaccggaucugagaaucuucucucucugggcuugccagggcucuccgaaccuagcuagcauccucuucaauuccaacuagaaagcuuaccaugggcaagagaagcgccggguccaucauguggcuggcuucucucgccguggucauugcgugcgcuggagccguuacgcuggugcggaaaaaccgcuggcuucugcucaaugugaccagcgaggaucuggggaagacauuuuccgucggaaccggcaacugcacaaccaauauucuggaagccaaauacuggugucccgacucuauggaguauaacugcccuaaucucagcccgagagaagaacccgaugacaucgauuguuggugcuacgggguggaaaacguucggguggcuuauggaaagugugacuccgccggccgcucuagacggagccgcagagcgauugaucugccuacacaugagaaucacggccuuaaaacccggcaagagaaguggaugacggggcgcaugggagaaagacagcugcagaagaucgagcggugguucguccgcaaccccuuuuucgcugugaccgcccucacaauugccuaccugguuggcuccaauaugacccagagaguggucaucgcccuucuggugcucgcuguggggccugcuuauagcgcccauugcaucggaauuacagaccgggauuuuaucgaaggcguccacgggggaaccuggguuucugcgacgcuggagcaagacaaaugugugacagugauggcccccgauaagccuucccuggacauuagccucgagaccgucgcuaucgauagaccggccgaagugcgcaaaguuugcuacaacgcugugcugacacaugucaagauuaaugacaaaugucccucuaccggcgaggcccaccuugcggaagagaacgaaggcgacaaugccugcaagcggaccuauuccgauagaggguggggaaacggcugugggcuguucggaaagggcagcaucguggcuugcgccaaauuuacaugcgcuaagucuaugucccucuucgagguugaccagacgaaaauucaguacgugauccgcgcccagcugcacgucggggccaagcaagagaauuggaacaccgauaucaaaacacuuaaguuugacgcucugagcggaucccaggaaguggaguucauuggcuacggcaaagcgacccucgaaugucagguccagacagccguggauuuugggaacucuuauaucgcugagauggaaaccgagagcuggauuguugaccggcaaugggcccaggaucugacgcugccuuggcaguccggaagcggcgggguguggagagagaugcaucaccucgucgaguucgagcccccucaugccgcuacaauccgcgugcuggcccuuggaaaucaagaaggcucucugaagaccgcgcucaccggggcuaugcggguuacaaaggacaccaacgauaauaaccuguacaaacuucacggcggacacguguccugcagagucaagcugagcgcccucacacugaaaggcacgucuuauaagauuuguaccgacaaaauguuuuucgugaagaaucccacagauaccgggcauggaacagugguuaugcaggucaaggugagcaaaggcgccccgugccgcaucccugugaucgucgcugacgaccugaccgccgcuauuaacaaggggauccucgugacgguuaaucccauugccuccaccaacgaugacgaggugcugaucgaagucaauccucccuucggagauucuuacauuaucgugggccggggagacagcagacuuacauaucaguggcacaaagagggcuccagcaucggaaagcuguuuacccagacaaugaaaggcguugagcgccucgcggugaugggggauaccgccugggacuucucuuccgcuggaggcuuuuucacgagcgucgggaaggggauucauacaguguuuggcucugccuuccaagggcuguuuggcggacugaacuggaucaccaagguuauuaugggcgcugugcuuaucugggucgggauuaauacacggaacaugaccauguccaugagcaugauccucgugggagugauuaugauguuccugucccugggcgucggggccgaucagggaugugcgaucaauuuuggcaaaugaggacuaguaauaaggaaacuguaugaaugucugugggcaggaagugaagagauccuucuguaaagguuuuuggaauuaugucugcugaauaauaaacuuuuuugaaauaauaaaucugguagaaaaaugagaucuaaaaaaaaaaaaaaaaaaaaaaaaaaaaaaaaaaaaaaaaaaaaaaaaaaaaaaaaaaaaaaaaugcaucccccccccccccccccccccccccccccccaaaggcucuuuucagagccaccagaauu

SEQ ID NO: 995 - RNA, 2483 nt, Artificial Sequence
  mRNA product Design h-4 comprising derived and/or modified sequence from YFV__NC_002031.1__SSjev-prME (polyprotein: aa122-778) (opt5)
gggagagggcgcuuggcuugcaaggacccugagcugcggcauugaagcacacccaacccaacucgacugaagucagccucacugaaccggaucugagaaucuucucucucugggcuugccagggcucuccgaaccuagcuagcauccucuucaauuccaacuagaaagcuuaccaugggcaagagaagcgccggguccaucauguggcuggcuucucucgccguggucauugcgugcgcuggagccgugacccuggucagaaagaaccgguggcuccugcuuaauguuacaagcgaggaccugggcaaaacguucuccguggggaccggaaacugcacaaccaauauccucgaagccaaguacuggugucccgauucuauggaguauaacugcccuaaucugagcccgcgcgaggaacccgacgauauugacuguuggugcuacggcguggaaaacgucagaguggcuuaugggaaaugugauuccgccggacggucucgcagaagccggcgcgcgaucgaccuuccuacacacgagaaucauggccugaagaccagacaggagaaauggaugacagggcggaugggagaacgccaacuccagaagauugagagaugguuuguucggaaccccuucuuugcugugaccgcccugacgaucgccuaccuggucggcuccaauaugacccagcgcgugguuauugcucuccuggugcuugccgucggcccugcuuauucugcccacugcaucgggaucacagauagagacuucauugaaggagugcauggcgggaccugggugagcgcgacacuggagcaggauaagugugucaccguuauggcccccgacaaaccuucccucgauaucagccuggagacgguggcuauugaccggccggccgaagugcgcaaggucugcuacaacgcugugcuuacacacguuaaaaucaaugauaagugucccucuaccggagaggcccaucuggcggaagagaacgaaggcgacaaugccugcaaaagaacauauuccgaccggggguggggaaacggcuguggccucuuugggaagggaagcauuguggcuugcgccaaguuuaccugcgcuaaaucuaugucccuguucgaggucgaucaaaccaagauccaguacgugauuagagcccagcugcacguuggcgccaaacaggagaauuggaacacagacaucaagacgcucaaauucgaugcucugagcgggucucaagaaguggaguuuaucggauacggcaaggcgacccuugaaugucagguccagacagccguggacuucgggaacuccuauauugcugagauggaaaccgagagcuggaucgucgaucgccagugggcccaagaccugacacucccuuggcaguccggaucuggcggcguguggcgggagaugcaccaucugguugaauuugagcccccucacgccgcuaccauuagagugcuugcccuggggaaucaggaaggaagccucaaaacggcgcugacaggcgcuaugcgcgucaccaaggauaccaacgacaauaaccuguacaagcuccaugggggacacguguccugccggguuaaacugagcgcccuuacacugaagggcaccucuuauaaaaucuguacagauaagauguucuuugugaaaaaucccacggacaccgggcacggcacagucgugaugcaagugaagguuuccaagggagccccgugccgcauuccugucaucguggcugaugaccucaccgccgcuaucaacaaaggcauucuggugacagucaaucccaucgccagcaccaacgacgaugaggugcuuauugaaguuaauccucccuucggggacucuuacaucauugugggaagaggcgauagccggcugacguaucaguggcauaaggagggguccucuaucggaaaacucuucacccagacaaugaagggcgucgagagacuggcggugaugggggacaccgccugggauuuuagcuccgcuggcggauucuuuacaagcguuggcaaagggauccacaccguguucggaucugccuuucagggccuguucgggggacucaacuggauuacgaaggucaucaugggcgcugugcugauuuggguugggaucaauacacgcaacaugaccauguccaugagcaugauucuugugggcgucaucaugauguuucugucucucggagugggcgccugaggacuaguaauaaggaaacuguaugaaugucugugggcaggaagugaagagauccuucuguaaagguuuuuggaauuaugucugcugaauaauaaacuuuuuugaaauaauaaaucugguagaaaaaugagaucuaaaaaaaaaaaaaaaaaaaaaaaaaaaaaaaaaaaaaaaaaaaaaaaaaaaaaaaaaaaaaaaaugcaucccccccccccccccccccccccccccccccaaaggcucuuuucagagccaccagaauu

SEQ ID NO: 996 - RNA, 2531 nt, Artificial Sequence
  mRNA product Design h-4 comprising derived and/or modified sequence from YFV__NC_002031.1__X-SS-prME-XX (polyprotein: aa92-788) (opt6)
gggagagggcgcuuggcuugcaaggacccugagcugcggcauugaagcacacccaacccaacucgacugaagucagccucacugaaccggaucugagaaucuucucucucugggcuugccagggcucuccgaaccuagcuagcauccucuucaauuccaacuagaaagcuuaccaugagaggauuaucaaguagaaaaagaagaucacaugauguacuaaccgugcaauuuuugaucuuagggaugcucuuaaugacaggagguguuacauuaguaagaaagaaucgauggcugcuuuuaaaugugacaucagaggauuuagggaaaacauuuucgguaggaacaggaaauuguacuacaaauauacuugaagcaaaauauuggugcccagacucuauggaauauaauuguccaaauuuaaguccuagagaagaaccugacgauauagauuguugguguuaugguguagaaaauguaagaguagcauacggcaaaugcgauagugcaggacguucuagacguucaaggagagccauagaucugcccacucacgaaaaucacggauugaaaacacgacaagaaaaauggaugacugggcgaaugggagaaagacaacuacagaaaauugaaagaugguucguuagaaauccauucuuugccguaacagcuuuaacaauagccuauuuaguagguaguaauaugacacaaagaguaguaauagcauugcuaguguuagcaguuggaccagcuuauagugcacauugcauaggaauaacagauagagacuuuauagaaggaguacacgggggaacuuggguaagugccacuuuagaacaagauaaauguguuacagugauggcgccagauaaaccaagucuggacauaaguuuggaaacaguagcgauugauagacccgcagaaguaagaaaaguuuguuauaaugcuguucuaacccauguuaaaauaaaugauaaaugcccuagcaccggagaagcccaucuagcagaagaaaaugaaggagauaacgcauguaaacgaacauacucagauagaggauggggcaacggauguggcuuguuuggaaaagguagcauaguagcaugcgcuaaauuuacaugcgcaaagucaaugucauuauuugaaguagaucaaacaaaaauacaauauguaauaagagcucaauuacacgugggugcaaaacaagaaaauuggaauacagacauaaagacacuaaaguucgacgcauuaaguggaucacaagagguagaauuuauaggguacggaaaagcgacuuuagagugucaaguccaaacagcaguagauuucgguaacucauacauagcagaaauggaaacugaaaguuggauaguagauagacaaugggcacaagacuugacacuaccuuggcaaucaggaagcggaggaguauggagagaaaugcaucauuuaguagaauuugaaccaccucaugcagcaacaauaagaguauuagcccuaggaaaccaagaaggaaguuuaaaaacagcacuaacaggagcuaugagaguaacaaaagauacaaaugacaacaaucuauacaaauuacacggaggacauguaagcugccggguaaaguugagcgcacuaacauuaaaaggaacgaguuauaaaauaugcacagauaaaauguucuuuguuaaaaauccuacagauaccggucauggaacaguaguaaugcaaguaaaaguaaguaaaggcgcucccuguagaauaccuguaauagucgcagacgauuuaaccgcagcaauaaauaaaggaauauuagucacgguaaacccaauagcgucaacaaaugaugaugaaguauuaauagaaguuaacccaccuuuuggagacaguuauauaauagucggaaggggugauaguagacuaacauaccaauggcauaaagaaggaagcucaauaggaaaauuauuuacucaaaccaugaaagguguagaaaggcuagcuguuaugggugacacagcaugggauuuuucaagcgcaggaggguucuuuacaucaguagguaaaggaauacauacaguauuuggaagugcauuucaaggauuauuuggugguuuaaauuggauaacaaaaguaauaaugggcgcaguuuuaauauggguagguauaaacacaagaaauaugacaaugucuaugaguaugauauuggucggaguaauaaugauguuuuuaucacuaggagugggugcagaucaagguugcgcuauuaauuuuggaaaaugaggacuaguaauaaggaaacuguaugaaugucugugggcaggaagugaagagauccuucuguaaagguuuuuggaauuaugucugcugaauaauaaacuuuuuugaaauaauaaaucugguagaaaaaugagaucuaaaaaaaaaaaaaaaaaaaaaaaaaaaaaaaaaaaaaaaaaaaaaaaaaaaaaaaaaaaaaaaaugcaucccccccccccccccccccccccccccccccaaaggcucuuuucagagccaccagaauu

SEQ ID NO: 997 - RNA, 2468 nt, Artificial Sequence
  mRNA product Design h-4 comprising derived and/or modified sequence from YFV__NC_002031.1__SS-prME (polyprotein: M,aa104-778) (opt6)
gggagagggcgcuuggcuugcaaggacccugagcugcggcauugaagcacacccaacccaacucgacugaagucagccucacugaaccggaucugagaaucuucucucucugggcuugccagggcucuccgaaccuagcuagcauccucuucaauuccaacuagaaagcuuaccauggauguucuaacaguacaauuuuuaauauuagggauguuauuaaugacaggaggcguaacauuaguacgaaagaaucgauggcuauuacuaaacguuacgucugaagauuuaggaaaaacauuuagcguaggaacaggaaauugcaccacgaauaucuuagaagcaaaauauugguguccagauaguauggaauacaauuguccaaauuuaaguccuagagaggaacccgacgauauagauugcugguguuacggaguggaaaauguaagaguagcauauggaaaaugugacagcgcagguagaaguagaagaucacgacgagcaauugaucuacccacucaugagaaccauggacuaaaaacaagacaagaaaaauggaugacagguagaaugggcgaaagacaauuacagaaaauagaaagaugguuuguacgaaauccuuucuuugcugucacugcauuaacuauagcuuauuuaguaggaaguaacaugacucaaagaguaguaauagcacuauuaguacuagcaguaggaccagcuuacagugcacacuguauagggauaacggauagagauuuuauagaaggaguacauggggguacaugggugucugccacuuuagaacaagacaaauguguuacaguuauggccccagauaaacccucuuuagacauaucauuagaaacuguagcaauagauagaccggcggaagugagaaagguauguuauaaugcaguacuaacccauguaaaaauuaaugacaaaugcccaucaacaggagaggcucaucuagcugaagaaaaugaaggagacaaugcuugcaaacguacauauucagacaggggguggggaaauggauguggauuauuugguaaagggucaauaguagcaugugcaaaauuuacaugcgcaaaaaguaugagcuuauuugaaguagaucaaacaaaaauccaauauguaauuagagcucaacuucacguaggagcaaaacaagagaauuggaacacagauauaaaaacauuaaaauuugacgcuuugucuggaagucaagaagucgaauuuauuggcuauggaaaggcaacauuagaaugccaaguucaaaccgcaguagauuuuggaaauucauacauagcagaaauggagacugaaaguuggauaguagauagacagugggcucaagaccuaacuuuaccauggcaaucaggaaguggugguguauggagagaaaugcaucauuuaguagaauuugaaccaccacaugcagcaacaauuagaguacuagcauuaggaaaucaagaagguaguuuaaagacagcgcuuaccggagcaaugagaguuacaaaagauacuaaugacaauaauuuauauaaacuucauggaggacauguuagcuguagagucaaauuaagugcauuaacacucaaaggaacaucauacaaaauauguacagauaaaauguuuuucgucaagaauccaacagauacaggacauggaacaguuguaaugcaaguaaaaguaucaaaaggagcaccuugcagaauaccaguaauaguagcagaugauuuaacagccgcaauuaauaaagggauauuaguaacaguaaacccuauagcaaguacaaaugaugaugaagucuugauagaaguaaauccaccauuuggagauucguauauaauagucggaagaggagauagucgauuaacauaucaauggcauaaagaagguucaucaauaggaaaauuauuuacacaaaccaugaaaggaguugaaagauuagcuguaaugggggacacagcuugggauuuuucuagcgcaggaggauucuuuacauccguaggaaaagguauacacacaguauuuggcucagcauuccaaggguuauuuggugguuuaaauuggauaacaaaagugauuaugggagcagugcuaaucuggguaggaauaaauacaagaaauaugacaaugaguaugagcaugauucucguaggaguaauaaugauguuccuuaguuugggaguuggcgcuugaggacuaguaauaaggaaacuguaugaaugucugugggcaggaagugaagagauccuucuguaaagguuuuuggaauuaugucugcugaauaauaaacuuuuuugaaauaauaaaucugguagaaaaaugagaucuaaaaaaaaaaaaaaaaaaaaaaaaaaaaaaaaaaaaaaaaaaaaaaaaaaaaaaaaaaaaaaaaugcaucccccccccccccccccccccccccccccccaaaggcucuuuucagagccaccagaauu

SEQ ID NO: 998 - RNA, 2495 nt, Artificial Sequence
  mRNA product Design h-4 comprising derived and/or modified sequence from YFV__NC_002031.1__SSIgE-prME-XX (polyprotein: aa122-788) (opt6)
gggagagggcgcuuggcuugcaaggacccugagcugcggcauugaagcacacccaacccaacucgacugaagucagccucacugaaccggaucugagaaucuucucucucugggcuugccagggcucuccgaaccuagcuagcauccucuucaauuccaacuagaaagcuuaccauggacuggacauggauauuauuuuuaguagcagcagcaacaagaguacauucaguuacauuaguaagaaagaaucgauggcugcuuuuaaaugugacaucagaggauuuagggaaaacauuuucgguaggaacaggaaauuguacuacaaauauacuugaagcaaaauauuggugcccagacucuauggaauauaauuguccaaauuuaaguccuagagaagaaccugacgauauagauuguugguguuaugguguagaaaauguaagaguagcauacggcaaaugcgauagugcaggacguucuagacguucaaggagagccauagaucugcccacucacgaaaaucacggauugaaaacacgacaagaaaaauggaugacugggcgaaugggagaaagacaacuacagaaaauugaaagaugguucguuagaaauccauucuuugccguaacagcuuuaacaauagccuauuuaguagguaguaauaugacacaaagaguaguaauagcauugcuaguguuagcaguuggaccagcuuauagugcacauugcauaggaauaacagauagagacuuuauagaaggaguacacgggggaacuuggguaagugccacuuuagaacaagauaaauguguuacagugauggcgccagauaaaccaagucuggacauaaguuuggaaacaguagcgauugauagacccgcagaaguaagaaaaguuuguuauaaugcuguucuaacccauguuaaaauaaaugauaaaugcccuagcaccggagaagcccaucuagcagaagaaaaugaaggagauaacgcauguaaacgaacauacucagauagaggauggggcaacggauguggcuuguuuggaaaagguagcauaguagcaugcgcuaaauuuacaugcgcaaagucaaugucauuauuugaaguagaucaaacaaaaauacaauauguaauaagagcucaauuacacgugggugcaaaacaagaaaauuggaauacagacauaaagacacuaaaguucgacgcauuaaguggaucacaagagguagaauuuauaggguacggaaaagcgacuuuagagugucaaguccaaacagcaguagauuucgguaacucauacauagcagaaauggaaacugaaaguuggauaguagauagacaaugggcacaagacuugacacuaccuuggcaaucaggaagcggaggaguauggagagaaaugcaucauuuaguagaauuugaaccaccucaugcagcaacaauaagaguauuagcccuaggaaaccaagaaggaaguuuaaaaacagcacuaacaggagcuaugagaguaacaaaagauacaaaugacaacaaucuauacaaauuacacggaggacauguaagcugccggguaaaguugagcgcacuaacauuaaaaggaacgaguuauaaaauaugcacagauaaaauguucuuuguuaaaaauccuacagauaccggucauggaacaguaguaaugcaaguaaaaguaaguaaaggcgcucccuguagaauaccuguaauagucgcagacgauuuaaccgcagcaauaaauaaaggaauauuagucacgguaaacccaauagcgucaacaaaugaugaugaaguauuaauagaaguuaacccaccuuuuggagacaguuauauaauagucggaaggggugauaguagacuaacauaccaauggcauaaagaaggaagcucaauaggaaaauuauuuacucaaaccaugaaagguguagaaaggcuagcuguuaugggugacacagcaugggauuuuucaagcgcaggaggguucuuuacaucaguagguaaaggaauacauacaguauuuggaagugcauuucaaggauuauuuggugguuuaaauuggauaacaaaaguaauaaugggcgcaguuuuaauauggguagguauaaacacaagaaauaugacaaugucuaugaguaugauauuggucggaguaauaaugauguuuuuaucacuaggagugggugcagaucaagguugcgcuauuaauuuuggaaaaugaggacuaguaauaaggaaacuguaugaaugucugugggcaggaagugaagagauccuucuguaaagguuuuuggaauuaugucugcugaauaauaaacuuuuuugaaauaauaaaucugguagaaaaaugagaucuaaaaaaaaaaaaaaaaaaaaaaaaaaaaaaaaaaaaaaaaaaaaaaaaaaaaaaaaaaaaaaaaugcaucccccccccccccccccccccccccccccccaaaggcucuuuucagagccaccagaauu

SEQ ID NO: 999 - RNA, 2465 nt, Artificial Sequence
  mRNA product Design h-4 comprising derived and/or modified sequence from YFV__NC_002031.1__SSIgE-prME (polyprotein: aa122-778) (opt6)
gggagagggcgcuuggcuugcaaggacccugagcugcggcauugaagcacacccaacccaacucgacugaagucagccucacugaaccggaucugagaaucuucucucucugggcuugccagggcucuccgaaccuagcuagcauccucuucaauuccaacuagaaagcuuaccauggacuggacauggauauuauuuuuaguagcagcagcaacaagaguacauucaguaacauuagucagaaagaacagaugguuauuacugaacguaacaagugaagacuuaggaaaaacauuuaguguaggcacaggaaauugcacaacaaauauacuugaagcaaaauauugguguccagauagcauggaauauaauuguccaaauuuaucaccuagagaggaacccgaugauauagauuguugguguuauggaguugaaaacgugcgaguagcauaugguaaaugugauagcgcaggaagaaguagaagaaguagaagggcaauagacuuaccaacucaugaaaaccauggauuaaaaacaagacaggaaaaauggaugacaggaagaaugggagaacgacaauuacagaaaauagaaagaugguucguaagaaauccauucuuugcaguaacagcauuaacaauagcauaucuaguuggaaguaacaugacucaaagaguaguaauagcauuguuaguacuagcaguaggaccggcuuauagcgcacauuguauagggauaacagauagagacuuuauagaaggagugcacgguggaacauggguuucagcaacgcuagagcaagauaaauguguaacgguaauggcgccggauaaaccaagccuugacauaucacuagaaacgguugcaaucgaucgaccagccgaaguaagaaaaguaugcuauaaugcggucuuaacacacguaaaaauaaaugauaaauguccuucaacgggagaagcacauuuagcagaagaaaacgaaggagacaacgcguguaaaagaacauauucagauaggggcuggggaaacggcugcgguuuauuuggaaaaggaaguauaguagcaugcgcaaaauuuacuugcgcaaaaaguaugaguuuauucgaaguugaucaaacaaagauacaauauguaauacgagcacaauuacauguaggugcaaagcaagaaaauuggaauacagacauaaaaacauugaaauuugacgcuuugaguggaucacaagaaguagaauuuauaggauacggaaaagcuacauuagaaugucaaguacaaacugcaguagauuuuggaaauucguauauagcagaaauggaaacugaaucauggauuguagauaggcaaugggcacaagauuuaaccuugccauggcaaagcggaagcggggguguauggcgggaaaugcaucauuuaguagaguucgaacccccacacgcggcuaccauaagaguacuagcauuaggaaaucaagaagggagucucaagacagcacucacaggugcaaugcgaguaacgaaagauacaaaugacaauaaucuauacaaacuacacggaggacauguaucuugcagaguaaaauuaucugcauuaacacuaaaagggacaaguuacaaaauuuguacagauaagauguucuuugucaaaaacccaacagacacgggacacggaacgguagucaugcaaguuaaaguaagcaaaggagcgccaugcagaauaccaguaaucgucgcagaugauuuaacagccgcaauaaauaaagguauauuaguaacgguaaauccaauagcgaguaccaaugaugaugaaguacuaauagaagugaacccaccauuuggugauagcuauauaauaguagggcgaggagauucaagauuaacauaucaauggcauaaagaagguaguaguauaggaaaauuauuuacacaaacuaugaaaggcguagaaagacuagcagucaugggagauacagcaugggauuucucaagugcaggcggauuuuucacaagcgucggaaaaggaauacauacaguguuugguagugcguuucaaggauuauucggaggacuaaauuggauaacgaaaguaauuaugggagcaguucucauaugggucggaauaaauacaaggaacaugacuaugaguaugagcaugauccuaguaggaguaauaaugauguuucuaagccuaggcguuggugcaugaggacuaguaauaaggaaacuguaugaaugucugugggcaggaagugaagagauccuucuguaaagguuuuuggaauuaugucugcugaauaauaaacuuuuuugaaauaauaaaucugguagaaaaaugagaucuaaaaaaaaaaaaaaaaaaaaaaaaaaaaaaaaaaaaaaaaaaaaaaaaaaaaaaaaaaaaaaaaugcaucccccccccccccccccccccccccccccccaaaggcucuuuucagagccaccagaauu

SEQ ID NO: 1000 - RNA, 2513 nt, Artificial Sequence
  mRNA product Design h-4 comprising derived and/or modified sequence from YFV__NC_002031.1__SSjev-prME-XX (polyprotein: aa122-788) (opt6)
gggagagggcgcuuggcuugcaaggacccugagcugcggcauugaagcacacccaacccaacucgacugaagucagccucacugaaccggaucugagaaucuucucucucugggcuugccagggcucuccgaaccuagcuagcauccucuucaauuccaacuagaaagcuuaccaugggaaaaagaagugcaggaaguauaaugugguuggcaaguuuagcaguaguaauagcaugugcaggagcaguuacauuaguaagaaagaaucgauggcugcuuuuaaaugugacaucagaggauuuagggaaaacauuuucgguaggaacaggaaauuguacuacaaauauacuugaagcaaaauauuggugcccagacucuauggaauauaauuguccaaauuuaaguccuagagaagaaccugacgauauagauuguugguguuaugguguagaaaauguaagaguagcauacggcaaaugcgauagugcaggacguucuagacguucaaggagagccauagaucugcccacucacgaaaaucacggauugaaaacacgacaagaaaaauggaugacugggcgaaugggagaaagacaacuacagaaaauugaaagaugguucguuagaaauccauucuuugccguaacagcuuuaacaauagccuauuuaguagguaguaauaugacacaaagaguaguaauagcauugcuaguguuagcaguuggaccagcuuauagugcacauugcauaggaauaacagauagagacuuuauagaaggaguacacgggggaacuuggguaagugccacuuuagaacaagauaaauguguuacagugauggcgccagauaaaccaagucuggacauaaguuuggaaacaguagcgauugauagacccgcagaaguaagaaaaguuuguuauaaugcuguucuaacccauguuaaaauaaaugauaaaugcccuagcaccggagaagcccaucuagcagaagaaaaugaaggagauaacgcauguaaacgaacauacucagauagaggauggggcaacggauguggcuuguuuggaaaagguagcauaguagcaugcgcuaaauuuacaugcgcaaagucaaugucauuauuugaaguagaucaaacaaaaauacaauauguaauaagagcucaauuacacgugggugcaaaacaagaaaauuggaauacagacauaaagacacuaaaguucgacgcauuaaguggaucacaagagguagaauuuauaggguacggaaaagcgacuuuagagugucaaguccaaacagcaguagauuucgguaacucauacauagcagaaauggaaacugaaaguuggauaguagauagacaaugggcacaagacuugacacuaccuuggcaaucaggaagcggaggaguauggagagaaaugcaucauuuaguagaauuugaaccaccucaugcagcaacaauaagaguauuagcccuaggaaaccaagaaggaaguuuaaaaacagcacuaacaggagcuaugagaguaacaaaagauacaaaugacaacaaucuauacaaauuacacggaggacauguaagcugccggguaaaguugagcgcacuaacauuaaaaggaacgaguuauaaaauaugcacagauaaaauguucuuuguuaaaaauccuacagauaccggucauggaacaguaguaaugcaaguaaaaguaaguaaaggcgcucccuguagaauaccuguaauagucgcagacgauuuaaccgcagcaauaaauaaaggaauauuagucacgguaaacccaauagcgucaacaaaugaugaugaaguauuaauagaaguuaacccaccuuuuggagacaguuauauaauagucggaaggggugauaguagacuaacauaccaauggcauaaagaaggaagcucaauaggaaaauuauuuacucaaaccaugaaagguguagaaaggcuagcuguuaugggugacacagcaugggauuuuucaagcgcaggaggguucuuuacaucaguagguaaaggaauacauacaguauuuggaagugcauuucaaggauuauuuggugguuuaaauuggauaacaaaaguaauaaugggcgcaguuuuaauauggguagguauaaacacaagaaauaugacaaugucuaugaguaugauauuggucggaguaauaaugauguuuuuaucacuaggagugggugcagaucaagguugcgcuauuaauuuuggaaaaugaggacuaguaauaaggaaacuguaugaaugucugugggcaggaagugaagagauccuucuguaaagguuuuuggaauuaugucugcugaauaauaaacuuuuuugaaauaauaaaucugguagaaaaaugagaucuaaaaaaaaaaaaaaaaaaaaaaaaaaaaaaaaaaaaaaaaaaaaaaaaaaaaaaaaaaaaaaaaugcaucccccccccccccccccccccccccccccccaaaggcucuuuucagagccaccagaauu

SEQ ID NO: 1001 - RNA, 2483 nt, Artificial Sequence
  mRNA product Design h-4 comprising derived and/or modified sequence from YFV__NC_002031.1__SSjev-prME (polyprotein: aa122-778) (opt6)
gggagagggcgcuuggcuugcaaggacccugagcugcggcauugaagcacacccaacccaacucgacugaagucagccucacugaaccggaucugagaaucuucucucucugggcuugccagggcucuccgaaccuagcuagcauccucuucaauuccaacuagaaagcuuaccaugggaaaaagaagugcaggaaguauaaugugguuggcaaguuuagcaguaguaauagcaugugcaggagcaguaacauuagucagaaagaacagaugguuauuacugaacguaacaagugaagacuuaggaaaaacauuuaguguaggcacaggaaauugcacaacaaauauacuugaagcaaaauauugguguccagauagcauggaauauaauuguccaaauuuaucaccuagagaggaacccgaugauauagauuguugguguuauggaguugaaaacgugcgaguagcauaugguaaaugugauagcgcaggaagaaguagaagaaguagaagggcaauagacuuaccaacucaugaaaaccauggauuaaaaacaagacaggaaaaauggaugacaggaagaaugggagaacgacaauuacagaaaauagaaagaugguucguaagaaauccauucuuugcaguaacagcauuaacaauagcauaucuaguuggaaguaacaugacucaaagaguaguaauagcauuguuaguacuagcaguaggaccggcuuauagcgcacauuguauagggauaacagauagagacuuuauagaaggagugcacgguggaacauggguuucagcaacgcuagagcaagauaaauguguaacgguaauggcgccggauaaaccaagccuugacauaucacuagaaacgguugcaaucgaucgaccagccgaaguaagaaaaguaugcuauaaugcggucuuaacacacguaaaaauaaaugauaaauguccuucaacgggagaagcacauuuagcagaagaaaacgaaggagacaacgcguguaaaagaacauauucagauaggggcuggggaaacggcugcgguuuauuuggaaaaggaaguauaguagcaugcgcaaaauuuacuugcgcaaaaaguaugaguuuauucgaaguugaucaaacaaagauacaauauguaauacgagcacaauuacauguaggugcaaagcaagaaaauuggaauacagacauaaaaacauugaaauuugacgcuuugaguggaucacaagaaguagaauuuauaggauacggaaaagcuacauuagaaugucaaguacaaacugcaguagauuuuggaaauucguauauagcagaaauggaaacugaaucauggauuguagauaggcaaugggcacaagauuuaaccuugccauggcaaagcggaagcggggguguauggcgggaaaugcaucauuuaguagaguucgaacccccacacgcggcuaccauaagaguacuagcauuaggaaaucaagaagggagucucaagacagcacucacaggugcaaugcgaguaacgaaagauacaaaugacaauaaucuauacaaacuacacggaggacauguaucuugcagaguaaaauuaucugcauuaacacuaaaagggacaaguuacaaaauuuguacagauaagauguucuuugucaaaaacccaacagacacgggacacggaacgguagucaugcaaguuaaaguaagcaaaggagcgccaugcagaauaccaguaaucgucgcagaugauuuaacagccgcaauaaauaaagguauauuaguaacgguaaauccaauagcgaguaccaaugaugaugaaguacuaauagaagugaacccaccauuuggugauagcuauauaauaguagggcgaggagauucaagauuaacauaucaauggcauaaagaagguaguaguauaggaaaauuauuuacacaaacuaugaaaggcguagaaagacuagcagucaugggagauacagcaugggauuucucaagugcaggcggauuuuucacaagcgucggaaaaggaauacauacaguguuugguagugcguuucaaggauuauucggaggacuaaauuggauaacgaaaguaauuaugggagcaguucucauaugggucggaauaaauacaaggaacaugacuaugaguaugagcaugauccuaguaggaguaauaaugauguuucuaagccuaggcguuggugcaugaggacuaguaauaaggaaacuguaugaaugucugugggcaggaagugaagagauccuucuguaaagguuuuuggaauuaugucugcugaauaauaaacuuuuuugaaauaauaaaucugguagaaaaaugagaucuaaaaaaaaaaaaaaaaaaaaaaaaaaaaaaaaaaaaaaaaaaaaaaaaaaaaaaaaaaaaaaaaugcaucccccccccccccccccccccccccccccccaaaggcucuuuucagagccaccagaauu

SEQ ID NO: 1002 - RNA, 2531 nt, Artificial Sequence
  mRNA product Design h-4 comprising derived and/or modified sequence from YFV__NC_002031.1__X-SS-prME-XX (polyprotein: aa92-788) (opt11)
gggagagggcgcuuggcuugcaaggacccugagcugcggcauugaagcacacccaacccaacucgacugaagucagccucacugaaccggaucugagaaucuucucucucugggcuugccagggcucuccgaaccuagcuagcauccucuucaauuccaacuagaaagcuuaccaugcggggacuaagcagcagaaaaagacgcagccacgaugugcucaccgugcaauuccucauacuggggaugcuccuaaugaccggaggcgugacccuaguaaggaaaaacagauggcuacuacuaaacguaaccucagaagaucuaggaaagacauuuucagucggcacaggcaacugcacaaccaacauacuagaagcaaaauauuggugcccagacagcauggaauacaacugucccaaccucagcccaagagaggaaccagacgacauagacugcugguguuacggaguagaaaacguaagaguggcauacggcaaaugcgacagcgcaggcaggagccgaagaucccgcagagccaucgacuugcccacgcacgaaaaccacggccucaaaacacgacaagaaaaauggaugacagggcgaaugggagaacgacagcuccagaaaauagaacgaugguucguccggaacccguucuucgcaguaacggcacuaacaaucgcauaccucguaggcagcaacaugacacaaagaguggucaucgcgcuacucguacuagcaguggggcccgcauacagugcacacugcauaggaaucacagaccgugacuucaucgaaggcguacacggaggaacguggguaagcgcgacacuggaacaagacaaaugcgugacaguaauggcaccagacaaaccaagccuagacauaucccuagaaacggucgccaucgaccgucccgcagaaguacgaaagguaugcuauaaugcaguccucacacacgucaaaauaaacgacaaaugccccagcacgggcgaagcacaccucgccgaagaaaacgaaggggauaacgcgugcaaacgcaccuacuccgacaggggauggggcaacggaugcggacuguucggaaaaggauccauagucgcaugcgcaaaauuuaccugcgcaaaaagcaugagcuuguucgagguagaccaaacgaagauccaauacguaauccgagcucaacuacacguuggggccaagcaagagaacuggaauacggacaucaaaacacuaaaauucgacgcacucuccggcucacaagaagucgaguucaucggcuacggcaaagcaacacuagaaugccaaguacaaacagcgguggacuucggcaacagcuacauagcagaaauggaaacagaaagcuggauaguagaccgacaaugggcacaagaccuaacucugccauggcaaagcggcucaggaggaguguggagagagaugcaccaccugguagaguucgaacccccacacgcagcaacaauaaggguacuggcacuaggcaaccaagaaggcagccuaaaaaccgcacucacaggagccaugcgcgugacgaaggacaccaacgacaacaaccucuacaaacuccacggagggcacguauccugccgcguaaaacuaucagcacuaacgcuaaaaggaacaagcuacaaaauaugcacagacaaaauguucuucgucaaaaaccccacagacacaggccacggcacagucguaaugcaagugaaggucagcaagggggcccccugccgaaucccagucauaguggcagacgaccucacggccgccaucaacaaagggauccugguaacagugaacccaauagcaucgaccaacgacgacgaaguccucauagaagugaaucccccguucggcgacagcuacaucaucguaggacgcggcgacucccgacugacguaccaauggcauaaagaaggcagcagcauuggaaaacuauucacccaaaccaugaagggcgucgaaagacucgcggugaugggagacaccgcaugggacuucucgagcgcaggcggcuucuucacaagcguaggaaaagggauucacacaguauucggauccgcauuccaaggccucuucgggggacuaaacuggauaacgaaaguaauaaugggagcaguucucauauggguaggaaucaacacacgaaacaugacaauguccaugucaaugauacucguaggcguaaucaugauguuucugucacucggagugggagcagaccaagguugcgccauaaacuucggcaagugaggacuaguaauaaggaaacuguaugaaugucugugggcaggaagugaagagauccuucuguaaagguuuuuggaauuaugucugcugaauaauaaacuuuuuugaaauaauaaaucugguagaaaaaugagaucuaaaaaaaaaaaaaaaaaaaaaaaaaaaaaaaaaaaaaaaaaaaaaaaaaaaaaaaaaaaaaaaaugcaucccccccccccccccccccccccccccccccaaaggcucuuuucagagccaccagaauu

SEQ ID NO: 1003 - RNA, 2468 nt, Artificial Sequence
  mRNA product Design h-4 comprising derived and/or modified sequence from YFV__NC_002031.1__SS-prME (polyprotein: M,aa104-778) (opt11)
gggagagggcgcuuggcuugcaaggacccugagcugcggcauugaagcacacccaacccaacucgacugaagucagccucacugaaccggaucugagaaucuucucucucugggcuugccagggcucuccgaaccuagcuagcauccucuucaauuccaacuagaaagcuuaccauggacguccuuacgguacaauuccuaauacuaggaaugcuucucaugaccgggggcgucacccuaguccggaaaaacagauggcuacugcuaaauguuacaagcgaagaccuuggcaagacauucagcguaggcacgggcaacuguacaaccaacauacuagaagcgaaauacuggugcccagacuccauggaguacaacugccccaaccuaagcccacgggaagaacccgacgacauagacugcugguguuacggggucgaaaacguccgcgucgcauacgggaaaugcgauagcgcaggccgcaguagacgcucccgccgcgccauagaccuaccaacgcacgagaaccacggccucaaaacucgccaagaaaaauggaugacagggcgaaugggugaacgccaacuacagaagaucgaaaggugguucgucaggaacccauucuucgcagugaccgcacuaacgauagccuaccuagugggaucaaacaugacgcaacgagucgugaucgcacuccuaguacuggccguaggaccggccuacuccgcgcacugcaucggcauaacggauagggacuucauugaaggaguacauggcggcacgugggucagcgcgacacucgaacaagacaaaugcguaaccgugauggcacccgacaaaccgagucuugacauaagccuggaaacgguagcgauagaucguccagccgaaguaagaaaaguaugcuacaacgcaguccuaacacacguaaaaauaaacgacaaaugcccaagcacaggggaagcccaccucgcagaagagaacgaaggcgacaacgcaugcaaacgcacauacuccgacaggggaugggggaauggcugcggacuauucgggaaaggaagcaucgucgcgugcgccaaauucacaugcgccaagagcaugagccuguucgaagucgaccaaacaaaaauccaauacguaauacgcgcgcaacugcacguaggagcgaaacaggaaaacuggaacacggacauuaaaacccucaaauucgacgcgcucucaggaucacaagaagucgaguucaucggcuacggcaaggcaacgcucgaaugccaaguacaaacagcaguagacuucggaaacagcuacauugccgagauggaaaccgagagcuggauagucgacagacaaugggcccaagaccuaacccugccauggcaaucaggcuccgggggcgucuggcgagagaugcaccaccuaguagaguucgaaccaccccacgccgccacgaucagaguacuggcccugggcaaccaagaaggcucacucaagacggcgcucacaggagcaaugagggucacgaaagacaccaacgacaacaaccucuacaaacuacacggagggcacgugagcugccggguaaaacugagcgcacucacucugaagggaacaagcuacaagauaugcaccgacaaaauguucuucgugaaaaacccaaccgacacuggacacggcacggucguuaugcaagucaagguaucaaaaggagccccaugcagaaucccaguaauaguagcggacgaccuaacagccgccauaaacaaaggaauccuagucacgguaaauccgauagcaucgaccaacgacgacgaaguacuaauagaagugaacccaccauucggcgacagcuacauaauagucgggagaggcgacucgcgacuaaccuaccaauggcacaaggaagggagcucuaucgggaaacuauucacccaaacgaugaagggcguagaaaggcucgcagucaugggcgacaccgcaugggacuucuccagcgcgggaggcuucuuuacuucagugggaaaagggauacacaccgucuucggcagcgcauuccagggccuauucggcggguuaaacuggaucacgaaagugauaaugggggcaguucucaucugggucggaauaaacacacguaacaugaccaugagcaugagcaugauccuagucggggucauaaugauguucuugagcuugggaguaggugcaugaggacuaguaauaaggaaacuguaugaaugucugugggcaggaagugaagagauccuucuguaaagguuuuuggaauuaugucugcugaauaauaaacuuuuuugaaauaauaaaucugguagaaaaaugagaucuaaaaaaaaaaaaaaaaaaaaaaaaaaaaaaaaaaaaaaaaaaaaaaaaaaaaaaaaaaaaaaaaugcaucccccccccccccccccccccccccccccccaaaggcucuuuucagagccaccagaauu

SEQ ID NO: 1004 - RNA, 2495 nt, Artificial Sequence
  mRNA product Design h-4 comprising derived and/or modified sequence from YFV__NC_002031.1__SSIgE-prME-XX (polyprotein: aa122-788) (opt11)
gggagagggcgcuuggcuugcaaggacccugagcugcggcauugaagcacacccaacccaacucgacugaagucagccucacugaaccggaucugagaaucuucucucucugggcuugccagggcucuccgaaccuagcuagcauccucuucaauuccaacuagaaagcuuaccauggauuggacguggauacucuuucucguggccgcggccacgcgcgugcacucggugacccuaguaaggaaaaacagauggcuacuacuaaacguaaccucagaagaucuaggaaagacauuuucagucggcacaggcaacugcacaaccaacauacuagaagcaaaauauuggugcccagacagcauggaauacaacugucccaaccucagcccaagagaggaaccagacgacauagacugcugguguuacggaguagaaaacguaagaguggcauacggcaaaugcgacagcgcaggcaggagccgaagaucccgcagagccaucgacuugcccacgcacgaaaaccacggccucaaaacacgacaagaaaaauggaugacagggcgaaugggagaacgacagcuccagaaaauagaacgaugguucguccggaacccguucuucgcaguaacggcacuaacaaucgcauaccucguaggcagcaacaugacacaaagaguggucaucgcgcuacucguacuagcaguggggcccgcauacagugcacacugcauaggaaucacagaccgugacuucaucgaaggcguacacggaggaacguggguaagcgcgacacuggaacaagacaaaugcgugacaguaauggcaccagacaaaccaagccuagacauaucccuagaaacggucgccaucgaccgucccgcagaaguacgaaagguaugcuauaaugcaguccucacacacgucaaaauaaacgacaaaugccccagcacgggcgaagcacaccucgccgaagaaaacgaaggggauaacgcgugcaaacgcaccuacuccgacaggggauggggcaacggaugcggacuguucggaaaaggauccauagucgcaugcgcaaaauuuaccugcgcaaaaagcaugagcuuguucgagguagaccaaacgaagauccaauacguaauccgagcucaacuacacguuggggccaagcaagagaacuggaauacggacaucaaaacacuaaaauucgacgcacucuccggcucacaagaagucgaguucaucggcuacggcaaagcaacacuagaaugccaaguacaaacagcgguggacuucggcaacagcuacauagcagaaauggaaacagaaagcuggauaguagaccgacaaugggcacaagaccuaacucugccauggcaaagcggcucaggaggaguguggagagagaugcaccaccugguagaguucgaacccccacacgcagcaacaauaaggguacuggcacuaggcaaccaagaaggcagccuaaaaaccgcacucacaggagccaugcgcgugacgaaggacaccaacgacaacaaccucuacaaacuccacggagggcacguauccugccgcguaaaacuaucagcacuaacgcuaaaaggaacaagcuacaaaauaugcacagacaaaauguucuucgucaaaaaccccacagacacaggccacggcacagucguaaugcaagugaaggucagcaagggggcccccugccgaaucccagucauaguggcagacgaccucacggccgccaucaacaaagggauccugguaacagugaacccaauagcaucgaccaacgacgacgaaguccucauagaagugaaucccccguucggcgacagcuacaucaucguaggacgcggcgacucccgacugacguaccaauggcauaaagaaggcagcagcauuggaaaacuauucacccaaaccaugaagggcgucgaaagacucgcggugaugggagacaccgcaugggacuucucgagcgcaggcggcuucuucacaagcguaggaaaagggauucacacaguauucggauccgcauuccaaggccucuucgggggacuaaacuggauaacgaaaguaauaaugggagcaguucucauauggguaggaaucaacacacgaaacaugacaauguccaugucaaugauacucguaggcguaaucaugauguuucugucacucggagugggagcagaccaagguugcgccauaaacuucggcaagugaggacuaguaauaaggaaacuguaugaaugucugugggcaggaagugaagagauccuucuguaaagguuuuuggaauuaugucugcugaauaauaaacuuuuuugaaauaauaaaucugguagaaaaaugagaucuaaaaaaaaaaaaaaaaaaaaaaaaaaaaaaaaaaaaaaaaaaaaaaaaaaaaaaaaaaaaaaaaugcaucccccccccccccccccccccccccccccccaaaggcucuuuucagagccaccagaauu

SEQ ID NO: 1005 - RNA, 2465 nt, Artificial Sequence
  mRNA product Design h-4 comprising derived and/or modified sequence from YFV__NC_002031.1__SSIgE-prME (polyprotein: aa122-778) (opt11)
gggagagggcgcuuggcuugcaaggacccugagcugcggcauugaagcacacccaacccaacucgacugaagucagccucacugaaccggaucugagaaucuucucucucugggcuugccagggcucuccgaaccuagcuagcauccucuucaauuccaacuagaaagcuuaccauggauuggacguggauacucuuucucguggccgcggccacgcgcgugcacucggugacccuaguccgcaaaaacagauggcuacuacuaaacguaacaagcgaagaccugggcaaaacauucagcguuggcacaggcaauugcacgacaaacauacucgaagcaaaauacuggugccccgacagcauggaauacaacugcccaaaucuaagcccacgcgaagaaccagacgacaucgacuguuggugcuacggagucgaaaacgugagggucgcauacgguaaaugcgacagcgcuggcagaagcagacgcucccgacgagccauugaccucccuacccacgaaaaccacggccuaaaaacccggcaggaaaaauggaugacaggccggaugggagaacgccaacuacagaaaauagagaggugguuuguaagaaacccauucuucgccguaaccgcgcucaccaucgcuuaccucguaggaucaaacaugacgcaaagaguagugaucgcgcuacucguacuagcgguaggccccgccuacagcgcacacugcaucggcaucacugacagggacuucauagaaggcguccacgggggcacguggguuagcgccacacucgaacaagacaaaugcgucacagugauggcaccagacaaacccucacuagacaucucacuagaaaccgucgcaaucgaccgcccagcagaagucaggaaagugugcuacaacgccgucuuaacccacguaaaaauaaaugauaaaugcccaagcacgggagaggcacaccuagcggaagaaaacgaaggcgacaacgcgugcaaacguaccuacagcgacagaggguggggcaacggaugcggcuuauucggaaaaggaaguaucguagcaugcgcaaaauuuaccugcgccaaaagcaugucccuauucgaaguagaucaaacaaaaauacaauacgucauccgagcccaacuacacgugggggcaaaacaagaaaacuggaacaccgacaucaaaacacucaaauucgaugcccuaagcggcucccaagaaguagaguucaucgguuacggcaaggccacgcucgagugccaaguccaaacagcaguagacuucgggaacucauacaucgccgagauggaaacggaaucauggauugucgacagacaaugggcacaagaccuaacacuaccauggcaaucaggcagcggaggggucuggcgagaaaugcaccaccuaguagaguucgaacccccacacgccgcaacaauccgaguacuagcccucggaaaccaagaaggaucacuaaaaaccgcacucaccggcgcaaugcgcguaacaaaagauacaaacgacaacaaccuauacaaacuacacggcggacacgucagcugccgcgucaaacuauccgcccuaacacuaaaaggaacaagcuacaaaauaugcacagacaaaauguucuucgucaaaaauccgacugacacgggccacggcacagucguaaugcaaguaaaagucucaaaaggcgcaccaugcagaaucccaguaaucgucgccgaugaccuaacagccgcaaucaacaagggcauccucguaacaguaaaccccauagccagcaccaacgacgacgaaguccuaaucgaagucaacccacccuucggagacagcuacauaauaguaggacgaggggacucacgccuaaccuaccaauggcacaaagaaggauccucaaucggcaaacuguucacacaaacgaugaaaggcguagaaagacucgcaguaaugggcgauacggccugggacuucucaagcgcgggcggcuucuucacgagcgucggaaaaggcauccauacaguauucggaagcgcauuccaaggccuauuuggaggccucaacuggauaacaaaagugaucaugggagcaguacugaucugggucggcaucaacacccgcaacaugacgaugagcaugucaaugauccucgugggaguaauaaugauguuccucagccugggcguaggcgcaugaggacuaguaauaaggaaacuguaugaaugucugugggcaggaagugaagagauccuucuguaaagguuuuuggaauuaugucugcugaauaauaaacuuuuuugaaauaauaaaucugguagaaaaaugagaucuaaaaaaaaaaaaaaaaaaaaaaaaaaaaaaaaaaaaaaaaaaaaaaaaaaaaaaaaaaaaaaaaugcaucccccccccccccccccccccccccccccccaaaggcucuuuucagagccaccagaauu

SEQ ID NO: 1006 - RNA, 2513 nt, Artificial Sequence
  mRNA product Design h-4 comprising derived and/or modified sequence from YFV__NC_002031.1__SSjev-prME-XX (polyprotein: aa122-788) (opt11)
gggagagggcgcuuggcuugcaaggacccugagcugcggcauugaagcacacccaacccaacucgacugaagucagccucacugaaccggaucugagaaucuucucucucugggcuugccagggcucuccgaaccuagcuagcauccucuucaauuccaacuagaaagcuuaccauggggaaaaggagcgcgggcucgauaaugugguuggccucgcucgcggucgugaucgcgugcgcgggcgcggugacccuaguaaggaaaaacagauggcuacuacuaaacguaaccucagaagaucuaggaaagacauuuucagucggcacaggcaacugcacaaccaacauacuagaagcaaaauauuggugcccagacagcauggaauacaacugucccaaccucagcccaagagaggaaccagacgacauagacugcugguguuacggaguagaaaacguaagaguggcauacggcaaaugcgacagcgcaggcaggagccgaagaucccgcagagccaucgacuugcccacgcacgaaaaccacggccucaaaacacgacaagaaaaauggaugacagggcgaaugggagaacgacagcuccagaaaauagaacgaugguucguccggaacccguucuucgcaguaacggcacuaacaaucgcauaccucguaggcagcaacaugacacaaagaguggucaucgcgcuacucguacuagcaguggggcccgcauacagugcacacugcauaggaaucacagaccgugacuucaucgaaggcguacacggaggaacguggguaagcgcgacacuggaacaagacaaaugcgugacaguaauggcaccagacaaaccaagccuagacauaucccuagaaacggucgccaucgaccgucccgcagaaguacgaaagguaugcuauaaugcaguccucacacacgucaaaauaaacgacaaaugccccagcacgggcgaagcacaccucgccgaagaaaacgaaggggauaacgcgugcaaacgcaccuacuccgacaggggauggggcaacggaugcggacuguucggaaaaggauccauagucgcaugcgcaaaauuuaccugcgcaaaaagcaugagcuuguucgagguagaccaaacgaagauccaauacguaauccgagcucaacuacacguuggggccaagcaagagaacuggaauacggacaucaaaacacuaaaauucgacgcacucuccggcucacaagaagucgaguucaucggcuacggcaaagcaacacuagaaugccaaguacaaacagcgguggacuucggcaacagcuacauagcagaaauggaaacagaaagcuggauaguagaccgacaaugggcacaagaccuaacucugccauggcaaagcggcucaggaggaguguggagagagaugcaccaccugguagaguucgaacccccacacgcagcaacaauaaggguacuggcacuaggcaaccaagaaggcagccuaaaaaccgcacucacaggagccaugcgcgugacgaaggacaccaacgacaacaaccucuacaaacuccacggagggcacguauccugccgcguaaaacuaucagcacuaacgcuaaaaggaacaagcuacaaaauaugcacagacaaaauguucuucgucaaaaaccccacagacacaggccacggcacagucguaaugcaagugaaggucagcaagggggcccccugccgaaucccagucauaguggcagacgaccucacggccgccaucaacaaagggauccugguaacagugaacccaauagcaucgaccaacgacgacgaaguccucauagaagugaaucccccguucggcgacagcuacaucaucguaggacgcggcgacucccgacugacguaccaauggcauaaagaaggcagcagcauuggaaaacuauucacccaaaccaugaagggcgucgaaagacucgcggugaugggagacaccgcaugggacuucucgagcgcaggcggcuucuucacaagcguaggaaaagggauucacacaguauucggauccgcauuccaaggccucuucgggggacuaaacuggauaacgaaaguaauaaugggagcaguucucauauggguaggaaucaacacacgaaacaugacaauguccaugucaaugauacucguaggcguaaucaugauguuucugucacucggagugggagcagaccaagguugcgccauaaacuucggcaagugaggacuaguaauaaggaaacuguaugaaugucugugggcaggaagugaagagauccuucuguaaagguuuuuggaauuaugucugcugaauaauaaacuuuuuugaaauaauaaaucugguagaaaaaugagaucuaaaaaaaaaaaaaaaaaaaaaaaaaaaaaaaaaaaaaaaaaaaaaaaaaaaaaaaaaaaaaaaaugcaucccccccccccccccccccccccccccccccaaaggcucuuuucagagccaccagaauu

SEQ ID NO: 1007 - RNA, 2483 nt, Artificial Sequence
  mRNA product Design h-4 comprising derived and/or modified sequence from YFV__NC_002031.1__SSjev-prME (polyprotein: aa122-778) (opt11)
gggagagggcgcuuggcuugcaaggacccugagcugcggcauugaagcacacccaacccaacucgacugaagucagccucacugaaccggaucugagaaucuucucucucugggcuugccagggcucuccgaaccuagcuagcauccucuucaauuccaacuagaaagcuuaccauggggaaaaggagcgcgggcucgauaaugugguuggccucgcucgcggucgugaucgcgugcgcgggcgcggugacccuaguccgcaaaaacagauggcuacuacuaaacguaacaagcgaagaccugggcaaaacauucagcguuggcacaggcaauugcacgacaaacauacucgaagcaaaauacuggugccccgacagcauggaauacaacugcccaaaucuaagcccacgcgaagaaccagacgacaucgacuguuggugcuacggagucgaaaacgugagggucgcauacgguaaaugcgacagcgcuggcagaagcagacgcucccgacgagccauugaccucccuacccacgaaaaccacggccuaaaaacccggcaggaaaaauggaugacaggccggaugggagaacgccaacuacagaaaauagagaggugguuuguaagaaacccauucuucgccguaaccgcgcucaccaucgcuuaccucguaggaucaaacaugacgcaaagaguagugaucgcgcuacucguacuagcgguaggccccgccuacagcgcacacugcaucggcaucacugacagggacuucauagaaggcguccacgggggcacguggguuagcgccacacucgaacaagacaaaugcgucacagugauggcaccagacaaacccucacuagacaucucacuagaaaccgucgcaaucgaccgcccagcagaagucaggaaagugugcuacaacgccgucuuaacccacguaaaaauaaaugauaaaugcccaagcacgggagaggcacaccuagcggaagaaaacgaaggcgacaacgcgugcaaacguaccuacagcgacagaggguggggcaacggaugcggcuuauucggaaaaggaaguaucguagcaugcgcaaaauuuaccugcgccaaaagcaugucccuauucgaaguagaucaaacaaaaauacaauacgucauccgagcccaacuacacgugggggcaaaacaagaaaacuggaacaccgacaucaaaacacucaaauucgaugcccuaagcggcucccaagaaguagaguucaucgguuacggcaaggccacgcucgagugccaaguccaaacagcaguagacuucgggaacucauacaucgccgagauggaaacggaaucauggauugucgacagacaaugggcacaagaccuaacacuaccauggcaaucaggcagcggaggggucuggcgagaaaugcaccaccuaguagaguucgaacccccacacgccgcaacaauccgaguacuagcccucggaaaccaagaaggaucacuaaaaaccgcacucaccggcgcaaugcgcguaacaaaagauacaaacgacaacaaccuauacaaacuacacggcggacacgucagcugccgcgucaaacuauccgcccuaacacuaaaaggaacaagcuacaaaauaugcacagacaaaauguucuucgucaaaaauccgacugacacgggccacggcacagucguaaugcaaguaaaagucucaaaaggcgcaccaugcagaaucccaguaaucgucgccgaugaccuaacagccgcaaucaacaagggcauccucguaacaguaaaccccauagccagcaccaacgacgacgaaguccuaaucgaagucaacccacccuucggagacagcuacauaauaguaggacgaggggacucacgccuaaccuaccaauggcacaaagaaggauccucaaucggcaaacuguucacacaaacgaugaaaggcguagaaagacucgcaguaaugggcgauacggccugggacuucucaagcgcgggcggcuucuucacgagcgucggaaaaggcauccauacaguauucggaagcgcauuccaaggccuauuuggaggccucaacuggauaacaaaagugaucaugggagcaguacugaucugggucggcaucaacacccgcaacaugacgaugagcaugucaaugauccucgugggaguaauaaugauguuccucagccugggcguaggcgcaugaggacuaguaauaaggaaacuguaugaaugucugugggcaggaagugaagagauccuucuguaaagguuuuuggaauuaugucugcugaauaauaaacuuuuuugaaauaauaaaucugguagaaaaaugagaucuaaaaaaaaaaaaaaaaaaaaaaaaaaaaaaaaaaaaaaaaaaaaaaaaaaaaaaaaaaaaaaaaugcaucccccccccccccccccccccccccccccccaaaggcucuuuucagagccaccagaauu

SEQ ID NO: 1008 - RNA, 2547 nt, Artificial Sequence
  mRNA product Design h-5 comprising derived and/or modified sequence from YFV__NC_002031.1__X-SS-prME-XX (polyprotein: aa92-788) (wt)
gggagagggcgcuuggcuugcaaggacccugagcugcggcauugaagcacacccaacccaacucgacugaagucagccucacugaaccggaucugagaaucuucucucucugggcuugccagggcucuccgaaccuagcuagcauccucuucaauuccaacuagaaagcuuaccaugagaggauuguccucaaggaaacgccguucccaugauguucugacugugcaauuccuaauuuugggaaugcuguugaugacggguggagugaccuuggugcggaaaaacagaugguugcuccuaaaugugacaucugaggaccucgggaaaacauucucugugggcacaggcaacugcacaacaaacauuuuggaagccaaguacuggugcccagacucaauggaauacaacugucccaaucucaguccaagagaggagccagaugacauugauugcuggugcuaugggguggaaaacguuagagucgcauaugguaagugugacucagcaggcaggucuaggaggucaagaagggccauugacuugccuacgcaugaaaaccaugguuugaagacccggcaagaaaaauggaugacuggaagaaugggugaaaggcaacuccaaaagauugagagaugguucgugaggaaccccuuuuuugcagugacggcucugaccauugccuaccuugugggaagcaacaugacgcaacgagucgugauugcccuacuggucuuggcuguugguccggccuacucagcucacugcauuggaauuacugacagggauuucauugagggggugcauggaggaacuuggguuucagcuacccuggagcaagacaagugugucacuguuauggccccugacaagccuucauuggacaucucacuagagacaguagccauugauagaccugcugaggugaggaaaguguguuacaaugcaguucucacucaugugaagauuaaugacaagugccccagcacuggagaggcccaccuagcugaagagaacgaaggggacaaugcgugcaagcgcacuuauucugauagaggcuggggcaauggcuguggccuauuugggaaagggagcauuguggcaugcgccaaauucacuugugccaaauccaugaguuuguuugagguugaucagaccaaaauucaguaugucaucagagcacaauugcauguaggggccaagcaggaaaauuggaauaccgacauuaagacucucaaguuugaugcccugucaggcucccaggaagucgaguucauuggguauggaaaagcuacacuggaaugccaggugcaaacugcgguggacuuugguaacaguuacaucgcugagauggaaacagagagcuggauaguggacagacagugggcccaggacuugacccugccauggcagaguggaaguggcgggguguggagagagaugcaucaucuugucgaauuugaaccuccgcaugccgccacuaucagaguacuggcccugggaaaccaggaaggcuccuugaaaacagcucuuacuggcgcaaugaggguuacaaaggacacaaaugacaacaaccuuuacaaacuacaugguggacauguuucuugcagagugaaauugucagcuuugacacucaaggggacauccuacaaaauaugcacugacaaaauguuuuuugucaagaacccaacugacacuggccauggcacuguugugaugcaggugaaagugucaaaaggagcccccugcaggauuccagugauaguagcugaugaucuuacagcggcaaucaauaaaggcauuuugguuacaguuaaccccaucgccucaaccaaugaugaugaagugcugauugaggugaacccaccuuuuggagacagcuacauuaucguugggagaggagauucacgucucacuuaccaguggcacaaagagggaagcucaauaggaaaguuguucacucagaccaugaaaggcguggaacgccuggccgucaugggagacaccgccugggauuucagcuccgcuggaggguucuucacuucgguugggaaaggaauccauacgguguuuggcucugccuuucaggggcuauuuggcggcuugaacuggauaacaaaggucaucaugggggcgguacuuauauggguuggcaucaacacaagaaacaugacaauguccaugagcaugaucuugguaggagugaucaugauguuuuugucucuaggaguuggggcggaucaaggaugcgccaucaacuuuggcaaguaaggacuaguacuggcugcaucucccuuuccucuguccuccauccuucucccaggauggugaagggggaccugguacccagugauccccaccccaggauccuaaaucaugacuuaccugcuaauaaaaacucauuggaaaagugagaagaucuaaaaaaaaaaaaaaaaaaaaaaaaaaaaaaaaaaaaaaaaaaaaaaaaaaaaaaaaaaaaaaaaugcaucccccccccccccccccccccccccccccccaaaggcucuuuucagagccaccagaauu

SEQ ID NO: 1009 - RNA, 2514 nt, Artificial Sequence
  mRNA product Design h-5 comprising derived and/or modified sequence from YFV__NC_002031.1__SS-prME (polyprotein: M,aa104-778) (wt)
gggagagggcgcuuggcuugcaaggacccugagcugcggcauugaagcacacccaacccaacucgacugaagucagccucacugaaccggaucugagaaucuucucucucugggcuugccagggcucuccgaaccuagcuagcauccucuucaauuccaacuagaaagcuuaccauggauguucugacugugcaauuccuaauuuugggaaugcuguugaugacggguggagugaccuuggugcggaaaaacagaugguugcuccuaaaugugacaucugaggaccucgggaaaacauucucugugggcacaggcaacugcacaacaaacauuuuggaagccaaguacuggugcccagacucaauggaauacaacugucccaaucucaguccaagagaggagccagaugacauugauugcuggugcuaugggguggaaaacguuagagucgcauaugguaagugugacucagcaggcaggucuaggaggucaagaagggccauugacuugccuacgcaugaaaaccaugguuugaagacccggcaagaaaaauggaugacuggaagaaugggugaaaggcaacuccaaaagauugagagaugguucgugaggaaccccuuuuuugcagugacggcucugaccauugccuaccuugugggaagcaacaugacgcaacgagucgugauugcccuacuggucuuggcuguugguccggccuacucagcucacugcauuggaauuacugacagggauuucauugagggggugcauggaggaacuuggguuucagcuacccuggagcaagacaagugugucacuguuauggccccugacaagccuucauuggacaucucacuagagacaguagccauugauagaccugcugaggugaggaaaguguguuacaaugcaguucucacucaugugaagauuaaugacaagugccccagcacuggagaggcccaccuagcugaagagaacgaaggggacaaugcgugcaagcgcacuuauucugauagaggcuggggcaauggcuguggccuauuugggaaagggagcauuguggcaugcgccaaauucacuugugccaaauccaugaguuuguuugagguugaucagaccaaaauucaguaugucaucagagcacaauugcauguaggggccaagcaggaaaauuggaauaccgacauuaagacucucaaguuugaugcccugucaggcucccaggaagucgaguucauuggguauggaaaagcuacacuggaaugccaggugcaaacugcgguggacuuugguaacaguuacaucgcugagauggaaacagagagcuggauaguggacagacagugggcccaggacuugacccugccauggcagaguggaaguggcgggguguggagagagaugcaucaucuugucgaauuugaaccuccgcaugccgccacuaucagaguacuggcccugggaaaccaggaaggcuccuugaaaacagcucuuacuggcgcaaugaggguuacaaaggacacaaaugacaacaaccuuuacaaacuacaugguggacauguuucuugcagagugaaauugucagcuuugacacucaaggggacauccuacaaaauaugcacugacaaaauguuuuuugucaagaacccaacugacacuggccauggcacuguugugaugcaggugaaagugucaaaaggagcccccugcaggauuccagugauaguagcugaugaucuuacagcggcaaucaauaaaggcauuuugguuacaguuaaccccaucgccucaaccaaugaugaugaagugcugauugaggugaacccaccuuuuggagacagcuacauuaucguugggagaggagauucacgucucacuuaccaguggcacaaagagggaagcucaauaggaaaguuguucacucagaccaugaaaggcguggaacgccuggccgucaugggagacaccgccugggauuucagcuccgcuggaggguucuucacuucgguugggaaaggaauccauacgguguuuggcucugccuuucaggggcuauuuggcggcuugaacuggauaacaaaggucaucaugggggcgguacuuauauggguuggcaucaacacaagaaacaugacaauguccaugagcaugaucuugguaggagugaucaugauguuuuugucucuaggaguuggggcggaucaaggaugcgccaucaacuuuggcaaguaaggacuaguacuggcugcaucucccuuuccucuguccuccauccuucucccaggauggugaagggggaccugguacccagugauccccaccccaggauccuaaaucaugacuuaccugcuaauaaaaacucauuggaaaagugagaagaucuaaaaaaaaaaaaaaaaaaaaaaaaaaaaaaaaaaaaaaaaaaaaaaaaaaaaaaaaaaaaaaaaugcaucccccccccccccccccccccccccccccccaaaggcucuuuucagagccaccagaauu

SEQ ID NO: 1010 - RNA, 2511 nt, Artificial Sequence
  mRNA product Design h-5 comprising derived and/or modified sequence from YFV__NC_002031.1__SSIgE-prME-XX (polyprotein: aa122-788) (wt)
gggagagggcgcuuggcuugcaaggacccugagcugcggcauugaagcacacccaacccaacucgacugaagucagccucacugaaccggaucugagaaucuucucucucugggcuugccagggcucuccgaaccuagcuagcauccucuucaauuccaacuagaaagcuuaccauggacuggaccuggauccuguuccucguggccgccgcgacccgcguccacagcgugaccuuggugcggaaaaacagaugguugcuccuaaaugugacaucugaggaccucgggaaaacauucucugugggcacaggcaacugcacaacaaacauuuuggaagccaaguacuggugcccagacucaauggaauacaacugucccaaucucaguccaagagaggagccagaugacauugauugcuggugcuaugggguggaaaacguuagagucgcauaugguaagugugacucagcaggcaggucuaggaggucaagaagggccauugacuugccuacgcaugaaaaccaugguuugaagacccggcaagaaaaauggaugacuggaagaaugggugaaaggcaacuccaaaagauugagagaugguucgugaggaaccccuuuuuugcagugacggcucugaccauugccuaccuugugggaagcaacaugacgcaacgagucgugauugcccuacuggucuuggcuguugguccggccuacucagcucacugcauuggaauuacugacagggauuucauugagggggugcauggaggaacuuggguuucagcuacccuggagcaagacaagugugucacuguuauggccccugacaagccuucauuggacaucucacuagagacaguagccauugauagaccugcugaggugaggaaaguguguuacaaugcaguucucacucaugugaagauuaaugacaagugccccagcacuggagaggcccaccuagcugaagagaacgaaggggacaaugcgugcaagcgcacuuauucugauagaggcuggggcaauggcuguggccuauuugggaaagggagcauuguggcaugcgccaaauucacuugugccaaauccaugaguuuguuugagguugaucagaccaaaauucaguaugucaucagagcacaauugcauguaggggccaagcaggaaaauuggaauaccgacauuaagacucucaaguuugaugcccugucaggcucccaggaagucgaguucauuggguauggaaaagcuacacuggaaugccaggugcaaacugcgguggacuuugguaacaguuacaucgcugagauggaaacagagagcuggauaguggacagacagugggcccaggacuugacccugccauggcagaguggaaguggcgggguguggagagagaugcaucaucuugucgaauuugaaccuccgcaugccgccacuaucagaguacuggcccugggaaaccaggaaggcuccuugaaaacagcucuuacuggcgcaaugaggguuacaaaggacacaaaugacaacaaccuuuacaaacuacaugguggacauguuucuugcagagugaaauugucagcuuugacacucaaggggacauccuacaaaauaugcacugacaaaauguuuuuugucaagaacccaacugacacuggccauggcacuguugugaugcaggugaaagugucaaaaggagcccccugcaggauuccagugauaguagcugaugaucuuacagcggcaaucaauaaaggcauuuugguuacaguuaaccccaucgccucaaccaaugaugaugaagugcugauugaggugaacccaccuuuuggagacagcuacauuaucguugggagaggagauucacgucucacuuaccaguggcacaaagagggaagcucaauaggaaaguuguucacucagaccaugaaaggcguggaacgccuggccgucaugggagacaccgccugggauuucagcuccgcuggaggguucuucacuucgguugggaaaggaauccauacgguguuuggcucugccuuucaggggcuauuuggcggcuugaacuggauaacaaaggucaucaugggggcgguacuuauauggguuggcaucaacacaagaaacaugacaauguccaugagcaugaucuugguaggagugaucaugauguuuuugucucuaggaguuggggcggaucaaggaugcgccaucaacuuuggcaaguaaggacuaguacuggcugcaucucccuuuccucuguccuccauccuucucccaggauggugaagggggaccugguacccagugauccccaccccaggauccuaaaucaugacuuaccugcuaauaaaaacucauuggaaaagugagaagaucuaaaaaaaaaaaaaaaaaaaaaaaaaaaaaaaaaaaaaaaaaaaaaaaaaaaaaaaaaaaaaaaaugcaucccccccccccccccccccccccccccccccaaaggcucuuuucagagccaccagaauu

SEQ ID NO: 1011 - RNA, 2481 nt, Artificial Sequence
  mRNA product Design h-5 comprising derived and/or modified sequence from YFV__NC_002031.1__SSIgE-prME (polyprotein: aa122-778) (wt)
gggagagggcgcuuggcuugcaaggacccugagcugcggcauugaagcacacccaacccaacucgacugaagucagccucacugaaccggaucugagaaucuucucucucugggcuugccagggcucuccgaaccuagcuagcauccucuucaauuccaacuagaaagcuuaccauggacuggaccuggauccuguuccucguggccgccgcgacccgcguccacagcgugaccuuggugcggaaaaacagaugguugcuccuaaaugugacaucugaggaccucgggaaaacauucucugugggcacaggcaacugcacaacaaacauuuuggaagccaaguacuggugcccagacucaauggaauacaacugucccaaucucaguccaagagaggagccagaugacauugauugcuggugcuaugggguggaaaacguuagagucgcauaugguaagugugacucagcaggcaggucuaggaggucaagaagggccauugacuugccuacgcaugaaaaccaugguuugaagacccggcaagaaaaauggaugacuggaagaaugggugaaaggcaacuccaaaagauugagagaugguucgugaggaaccccuuuuuugcagugacggcucugaccauugccuaccuugugggaagcaacaugacgcaacgagucgugauugcccuacuggucuuggcuguugguccggccuacucagcucacugcauuggaauuacugacagggauuucauugagggggugcauggaggaacuuggguuucagcuacccuggagcaagacaagugugucacuguuauggccccugacaagccuucauuggacaucucacuagagacaguagccauugauagaccugcugaggugaggaaaguguguuacaaugcaguucucacucaugugaagauuaaugacaagugccccagcacuggagaggcccaccuagcugaagagaacgaaggggacaaugcgugcaagcgcacuuauucugauagaggcuggggcaauggcuguggccuauuugggaaagggagcauuguggcaugcgccaaauucacuugugccaaauccaugaguuuguuugagguugaucagaccaaaauucaguaugucaucagagcacaauugcauguaggggccaagcaggaaaauuggaauaccgacauuaagacucucaaguuugaugcccugucaggcucccaggaagucgaguucauuggguauggaaaagcuacacuggaaugccaggugcaaacugcgguggacuuugguaacaguuacaucgcugagauggaaacagagagcuggauaguggacagacagugggcccaggacuugacccugccauggcagaguggaaguggcgggguguggagagagaugcaucaucuugucgaauuugaaccuccgcaugccgccacuaucagaguacuggcccugggaaaccaggaaggcuccuugaaaacagcucuuacuggcgcaaugaggguuacaaaggacacaaaugacaacaaccuuuacaaacuacaugguggacauguuucuugcagagugaaauugucagcuuugacacucaaggggacauccuacaaaauaugcacugacaaaauguuuuuugucaagaacccaacugacacuggccauggcacuguugugaugcaggugaaagugucaaaaggagcccccugcaggauuccagugauaguagcugaugaucuuacagcggcaaucaauaaaggcauuuugguuacaguuaaccccaucgccucaaccaaugaugaugaagugcugauugaggugaacccaccuuuuggagacagcuacauuaucguugggagaggagauucacgucucacuuaccaguggcacaaagagggaagcucaauaggaaaguuguucacucagaccaugaaaggcguggaacgccuggccgucaugggagacaccgccugggauuucagcuccgcuggaggguucuucacuucgguugggaaaggaauucauacgguguuuggcucugccuuucaggggcuauuuggcggcuugaacuggauaacaaaggucaucaugggggcgguacuuauauggguuggcaucaacacaagaaacaugacaauguccaugagcaugaucuugguaggagugaucaugauguuuuugucucuaggaguuggggcguaaggacuaguacuggcugcaucucccuuuccucuguccuccauccuucucccaggauggugaagggggaccugguacccagugauccccaccccaggauccuaaaucaugacuuaccugcuaauaaaaacucauuggaaaagugagaagaucuaaaaaaaaaaaaaaaaaaaaaaaaaaaaaaaaaaaaaaaaaaaaaaaaaaaaaaaaaaaaaaaaugcaucccccccccccccccccccccccccccccccaaaggcucuuuucagagccaccagaauu

SEQ ID NO: 1012 - RNA, 2529 nt, Artificial Sequence
  mRNA product Design h-5 comprising derived and/or modified sequence from YFV__NC_002031.1__SSjev-prME-XX (polyprotein: aa122-788) (wt)
gggagagggcgcuuggcuugcaaggacccugagcugcggcauugaagcacacccaacccaacucgacugaagucagccucacugaaccggaucugagaaucuucucucucugggcuugccagggcucuccgaaccuagcuagcauccucuucaauuccaacuagaaagcuuaccauggguaaacggagcgcuggcucaaucauguggcucgcgagcuuggcaguugucauagcuugugcaggagccgugaccuuggugcggaaaaacagaugguugcuccuaaaugugacaucugaggaccucgggaaaacauucucugugggcacaggcaacugcacaacaaacauuuuggaagccaaguacuggugcccagacucaauggaauacaacugucccaaucucaguccaagagaggagccagaugacauugauugcuggugcuaugggguggaaaacguuagagucgcauaugguaagugugacucagcaggcaggucuaggaggucaagaagggccauugacuugccuacgcaugaaaaccaugguuugaagacccggcaagaaaaauggaugacuggaagaaugggugaaaggcaacuccaaaagauugagagaugguucgugaggaaccccuuuuuugcagugacggcucugaccauugccuaccuugugggaagcaacaugacgcaacgagucgugauugcccuacuggucuuggcuguugguccggccuacucagcucacugcauuggaauuacugacagggauuucauugagggggugcauggaggaacuuggguuucagcuacccuggagcaagacaagugugucacuguuauggccccugacaagccuucauuggacaucucacuagagacaguagccauugauagaccugcugaggugaggaaaguguguuacaaugcaguucucacucaugugaagauuaaugacaagugccccagcacuggagaggcccaccuagcugaagagaacgaaggggacaaugcgugcaagcgcacuuauucugauagaggcuggggcaauggcuguggccuauuugggaaagggagcauuguggcaugcgccaaauucacuugugccaaauccaugaguuuguuugagguugaucagaccaaaauucaguaugucaucagagcacaauugcauguaggggccaagcaggaaaauuggaauaccgacauuaagacucucaaguuugaugcccugucaggcucccaggaagucgaguucauuggguauggaaaagcuacacuggaaugccaggugcaaacugcgguggacuuugguaacaguuacaucgcugagauggaaacagagagcuggauaguggacagacagugggcccaggacuugacccugccauggcagaguggaaguggcgggguguggagagagaugcaucaucuugucgaauuugaaccuccgcaugccgccacuaucagaguacuggcccugggaaaccaggaaggcuccuugaaaacagcucuuacuggcgcaaugaggguuacaaaggacacaaaugacaacaaccuuuacaaacuacaugguggacauguuucuugcagagugaaauugucagcuuugacacucaaggggacauccuacaaaauaugcacugacaaaauguuuuuugucaagaacccaacugacacuggccauggcacuguugugaugcaggugaaagugucaaaaggagcccccugcaggauuccagugauaguagcugaugaucuuacagcggcaaucaauaaaggcauuuugguuacaguuaaccccaucgccucaaccaaugaugaugaagugcugauugaggugaacccaccuuuuggagacagcuacauuaucguugggagaggagauucacgucucacuuaccaguggcacaaagagggaagcucaauaggaaaguuguucacucagaccaugaaaggcguggaacgccuggccgucaugggagacaccgccugggauuucagcuccgcuggaggguucuucacuucgguugggaaaggaauccauacgguguuuggcucugccuuucaggggcuauuuggcggcuugaacuggauaacaaaggucaucaugggggcgguacuuauauggguuggcaucaacacaagaaacaugacaauguccaugagcaugaucuugguaggagugaucaugauguuuuugucucuaggaguuggggcggaucaaggaugcgccaucaacuuuggcaaguaaggacuaguacuggcugcaucucccuuuccucuguccuccauccuucucccaggauggugaagggggaccugguacccagugauccccaccccaggauccuaaaucaugacuuaccugcuaauaaaaacucauuggaaaagugagaagaucuaaaaaaaaaaaaaaaaaaaaaaaaaaaaaaaaaaaaaaaaaaaaaaaaaaaaaaaaaaaaaaaaugcaucccccccccccccccccccccccccccccccaaaggcucuuuucagagccaccagaauu

SEQ ID NO: 1013 - RNA, 2499 nt, Artificial Sequence
  mRNA product Design h-5 comprising derived and/or modified sequence from YFV__NC_002031.1__SSjev-prME (polyprotein: aa122-778) (wt)
gggagagggcgcuuggcuugcaaggacccugagcugcggcauugaagcacacccaacccaacucgacugaagucagccucacugaaccggaucugagaaucuucucucucugggcuugccagggcucuccgaaccuagcuagcauccucuucaauuccaacuagaaagcuuaccauggguaaacggagcgcuggcucaaucauguggcucgcgagcuuggcaguugucauagcuugugcaggagccgugaccuuggugcggaaaaacagaugguugcuccuaaaugugacaucugaggaccucgggaaaacauucucugugggcacaggcaacugcacaacaaacauuuuggaagccaaguacuggugcccagacucaauggaauacaacugucccaaucucaguccaagagaggagccagaugacauugauugcuggugcuaugggguggaaaacguuagagucgcauaugguaagugugacucagcaggcaggucuaggaggucaagaagggccauugacuugccuacgcaugaaaaccaugguuugaagacccggcaagaaaaauggaugacuggaagaaugggugaaaggcaacuccaaaagauugagagaugguucgugaggaaccccuuuuuugcagugacggcucugaccauugccuaccuugugggaagcaacaugacgcaacgagucgugauugcccuacuggucuuggcuguugguccggccuacucagcucacugcauuggaauuacugacagggauuucauugagggggugcauggaggaacuuggguuucagcuacccuggagcaagacaagugugucacuguuauggccccugacaagccuucauuggacaucucacuagagacaguagccauugauagaccugcugaggugaggaaaguguguuacaaugcaguucucacucaugugaagauuaaugacaagugccccagcacuggagaggcccaccuagcugaagagaacgaaggggacaaugcgugcaagcgcacuuauucugauagaggcuggggcaauggcuguggccuauuugggaaagggagcauuguggcaugcgccaaauucacuugugccaaauccaugaguuuguuugagguugaucagaccaaaauucaguaugucaucagagcacaauugcauguaggggccaagcaggaaaauuggaauaccgacauuaagacucucaaguuugaugcccugucaggcucccaggaagucgaguucauuggguauggaaaagcuacacuggaaugccaggugcaaacugcgguggacuuugguaacaguuacaucgcugagauggaaacagagagcuggauaguggacagacagugggcccaggacuugacccugccauggcagaguggaaguggcgggguguggagagagaugcaucaucuugucgaauuugaaccuccgcaugccgccacuaucagaguacuggcccugggaaaccaggaaggcuccuugaaaacagcucuuacuggcgcaaugaggguuacaaaggacacaaaugacaacaaccuuuacaaacuacaugguggacauguuucuugcagagugaaauugucagcuuugacacucaaggggacauccuacaaaauaugcacugacaaaauguuuuuugucaagaacccaacugacacuggccauggcacuguugugaugcaggugaaagugucaaaaggagcccccugcaggauuccagugauaguagcugaugaucuuacagcggcaaucaauaaaggcauuuugguuacaguuaaccccaucgccucaaccaaugaugaugaagugcugauugaggugaacccaccuuuuggagacagcuacauuaucguugggagaggagauucacgucucacuuaccaguggcacaaagagggaagcucaauaggaaaguuguucacucagaccaugaaaggcguggaacgccuggccgucaugggagacaccgccugggauuucagcuccgcuggaggguucuucacuucgguugggaaaggaauucauacgguguuuggcucugccuuucaggggcuauuuggcggcuugaacuggauaacaaaggucaucaugggggcgguacuuauauggguuggcaucaacacaagaaacaugacaauguccaugagcaugaucuugguaggagugaucaugauguuuuugucucuaggaguuggggcguaaggacuaguacuggcugcaucucccuuuccucuguccuccauccuucucccaggauggugaagggggaccugguacccagugauccccaccccaggauccuaaaucaugacuuaccugcuaauaaaaacucauuggaaaagugagaagaucuaaaaaaaaaaaaaaaaaaaaaaaaaaaaaaaaaaaaaaaaaaaaaaaaaaaaaaaaaaaaaaaaugcaucccccccccccccccccccccccccccccccaaaggcucuuuucagagccaccagaauu

SEQ ID NO: 1014 - RNA, 2547 nt, Artificial Sequence
  mRNA product Design h-5 comprising derived and/or modified sequence from YFV__NC_002031.1__X-SS-prME-XX (polyprotein: aa92-788) (opt1)
gggagagggcgcuuggcuugcaaggacccugagcugcggcauugaagcacacccaacccaacucgacugaagucagccucacugaaccggaucugagaaucuucucucucugggcuugccagggcucuccgaaccuagcuagcauccucuucaauuccaacuagaaagcuuaccaugcggggccugagcucccgcaagcggcgcagccacgacgugcucaccguccaguuccugauccuggggaugcuccugaugaccggcggggugacgcuggugcggaagaaccgcuggcuccugcugaacgucaccuccgaggaccucggcaagaccuucagcguggggaccggcaacugcacgaccaacauccuggaggccaaguacuggugccccgacuccauggaguacaacugcccgaaccugagcccccgggaggagcccgacgacaucgacugcuggugcuacggcguggagaacguccgcguggccuacgggaagugcgacuccgcgggccggagccgccggucccgccgggccaucgaccuccccacccacgagaaccacgggcugaagacccgccaggagaaguggaugacgggccggaugggggagcgccagcugcagaagaucgagcggugguucgugcgcaacccguucuucgccgucaccgcccucaccaucgccuaccuggugggcagcaacaugacccagcggguggucaucgcgcugcucgugcuggccgugggccccgccuacuccgcccacugcaucgggaucacggaccgcgacuucaucgagggcguccacgggggcaccugggugagcgcgacccuggagcaggacaagugcgugaccgucauggcccccgacaagcccucccucgacaucagccuggagacgguggccaucgaccggccggccgaggugcgcaaggucugcuacaacgccgugcugacccacgugaagaucaacgacaagugccccuccaccggcgaggcgcaccucgccgaggagaacgagggggacaacgccugcaagcggaccuacagcgaccggggcugggggaacggcugcgggcuguucggcaagggcuccaucgucgccugcgccaaguucacgugcgcgaagagcaugucccuguucgagguggaccagaccaagauccaguacgucauccgcgcccagcuccacgugggggccaagcaggagaacuggaacaccgacaucaagacccugaaguucgacgcccugagcggcagccaggagguggaguucaucggguacggcaaggccacgcucgagugccagguccagaccgcgguggacuucgggaacuccuacaucgccgagauggagaccgagagcuggaucguggaccggcagugggcccaggaccugacccugcccuggcaguccggcagcggcggggucuggcgcgagaugcaccaccucguggaguucgagcccccgcacgccgccacgauccgggugcuggcgcugggcaaccaggaggggucccucaagaccgcccugaccggcgccaugcgcgucaccaaggacacgaacgacaacaaccuguacaagcuccacgggggccacgugagcugccgggugaagcuguccgcccugacccucaagggcaccagcuacaagaucugcaccgacaagauguucuucgucaagaaccccacggacaccgggcacggcaccguggugaugcaggucaagguguccaagggggcgcccugccgcaucccggugaucgucgccgacgaccugaccgccgccaucaacaagggcauccuggugaccgugaacccgaucgccagcacgaacgacgacgagguccucaucgaggugaacccccccuucggcgacuccuacaucaucguggggcggggcgacagccgccugaccuaccaguggcacaaggagggguccagcaucggcaagcuguucacccagaccaugaagggggucgagcggcuggcggugaugggcgacacggccugggacuucuccagcgccggcggguucuucaccuccgugggcaaggggauccacaccgucuucggcagcgccuuccaggggcucuucggcggccugaacuggaucaccaaggugaucaugggggccgugcugaucugggucggcaucaacacgcgcaacaugaccauguccaugagcaugauccucgugggggugaucaugauguuccugagccugggcgucggggcggaccagggcugcgccaucaacuucggcaagugaggacuaguacuggcugcaucucccuuuccucuguccuccauccuucucccaggauggugaagggggaccugguacccagugauccccaccccaggauccuaaaucaugacuuaccugcuaauaaaaacucauuggaaaagugagaagaucuaaaaaaaaaaaaaaaaaaaaaaaaaaaaaaaaaaaaaaaaaaaaaaaaaaaaaaaaaaaaaaaaugcaucccccccccccccccccccccccccccccccaaaggcucuuuucagagccaccagaauu

SEQ ID NO: 1015 - RNA, 2484 nt, Artificial Sequence
  mRNA product Design h-5 comprising derived and/or modified sequence from YFV__NC_002031.1__SS-prME (polyprotein: M,aa104-778) (opt1)
gggagagggcgcuuggcuugcaaggacccugagcugcggcauugaagcacacccaacccaacucgacugaagucagccucacugaaccggaucugagaaucuucucucucugggcuugccagggcucuccgaaccuagcuagcauccucuucaauuccaacuagaaagcuuaccauggacgugcugaccguccaguuccucauccugggcaugcugcucaugaccgggggcgugacccugguccggaagaaccgcuggcuccugcugaacgugaccagcgaggaccucggcaagacguucuccguggggaccggcaacugcaccaccaacauccuggaggccaaguacuggugccccgacagcauggaguacaacugccccaaccuguccccgcgggaggagcccgacgacaucgacugcuggugcuacggggucgagaacgugcgcguggccuacggcaagugcgacagcgcggggcggucccgccggagccgccgggccaucgaccugcccacccacgagaaccacggccucaagacccggcaggagaaguggaugacggggcgcaugggcgagcggcagcugcagaagaucgagcgcugguucgugcggaacccguucuucgccgucaccgcgcugaccaucgccuaccucguggggagcaacaugacccagcgcguggucaucgcccugcuggugcucgccgugggccccgccuacuccgcgcacugcaucgggaucacggaccgggacuucaucgagggcguccacggcgggaccugggugagcgccacccuggagcaggacaagugcgugaccgucauggcccccgacaagcccucccuggacaucagccucgagacgguggccaucgaccgcccggcggaggugcggaaggucugcuacaacgccgugcugacccacgugaagaucaacgacaagugccccuccaccggcgaggcccaccuggccgaggagaacgagggggacaacgccugcaagcgcaccuacagcgaccggggcugggggaacggcugcggccucuucgggaagggcuccaucgucgcgugcgccaaguucacgugcgccaagagcaugucccuguucgagguggaccagaccaagauccaguacgugauccgcgcccagcugcacgucggggccaagcaggagaacuggaacaccgacaucaagacccucaaguucgacgcgcugagcggcucccaggagguggaguucaucggcuacgggaaggccacgcuggagugccaggugcagaccgccgucgacuucggcaacagcuacaucgccgagauggagaccgaguccuggaucguggaccggcagugggcccaggaccucacccugcccuggcagagcggguccggcgggguguggcgcgagaugcaccaccuggucgaguucgagcccccgcacgcggccacgauccgggugcucgcccugggcaaccaggagggcagccugaagaccgcccucaccggggccaugcgcgucaccaaggacacgaacgacaacaaccuguacaagcugcacggcgggcacguguccugccgggugaagcucagcgcgcugacccugaagggcaccuccuacaagaucugcaccgacaagauguucuucgucaagaaccccacggacaccgggcacggcaccguggugaugcaggucaaggugagcaagggcgcccccugccgcaucccggugaucgucgccgacgaccucaccgccgcgaucaacaaggggauccuggugacggugaaccccaucgccagcaccaacgacgacgagguccugaucgaggugaacccgcccuucggcgacuccuacaucaucguggggcggggcgacagccgccucaccuaccaguggcacaaggagggguccagcaucggcaagcuguucacccagacgaugaagggcgucgagcggcuggccgugaugggggacaccgccugggacuucuccagcgccggcggguucuucaccuccgugggcaagggcauccacaccgucuucgggagcgcguuccagggccucuucgggggccugaacuggaucaccaaggugaucaugggggccgugcugaucugggucggcaucaacacgcgcaacaugaccauguccaugagcaugauccucgugggcgugaucaugauguuccugucccugggggucggcgccugaggacuaguacuggcugcaucucccuuuccucuguccuccauccuucucccaggauggugaagggggaccugguacccagugauccccaccccaggauccuaaaucaugacuuaccugcuaauaaaaacucauuggaaaagugagaagaucuaaaaaaaaaaaaaaaaaaaaaaaaaaaaaaaaaaaaaaaaaaaaaaaaaaaaaaaaaaaaaaaaugcaucccccccccccccccccccccccccccccccaaaggcucuuuucagagccaccagaauu

SEQ ID NO: 1016 - RNA, 2511 nt, Artificial Sequence
  mRNA product Design h-5 comprising derived and/or modified sequence from YFV__NC_002031.1__SSIgE-prME-XX (polyprotein: aa122-788) (opt1)
gggagagggcgcuuggcuugcaaggacccugagcugcggcauugaagcacacccaacccaacucgacugaagucagccucacugaaccggaucugagaaucuucucucucugggcuugccagggcucuccgaaccuagcuagcauccucuucaauuccaacuagaaagcuuaccauggacuggaccuggauccuguuccucguggccgccgcgacccgcguccacagcgugacgcuggugcggaagaaccgcuggcuccugcugaacgucaccuccgaggaccucggcaagaccuucagcguggggaccggcaacugcacgaccaacauccuggaggccaaguacuggugccccgacuccauggaguacaacugcccgaaccugagcccccgggaggagcccgacgacaucgacugcuggugcuacggcguggagaacguccgcguggccuacgggaagugcgacuccgcgggccggagccgccggucccgccgggccaucgaccuccccacccacgagaaccacgggcugaagacccgccaggagaaguggaugacgggccggaugggggagcgccagcugcagaagaucgagcggugguucgugcgcaacccguucuucgccgucaccgcccucaccaucgccuaccuggugggcagcaacaugacccagcggguggucaucgcgcugcucgugcuggccgugggccccgccuacuccgcccacugcaucgggaucacggaccgcgacuucaucgagggcguccacgggggcaccugggugagcgcgacccuggagcaggacaagugcgugaccgucauggcccccgacaagcccucccucgacaucagccuggagacgguggccaucgaccggccggccgaggugcgcaaggucugcuacaacgccgugcugacccacgugaagaucaacgacaagugccccuccaccggcgaggcgcaccucgccgaggagaacgagggggacaacgccugcaagcggaccuacagcgaccggggcugggggaacggcugcgggcuguucggcaagggcuccaucgucgccugcgccaaguucacgugcgcgaagagcaugucccuguucgagguggaccagaccaagauccaguacgucauccgcgcccagcuccacgugggggccaagcaggagaacuggaacaccgacaucaagacccugaaguucgacgcccugagcggcagccaggagguggaguucaucggguacggcaaggccacgcucgagugccagguccagaccgcgguggacuucgggaacuccuacaucgccgagauggagaccgagagcuggaucguggaccggcagugggcccaggaccugacccugcccuggcaguccggcagcggcggggucuggcgcgagaugcaccaccucguggaguucgagcccccgcacgccgccacgauccgggugcuggcgcugggcaaccaggaggggucccucaagaccgcccugaccggcgccaugcgcgucaccaaggacacgaacgacaacaaccuguacaagcuccacgggggccacgugagcugccgggugaagcuguccgcccugacccucaagggcaccagcuacaagaucugcaccgacaagauguucuucgucaagaaccccacggacaccgggcacggcaccguggugaugcaggucaagguguccaagggggcgcccugccgcaucccggugaucgucgccgacgaccugaccgccgccaucaacaagggcauccuggugaccgugaacccgaucgccagcacgaacgacgacgagguccucaucgaggugaacccccccuucggcgacuccuacaucaucguggggcggggcgacagccgccugaccuaccaguggcacaaggagggguccagcaucggcaagcuguucacccagaccaugaagggggucgagcggcuggcggugaugggcgacacggccugggacuucuccagcgccggcggguucuucaccuccgugggcaaggggauccacaccgucuucggcagcgccuuccaggggcucuucggcggccugaacuggaucaccaaggugaucaugggggccgugcugaucugggucggcaucaacacgcgcaacaugaccauguccaugagcaugauccucgugggggugaucaugauguuccugagccugggcgucggggcggaccagggcugcgccaucaacuucggcaagugaggacuaguacuggcugcaucucccuuuccucuguccuccauccuucucccaggauggugaagggggaccugguacccagugauccccaccccaggauccuaaaucaugacuuaccugcuaauaaaaacucauuggaaaagugagaagaucuaaaaaaaaaaaaaaaaaaaaaaaaaaaaaaaaaaaaaaaaaaaaaaaaaaaaaaaaaaaaaaaaugcaucccccccccccccccccccccccccccccccaaaggcucuuuucagagccaccagaauu

SEQ ID NO: 1017 - RNA, 2481 nt, Artificial Sequence
  mRNA product Design h-5 comprising derived and/or modified sequence from YFV__NC_002031.1__SSIgE-prME (polyprotein: aa122-778) (opt1)
gggagagggcgcuuggcuugcaaggacccugagcugcggcauugaagcacacccaacccaacucgacugaagucagccucacugaaccggaucugagaaucuucucucucugggcuugccagggcucuccgaaccuagcuagcauccucuucaauuccaacuagaaagcuuaccauggacuggaccuggauccuguuccucguggccgccgcgacccgcguccacagcgugacccugguccgcaagaaccgguggcuccugcugaacgugaccagcgaggaccucggcaagacguucuccguggggaccggcaacugcaccaccaacauccuggaggccaaguacuggugccccgacagcauggaguacaacugcccgaaccuguccccgcgcgaggagcccgacgacaucgacugcuggugcuacggggucgagaacgugcggguggccuacggcaagugcgacagcgcggggcgcucccggcgcagccggcgcgccaucgaccuccccacgcacgagaaccacggccugaagacccggcaggagaaguggaugaccggccgcaugggggagcggcagcugcagaagaucgagcgcugguucguccggaaccccuucuucgccgugaccgcccucacgaucgccuaccuggugggcuccaacaugacccagcgcgucgugaucgcgcugcucgugcuggccgucgggcccgccuacagcgcccacugcaucggcaucaccgaccgggacuucaucgagggggugcacggcggcaccuggguguccgcgacgcuggagcaggacaagugcgucaccgugauggcccccgacaagcccagccucgacaucucccuggagaccguggccaucgaccgcccggccgagguccggaaggugugcuacaacgccgugcugacccacgucaagaucaacgacaagugccccagcacgggggaggcgcaccucgccgaggagaacgagggcgacaacgccugcaagcgcaccuacuccgaccggggguggggcaacggcugcgggcuguucggcaaggggagcaucguggccugcgccaaguucaccugcgcgaaguccaugagccuguucgagguggaccagaccaagauccaguacgucauccgcgcccagcuccacgugggcgccaagcaggagaacuggaacacggacaucaagacccugaaguucgacgcccuguccgggagccaggaggucgaguucaucggcuacggcaaggccacccucgagugccaggugcagaccgcgguggacuucgggaacuccuacaucgccgagauggagacggagagcuggaucgucgaccggcagugggcccaggaccugacccugcccuggcagagcggcuccgggggcguguggcgcgagaugcaccaccucguggaguucgagcccccgcacgccgccaccauccgcguccuggcgcuggggaaccaggagggcagccucaagaccgcccugacgggcgccaugcgggugaccaaggacaccaacgacaacaaccuguacaagcuccacgggggccacguguccugccgcgucaagcugagcgcccugacccucaaggggacguccuacaagaucugcaccgacaagauguucuucgugaagaaccccaccgacaccggccacgggacgguggucaugcaggugaaggugagcaagggcgcgcccugccggauccccgucaucguggccgacgaccugaccgccgccaucaacaagggcauccuggugaccgucaacccgaucgccuccaccaacgacgacgaggugcucaucgaggugaacccgcccuucggggacagcuacaucaucgucggccgcggggacucccggcugaccuaccaguggcacaaggagggcagcuccaucggcaagcuguucacgcagaccaugaaggggguggagcgccucgcggugaugggcgacaccgccugggacuucagcuccgccgggggcuucuucaccagcgucgggaagggcauccacacgguguucggcuccgccuuccaggggcuguucggcgggcugaacuggaucaccaaggugaucaugggcgccguccucaucuggguggggaucaacacccggaacaugaccaugagcauguccaugauccuggugggcgucaucaugauguuccugagccugggcgugggggcgugaggacuaguacuggcugcaucucccuuuccucuguccuccauccuucucccaggauggugaagggggaccugguacccagugauccccaccccaggauccuaaaucaugacuuaccugcuaauaaaaacucauuggaaaagugagaagaucuaaaaaaaaaaaaaaaaaaaaaaaaaaaaaaaaaaaaaaaaaaaaaaaaaaaaaaaaaaaaaaaaugcaucccccccccccccccccccccccccccccccaaaggcucuuuucagagccaccagaauu

SEQ ID NO: 1018 - RNA, 2529 nt, Artificial Sequence
  mRNA product Design h-5 comprising derived and/or modified sequence from YFV__NC_002031.1__SSjev-prME-XX (polyprotein: aa122-788) (opt1)
gggagagggcgcuuggcuugcaaggacccugagcugcggcauugaagcacacccaacccaacucgacugaagucagccucacugaaccggaucugagaaucuucucucucugggcuugccagggcucuccgaaccuagcuagcauccucuucaauuccaacuagaaagcuuaccaugggcaagcgcagcgccggguccaucauguggcuggccagccucgcgguggucaucgccugcgccggcgccgugacgcuggugcggaagaaccgcuggcuccugcugaacgucaccuccgaggaccucggcaagaccuucagcguggggaccggcaacugcacgaccaacauccuggaggccaaguacuggugccccgacuccauggaguacaacugcccgaaccugagcccccgggaggagcccgacgacaucgacugcuggugcuacggcguggagaacguccgcguggccuacgggaagugcgacuccgcgggccggagccgccggucccgccgggccaucgaccuccccacccacgagaaccacgggcugaagacccgccaggagaaguggaugacgggccggaugggggagcgccagcugcagaagaucgagcggugguucgugcgcaacccguucuucgccgucaccgcccucaccaucgccuaccuggugggcagcaacaugacccagcggguggucaucgcgcugcucgugcuggccgugggccccgccuacuccgcccacugcaucgggaucacggaccgcgacuucaucgagggcguccacgggggcaccugggugagcgcgacccuggagcaggacaagugcgugaccgucauggcccccgacaagcccucccucgacaucagccuggagacgguggccaucgaccggccggccgaggugcgcaaggucugcuacaacgccgugcugacccacgugaagaucaacgacaagugccccuccaccggcgaggcgcaccucgccgaggagaacgagggggacaacgccugcaagcggaccuacagcgaccggggcugggggaacggcugcgggcuguucggcaagggcuccaucgucgccugcgccaaguucacgugcgcgaagagcaugucccuguucgagguggaccagaccaagauccaguacgucauccgcgcccagcuccacgugggggccaagcaggagaacuggaacaccgacaucaagacccugaaguucgacgcccugagcggcagccaggagguggaguucaucggguacggcaaggccacgcucgagugccagguccagaccgcgguggacuucgggaacuccuacaucgccgagauggagaccgagagcuggaucguggaccggcagugggcccaggaccugacccugcccuggcaguccggcagcggcggggucuggcgcgagaugcaccaccucguggaguucgagcccccgcacgccgccacgauccgggugcuggcgcugggcaaccaggaggggucccucaagaccgcccugaccggcgccaugcgcgucaccaaggacacgaacgacaacaaccuguacaagcuccacgggggccacgugagcugccgggugaagcuguccgcccugacccucaagggcaccagcuacaagaucugcaccgacaagauguucuucgucaagaaccccacggacaccgggcacggcaccguggugaugcaggucaagguguccaagggggcgcccugccgcaucccggugaucgucgccgacgaccugaccgccgccaucaacaagggcauccuggugaccgugaacccgaucgccagcacgaacgacgacgagguccucaucgaggugaacccccccuucggcgacuccuacaucaucguggggcggggcgacagccgccugaccuaccaguggcacaaggagggguccagcaucggcaagcuguucacccagaccaugaagggggucgagcggcuggcggugaugggcgacacggccugggacuucuccagcgccggcggguucuucaccuccgugggcaaggggauccacaccgucuucggcagcgccuuccaggggcucuucggcggccugaacuggaucaccaaggugaucaugggggccgugcugaucugggucggcaucaacacgcgcaacaugaccauguccaugagcaugauccucgugggggugaucaugauguuccugagccugggcgucggggcggaccagggcugcgccaucaacuucggcaagugaggacuaguacuggcugcaucucccuuuccucuguccuccauccuucucccaggauggugaagggggaccugguacccagugauccccaccccaggauccuaaaucaugacuuaccugcuaauaaaaacucauuggaaaagugagaagaucuaaaaaaaaaaaaaaaaaaaaaaaaaaaaaaaaaaaaaaaaaaaaaaaaaaaaaaaaaaaaaaaaugcaucccccccccccccccccccccccccccccccaaaggcucuuuucagagccaccagaauu

SEQ ID NO: 1019 - RNA, 2499 nt, Artificial Sequence
  mRNA product Design h-5 comprising derived and/or modified sequence from YFV__NC_002031.1__SSjev-prME (polyprotein: aa122-778) (opt1)
gggagagggcgcuuggcuugcaaggacccugagcugcggcauugaagcacacccaacccaacucgacugaagucagccucacugaaccggaucugagaaucuucucucucugggcuugccagggcucuccgaaccuagcuagcauccucuucaauuccaacuagaaagcuuaccaugggcaagcgcagcgccggguccaucauguggcuggccagccucgcgguggucaucgccugcgccggcgccgugacccugguccgcaagaaccgguggcuccugcugaacgugaccagcgaggaccucggcaagacguucuccguggggaccggcaacugcaccaccaacauccuggaggccaaguacuggugccccgacagcauggaguacaacugcccgaaccuguccccgcgcgaggagcccgacgacaucgacugcuggugcuacggggucgagaacgugcggguggccuacggcaagugcgacagcgcggggcgcucccggcgcagccggcgcgccaucgaccuccccacgcacgagaaccacggccugaagacccggcaggagaaguggaugaccggccgcaugggggagcggcagcugcagaagaucgagcgcugguucguccggaaccccuucuucgccgugaccgcccucacgaucgccuaccuggugggcuccaacaugacccagcgcgucgugaucgcgcugcucgugcuggccgucgggcccgccuacagcgcccacugcaucggcaucaccgaccgggacuucaucgagggggugcacggcggcaccuggguguccgcgacgcuggagcaggacaagugcgucaccgugauggcccccgacaagcccagccucgacaucucccuggagaccguggccaucgaccgcccggccgagguccggaaggugugcuacaacgccgugcugacccacgucaagaucaacgacaagugccccagcacgggggaggcgcaccucgccgaggagaacgagggcgacaacgccugcaagcgcaccuacuccgaccggggguggggcaacggcugcgggcuguucggcaaggggagcaucguggccugcgccaaguucaccugcgcgaaguccaugagccuguucgagguggaccagaccaagauccaguacgucauccgcgcccagcuccacgugggcgccaagcaggagaacuggaacacggacaucaagacccugaaguucgacgcccuguccgggagccaggaggucgaguucaucggcuacggcaaggccacccucgagugccaggugcagaccgcgguggacuucgggaacuccuacaucgccgagauggagacggagagcuggaucgucgaccggcagugggcccaggaccugacccugcccuggcagagcggcuccgggggcguguggcgcgagaugcaccaccucguggaguucgagcccccgcacgccgccaccauccgcguccuggcgcuggggaaccaggagggcagccucaagaccgcccugacgggcgccaugcgggugaccaaggacaccaacgacaacaaccuguacaagcuccacgggggccacguguccugccgcgucaagcugagcgcccugacccucaaggggacguccuacaagaucugcaccgacaagauguucuucgugaagaaccccaccgacaccggccacgggacgguggucaugcaggugaaggugagcaagggcgcgcccugccggauccccgucaucguggccgacgaccugaccgccgccaucaacaagggcauccuggugaccgucaacccgaucgccuccaccaacgacgacgaggugcucaucgaggugaacccgcccuucggggacagcuacaucaucgucggccgcggggacucccggcugaccuaccaguggcacaaggagggcagcuccaucggcaagcuguucacgcagaccaugaaggggguggagcgccucgcggugaugggcgacaccgccugggacuucagcuccgccgggggcuucuucaccagcgucgggaagggcauccacacgguguucggcuccgccuuccaggggcuguucggcgggcugaacuggaucaccaaggugaucaugggcgccguccucaucuggguggggaucaacacccggaacaugaccaugagcauguccaugauccuggugggcgucaucaugauguuccugagccugggcgugggggcgugaggacuaguacuggcugcaucucccuuuccucuguccuccauccuucucccaggauggugaagggggaccugguacccagugauccccaccccaggauccuaaaucaugacuuaccugcuaauaaaaacucauuggaaaagugagaagaucuaaaaaaaaaaaaaaaaaaaaaaaaaaaaaaaaaaaaaaaaaaaaaaaaaaaaaaaaaaaaaaaaugcaucccccccccccccccccccccccccccccccaaaggcucuuuucagagccaccagaauu

SEQ ID NO: 1020 - RNA, 2547 nt, Artificial Sequence
  mRNA product Design h-5 comprising derived and/or modified sequence from YFV__NC_002031.1__X-SS-prME-XX (polyprotein: aa92-788) (opt1)
gggagagggcgcuuggcuugcaaggacccugagcugcggcauugaagcacacccaacccaacucgacugaagucagccucacugaaccggaucugagaaucuucucucucugggcuugccagggcucuccgaaccuagcuagcauccucuucaauuccaacuagaaagcuuaccaugcggggccugagcucccgcaagcggcgcagccacgacgugcucaccguccaguuccugauccuggggaugcuccugaugaccggcggggugacgcuggugcggaagaaccgcuggcuccugcugaacgucaccuccgaggaccucggcaagaccuucagcguggggaccggcaacugcacgaccaacauccuggaggccaaguacuggugccccgacuccauggaguacaacugcccgaaccugagcccccgggaggagcccgacgacaucgacugcuggugcuacggcguggagaacguccgcguggccuacgggaagugcgacuccgcgggccggagccgccggucccgccgggccaucgaccuccccacccacgagaaccacgggcugaagacccgccaggagaaguggaugacgggccggaugggggagcgccagcugcagaagaucgagcggugguucgugcgcaacccguucuucgccgucaccgcccucaccaucgccuaccuggugggcagcaacaugacccagcggguggucaucgcgcugcucgugcuggccgugggccccgccuacuccgcccacugcaucgggaucacggaccgcgacuucaucgagggcguccacgggggcaccugggugagcgcgacccuggagcaggacaagugcgugaccgucauggcccccgacaagcccucccucgacaucagccuggagacgguggccaucgaccggccggccgaggugcgcaaggucugcuacaacgccgugcugacccacgugaagaucaacgacaagugccccuccaccggcgaggcgcaccucgccgaggagaacgagggggacaacgccugcaagcggaccuacagcgaccggggcugggggaacggcugcgggcuguucggcaagggcuccaucgucgccugcgccaaguucacgugcgcgaaguccaugagccuguucgagguggaccagaccaagauccaguacgucauccgcgcccagcuccacgugggggccaagcaggagaacuggaacaccgacaucaagacccugaaguucgacgcccugagcggcagccaggagguggaguucaucggguacggcaaggccacgcucgagugccagguccagaccgcgguggacuucgggaacuccuacaucgccgagauggagaccgagagcuggaucguggaccggcagugggcccaggaccugacccugcccuggcaguccggcagcggcggggucuggcgcgagaugcaccaccucguggaguucgagcccccgcacgccgccacgauccgggugcuggcgcugggcaaccaggaggggucccucaagaccgcccugaccggcgccaugcgcgucaccaaggacacgaacgacaacaaccuguacaagcuccacgggggccacgugagcugccgggugaagcuguccgcccugacccucaagggcaccagcuacaagaucugcaccgacaagauguucuucgucaagaaccccacggacaccgggcacggcaccguggugaugcaggucaagguguccaagggggcgcccugccgcaucccggugaucgucgccgacgaccugaccgccgccaucaacaagggcauccuggugaccgugaacccgaucgccagcacgaacgacgacgagguccucaucgaggugaacccccccuucggcgacuccuacaucaucguggggcggggcgacagccgccugaccuaccaguggcacaaggagggguccagcaucggcaagcuguucacccagaccaugaagggggucgagcggcuggcggugaugggcgacacggccugggacuucuccagcgccggcggguucuucaccuccgugggcaaggggauccacaccgucuucggcagcgccuuccaggggcuguucggcggccucaacuggaucaccaaggugaucaugggggccgugcugaucugggucggcaucaacacgcgcaacaugaccauguccaugagcaugauccucgugggggugaucaugauguuccugagccugggcgucggggcggaccagggcugcgccaucaacuucggcaagugaggacuaguacuggcugcaucucccuuuccucuguccuccauccuucucccaggauggugaagggggaccugguacccagugauccccaccccaggauccuaaaucaugacuuaccugcuaauaaaaacucauuggaaaagugagaagaucuaaaaaaaaaaaaaaaaaaaaaaaaaaaaaaaaaaaaaaaaaaaaaaaaaaaaaaaaaaaaaaaaugcaucccccccccccccccccccccccccccccccaaaggcucuuuucagagccaccagaauu

SEQ ID NO: 1021 - RNA, 2484 nt, Artificial Sequence
  mRNA product Design h-5 comprising derived and/or modified sequence from YFV__NC_002031.1__SS-prME (polyprotein: M,aa104-778) (opt1)
gggagagggcgcuuggcuugcaaggacccugagcugcggcauugaagcacacccaacccaacucgacugaagucagccucacugaaccggaucugagaaucuucucucucugggcuugccagggcucuccgaaccuagcuagcauccucuucaauuccaacuagaaagcuuaccauggacgugcucaccguccaguuccugauccuggggaugcuccugaugaccggcggggugacgcuggugcggaagaaccgcuggcuccugcugaacgucaccuccgaggaccucggcaagaccuucagcguggggaccggcaacugcacgaccaacauccuggaggccaaguacuggugccccgacuccauggaguacaacugcccgaaccugagcccccgggaggagcccgacgacaucgacugcuggugcuacggcguggagaacguccgcguggccuacgggaagugcgacuccgcgggccggagccgccggucccgccgggccaucgaccuccccacccacgagaaccacgggcugaagacccgccaggagaaguggaugacgggccggaugggggagcgccagcugcagaagaucgagcggugguucgugcgcaacccguucuucgccgucaccgcccucaccaucgccuaccuggugggcagcaacaugacccagcggguggucaucgcgcugcucgugcuggccgugggccccgccuacuccgcccacugcaucgggaucacggaccgcgacuucaucgagggcguccacgggggcaccugggugagcgcgacccuggagcaggacaagugcgugaccgucauggcccccgacaagcccucccucgacaucagccuggagacgguggccaucgaccggccggccgaggugcgcaaggucugcuacaacgccgugcugacccacgugaagaucaacgacaagugccccuccaccggcgaggcgcaccucgccgaggagaacgagggggacaacgccugcaagcggaccuacagcgaccggggcugggggaacggcugcgggcuguucggcaagggcuccaucgucgccugcgccaaguucacgugcgcgaaguccaugagccuguucgagguggaccagaccaagauccaguacgucauccgcgcccagcuccacgugggggccaagcaggagaacuggaacaccgacaucaagacccugaaguucgacgcccugagcggcagccaggagguggaguucaucggguacggcaaggccacgcucgagugccagguccagaccgcgguggacuucgggaacuccuacaucgccgagauggagaccgagagcuggaucguggaccggcagugggcccaggaccugacccugcccuggcaguccggcagcggcggggucuggcgcgagaugcaccaccucguggaguucgagcccccgcacgccgccacgauccgggugcuggcgcugggcaaccaggaggggucccucaagaccgcccugaccggcgccaugcgcgucaccaaggacacgaacgacaacaaccuguacaagcuccacgggggccacgugagcugccgggugaagcuguccgcccugacccucaagggcaccagcuacaagaucugcaccgacaagauguucuucgucaagaaccccacggacaccgggcacggcaccguggugaugcaggucaagguguccaagggggcgcccugccgcaucccggugaucgucgccgacgaccugaccgccgccaucaacaagggcauccuggugaccgugaacccgaucgccagcacgaacgacgacgagguccucaucgaggugaacccccccuucggcgacuccuacaucaucguggggcggggcgacagccgccugaccuaccaguggcacaaggagggguccagcaucggcaagcuguucacccagaccaugaagggggucgagcggcuggcggugaugggcgacacggccugggacuucuccagcgccggcggguucuucaccuccgugggcaaggggauccacaccgucuucggcagcgccuuccaggggcuguucggcggccucaacuggaucaccaaggugaucaugggggccgugcugaucugggucggcaucaacacgcgcaacaugaccauguccaugagcaugauccucgugggggugaucaugauguuccugagccugggcgucggggcgugaggacuaguacuggcugcaucucccuuuccucuguccuccauccuucucccaggauggugaagggggaccugguacccagugauccccaccccaggauccuaaaucaugacuuaccugcuaauaaaaacucauuggaaaagugagaagaucuaaaaaaaaaaaaaaaaaaaaaaaaaaaaaaaaaaaaaaaaaaaaaaaaaaaaaaaaaaaaaaaaugcaucccccccccccccccccccccccccccccccaaaggcucuuuucagagccaccagaauu

SEQ ID NO: 1022 - RNA, 2511 nt, Artificial Sequence
  mRNA product Design h-5 comprising derived and/or modified sequence from YFV__NC_002031.1__SSIgE-prME-XX (polyprotein: aa122-788) (opt1)
gggagagggcgcuuggcuugcaaggacccugagcugcggcauugaagcacacccaacccaacucgacugaagucagccucacugaaccggaucugagaaucuucucucucugggcuugccagggcucuccgaaccuagcuagcauccucuucaauuccaacuagaaagcuuaccauggacuggaccuggauccuguuccucguggccgccgcgacccgcguccacagcgugacgcuggugcggaagaaccgcuggcuccugcugaacgucaccuccgaggaccucggcaagaccuucagcguggggaccggcaacugcacgaccaacauccuggaggccaaguacuggugccccgacuccauggaguacaacugcccgaaccugagcccccgggaggagcccgacgacaucgacugcuggugcuacggcguggagaacguccgcguggccuacgggaagugcgacuccgcgggccggagccgccggucccgccgggccaucgaccuccccacccacgagaaccacgggcugaagacccgccaggagaaguggaugacgggccggaugggggagcgccagcugcagaagaucgagcggugguucgugcgcaacccguucuucgccgucaccgcccucaccaucgccuaccuggugggcagcaacaugacccagcggguggucaucgcgcugcucgugcuggccgugggccccgccuacuccgcccacugcaucgggaucacggaccgcgacuucaucgagggcguccacgggggcaccugggugagcgcgacccuggagcaggacaagugcgugaccgucauggcccccgacaagcccucccucgacaucagccuggagacgguggccaucgaccggccggccgaggugcgcaaggucugcuacaacgccgugcugacccacgugaagaucaacgacaagugccccuccaccggcgaggcgcaccucgccgaggagaacgagggggacaacgccugcaagcggaccuacagcgaccggggcugggggaacggcugcgggcuguucggcaagggcuccaucgucgccugcgccaaguucacgugcgcgaaguccaugagccuguucgagguggaccagaccaagauccaguacgucauccgcgcccagcuccacgugggggccaagcaggagaacuggaacaccgacaucaagacccugaaguucgacgcccugagcggcagccaggagguggaguucaucggguacggcaaggccacgcucgagugccagguccagaccgcgguggacuucgggaacuccuacaucgccgagauggagaccgagagcuggaucguggaccggcagugggcccaggaccugacccugcccuggcaguccggcagcggcggggucuggcgcgagaugcaccaccucguggaguucgagcccccgcacgccgccacgauccgggugcuggcgcugggcaaccaggaggggucccucaagaccgcccugaccggcgccaugcgcgucaccaaggacacgaacgacaacaaccuguacaagcuccacgggggccacgugagcugccgggugaagcuguccgcccugacccucaagggcaccagcuacaagaucugcaccgacaagauguucuucgucaagaaccccacggacaccgggcacggcaccguggugaugcaggucaagguguccaagggggcgcccugccgcaucccggugaucgucgccgacgaccugaccgccgccaucaacaagggcauccuggugaccgugaacccgaucgccagcacgaacgacgacgagguccucaucgaggugaacccccccuucggcgacuccuacaucaucguggggcggggcgacagccgccugaccuaccaguggcacaaggagggguccagcaucggcaagcuguucacccagaccaugaagggggucgagcggcuggcggugaugggcgacacggccugggacuucuccagcgccggcggguucuucaccuccgugggcaaggggauccacaccgucuucggcagcgccuuccaggggcuguucggcggccucaacuggaucaccaaggugaucaugggggccgugcugaucugggucggcaucaacacgcgcaacaugaccauguccaugagcaugauccucgugggggugaucaugauguuccugagccugggcgucggggcggaccagggcugcgccaucaacuucggcaagugaggacuaguacuggcugcaucucccuuuccucuguccuccauccuucucccaggauggugaagggggaccugguacccagugauccccaccccaggauccuaaaucaugacuuaccugcuaauaaaaacucauuggaaaagugagaagaucuaaaaaaaaaaaaaaaaaaaaaaaaaaaaaaaaaaaaaaaaaaaaaaaaaaaaaaaaaaaaaaaaugcaucccccccccccccccccccccccccccccccaaaggcucuuuucagagccaccagaauu

SEQ ID NO: 1023 - RNA, 2481 nt, Artificial Sequence
  mRNA product Design h-5 comprising derived and/or modified sequence from YFV__NC_002031.1__SSIgE-prME (polyprotein: aa122-778) (opt1)
gggagagggcgcuuggcuugcaaggacccugagcugcggcauugaagcacacccaacccaacucgacugaagucagccucacugaaccggaucugagaaucuucucucucugggcuugccagggcucuccgaaccuagcuagcauccucuucaauuccaacuagaaagcuuaccauggacuggaccuggauccuguuccucguggccgccgcgacccgcguccacagcgugacgcuggugcggaagaaccgcuggcuccugcugaacgucaccuccgaggaccucggcaagaccuucagcguggggaccggcaacugcacgaccaacauccuggaggccaaguacuggugccccgacuccauggaguacaacugcccgaaccugagcccccgggaggagcccgacgacaucgacugcuggugcuacggcguggagaacguccgcguggccuacgggaagugcgacuccgcgggccggagccgccggucccgccgggccaucgaccuccccacccacgagaaccacgggcugaagacccgccaggagaaguggaugacgggccggaugggggagcgccagcugcagaagaucgagcggugguucgugcgcaacccguucuucgccgucaccgcccucaccaucgccuaccuggugggcagcaacaugacccagcggguggucaucgcgcugcucgugcuggccgugggccccgccuacuccgcccacugcaucgggaucacggaccgcgacuucaucgagggcguccacgggggcaccugggugagcgcgacccuggagcaggacaagugcgugaccgucauggcccccgacaagcccucccucgacaucagccuggagacgguggccaucgaccggccggccgaggugcgcaaggucugcuacaacgccgugcugacccacgugaagaucaacgacaagugccccuccaccggcgaggcgcaccucgccgaggagaacgagggggacaacgccugcaagcggaccuacagcgaccggggcugggggaacggcugcgggcuguucggcaagggcuccaucgucgccugcgccaaguucacgugcgcgaaguccaugagccuguucgagguggaccagaccaagauccaguacgucauccgcgcccagcuccacgugggggccaagcaggagaacuggaacaccgacaucaagacccugaaguucgacgcccugagcggcagccaggagguggaguucaucggguacggcaaggccacgcucgagugccagguccagaccgcgguggacuucgggaacuccuacaucgccgagauggagaccgagagcuggaucguggaccggcagugggcccaggaccugacccugcccuggcaguccggcagcggcggggucuggcgcgagaugcaccaccucguggaguucgagcccccgcacgccgccacgauccgggugcuggcgcugggcaaccaggaggggucccucaagaccgcccugaccggcgccaugcgcgucaccaaggacacgaacgacaacaaccuguacaagcuccacgggggccacgugagcugccgggugaagcuguccgcccugacccucaagggcaccagcuacaagaucugcaccgacaagauguucuucgucaagaaccccacggacaccgggcacggcaccguggugaugcaggucaagguguccaagggggcgcccugccgcaucccggugaucgucgccgacgaccugaccgccgccaucaacaagggcauccuggugaccgugaacccgaucgccagcacgaacgacgacgagguccucaucgaggugaacccccccuucggcgacuccuacaucaucguggggcggggcgacagccgccugaccuaccaguggcacaaggagggguccagcaucggcaagcuguucacccagaccaugaagggggucgagcggcuggcggugaugggcgacacggccugggacuucuccagcgccggcggguucuucaccuccgugggcaaggggauccacaccgucuucggcagcgccuuccaggggcuguucggcggccucaacuggaucaccaaggugaucaugggggccgugcugaucugggucggcaucaacacgcgcaacaugaccauguccaugagcaugauccucgugggggugaucaugauguuccugagccugggcgucggggcgugaggacuaguacuggcugcaucucccuuuccucuguccuccauccuucucccaggauggugaagggggaccugguacccagugauccccaccccaggauccuaaaucaugacuuaccugcuaauaaaaacucauuggaaaagugagaagaucuaaaaaaaaaaaaaaaaaaaaaaaaaaaaaaaaaaaaaaaaaaaaaaaaaaaaaaaaaaaaaaaaugcaucccccccccccccccccccccccccccccccaaaggcucuuuucagagccaccagaauu

SEQ ID NO: 1024 - RNA, 2529 nt, Artificial Sequence
  mRNA product Design h-5 comprising derived and/or modified sequence from YFV__NC_002031.1__SSjev-prME-XX (polyprotein: aa122-788) (opt1)
gggagagggcgcuuggcuugcaaggacccugagcugcggcauugaagcacacccaacccaacucgacugaagucagccucacugaaccggaucugagaaucuucucucucugggcuugccagggcucuccgaaccuagcuagcauccucuucaauuccaacuagaaagcuuaccaugggcaagcgcagcgccggguccaucauguggcuggccagccucgcgguggucaucgccugcgccggcgccgugacgcuggugcggaagaaccgcuggcuccugcugaacgucaccuccgaggaccucggcaagaccuucagcguggggaccggcaacugcacgaccaacauccuggaggccaaguacuggugccccgacuccauggaguacaacugcccgaaccugagcccccgggaggagcccgacgacaucgacugcuggugcuacggcguggagaacguccgcguggccuacgggaagugcgacuccgcgggccggagccgccggucccgccgggccaucgaccuccccacccacgagaaccacgggcugaagacccgccaggagaaguggaugacgggccggaugggggagcgccagcugcagaagaucgagcggugguucgugcgcaacccguucuucgccgucaccgcccucaccaucgccuaccuggugggcagcaacaugacccagcggguggucaucgcgcugcucgugcuggccgugggccccgccuacuccgcccacugcaucgggaucacggaccgcgacuucaucgagggcguccacgggggcaccugggugagcgcgacccuggagcaggacaagugcgugaccgucauggcccccgacaagcccucccucgacaucagccuggagacgguggccaucgaccggccggccgaggugcgcaaggucugcuacaacgccgugcugacccacgugaagaucaacgacaagugccccuccaccggcgaggcgcaccucgccgaggagaacgagggggacaacgccugcaagcggaccuacagcgaccggggcugggggaacggcugcgggcuguucggcaagggcuccaucgucgccugcgccaaguucacgugcgcgaaguccaugagccuguucgagguggaccagaccaagauccaguacgucauccgcgcccagcuccacgugggggccaagcaggagaacuggaacaccgacaucaagacccugaaguucgacgcccugagcggcagccaggagguggaguucaucggguacggcaaggccacgcucgagugccagguccagaccgcgguggacuucgggaacuccuacaucgccgagauggagaccgagagcuggaucguggaccggcagugggcccaggaccugacccugcccuggcaguccggcagcggcggggucuggcgcgagaugcaccaccucguggaguucgagcccccgcacgccgccacgauccgggugcuggcgcugggcaaccaggaggggucccucaagaccgcccugaccggcgccaugcgcgucaccaaggacacgaacgacaacaaccuguacaagcuccacgggggccacgugagcugccgggugaagcuguccgcccugacccucaagggcaccagcuacaagaucugcaccgacaagauguucuucgucaagaaccccacggacaccgggcacggcaccguggugaugcaggucaagguguccaagggggcgcccugccgcaucccggugaucgucgccgacgaccugaccgccgccaucaacaagggcauccuggugaccgugaacccgaucgccagcacgaacgacgacgagguccucaucgaggugaacccccccuucggcgacuccuacaucaucguggggcggggcgacagccgccugaccuaccaguggcacaaggagggguccagcaucggcaagcuguucacccagaccaugaagggggucgagcggcuggcggugaugggcgacacggccugggacuucuccagcgccggcggguucuucaccuccgugggcaaggggauccacaccgucuucggcagcgccuuccaggggcuguucggcggccucaacuggaucaccaaggugaucaugggggccgugcugaucugggucggcaucaacacgcgcaacaugaccauguccaugagcaugauccucgugggggugaucaugauguuccugagccugggcgucggggcggaccagggcugcgccaucaacuucggcaagugaggacuaguacuggcugcaucucccuuuccucuguccuccauccuucucccaggauggugaagggggaccugguacccagugauccccaccccaggauccuaaaucaugacuuaccugcuaauaaaaacucauuggaaaagugagaagaucuaaaaaaaaaaaaaaaaaaaaaaaaaaaaaaaaaaaaaaaaaaaaaaaaaaaaaaaaaaaaaaaaugcaucccccccccccccccccccccccccccccccaaaggcucuuuucagagccaccagaauu

SEQ ID NO: 1025 - RNA, 2499 nt, Artificial Sequence
  mRNA product Design h-5 comprising derived and/or modified sequence from YFV__NC_002031.1__SSjev-prME (polyprotein: aa122-778) (opt1)
gggagagggcgcuuggcuugcaaggacccugagcugcggcauugaagcacacccaacccaacucgacugaagucagccucacugaaccggaucugagaaucuucucucucugggcuugccagggcucuccgaaccuagcuagcauccucuucaauuccaacuagaaagcuuaccaugggcaagcgcagcgccggguccaucauguggcuggccagccucgcgguggucaucgccugcgccggcgccgugacgcuggugcggaagaaccgcuggcuccugcugaacgucaccuccgaggaccucggcaagaccuucagcguggggaccggcaacugcacgaccaacauccuggaggccaaguacuggugccccgacuccauggaguacaacugcccgaaccugagcccccgggaggagcccgacgacaucgacugcuggugcuacggcguggagaacguccgcguggccuacgggaagugcgacuccgcgggccggagccgccggucccgccgggccaucgaccuccccacccacgagaaccacgggcugaagacccgccaggagaaguggaugacgggccggaugggggagcgccagcugcagaagaucgagcggugguucgugcgcaacccguucuucgccgucaccgcccucaccaucgccuaccuggugggcagcaacaugacccagcggguggucaucgcgcugcucgugcuggccgugggccccgccuacuccgcccacugcaucgggaucacggaccgcgacuucaucgagggcguccacgggggcaccugggugagcgcgacccuggagcaggacaagugcgugaccgucauggcccccgacaagcccucccucgacaucagccuggagacgguggccaucgaccggccggccgaggugcgcaaggucugcuacaacgccgugcugacccacgugaagaucaacgacaagugccccuccaccggcgaggcgcaccucgccgaggagaacgagggggacaacgccugcaagcggaccuacagcgaccggggcugggggaacggcugcgggcuguucggcaagggcuccaucgucgccugcgccaaguucacgugcgcgaaguccaugagccuguucgagguggaccagaccaagauccaguacgucauccgcgcccagcuccacgugggggccaagcaggagaacuggaacaccgacaucaagacccugaaguucgacgcccugagcggcagccaggagguggaguucaucggguacggcaaggccacgcucgagugccagguccagaccgcgguggacuucgggaacuccuacaucgccgagauggagaccgagagcuggaucguggaccggcagugggcccaggaccugacccugcccuggcaguccggcagcggcggggucuggcgcgagaugcaccaccucguggaguucgagcccccgcacgccgccacgauccgggugcuggcgcugggcaaccaggaggggucccucaagaccgcccugaccggcgccaugcgcgucaccaaggacacgaacgacaacaaccuguacaagcuccacgggggccacgugagcugccgggugaagcuguccgcccugacccucaagggcaccagcuacaagaucugcaccgacaagauguucuucgucaagaaccccacggacaccgggcacggcaccguggugaugcaggucaagguguccaagggggcgcccugccgcaucccggugaucgucgccgacgaccugaccgccgccaucaacaagggcauccuggugaccgugaacccgaucgccagcacgaacgacgacgagguccucaucgaggugaacccccccuucggcgacuccuacaucaucguggggcggggcgacagccgccugaccuaccaguggcacaaggagggguccagcaucggcaagcuguucacccagaccaugaagggggucgagcggcuggcggugaugggcgacacggccugggacuucuccagcgccggcggguucuucaccuccgugggcaaggggauccacaccgucuucggcagcgccuuccaggggcuguucggcggccucaacuggaucaccaaggugaucaugggggccgugcugaucugggucggcaucaacacgcgcaacaugaccauguccaugagcaugauccucgugggggugaucaugauguuccugagccugggcgucggggcgugaggacuaguacuggcugcaucucccuuuccucuguccuccauccuucucccaggauggugaagggggaccugguacccagugauccccaccccaggauccuaaaucaugacuuaccugcuaauaaaaacucauuggaaaagugagaagaucuaaaaaaaaaaaaaaaaaaaaaaaaaaaaaaaaaaaaaaaaaaaaaaaaaaaaaaaaaaaaaaaaugcaucccccccccccccccccccccccccccccccaaaggcucuuuucagagccaccagaauu

SEQ ID NO: 1026 - RNA, 2547 nt, Artificial Sequence
  mRNA product Design h-5 comprising derived and/or modified sequence from YFV__NC_002031.1__X-SS-prME-XX (polyprotein: aa92-788) (opt1)
gggagagggcgcuuggcuugcaaggacccugagcugcggcauugaagcacacccaacccaacucgacugaagucagccucacugaaccggaucugagaaucuucucucucugggcuugccagggcucuccgaaccuagcuagcauccucuucaauuccaacuagaaagcuuaccaugcgcggccugagcucccggaagcgccggagccacgacgugcucaccguccaguuccugauccuggggaugcuccugaugaccggcggggugacgcuggugcgcaagaaccgguggcuccugcugaacgucaccuccgaggaccucggcaagaccuucagcguggggaccggcaacugcacgaccaacauccuggaggccaaguacuggugccccgacuccauggaguacaacugccccaaccugagcccccgcgaggagcccgacgacaucgacugcuggugcuacggcguggagaacguccggguggccuacgggaagugcgacuccgcgggccgcagccggcgcucccggcgcgccaucgaccuccccacccacgagaaccacgggcugaagacccggcaggagaaguggaugacgggccgcaugggggagcggcagcugcagaagaucgagcgcugguucgugcggaacccguucuucgccgucaccgcccucaccaucgccuaccuggugggcagcaacaugacccagcgcguggucaucgcgcugcucgugcuggccgugggccccgccuacuccgcccacugcaucgggaucacggaccgggacuucaucgagggcguccacgggggcaccugggugagcgcgacccuggagcaggacaagugcgugaccgucauggcccccgacaagcccucccucgacaucagccuggagacgguggccaucgaccgcccggccgaggugcggaaggucugcuacaacgccgugcugacccacgugaagaucaacgacaagugccccuccaccggcgaggcgcaccucgccgaggagaacgagggggacaacgccugcaagcgcaccuacagcgaccgcggcugggggaacggcugcgggcuguucggcaagggcuccaucgucgccugcgccaaguucacgugcgccaagagcaugucccuguucgagguggaccagaccaagauccaguacgucauccgggcgcagcuccacgugggggccaagcaggagaacuggaacaccgacaucaagacccugaaguucgacgcccugagcggcagccaggagguggaguucaucggguacggcaaggccacgcucgagugccagguccagaccgcgguggacuucgggaacuccuacaucgccgagauggagaccgagagcuggaucguggaccgccagugggcccaggaccugacccugcccuggcaguccggcagcggcggggucuggcgggagaugcaccaccucguggaguucgagcccccgcacgccgccacgauccgcgugcuggcgcugggcaaccaggaggggucccucaagaccgcccugaccggcgccaugcgggucaccaaggacacgaacgacaacaaccuguacaagcuccacgggggccacgugagcugccgcgugaagcuguccgcccugacccucaagggcaccagcuacaagaucugcaccgacaagauguucuucgucaagaaccccacggacaccgggcacggcaccguggugaugcaggucaagguguccaagggggcgcccugccggauccccgugaucgucgccgacgaccugaccgccgccaucaacaagggcauccuggugaccgugaacccgaucgccagcacgaacgacgacgagguccucaucgaggugaacccgcccuucggcgacuccuacaucaucguggggcgcggcgacagccggcugaccuaccaguggcacaaggagggguccagcaucggcaagcuguucacccagaccaugaagggggucgagcgccucgcggugaugggcgacacggccugggacuucuccagcgccggcggguucuucaccuccgugggcaaggggauccacaccgucuucggcagcgccuuccaggggcuguucggcggccugaacuggaucaccaaggugaucaugggggccgugcugaucugggucggcaucaacacgcggaacaugaccauguccaugagcaugauccucgugggggugaucaugauguuccugagccugggcgucggggcggaccagggcugcgccaucaacuucggcaagugaggacuaguacuggcugcaucucccuuuccucuguccuccauccuucucccaggauggugaagggggaccugguacccagugauccccaccccaggauccuaaaucaugacuuaccugcuaauaaaaacucauuggaaaagugagaagaucuaaaaaaaaaaaaaaaaaaaaaaaaaaaaaaaaaaaaaaaaaaaaaaaaaaaaaaaaaaaaaaaaugcaucccccccccccccccccccccccccccccccaaaggcucuuuucagagccaccagaauu

SEQ ID NO: 1027 - RNA, 2484 nt, Artificial Sequence
  mRNA product Design h-5 comprising derived and/or modified sequence from YFV__NC_002031.1__SS-prME (polyprotein: M,aa104-778) (opt1)
gggagagggcgcuuggcuugcaaggacccugagcugcggcauugaagcacacccaacccaacucgacugaagucagccucacugaaccggaucugagaaucuucucucucugggcuugccagggcucuccgaaccuagcuagcauccucuucaauuccaacuagaaagcuuaccauggacgugcugaccguccaguuccucauccugggcaugcugcucaugaccgggggcgugacgcuggugcgcaagaaccgguggcugcuccugaacgucaccagcgaggaccuggggaagaccuucuccgugggcaccgggaacugcacgaccaacauccucgaggccaaguacuggugccccgacagcauggaguacaacugccccaaccugagcccccgcgaggagcccgacgacaucgacugcuggugcuacggcguggagaacguccggguggccuacggcaagugcgacuccgcggggcgcucccggcgcagccggcgcgccaucgaccugcccacccacgagaaccacggccucaagacccggcaggagaaguggaugacggggcgcaugggcgagcggcagcugcagaagaucgagcgcugguucgugcggaacccguucuucgccgucaccgcccugaccaucgccuaccucgugggguccaacaugacccagcgcguggucaucgcgcugcuggugcucgccgugggccccgccuacagcgcccacugcaucggcaucacggaccgggacuucaucgaggggguccacggcgggaccuggguguccgcgacccuggagcaggacaagugcgugaccgucauggcccccgacaagcccagccuggacaucucccucgagacgguggccaucgaccgcccggccgaggugcggaaggucugcuacaacgccgugcugacccacgugaagaucaacgacaagugccccagcaccggcgaggcgcaccuggccgaggagaacgagggcgacaacgccugcaagcgcaccuacuccgaccggggguggggcaacgggugcggccucuucgggaagggcagcaucgucgccugcgccaaguucacgugcgcgaaguccaugagccuguucgagguggaccagaccaagauccaguacgucauccgcgcccagcugcacgugggcgccaagcaggagaacuggaacaccgacaucaagacccucaaguucgacgcccuguccgggagccaggagguggaguucaucggcuacgggaaggccacgcuggagugccagguccagaccgcgguggacuucggcaacuccuacaucgccgagauggagaccgagagcuggaucguggaccggcagugggcccaggaccucacccugcccuggcagagcggguccggcggcgucuggcgcgagaugcaccaccugguggaguucgagcccccgcacgccgccacgauccgcgugcucgcgcuggggaaccaggagggcagccugaagaccgcccucaccggggccaugcgggucaccaaggacacgaacgacaacaaccuguacaagcugcacggcgggcacguguccugccgcgugaagcucagcgcccugacccugaagggcaccuccuacaagaucugcaccgacaagauguucuucgucaagaaccccacggacaccggccacgggaccguggugaugcaggucaaggugagcaagggcgcgcccugccggauccccgugaucgucgccgacgaccucaccgccgccaucaacaaggggauccuggugaccgugaacccgaucgccuccacgaacgacgacgagguccugaucgaggugaacccgcccuucggcgacagcuacaucaucgugggccgcggggacucccggcucaccuaccaguggcacaaggagggcagcuccaucgggaagcuguucacccagaccaugaagggcgucgagcgccuggcggugaugggggacacggccugggacuucagcuccgccggcggcuucuucaccagcguggggaagggcauccacaccgucuucggguccgccuuccagggccucuucgggggccugaacuggaucaccaaggugaucaugggcgccgugcugaucugggucgggaucaacacgcggaacaugaccaugagcauguccaugauccuggugggcgugaucaugauguuccucagccugggggucggcgcgugaggacuaguacuggcugcaucucccuuuccucuguccuccauccuucucccaggauggugaagggggaccugguacccagugauccccaccccaggauccuaaaucaugacuuaccugcuaauaaaaacucauuggaaaagugagaagaucuaaaaaaaaaaaaaaaaaaaaaaaaaaaaaaaaaaaaaaaaaaaaaaaaaaaaaaaaaaaaaaaaugcaucccccccccccccccccccccccccccccccaaaggcucuuuucagagccaccagaauu

SEQ ID NO: 1028 - RNA, 2511 nt, Artificial Sequence
  mRNA product Design h-5 comprising derived and/or modified sequence from YFV__NC_002031.1__SSIgE-prME-XX (polyprotein: aa122-788) (opt1)
gggagagggcgcuuggcuugcaaggacccugagcugcggcauugaagcacacccaacccaacucgacugaagucagccucacugaaccggaucugagaaucuucucucucugggcuugccagggcucuccgaaccuagcuagcauccucuucaauuccaacuagaaagcuuaccauggacuggaccuggauccuguuccucguggccgccgcgacccgcguccacagcgugacgcuggugcggaagaaccgcuggcugcuccugaacgucaccuccgaggaccugggcaagaccuucagcguggggaccggcaacugcacgaccaacauccucgaggccaaguacuggugccccgacuccauggaguacaacugccccaaccugagcccccgggaggagcccgacgacaucgacugcuggugcuacgggguggagaacguccgcguggccuacggcaagugcgacuccgccgggcggagccgccggucccgccgggccaucgaccugcccacccacgagaaccacggccucaagacccgccaggagaaguggaugacgggccggaugggggagcgccagcugcagaagaucgagcggugguucgugcgcaacccguucuucgcggucaccgcccugaccaucgccuaccucgugggcagcaacaugacccagcggguggucaucgcccugcuggugcucgcgguggggcccgccuacuccgcccacugcaucggcaucacggaccgcgacuucaucgaggggguccacggcggcaccugggugagcgccacccuggagcaggacaagugcgugaccgucauggcccccgacaagcccucccuggacaucagccucgagacgguggcgaucgaccggccggccgaggugcgcaaggucugcuacaacgccgugcugacccacgugaagaucaacgacaagugccccuccaccggggaggcccaccuggccgaggagaacgagggcgacaacgcgugcaagcggaccuacagcgaccgcggguggggcaacggcugcggccucuucgggaagggguccaucgucgccugcgccaaguucacgugcgccaagagcaugucccuguucgagguggaccagaccaagauccaguacgucauccgggcccagcugcacgugggcgcgaagcaggagaacuggaacaccgacaucaagacccucaaguucgacgcccugagcgggucccaggagguggaguucaucggcuacggcaaggccacgcuggagugccagguccagaccgccguggacuucgggaacagcuacaucgccgagauggagaccgagagcuggaucguggaccgccagugggcgcaggaccucacccugcccuggcaguccggcagcgggggcgucuggcgcgagaugcaccaccugguggaguucgagcccccgcacgccgccacgauccgggugcucgcccuggggaaccaggagggcucccugaagaccgcgcucaccggcgccaugcgcgucaccaaggacacgaacgacaacaaccuguacaagcugcacgggggccacgugagcugccgggugaagcucuccgcccugacccugaaggggaccagcuacaagaucugcaccgacaagauguucuucgucaagaaccccacggacaccggccacgggaccguggugaugcaggucaagguguccaagggcgcccccugccgcauccccgugaucgucgccgacgaccucaccgcggccaucaacaagggcauccuggugaccgugaacccgaucgccagcacgaacgacgacgagguccugaucgaggugaacccgcccuucggggacuccuacaucaucgugggccgcggggacagccggcucaccuaccaguggcacaaggagggcuccagcaucggcaagcuguucacccagaccaugaagggggucgagcggcuggccgugaugggcgacacggccugggacuucuccagcgccgggggcuucuucaccuccguggggaagggcauccacaccgucuucggcagcgcguuccaggggcuguucggcgggcucaacuggaucaccaaggugaucaugggcgccgugcugaucugggucgggaucaacacgcgcaacaugaccauguccaugagcaugauccucgugggcgugaucaugauguuccugucccugggcgucggggccgaccagggcugcgccaucaacuucgggaagugaggacuaguacuggcugcaucucccuuuccucuguccuccauccuucucccaggauggugaagggggaccugguacccagugauccccaccccaggauccuaaaucaugacuuaccugcuaauaaaaacucauuggaaaagugagaagaucuaaaaaaaaaaaaaaaaaaaaaaaaaaaaaaaaaaaaaaaaaaaaaaaaaaaaaaaaaaaaaaaaugcaucccccccccccccccccccccccccccccccaaaggcucuuuucagagccaccagaauu

SEQ ID NO: 1029 - RNA, 2481 nt, Artificial Sequence
  mRNA product Design h-5 comprising derived and/or modified sequence from YFV__NC_002031.1__SSIgE-prME (polyprotein: aa122-778) (opt1)
gggagagggcgcuuggcuugcaaggacccugagcugcggcauugaagcacacccaacccaacucgacugaagucagccucacugaaccggaucugagaaucuucucucucugggcuugccagggcucuccgaaccuagcuagcauccucuucaauuccaacuagaaagcuuaccauggacuggaccuggauccuguuccucguggccgccgcgacccgcguccacagcgugacgcuggugcggaagaaccgcuggcugcuccugaacgucaccuccgaggaccugggcaagaccuucagcguggggaccggcaacugcacgaccaacauccucgaggccaaguacuggugccccgacuccauggaguacaacugccccaaccugagcccccgggaggagcccgacgacaucgacugcuggugcuacgggguggagaacguccgcguggccuacggcaagugcgacuccgccgggcggagccgccggucccgccgggccaucgaccugcccacccacgagaaccacggccucaagacccgccaggagaaguggaugacgggccggaugggggagcgccagcugcagaagaucgagcggugguucgugcgcaacccguucuucgcggucaccgcccugaccaucgccuaccucgugggcagcaacaugacccagcggguggucaucgcccugcuggugcucgcgguggggcccgccuacuccgcccacugcaucggcaucacggaccgcgacuucaucgaggggguccacggcggcaccugggugagcgccacccuggagcaggacaagugcgugaccgucauggcccccgacaagcccucccuggacaucagccucgagacgguggcgaucgaccggccggccgaggugcgcaaggucugcuacaacgccgugcugacccacgugaagaucaacgacaagugccccuccaccggggaggcccaccuggccgaggagaacgagggcgacaacgcgugcaagcggaccuacagcgaccgcggguggggcaacggcugcggccucuucgggaagggguccaucgucgccugcgccaaguucacgugcgccaagagcaugucccuguucgagguggaccagaccaagauccaguacgucauccgggcccagcugcacgugggcgcgaagcaggagaacuggaacaccgacaucaagacccucaaguucgacgcccugagcgggucccaggagguggaguucaucggcuacggcaaggccacgcuggagugccagguccagaccgccguggacuucgggaacagcuacaucgccgagauggagaccgagagcuggaucguggaccgccagugggcgcaggaccucacccugcccuggcaguccggcagcgggggcgucuggcgcgagaugcaccaccugguggaguucgagcccccgcacgccgccacgauccgggugcucgcccuggggaaccaggagggcucccugaagaccgcgcucaccggcgccaugcgcgucaccaaggacacgaacgacaacaaccuguacaagcugcacgggggccacgugagcugccgggugaagcucuccgcccugacccugaaggggaccagcuacaagaucugcaccgacaagauguucuucgucaagaaccccacggacaccggccacgggaccguggugaugcaggucaagguguccaagggcgcccccugccgcauccccgugaucgucgccgacgaccucaccgcggccaucaacaagggcauccuggugaccgugaacccgaucgccagcacgaacgacgacgagguccugaucgaggugaacccgcccuucggggacuccuacaucaucgugggccgcggggacagccggcucaccuaccaguggcacaaggagggcuccagcaucggcaagcuguucacccagaccaugaagggggucgagcggcuggccgugaugggcgacacggccugggacuucuccagcgccgggggcuucuucaccuccguggggaagggcauccacaccgucuucggcagcgcguuccaggggcuguucggcgggcucaacuggaucaccaaggugaucaugggcgccgugcugaucugggucgggaucaacacgcgcaacaugaccauguccaugagcaugauccucgugggcgugaucaugauguuccugucccugggcgucggggccugaggacuaguacuggcugcaucucccuuuccucuguccuccauccuucucccaggauggugaagggggaccugguacccagugauccccaccccaggauccuaaaucaugacuuaccugcuaauaaaaacucauuggaaaagugagaagaucuaaaaaaaaaaaaaaaaaaaaaaaaaaaaaaaaaaaaaaaaaaaaaaaaaaaaaaaaaaaaaaaaugcaucccccccccccccccccccccccccccccccaaaggcucuuuucagagccaccagaauu

SEQ ID NO: 1030 - RNA, 2529 nt, Artificial Sequence
  mRNA product Design h-5 comprising derived and/or modified sequence from YFV__NC_002031.1__SSjev-prME-XX (polyprotein: aa122-788) (opt1)
gggagagggcgcuuggcuugcaaggacccugagcugcggcauugaagcacacccaacccaacucgacugaagucagccucacugaaccggaucugagaaucuucucucucugggcuugccagggcucuccgaaccuagcuagcauccucuucaauuccaacuagaaagcuuaccaugggcaagcgcagcgccggguccaucauguggcuggccagccucgcgguggucaucgccugcgccggcgccgugacccuggugcggaagaaccgcuggcugcuccugaacgucaccuccgaggaccuggggaagacguucagcgugggcaccgggaacugcaccaccaacauccucgaggccaaguacuggugccccgacuccauggaguacaacugccccaaccugagcccccgggaggagcccgacgacaucgacugcuggugcuacggcguggagaacguccgcguggcguacggcaagugcgacuccgccgggcggagccgccggucccgccgggccaucgaccugcccacgcacgagaaccacggccucaagacccgccaggagaaguggaugaccgggcggaugggcgagcgccagcugcagaagaucgagcggugguucgugcgcaacccguucuucgccgucaccgcgcugacgaucgccuaccucguggggagcaacaugacccagcggguggucaucgcccugcuggugcucgccgugggccccgccuacuccgcgcacugcaucggcaucaccgaccgcgacuucaucgaggggguccacggcgggaccugggugagcgccacgcuggagcaggacaagugcgugaccgucauggcccccgacaagcccucccuggacaucagccucgagaccguggccaucgaccggccggccgaggugcgcaaggucugcuacaacgcggugcugacccacgugaagaucaacgacaagugccccuccacgggcgaggcccaccuggccgaggagaacgagggcgacaacgccugcaagcggaccuacagcgaccgcggguggggcaacgggugcggccucuucgggaagggcuccaucgucgccugcgcgaaguucacgugcgccaagagcaugucccuguucgagguggaccagaccaagauccaguacgucauccgggcccagcugcacgugggcgccaagcaggagaacuggaacaccgacaucaagacccucaaguucgacgcccugagcgggagccaggagguggaguucaucggcuacgggaaggcgacccuggagugccagguccagaccgccguggacuucggcaacuccuacaucgccgagauggagacggagagcuggaucguggaccgccagugggcccaggaccucacccugcccuggcaguccgggagcggcggcgucuggcgcgagaugcaccaccugguggaguucgagcccccgcacgcggccaccauccgggugcucgcccuggggaaccaggagggcucccugaagaccgcccucacgggggccaugcgcgucaccaaggacaccaacgacaacaaccuguacaagcugcacggcgggcacgugagcugccgggugaagcucuccgcgcugacccugaagggcacgagcuacaagaucugcaccgacaagauguucuucgucaagaaccccaccgacaccggccacgggacgguggugaugcaggucaagguguccaagggcgcccccugccgcauccccgugaucgucgccgacgaccucaccgccgccaucaacaaggggauccuggugaccgugaacccgaucgcgagcaccaacgacgacgagguccugaucgaggugaacccgcccuucggcgacuccuacaucaucgugggccgcggggacagccggcucaccuaccaguggcacaaggagggcuccagcaucgggaagcuguucacgcagaccaugaagggcgucgagcggcuggccgugaugggggacaccgccugggacuucuccagcgccggcggcuucuucaccuccguggggaagggcauccacacggucuucgggagcgccuuccagggccucuucgggggccugaacuggaucaccaaggugaucaugggcgcggugcugaucugggucgggaucaacacccgcaacaugaccauguccaugagcaugauccucgugggcgugaucaugauguuccugagccugggggucggcgccgaccaggggugcgccaucaacuucggcaagugaggacuaguacuggcugcaucucccuuuccucuguccuccauccuucucccaggauggugaagggggaccugguacccagugauccccaccccaggauccuaaaucaugacuuaccugcuaauaaaaacucauuggaaaagugagaagaucuaaaaaaaaaaaaaaaaaaaaaaaaaaaaaaaaaaaaaaaaaaaaaaaaaaaaaaaaaaaaaaaaugcaucccccccccccccccccccccccccccccccaaaggcucuuuucagagccaccagaauu

SEQ ID NO: 1031 - RNA, 2499 nt, Artificial Sequence
  mRNA product Design h-5 comprising derived and/or modified sequence from YFV__NC_002031.1__SSjev-prME (polyprotein: aa122-778) (opt1)
gggagagggcgcuuggcuugcaaggacccugagcugcggcauugaagcacacccaacccaacucgacugaagucagccucacugaaccggaucugagaaucuucucucucugggcuugccagggcucuccgaaccuagcuagcauccucuucaauuccaacuagaaagcuuaccaugggcaagcgcagcgccggguccaucauguggcuggccagccucgcgguggucaucgccugcgccggcgccgugacccuggugcggaagaaccgcuggcugcuccugaacgucaccuccgaggaccuggggaagacguucagcgugggcaccgggaacugcaccaccaacauccucgaggccaaguacuggugccccgacuccauggaguacaacugccccaaccugagcccccgggaggagcccgacgacaucgacugcuggugcuacggcguggagaacguccgcguggcguacggcaagugcgacuccgccgggcggagccgccggucccgccgggccaucgaccugcccacgcacgagaaccacggccucaagacccgccaggagaaguggaugaccgggcggaugggcgagcgccagcugcagaagaucgagcggugguucgugcgcaacccguucuucgccgucaccgcgcugacgaucgccuaccucguggggagcaacaugacccagcggguggucaucgcccugcuggugcucgccgugggccccgccuacuccgcgcacugcaucggcaucaccgaccgcgacuucaucgaggggguccacggcgggaccugggugagcgccacgcuggagcaggacaagugcgugaccgucauggcccccgacaagcccucccuggacaucagccucgagaccguggccaucgaccggccggccgaggugcgcaaggucugcuacaacgcggugcugacccacgugaagaucaacgacaagugccccuccacgggcgaggcccaccuggccgaggagaacgagggcgacaacgccugcaagcggaccuacagcgaccgcggguggggcaacgggugcggccucuucgggaagggcuccaucgucgccugcgcgaaguucacgugcgccaagagcaugucccuguucgagguggaccagaccaagauccaguacgucauccgggcccagcugcacgugggcgccaagcaggagaacuggaacaccgacaucaagacccucaaguucgacgcccugagcgggagccaggagguggaguucaucggcuacgggaaggcgacccuggagugccagguccagaccgccguggacuucggcaacuccuacaucgccgagauggagacggagagcuggaucguggaccgccagugggcccaggaccucacccugcccuggcaguccgggagcggcggcgucuggcgcgagaugcaccaccugguggaguucgagcccccgcacgcggccaccauccgggugcucgcccuggggaaccaggagggcucccugaagaccgcccucacgggggccaugcgcgucaccaaggacaccaacgacaacaaccuguacaagcugcacggcgggcacgugagcugccgggugaagcucuccgcgcugacccugaagggcacgagcuacaagaucugcaccgacaagauguucuucgucaagaaccccaccgacaccggccacgggacgguggugaugcaggucaagguguccaagggcgcccccugccgcauccccgugaucgucgccgacgaccucaccgccgccaucaacaaggggauccuggugaccgugaacccgaucgcgagcaccaacgacgacgagguccugaucgaggugaacccgcccuucggcgacuccuacaucaucgugggccgcggggacagccggcucaccuaccaguggcacaaggagggcuccagcaucgggaagcuguucacgcagaccaugaagggcgucgagcggcuggccgugaugggggacaccgccugggacuucuccagcgccggcggcuucuucaccuccguggggaagggcauccacacggucuucgggagcgccuuccagggccucuucgggggccugaacuggaucaccaaggugaucaugggcgcggugcugaucugggucgggaucaacacccgcaacaugaccauguccaugagcaugauccucgugggcgugaucaugauguuccugagccugggggucggcgccugaggacuaguacuggcugcaucucccuuuccucuguccuccauccuucucccaggauggugaagggggaccugguacccagugauccccaccccaggauccuaaaucaugacuuaccugcuaauaaaaacucauuggaaaagugagaagaucuaaaaaaaaaaaaaaaaaaaaaaaaaaaaaaaaaaaaaaaaaaaaaaaaaaaaaaaaaaaaaaaaugcaucccccccccccccccccccccccccccccccaaaggcucuuuucagagccaccagaauu

SEQ ID NO: 1032 - RNA, 2547 nt, Artificial Sequence
  mRNA product Design h-5 comprising derived and/or modified sequence from YFV__NC_002031.1__X-SS-prME-XX (polyprotein: aa92-788) (opt2)
gggagagggcgcuuggcuugcaaggacccugagcugcggcauugaagcacacccaacccaacucgacugaagucagccucacugaaccggaucugagaaucuucucucucugggcuugccagggcucuccgaaccuagcuagcauccucuucaauuccaacuagaaagcuuaccaugcgcggccucuccucccgcaagcgccgcucccacgacguccucaccguccaguuccucauccucggcaugcuccucaugaccggcggcgucacccucguccgcaagaaccgcuggcuccuccucaacgucaccuccgaggaccucggcaagaccuucuccgucggcaccggcaacugcaccaccaacauccucgaggccaaguacuggugccccgacuccauggaguacaacugccccaaccucuccccccgcgaggagcccgacgacaucgacugcuggugcuacggcgucgagaacguccgcgucgccuacggcaagugcgacuccgccggccgcucccgccgcucccgccgcgccaucgaccuccccacccacgagaaccacggccucaagacccgccaggagaaguggaugaccggccgcaugggcgagcgccagcuccagaagaucgagcgcugguucguccgcaaccccuucuucgccgucaccgcccucaccaucgccuaccucgucggcuccaacaugacccagcgcgucgucaucgcccuccucguccucgccgucggccccgccuacuccgcccacugcaucggcaucaccgaccgcgacuucaucgagggcguccacggcggcaccugggucuccgccacccucgagcaggacaagugcgucaccgucauggcccccgacaagcccucccucgacaucucccucgagaccgucgccaucgaccgccccgccgagguccgcaaggucugcuacaacgccguccucacccacgucaagaucaacgacaagugccccuccaccggcgaggcccaccucgccgaggagaacgagggcgacaacgccugcaagcgcaccuacuccgaccgcggcuggggcaacggcugcggccucuucggcaagggcuccaucgucgccugcgccaaguucaccugcgccaaguccaugucccucuucgaggucgaccagaccaagauccaguacgucauccgcgcccagcuccacgucggcgccaagcaggagaacuggaacaccgacaucaagacccucaaguucgacgcccucuccggcucccaggaggucgaguucaucggcuacggcaaggccacccucgagugccagguccagaccgccgucgacuucggcaacuccuacaucgccgagauggagaccgaguccuggaucgucgaccgccagugggcccaggaccucacccuccccuggcaguccggcuccggcggcgucuggcgcgagaugcaccaccucgucgaguucgagcccccccacgccgccaccauccgcguccucgcccucggcaaccaggagggcucccucaagaccgcccucaccggcgccaugcgcgucaccaaggacaccaacgacaacaaccucuacaagcuccacggcggccacgucuccugccgcgucaagcucuccgcccucacccucaagggcaccuccuacaagaucugcaccgacaagauguucuucgucaagaaccccaccgacaccggccacggcaccgucgucaugcaggucaaggucuccaagggcgcccccugccgcauccccgucaucgucgccgacgaccucaccgccgccaucaacaagggcauccucgucaccgucaaccccaucgccuccaccaacgacgacgagguccucaucgaggucaacccccccuucggcgacuccuacaucaucgucggccgcggcgacucccgccucaccuaccaguggcacaaggagggcuccuccaucggcaagcucuucacccagaccaugaagggcgucgagcgccucgccgucaugggcgacaccgccugggacuucuccuccgccggcggcuucuucaccuccgucggcaagggcauccacaccgucuucggcuccgccuuccagggccucuucggcggccucaacuggaucaccaaggucaucaugggcgccguccucaucugggucggcaucaacacccgcaacaugaccauguccauguccaugauccucgucggcgucaucaugauguuccucucccucggcgucggcgccgaccagggcugcgccaucaacuucggcaagugaggacuaguacuggcugcaucucccuuuccucuguccuccauccuucucccaggauggugaagggggaccugguacccagugauccccaccccaggauccuaaaucaugacuuaccugcuaauaaaaacucauuggaaaagugagaagaucuaaaaaaaaaaaaaaaaaaaaaaaaaaaaaaaaaaaaaaaaaaaaaaaaaaaaaaaaaaaaaaaaugcaucccccccccccccccccccccccccccccccaaaggcucuuuucagagccaccagaauu

SEQ ID NO: 1033 - RNA, 2484 nt, Artificial Sequence
  mRNA product Design h-5 comprising derived and/or modified sequence from YFV__NC_002031.1__SS-prME (polyprotein: M,aa104-778) (opt2)
gggagagggcgcuuggcuugcaaggacccugagcugcggcauugaagcacacccaacccaacucgacugaagucagccucacugaaccggaucugagaaucuucucucucugggcuugccagggcucuccgaaccuagcuagcauccucuucaauuccaacuagaaagcuuaccauggacguccucaccguccaguuccucauccucggcaugcuccucaugaccggcggcgucacccucguccgcaagaaccgcuggcuccuccucaacgucaccuccgaggaccucggcaagaccuucuccgucggcaccggcaacugcaccaccaacauccucgaggccaaguacuggugccccgacuccauggaguacaacugccccaaccucuccccccgcgaggagcccgacgacaucgacugcuggugcuacggcgucgagaacguccgcgucgccuacggcaagugcgacuccgccggccgcucccgccgcucccgccgcgccaucgaccuccccacccacgagaaccacggccucaagacccgccaggagaaguggaugaccggccgcaugggcgagcgccagcuccagaagaucgagcgcugguucguccgcaaccccuucuucgccgucaccgcccucaccaucgccuaccucgucggcuccaacaugacccagcgcgucgucaucgcccuccucguccucgccgucggccccgccuacuccgcccacugcaucggcaucaccgaccgcgacuucaucgagggcguccacggcggcaccugggucuccgccacccucgagcaggacaagugcgucaccgucauggcccccgacaagcccucccucgacaucucccucgagaccgucgccaucgaccgccccgccgagguccgcaaggucugcuacaacgccguccucacccacgucaagaucaacgacaagugccccuccaccggcgaggcccaccucgccgaggagaacgagggcgacaacgccugcaagcgcaccuacuccgaccgcggcuggggcaacggcugcggccucuucggcaagggcuccaucgucgccugcgccaaguucaccugcgccaaguccaugucccucuucgaggucgaccagaccaagauccaguacgucauccgcgcccagcuccacgucggcgccaagcaggagaacuggaacaccgacaucaagacccucaaguucgacgcccucuccggcucccaggaggucgaguucaucggcuacggcaaggccacccucgagugccagguccagaccgccgucgacuucggcaacuccuacaucgccgagauggagaccgaguccuggaucgucgaccgccagugggcccaggaccucacccuccccuggcaguccggcuccggcggcgucuggcgcgagaugcaccaccucgucgaguucgagcccccccacgccgccaccauccgcguccucgcccucggcaaccaggagggcucccucaagaccgcccucaccggcgccaugcgcgucaccaaggacaccaacgacaacaaccucuacaagcuccacggcggccacgucuccugccgcgucaagcucuccgcccucacccucaagggcaccuccuacaagaucugcaccgacaagauguucuucgucaagaaccccaccgacaccggccacggcaccgucgucaugcaggucaaggucuccaagggcgcccccugccgcauccccgucaucgucgccgacgaccucaccgccgccaucaacaagggcauccucgucaccgucaaccccaucgccuccaccaacgacgacgagguccucaucgaggucaacccccccuucggcgacuccuacaucaucgucggccgcggcgacucccgccucaccuaccaguggcacaaggagggcuccuccaucggcaagcucuucacccagaccaugaagggcgucgagcgccucgccgucaugggcgacaccgccugggacuucuccuccgccggcggcuucuucaccuccgucggcaagggcauccacaccgucuucggcuccgccuuccagggccucuucggcggccucaacuggaucaccaaggucaucaugggcgccguccucaucugggucggcaucaacacccgcaacaugaccauguccauguccaugauccucgucggcgucaucaugauguuccucucccucggcgucggcgccugaggacuaguacuggcugcaucucccuuuccucuguccuccauccuucucccaggauggugaagggggaccugguacccagugauccccaccccaggauccuaaaucaugacuuaccugcuaauaaaaacucauuggaaaagugagaagaucuaaaaaaaaaaaaaaaaaaaaaaaaaaaaaaaaaaaaaaaaaaaaaaaaaaaaaaaaaaaaaaaaugcaucccccccccccccccccccccccccccccccaaaggcucuuuucagagccaccagaauu

SEQ ID NO: 1034 - RNA, 2511 nt, Artificial Sequence
  mRNA product Design h-5 comprising derived and/or modified sequence from YFV__NC_002031.1__SSIgE-prME-XX (polyprotein: aa122-788) (opt2)
gggagagggcgcuuggcuugcaaggacccugagcugcggcauugaagcacacccaacccaacucgacugaagucagccucacugaaccggaucugagaaucuucucucucugggcuugccagggcucuccgaaccuagcuagcauccucuucaauuccaacuagaaagcuuaccauggacuggaccuggauccucuuccucgucgccgccgccacccgcguccacuccgucacccucguccgcaagaaccgcuggcuccuccucaacgucaccuccgaggaccucggcaagaccuucuccgucggcaccggcaacugcaccaccaacauccucgaggccaaguacuggugccccgacuccauggaguacaacugccccaaccucuccccccgcgaggagcccgacgacaucgacugcuggugcuacggcgucgagaacguccgcgucgccuacggcaagugcgacuccgccggccgcucccgccgcucccgccgcgccaucgaccuccccacccacgagaaccacggccucaagacccgccaggagaaguggaugaccggccgcaugggcgagcgccagcuccagaagaucgagcgcugguucguccgcaaccccuucuucgccgucaccgcccucaccaucgccuaccucgucggcuccaacaugacccagcgcgucgucaucgcccuccucguccucgccgucggccccgccuacuccgcccacugcaucggcaucaccgaccgcgacuucaucgagggcguccacggcggcaccugggucuccgccacccucgagcaggacaagugcgucaccgucauggcccccgacaagcccucccucgacaucucccucgagaccgucgccaucgaccgccccgccgagguccgcaaggucugcuacaacgccguccucacccacgucaagaucaacgacaagugccccuccaccggcgaggcccaccucgccgaggagaacgagggcgacaacgccugcaagcgcaccuacuccgaccgcggcuggggcaacggcugcggccucuucggcaagggcuccaucgucgccugcgccaaguucaccugcgccaaguccaugucccucuucgaggucgaccagaccaagauccaguacgucauccgcgcccagcuccacgucggcgccaagcaggagaacuggaacaccgacaucaagacccucaaguucgacgcccucuccggcucccaggaggucgaguucaucggcuacggcaaggccacccucgagugccagguccagaccgccgucgacuucggcaacuccuacaucgccgagauggagaccgaguccuggaucgucgaccgccagugggcccaggaccucacccuccccuggcaguccggcuccggcggcgucuggcgcgagaugcaccaccucgucgaguucgagcccccccacgccgccaccauccgcguccucgcccucggcaaccaggagggcucccucaagaccgcccucaccggcgccaugcgcgucaccaaggacaccaacgacaacaaccucuacaagcuccacggcggccacgucuccugccgcgucaagcucuccgcccucacccucaagggcaccuccuacaagaucugcaccgacaagauguucuucgucaagaaccccaccgacaccggccacggcaccgucgucaugcaggucaaggucuccaagggcgcccccugccgcauccccgucaucgucgccgacgaccucaccgccgccaucaacaagggcauccucgucaccgucaaccccaucgccuccaccaacgacgacgagguccucaucgaggucaacccccccuucggcgacuccuacaucaucgucggccgcggcgacucccgccucaccuaccaguggcacaaggagggcuccuccaucggcaagcucuucacccagaccaugaagggcgucgagcgccucgccgucaugggcgacaccgccugggacuucuccuccgccggcggcuucuucaccuccgucggcaagggcauccacaccgucuucggcuccgccuuccagggccucuucggcggccucaacuggaucaccaaggucaucaugggcgccguccucaucugggucggcaucaacacccgcaacaugaccauguccauguccaugauccucgucggcgucaucaugauguuccucucccucggcgucggcgccgaccagggcugcgccaucaacuucggcaagugaggacuaguacuggcugcaucucccuuuccucuguccuccauccuucucccaggauggugaagggggaccugguacccagugauccccaccccaggauccuaaaucaugacuuaccugcuaauaaaaacucauuggaaaagugagaagaucuaaaaaaaaaaaaaaaaaaaaaaaaaaaaaaaaaaaaaaaaaaaaaaaaaaaaaaaaaaaaaaaaugcaucccccccccccccccccccccccccccccccaaaggcucuuuucagagccaccagaauu

SEQ ID NO: 1035 - RNA, 2481 nt, Artificial Sequence
  mRNA product Design h-5 comprising derived and/or modified sequence from YFV__NC_002031.1__SSIgE-prME (polyprotein: aa122-778) (opt2)
gggagagggcgcuuggcuugcaaggacccugagcugcggcauugaagcacacccaacccaacucgacugaagucagccucacugaaccggaucugagaaucuucucucucugggcuugccagggcucuccgaaccuagcuagcauccucuucaauuccaacuagaaagcuuaccauggacuggaccuggauccucuuccucgucgccgccgccacccgcguccacuccgucacccucguccgcaagaaccgcuggcuccuccucaacgucaccuccgaggaccucggcaagaccuucuccgucggcaccggcaacugcaccaccaacauccucgaggccaaguacuggugccccgacuccauggaguacaacugccccaaccucuccccccgcgaggagcccgacgacaucgacugcuggugcuacggcgucgagaacguccgcgucgccuacggcaagugcgacuccgccggccgcucccgccgcucccgccgcgccaucgaccuccccacccacgagaaccacggccucaagacccgccaggagaaguggaugaccggccgcaugggcgagcgccagcuccagaagaucgagcgcugguucguccgcaaccccuucuucgccgucaccgcccucaccaucgccuaccucgucggcuccaacaugacccagcgcgucgucaucgcccuccucguccucgccgucggccccgccuacuccgcccacugcaucggcaucaccgaccgcgacuucaucgagggcguccacggcggcaccugggucuccgccacccucgagcaggacaagugcgucaccgucauggcccccgacaagcccucccucgacaucucccucgagaccgucgccaucgaccgccccgccgagguccgcaaggucugcuacaacgccguccucacccacgucaagaucaacgacaagugccccuccaccggcgaggcccaccucgccgaggagaacgagggcgacaacgccugcaagcgcaccuacuccgaccgcggcuggggcaacggcugcggccucuucggcaagggcuccaucgucgccugcgccaaguucaccugcgccaaguccaugucccucuucgaggucgaccagaccaagauccaguacgucauccgcgcccagcuccacgucggcgccaagcaggagaacuggaacaccgacaucaagacccucaaguucgacgcccucuccggcucccaggaggucgaguucaucggcuacggcaaggccacccucgagugccagguccagaccgccgucgacuucggcaacuccuacaucgccgagauggagaccgaguccuggaucgucgaccgccagugggcccaggaccucacccuccccuggcaguccggcuccggcggcgucuggcgcgagaugcaccaccucgucgaguucgagcccccccacgccgccaccauccgcguccucgcccucggcaaccaggagggcucccucaagaccgcccucaccggcgccaugcgcgucaccaaggacaccaacgacaacaaccucuacaagcuccacggcggccacgucuccugccgcgucaagcucuccgcccucacccucaagggcaccuccuacaagaucugcaccgacaagauguucuucgucaagaaccccaccgacaccggccacggcaccgucgucaugcaggucaaggucuccaagggcgcccccugccgcauccccgucaucgucgccgacgaccucaccgccgccaucaacaagggcauccucgucaccgucaaccccaucgccuccaccaacgacgacgagguccucaucgaggucaacccccccuucggcgacuccuacaucaucgucggccgcggcgacucccgccucaccuaccaguggcacaaggagggcuccuccaucggcaagcucuucacccagaccaugaagggcgucgagcgccucgccgucaugggcgacaccgccugggacuucuccuccgccggcggcuucuucaccuccgucggcaagggcauccacaccgucuucggcuccgccuuccagggccucuucggcggccucaacuggaucaccaaggucaucaugggcgccguccucaucugggucggcaucaacacccgcaacaugaccauguccauguccaugauccucgucggcgucaucaugauguuccucucccucggcgucggcgccugaggacuaguacuggcugcaucucccuuuccucuguccuccauccuucucccaggauggugaagggggaccugguacccagugauccccaccccaggauccuaaaucaugacuuaccugcuaauaaaaacucauuggaaaagugagaagaucuaaaaaaaaaaaaaaaaaaaaaaaaaaaaaaaaaaaaaaaaaaaaaaaaaaaaaaaaaaaaaaaaugcaucccccccccccccccccccccccccccccccaaaggcucuuuucagagccaccagaauu

SEQ ID NO: 1036 - RNA, 2529 nt, Artificial Sequence
  mRNA product Design h-5 comprising derived and/or modified sequence from YFV__NC_002031.1__SSjev-prME-XX (polyprotein: aa122-788) (opt2)
gggagagggcgcuuggcuugcaaggacccugagcugcggcauugaagcacacccaacccaacucgacugaagucagccucacugaaccggaucugagaaucuucucucucugggcuugccagggcucuccgaaccuagcuagcauccucuucaauuccaacuagaaagcuuaccaugggcaagcgcuccgccggcuccaucauguggcucgccucccucgccgucgucaucgccugcgccggcgccgucacccucguccgcaagaaccgcuggcuccuccucaacgucaccuccgaggaccucggcaagaccuucuccgucggcaccggcaacugcaccaccaacauccucgaggccaaguacuggugccccgacuccauggaguacaacugccccaaccucuccccccgcgaggagcccgacgacaucgacugcuggugcuacggcgucgagaacguccgcgucgccuacggcaagugcgacuccgccggccgcucccgccgcucccgccgcgccaucgaccuccccacccacgagaaccacggccucaagacccgccaggagaaguggaugaccggccgcaugggcgagcgccagcuccagaagaucgagcgcugguucguccgcaaccccuucuucgccgucaccgcccucaccaucgccuaccucgucggcuccaacaugacccagcgcgucgucaucgcccuccucguccucgccgucggccccgccuacuccgcccacugcaucggcaucaccgaccgcgacuucaucgagggcguccacggcggcaccugggucuccgccacccucgagcaggacaagugcgucaccgucauggcccccgacaagcccucccucgacaucucccucgagaccgucgccaucgaccgccccgccgagguccgcaaggucugcuacaacgccguccucacccacgucaagaucaacgacaagugccccuccaccggcgaggcccaccucgccgaggagaacgagggcgacaacgccugcaagcgcaccuacuccgaccgcggcuggggcaacggcugcggccucuucggcaagggcuccaucgucgccugcgccaaguucaccugcgccaaguccaugucccucuucgaggucgaccagaccaagauccaguacgucauccgcgcccagcuccacgucggcgccaagcaggagaacuggaacaccgacaucaagacccucaaguucgacgcccucuccggcucccaggaggucgaguucaucggcuacggcaaggccacccucgagugccagguccagaccgccgucgacuucggcaacuccuacaucgccgagauggagaccgaguccuggaucgucgaccgccagugggcccaggaccucacccuccccuggcaguccggcuccggcggcgucuggcgcgagaugcaccaccucgucgaguucgagcccccccacgccgccaccauccgcguccucgcccucggcaaccaggagggcucccucaagaccgcccucaccggcgccaugcgcgucaccaaggacaccaacgacaacaaccucuacaagcuccacggcggccacgucuccugccgcgucaagcucuccgcccucacccucaagggcaccuccuacaagaucugcaccgacaagauguucuucgucaagaaccccaccgacaccggccacggcaccgucgucaugcaggucaaggucuccaagggcgcccccugccgcauccccgucaucgucgccgacgaccucaccgccgccaucaacaagggcauccucgucaccgucaaccccaucgccuccaccaacgacgacgagguccucaucgaggucaacccccccuucggcgacuccuacaucaucgucggccgcggcgacucccgccucaccuaccaguggcacaaggagggcuccuccaucggcaagcucuucacccagaccaugaagggcgucgagcgccucgccgucaugggcgacaccgccugggacuucuccuccgccggcggcuucuucaccuccgucggcaagggcauccacaccgucuucggcuccgccuuccagggccucuucggcggccucaacuggaucaccaaggucaucaugggcgccguccucaucugggucggcaucaacacccgcaacaugaccauguccauguccaugauccucgucggcgucaucaugauguuccucucccucggcgucggcgccgaccagggcugcgccaucaacuucggcaagugaggacuaguacuggcugcaucucccuuuccucuguccuccauccuucucccaggauggugaagggggaccugguacccagugauccccaccccaggauccuaaaucaugacuuaccugcuaauaaaaacucauuggaaaagugagaagaucuaaaaaaaaaaaaaaaaaaaaaaaaaaaaaaaaaaaaaaaaaaaaaaaaaaaaaaaaaaaaaaaaugcaucccccccccccccccccccccccccccccccaaaggcucuuuucagagccaccagaauu

SEQ ID NO: 1037 - RNA, 2499 nt, Artificial Sequence
  mRNA product Design h-5 comprising derived and/or modified sequence from YFV__NC_002031.1__SSjev-prME (polyprotein: aa122-778) (opt2)
gggagagggcgcuuggcuugcaaggacccugagcugcggcauugaagcacacccaacccaacucgacugaagucagccucacugaaccggaucugagaaucuucucucucugggcuugccagggcucuccgaaccuagcuagcauccucuucaauuccaacuagaaagcuuaccaugggcaagcgcuccgccggcuccaucauguggcucgccucccucgccgucgucaucgccugcgccggcgccgucacccucguccgcaagaaccgcuggcuccuccucaacgucaccuccgaggaccucggcaagaccuucuccgucggcaccggcaacugcaccaccaacauccucgaggccaaguacuggugccccgacuccauggaguacaacugccccaaccucuccccccgcgaggagcccgacgacaucgacugcuggugcuacggcgucgagaacguccgcgucgccuacggcaagugcgacuccgccggccgcucccgccgcucccgccgcgccaucgaccuccccacccacgagaaccacggccucaagacccgccaggagaaguggaugaccggccgcaugggcgagcgccagcuccagaagaucgagcgcugguucguccgcaaccccuucuucgccgucaccgcccucaccaucgccuaccucgucggcuccaacaugacccagcgcgucgucaucgcccuccucguccucgccgucggccccgccuacuccgcccacugcaucggcaucaccgaccgcgacuucaucgagggcguccacggcggcaccugggucuccgccacccucgagcaggacaagugcgucaccgucauggcccccgacaagcccucccucgacaucucccucgagaccgucgccaucgaccgccccgccgagguccgcaaggucugcuacaacgccguccucacccacgucaagaucaacgacaagugccccuccaccggcgaggcccaccucgccgaggagaacgagggcgacaacgccugcaagcgcaccuacuccgaccgcggcuggggcaacggcugcggccucuucggcaagggcuccaucgucgccugcgccaaguucaccugcgccaaguccaugucccucuucgaggucgaccagaccaagauccaguacgucauccgcgcccagcuccacgucggcgccaagcaggagaacuggaacaccgacaucaagacccucaaguucgacgcccucuccggcucccaggaggucgaguucaucggcuacggcaaggccacccucgagugccagguccagaccgccgucgacuucggcaacuccuacaucgccgagauggagaccgaguccuggaucgucgaccgccagugggcccaggaccucacccuccccuggcaguccggcuccggcggcgucuggcgcgagaugcaccaccucgucgaguucgagcccccccacgccgccaccauccgcguccucgcccucggcaaccaggagggcucccucaagaccgcccucaccggcgccaugcgcgucaccaaggacaccaacgacaacaaccucuacaagcuccacggcggccacgucuccugccgcgucaagcucuccgcccucacccucaagggcaccuccuacaagaucugcaccgacaagauguucuucgucaagaaccccaccgacaccggccacggcaccgucgucaugcaggucaaggucuccaagggcgcccccugccgcauccccgucaucgucgccgacgaccucaccgccgccaucaacaagggcauccucgucaccgucaaccccaucgccuccaccaacgacgacgagguccucaucgaggucaacccccccuucggcgacuccuacaucaucgucggccgcggcgacucccgccucaccuaccaguggcacaaggagggcuccuccaucggcaagcucuucacccagaccaugaagggcgucgagcgccucgccgucaugggcgacaccgccugggacuucuccuccgccggcggcuucuucaccuccgucggcaagggcauccacaccgucuucggcuccgccuuccagggccucuucggcggccucaacuggaucaccaaggucaucaugggcgccguccucaucugggucggcaucaacacccgcaacaugaccauguccauguccaugauccucgucggcgucaucaugauguuccucucccucggcgucggcgccugaggacuaguacuggcugcaucucccuuuccucuguccuccauccuucucccaggauggugaagggggaccugguacccagugauccccaccccaggauccuaaaucaugacuuaccugcuaauaaaaacucauuggaaaagugagaagaucuaaaaaaaaaaaaaaaaaaaaaaaaaaaaaaaaaaaaaaaaaaaaaaaaaaaaaaaaaaaaaaaaugcaucccccccccccccccccccccccccccccccaaaggcucuuuucagagccaccagaauu

SEQ ID NO: 1038 - RNA, 2547 nt, Artificial Sequence
  mRNA product Design h-5 comprising derived and/or modified sequence from YFV__NC_002031.1__X-SS-prME-XX (polyprotein: aa92-788) (opt3)
gggagagggcgcuuggcuugcaaggacccugagcugcggcauugaagcacacccaacccaacucgacugaagucagccucacugaaccggaucugagaaucuucucucucugggcuugccagggcucuccgaaccuagcuagcauccucuucaauuccaacuagaaagcuuaccaugagaggccugagcuccaggaagcggcgcucucacgacgugcucaccguccaguuccuuauccuggggauguuguuaaugacaggagguguuacucuggugcguaaaaaccgauggcuacuccugaauguaacgucagaggaucuuggcaagaccuuuaguguggggacaggaaacugcacuaccaauauucuggaagccaaauacuggugucccgacagcauggaguauaacugcccuaauuuguccccaagagaggaaccggaugacauagauuguuggugcuacggcgucgaaaacgugaggguugcuuaugguaagugugacucugcagggcggucgcgcagaucaaggcgggccaucgaucuccccacacaugagaaucacggacugaaaacccgccaagagaaguggaugacuggccgaaugggcgaaagacagcugcagaagauugagaggugguucgugcggaacccuuucuucgcggucacagcucucaccaucgccuacuuaguggggagcaauaugacgcagcguguaguuauugcacugcuuguguuggccgucggaccagcuuauagugcacauugcaucgguauaacugaccgcgauuuuaucgaaggcgugcacgggggaaccuggguguccgccacacuggagcaagacaaaugugucacuguuauggcucccgauaagccuucucuagacauuagccucgagaccguggccaucgauagaccagcggaaguaaggaaagugugcuacaacgcaguccugacacaugugaagauuaaugacaaaugucccuccaccggcgaggcccaccuugcugaagagaacgaaggugacaaugccugcaagcggacguauucagaucgaggguggggaaacggcuguggccuguucgggaagggaaguaucguugcaugcgcuaaauuuacuugcgccaagagcaugucuuuguucgagguggaccagacaaaaauacaguacgucauucgcgcgcagcuccacgugggugccaagcaagagaauuggaacaccgauaucaaaacucugaaguuugacgcauuauccggcucacaggaaguagaguucauuggguacggaaaagcuacacuggaaugucagguucagaccgccguggauuuuggcaacagcuauaucgcugagauggaaacggagaguuggaucgucgacagacaaugggcccaggaucucacccuuccuuggcagucugguuccgggggcguguggagggagaugcaucaccuggucgaauuugagccaccgcaugcagccacaauucggguguuggcucuaggaaaucaagaaggcagccugaagacugcgcucaccggggcaaugcgcguuacaaaggacacuaacgauaauaaccuguacaaacuucacggaggucacgugucgugcagaguaaagcugucugccuugacccucaaaggcacauccuauaagauauguaccgacaaaauguuuuucgucaagaaucccacugauacggggcauggaacagugguuaugcaagugaaggucucaaaaggcgcuccuugcaggaucccagugauuguagccgacgaccugaccgcagccaucaacaaggguauauuagugacuguuaaucccauugcuaguaccaacgaugacgagguccugaucgaagugaauccuccauucggggauagcuacaucauugugggccguggagacucccggcuaacauaucaguggcacaaagagggcucuagcaucgggaagcucuuuacccagacuaugaaaggagucgagcgacuggccguuaugggugauacagcaugggacuucucaagugcgggcggguuuuucacguccgugggaaagggcauucauaccguguuugguagcgcuuuccaggggcuuuuuggcggauugaacuggauaacuaagguaaucaugggcgccguccugauuuggguggggaucaauacaagaaacaugaccaugucuaugucaaugauccucguuggagugauuaugauguuccugagucuuggcgucggugcagaucaggggugugccauaaauuuuggaaaaugaggacuaguacuggcugcaucucccuuuccucuguccuccauccuucucccaggauggugaagggggaccugguacccagugauccccaccccaggauccuaaaucaugacuuaccugcuaauaaaaacucauuggaaaagugagaagaucuaaaaaaaaaaaaaaaaaaaaaaaaaaaaaaaaaaaaaaaaaaaaaaaaaaaaaaaaaaaaaaaaugcaucccccccccccccccccccccccccccccccaaaggcucuuuucagagccaccagaauu

SEQ ID NO: 1039 - RNA, 2484 nt, Artificial Sequence
  mRNA product Design h-5 comprising derived and/or modified sequence from YFV__NC_002031.1__SS-prME (polyprotein: M,aa104-778) (opt3)
gggagagggcgcuuggcuugcaaggacccugagcugcggcauugaagcacacccaacccaacucgacugaagucagccucacugaaccggaucugagaaucuucucucucugggcuugccagggcucuccgaaccuagcuagcauccucuucaauuccaacuagaaagcuuaccauggacgugcugaccguccaguuccucauccuuggcaugcuguugaugacagggggaguuacuuuagugagaaagaacagguggcugcuacucaauguaacgagcgaggaucuggguaaaaccuuuuccgugggcacagggaacugcacuaccaauauucuugaagccaaguacuggugucccgacucuauggaguauaacugcccuaaucugucaccacgggaggaaccggaugacauagauuguuggugcuacggagucgaaaacgugcgcguugcuuauggcaaaugugacagugcaggucgaagccguagauccaggcgggccaucgauuugcccacacacgagaaucaugggcucaagacccgccaagagaaauggaugacuggaagaaugggcgaaaggcagcugcagaagauugagcggugguucgugcgcaacccuuucuucgcggucacagcucugaccaucgccuaccucgugggcucuaauaugacgcagcgaguaguuauugcauuacuggugcuugccgucgggccagcuuauucggcacacugcaucggaauaacugacagagauuuuaucgaaggugugcauggcgggaccugggugucagccacauuggagcaagacaagugugucacuguuauggcucccgauaaaccuagccuggacauuagucuagagaccguggccaucgauaggccagcggaaguacggaaggugugcuacaacgcaguccucacacacgugaaaauuaaugacaagugucccuccaccggagaggcccaucuggcugaagagaacgaaggcgacaaugccugcaaacguacguauucugaucgcgguugggggaacggauguggccuuuucggcaaggggagcaucguugcaugcgcuaaguuuacuugcgccaaauccaugucacuguucgagguggaccagacaaagauacaguacgucauuagagcgcaguugcacgugggagccaaacaagagaauuggaacaccgauaucaagacucucaaauuugacgcacugagugguagccaggaaguagaguucauuggcuacgggaaggcuacauuagaaugucagguucagaccgccguggauuuuggaaacucuuauaucgcugagauggaaacggaguccuggaucgucgacaggcaaugggcccaggaucugacccucccuuggcagucaggcagcggugggguguggcgggagaugcaccaucuugucgaauuugagccaccgcacgcagccacaauucgagugcuggcuuugggcaaucaagaaggaagucuaaaaacugcgcugaccggcgcaaugcgcguuacaaaggacacuaacgauaauaaccucuacaagcugcaugggggacacgugucuugcagaguaaaacuuuccgcccugaccuugaaggguacaagcuauaaaauauguaccgacaagauguuuuucgucaaaaaucccacugauacgggccacgggacagugguuaugcaagugaaggucucgaagggagcuccuugcaggaucccagugauuguagccgacgaccucaccgcagccaucaacaaaggcauacuggugacuguuaaucccauugcuucuaccaacgaugacgaggucuuaaucgaagugaauccuccauucggugauuccuacaucauuguggggcggggcgacucacgccugacauaucaguggcauaaggagggaaguagcaucggcaaacuauuuacccagacuaugaagggggucgagagacucgccguuaugggagauacagcaugggacuucuccucugcggguggcuuuuucacgagcguggggaaaggcauucacaccguguuuggaucagcuuuccagggucuguuugggggccuuaacuggauaacuaagguaaucaugggagccgucuugauuugggugggcaucaauacaaggaacaugaccaugaguauguccaugauccugguuggggugauuaugauguuccucagccugggagucggcgcaugaggacuaguacuggcugcaucucccuuuccucuguccuccauccuucucccaggauggugaagggggaccugguacccagugauccccaccccaggauccuaaaucaugacuuaccugcuaauaaaaacucauuggaaaagugagaagaucuaaaaaaaaaaaaaaaaaaaaaaaaaaaaaaaaaaaaaaaaaaaaaaaaaaaaaaaaaaaaaaaaugcaucccccccccccccccccccccccccccccccaaaggcucuuuucagagccaccagaauu

SEQ ID NO: 1040 - RNA, 2511 nt, Artificial Sequence
  mRNA product Design h-5 comprising derived and/or modified sequence from YFV__NC_002031.1__SSIgE-prME-XX (polyprotein: aa122-788) (opt3)
gggagagggcgcuuggcuugcaaggacccugagcugcggcauugaagcacacccaacccaacucgacugaagucagccucacugaaccggaucugagaaucuucucucucugggcuugccagggcucuccgaaccuagcuagcauccucuucaauuccaacuagaaagcuuaccauggacuggaccuggauccuguuccucguggccgcugcaacaagaguccacagcguuacucuggugcguaaaaaccgauggcuacuccugaauguaacgucagaggaucuuggcaagaccuuuaguguggggacaggaaacugcacuaccaauauucuggaagccaaauacuggugucccgacagcauggaguauaacugcccuaauuuguccccaagagaggaaccggaugacauagauuguuggugcuacggcgucgaaaacgugaggguugcuuaugguaagugugacucugcagggcggucgcgcagaucaaggcgggccaucgaucuccccacacaugagaaucacggacugaaaacccgccaagagaaguggaugacuggccgaaugggcgaaagacagcugcagaagauugagaggugguucgugcggaacccuuucuucgcggucacagcucucaccaucgccuacuuaguggggagcaauaugacgcagcguguaguuauugcacugcuuguguuggccgucggaccagcuuauagugcacauugcaucgguauaacugaccgcgauuuuaucgaaggcgugcacgggggaaccuggguguccgccacacuggagcaagacaaaugugucacuguuauggcucccgauaagccuucucuagacauuagccucgagaccguggccaucgauagaccagcggaaguaaggaaagugugcuacaacgcaguccugacacaugugaagauuaaugacaaaugucccuccaccggcgaggcccaccuugcugaagagaacgaaggugacaaugccugcaagcggacguauucagaucgaggguggggaaacggcuguggccuguucgggaagggaaguaucguugcaugcgcuaaauuuacuugcgccaagagcaugucuuuguucgagguggaccagacaaaaauacaguacgucauucgcgcgcagcuccacgugggugccaagcaagagaauuggaacaccgauaucaaaacucugaaguuugacgcauuauccggcucacaggaaguagaguucauuggguacggaaaagcuacacuggaaugucagguucagaccgccguggauuuuggcaacagcuauaucgcugagauggaaacggagaguuggaucgucgacagacaaugggcccaggaucucacccuuccuuggcagucugguuccgggggcguguggagggagaugcaucaccuggucgaauuugagccaccgcaugcagccacaauucggguguuggcucuaggaaaucaagaaggcagccugaagacugcgcucaccggggcaaugcgcguuacaaaggacacuaacgauaauaaccuguacaaacuucacggaggucacgugucgugcagaguaaagcugucugccuugacccucaaaggcacauccuauaagauauguaccgacaaaauguuuuucgucaagaaucccacugauacggggcauggaacagugguuaugcaagugaaggucucaaaaggcgcuccuugcaggaucccagugauuguagccgacgaccugaccgcagccaucaacaaggguauauuagugacuguuaaucccauugcuaguaccaacgaugacgagguccugaucgaagugaauccuccauucggggauagcuacaucauugugggccguggagacucccggcuaacauaucaguggcacaaagagggcucuagcaucgggaagcucuuuacccagacuaugaaaggagucgagcgacuggccguuaugggugauacagcaugggacuucucaagugcgggcggguuuuucacguccgugggaaagggcauucauaccguguuugguagcgcuuuccaggggcuuuuuggcggauugaacuggauaacuaagguaaucaugggcgccguccugauuuggguggggaucaauacaagaaacaugaccaugucuaugucaaugauccucguuggagugauuaugauguuccugagucuuggcgucggugcagaucaggggugugccauaaauuuuggaaaaugaggacuaguacuggcugcaucucccuuuccucuguccuccauccuucucccaggauggugaagggggaccugguacccagugauccccaccccaggauccuaaaucaugacuuaccugcuaauaaaaacucauuggaaaagugagaagaucuaaaaaaaaaaaaaaaaaaaaaaaaaaaaaaaaaaaaaaaaaaaaaaaaaaaaaaaaaaaaaaaaugcaucccccccccccccccccccccccccccccccaaaggcucuuuucagagccaccagaauu

SEQ ID NO: 1041 - RNA, 2481 nt, Artificial Sequence
  mRNA product Design h-5 comprising derived and/or modified sequence from YFV__NC_002031.1__SSIgE-prME (polyprotein: aa122-778) (opt3)
gggagagggcgcuuggcuugcaaggacccugagcugcggcauugaagcacacccaacccaacucgacugaagucagccucacugaaccggaucugagaaucuucucucucugggcuugccagggcucuccgaaccuagcuagcauccucuucaauuccaacuagaaagcuuaccauggacuggaccuggauccuguuccucguggccgcugcaacaagaguccacagcgugacccuggucagaaagaacagguggcuccuucugaauguuacaagcgaggacuugggcaaaacuuucuccguggggacgggaaacugcaccacaaauaucuuagaagccaaguacuggugucccgauucuauggaguauaacugcccuaaucugucaccacgggaggaaccggacgauauugacuguuggugcuacgguguagaaaacgugcgcgucgcuuauggcaaaugugauagugcagggcgaagccguagauccaggcgggccauagaccuacccacucacgagaaucauggacucaagacccgccaggagaaauggaugacaggcagaaugggugaaaggcaacugcagaagaucgagcggugguuugugcgcaacccuuucuuugcgguuaccgcucuuacuauugccuaccugguggggucuaauaugacacagcgagucgugaucgcauugcucguacuggccguuggaccagcuuauucggcacacugcauuggcaucaccgauagagacuucauagaaggcgugcaugggggaacgugggucucagccacucuggagcaggauaagugugugaccgugauggcucccgacaaaccuagccucgauaucaguuuagagacagucgccauugacaggccagcggaaguucggaaggugugcuacaacgcaguacugacucacgugaaaaucaaugauaagugucccuccaccggugaggcccaucuugcugaagagaacgaaggcgacaaugccugcaaacguacauauucugaccgcggguggggaaacggcugugguuuguuugggaagggaagcauugucgcaugcgcuaaguuuaccugcgccaaauccaugucacuguucgagguggaucaaacgaagauccaguacguuauaagagcgcagcuacacgugggcgccaaacaggagaauuggaacacugacauuaagacacucaaauucgaugcacugaguggcagccaagaagucgaguuuaucggguacggaaaggcuacccuugaaugucaggugcagacugccguagacuucgguaacucuuauauugcugagauggaaacagaguccuggaucguugauaggcagugggcccaagaccugaccuugccuuggcagucaggcagcgggggaguguggcgggagaugcaccaucucgucgaauuugagccaccgcacgcagccacgauccgagugcuggcuuuaggcaaucaggaagguagucugaaaaccgcgcucacaggggcaaugcgcgucacuaaggauaccaacgacaauaaccuuuacaagcugcauggcggacacgugucuugcagaguuaaauuguccgcccuaacacugaagggcacuagcuauaaaauuuguaccgauaagauguucuuugugaaaaaucccacagacaccgggcacggaacuguagucaugcaagugaagguuucgaagggugcuccuugcaggauaccagugaucgucgccgaugaccucacggcagccauuaacaaaggcauccuggugacaguaaaucccauagcuucuaccaacgacgaugaggugcuuauugaaguuaauccuccauucggggacuccuacaucaucgucggacggggcgauucacgccugacuuaucaguggcauaaggaggguaguagcauugggaaauuguucacccagacaaugaagggcguggagagacucgccgugaugggagacaccgcaugggauuuuuccucugcgggcggguucuuuacuagcgucggaaaagguauccacacaguuuucggcucagcuuuucaggggcuguucggaggcuuaaacuggauuacgaaggugauaaugggugccgugcugaucuggguagggauuaauaccaggaacaugacuaugaguauguccaugauccuagucggcgugaucaugauguuucucagccugggaguuggcgcaugaggacuaguacuggcugcaucucccuuuccucuguccuccauccuucucccaggauggugaagggggaccugguacccagugauccccaccccaggauccuaaaucaugacuuaccugcuaauaaaaacucauuggaaaagugagaagaucuaaaaaaaaaaaaaaaaaaaaaaaaaaaaaaaaaaaaaaaaaaaaaaaaaaaaaaaaaaaaaaaaugcaucccccccccccccccccccccccccccccccaaaggcucuuuucagagccaccagaauu

SEQ ID NO: 1042 - RNA, 2529 nt, Artificial Sequence
  mRNA product Design h-5 comprising derived and/or modified sequence from YFV__NC_002031.1__SSjev-prME-XX (polyprotein: aa122-788) (opt3)
gggagagggcgcuuggcuugcaaggacccugagcugcggcauugaagcacacccaacccaacucgacugaagucagccucacugaaccggaucugagaaucuucucucucugggcuugccagggcucuccgaaccuagcuagcauccucuucaauuccaacuagaaagcuuaccaugggcaagagaagcgccggguccaucauguggcuggcuucucucgcaguggucauugccugcgcgggagcuguuacucuggugcguaaaaaccgauggcuacuccugaauguaacgucagaggaucuuggcaagaccuuuaguguggggacaggaaacugcacuaccaauauucuggaagccaaauacuggugucccgacagcauggaguauaacugcccuaauuuguccccaagagaggaaccggaugacauagauuguuggugcuacggcgucgaaaacgugaggguugcuuaugguaagugugacucugcagggcggucgcgcagaucaaggcgggccaucgaucuccccacacaugagaaucacggacugaaaacccgccaagagaaguggaugacuggccgaaugggcgaaagacagcugcagaagauugagaggugguucgugcggaacccuuucuucgcggucacagcucucaccaucgccuacuuaguggggagcaauaugacgcagcguguaguuauugcacugcuuguguuggccgucggaccagcuuauagugcacauugcaucgguauaacugaccgcgauuuuaucgaaggcgugcacgggggaaccuggguguccgccacacuggagcaagacaaaugugucacuguuauggcucccgauaagccuucucuagacauuagccucgagaccguggccaucgauagaccagcggaaguaaggaaagugugcuacaacgcaguccugacacaugugaagauuaaugacaaaugucccuccaccggcgaggcccaccuugcugaagagaacgaaggugacaaugccugcaagcggacguauucagaucgaggguggggaaacggcuguggccuguucgggaagggaaguaucguugcaugcgcuaaauuuacuugcgccaagagcaugucuuuguucgagguggaccagacaaaaauacaguacgucauucgcgcgcagcuccacgugggugccaagcaagagaauuggaacaccgauaucaaaacucugaaguuugacgcauuauccggcucacaggaaguagaguucauuggguacggaaaagcuacacuggaaugucagguucagaccgccguggauuuuggcaacagcuauaucgcugagauggaaacggagaguuggaucgucgacagacaaugggcccaggaucucacccuuccuuggcagucugguuccgggggcguguggagggagaugcaucaccuggucgaauuugagccaccgcaugcagccacaauucggguguuggcucuaggaaaucaagaaggcagccugaagacugcgcucaccggggcaaugcgcguuacaaaggacacuaacgauaauaaccuguacaaacuucacggaggucacgugucgugcagaguaaagcugucugccuugacccucaaaggcacauccuauaagauauguaccgacaaaauguuuuucgucaagaaucccacugauacggggcauggaacagugguuaugcaagugaaggucucaaaaggcgcuccuugcaggaucccagugauuguagccgacgaccugaccgcagccaucaacaaggguauauuagugacuguuaaucccauugcuaguaccaacgaugacgagguccugaucgaagugaauccuccauucggggauagcuacaucauugugggccguggagacucccggcuaacauaucaguggcacaaagagggcucuagcaucgggaagcucuuuacccagacuaugaaaggagucgagcgacuggccguuaugggugauacagcaugggacuucucaagugcgggcggguuuuucacguccgugggaaagggcauucauaccguguuugguagcgcuuuccaggggcuuuuuggcggauugaacuggauaacuaagguaaucaugggcgccguccugauuuggguggggaucaauacaagaaacaugaccaugucuaugucaaugauccucguuggagugauuaugauguuccugagucuuggcgucggugcagaucaggggugugccauaaauuuuggaaaaugaggacuaguacuggcugcaucucccuuuccucuguccuccauccuucucccaggauggugaagggggaccugguacccagugauccccaccccaggauccuaaaucaugacuuaccugcuaauaaaaacucauuggaaaagugagaagaucuaaaaaaaaaaaaaaaaaaaaaaaaaaaaaaaaaaaaaaaaaaaaaaaaaaaaaaaaaaaaaaaaugcaucccccccccccccccccccccccccccccccaaaggcucuuuucagagccaccagaauu

SEQ ID NO: 1043 - RNA, 2499 nt, Artificial Sequence
  mRNA product Design h-5 comprising derived and/or modified sequence from YFV__NC_002031.1__SSjev-prME (polyprotein: aa122-778) (opt3)
gggagagggcgcuuggcuugcaaggacccugagcugcggcauugaagcacacccaacccaacucgacugaagucagccucacugaaccggaucugagaaucuucucucucugggcuugccagggcucuccgaaccuagcuagcauccucuucaauuccaacuagaaagcuuaccaugggcaagagaagcgccggguccaucauguggcuggcuucucucgcaguggucauugccugcgcgggagcugugacccuggucagaaagaacagguggcuccuucugaauguuacaagcgaggacuugggcaaaacuuucuccguggggacgggaaacugcaccacaaauaucuuagaagccaaguacuggugucccgauucuauggaguauaacugcccuaaucugucaccacgggaggaaccggacgauauugacuguuggugcuacgguguagaaaacgugcgcgucgcuuauggcaaaugugauagugcagggcgaagccguagauccaggcgggccauagaccuacccacucacgagaaucauggacucaagacccgccaggagaaauggaugacaggcagaaugggugaaaggcaacugcagaagaucgagcggugguuugugcgcaacccuuucuuugcgguuaccgcucuuacuauugccuaccugguggggucuaauaugacacagcgagucgugaucgcauugcucguacuggccguuggaccagcuuauucggcacacugcauuggcaucaccgauagagacuucauagaaggcgugcaugggggaacgugggucucagccacucuggagcaggauaagugugugaccgugauggcucccgacaaaccuagccucgauaucaguuuagagacagucgccauugacaggccagcggaaguucggaaggugugcuacaacgcaguacugacucacgugaaaaucaaugauaagugucccuccaccggugaggcccaucuugcugaagagaacgaaggcgacaaugccugcaaacguacauauucugaccgcggguggggaaacggcugugguuuguuugggaagggaagcauugucgcaugcgcuaaguuuaccugcgccaaauccaugucacuguucgagguggaucaaacgaagauccaguacguuauaagagcgcagcuacacgugggcgccaaacaggagaauuggaacacugacauuaagacacucaaauucgaugcacugaguggcagccaagaagucgaguuuaucggguacggaaaggcuacccuugaaugucaggugcagacugccguagacuucgguaacucuuauauugcugagauggaaacagaguccuggaucguugauaggcagugggcccaagaccugaccuugccuuggcagucaggcagcgggggaguguggcgggagaugcaccaucucgucgaauuugagccaccgcacgcagccacgauccgagugcuggcuuuaggcaaucaggaagguagucugaaaaccgcgcucacaggggcaaugcgcgucacuaaggauaccaacgacaauaaccuuuacaagcugcauggcggacacgugucuugcagaguuaaauuguccgcccuaacacugaagggcacuagcuauaaaauuuguaccgauaagauguucuuugugaaaaaucccacagacaccgggcacggaacuguagucaugcaagugaagguuucgaagggugcuccuugcaggauaccagugaucgucgccgaugaccucacggcagccauuaacaaaggcauccuggugacaguaaaucccauagcuucuaccaacgacgaugaggugcuuauugaaguuaauccuccauucggggacuccuacaucaucgucggacggggcgauucacgccugacuuaucaguggcauaaggaggguaguagcauugggaaauuguucacccagacaaugaagggcguggagagacucgccgugaugggagacaccgcaugggauuuuuccucugcgggcggguucuuuacuagcgucggaaaagguauccacacaguuuucggcucagcuuuucaggggcuguucggaggcuuaaacuggauuacgaaggugauaaugggugccgugcugaucuggguagggauuaauaccaggaacaugacuaugaguauguccaugauccuagucggcgugaucaugauguuucucagccugggaguuggcgcaugaggacuaguacuggcugcaucucccuuuccucuguccuccauccuucucccaggauggugaagggggaccugguacccagugauccccaccccaggauccuaaaucaugacuuaccugcuaauaaaaacucauuggaaaagugagaagaucuaaaaaaaaaaaaaaaaaaaaaaaaaaaaaaaaaaaaaaaaaaaaaaaaaaaaaaaaaaaaaaaaugcaucccccccccccccccccccccccccccccccaaaggcucuuuucagagccaccagaauu

SEQ ID NO: 1044 - RNA, 2547 nt, Artificial Sequence
  mRNA product Design h-5 comprising derived and/or modified sequence from YFV__NC_002031.1__X-SS-prME-XX (polyprotein: aa92-788) (opt4)
gggagagggcgcuuggcuugcaaggacccugagcugcggcauugaagcacacccaacccaacucgacugaagucagccucacugaaccggaucugagaaucuucucucucugggcuugccagggcucuccgaaccuagcuagcauccucuucaauuccaacuagaaagcuuaccaugagaggccugagcagcagaaagagaagaagccacgacgugcugaccgugcaguuccugauccugggcaugcugcugaugaccggcggcgugacccuggugagaaagaacagauggcugcugcugaacgugaccagcgaggaccugggcaagaccuucagcgugggcaccggcaacugcaccaccaacauccuggaggccaaguacuggugccccgacagcauggaguacaacugccccaaccugagccccagagaggagcccgacgacaucgacugcuggugcuacggcguggagaacgugagaguggccuacggcaagugcgacagcgccggcagaagcagaagaagcagaagagccaucgaccugcccacccacgagaaccacggccugaagaccagacaggagaaguggaugaccggcagaaugggcgagagacagcugcagaagaucgagagaugguucgugagaaaccccuucuucgccgugaccgcccugaccaucgccuaccuggugggcagcaacaugacccagagaguggugaucgcccugcuggugcuggccgugggccccgccuacagcgcccacugcaucggcaucaccgacagagacuucaucgagggcgugcacggcggcaccugggugagcgccacccuggagcaggacaagugcgugaccgugauggcccccgacaagcccagccuggacaucagccuggagaccguggccaucgacagacccgccgaggugagaaaggugugcuacaacgccgugcugacccacgugaagaucaacgacaagugccccagcaccggcgaggcccaccuggccgaggagaacgagggcgacaacgccugcaagagaaccuacagcgacagaggcuggggcaacggcugcggccuguucggcaagggcagcaucguggccugcgccaaguucaccugcgccaagagcaugagccuguucgagguggaccagaccaagauccaguacgugaucagagcccagcugcacgugggcgccaagcaggagaacuggaacaccgacaucaagacccugaaguucgacgcccugagcggcagccaggagguggaguucaucggcuacggcaaggccacccuggagugccaggugcagaccgccguggacuucggcaacagcuacaucgccgagauggagaccgagagcuggaucguggacagacagugggcccaggaccugacccugcccuggcagagcggcagcggcggcguguggagagagaugcaccaccugguggaguucgagcccccccacgccgccaccaucagagugcuggcccugggcaaccaggagggcagccugaagaccgcccugaccggcgccaugagagugaccaaggacaccaacgacaacaaccuguacaagcugcacggcggccacgugagcugcagagugaagcugagcgcccugacccugaagggcaccagcuacaagaucugcaccgacaagauguucuucgugaagaaccccaccgacaccggccacggcaccguggugaugcaggugaaggugagcaagggcgcccccugcagaauccccgugaucguggccgacgaccugaccgccgccaucaacaagggcauccuggugaccgugaaccccaucgccagcaccaacgacgacgaggugcugaucgaggugaacccccccuucggcgacagcuacaucaucgugggcagaggcgacagcagacugaccuaccaguggcacaaggagggcagcagcaucggcaagcuguucacccagaccaugaagggcguggagagacuggccgugaugggcgacaccgccugggacuucagcagcgccggcggcuucuucaccagcgugggcaagggcauccacaccguguucggcagcgccuuccagggccuguucggcggccugaacuggaucaccaaggugaucaugggcgccgugcugaucugggugggcaucaacaccagaaacaugaccaugagcaugagcaugauccuggugggcgugaucaugauguuccugagccugggcgugggcgccgaccagggcugcgccaucaacuucggcaagugaggacuaguacuggcugcaucucccuuuccucuguccuccauccuucucccaggauggugaagggggaccugguacccagugauccccaccccaggauccuaaaucaugacuuaccugcuaauaaaaacucauuggaaaagugagaagaucuaaaaaaaaaaaaaaaaaaaaaaaaaaaaaaaaaaaaaaaaaaaaaaaaaaaaaaaaaaaaaaaaugcaucccccccccccccccccccccccccccccccaaaggcucuuuucagagccaccagaauu

SEQ ID NO: 1045 - RNA, 2484 nt, Artificial Sequence
  mRNA product Design h-5 comprising derived and/or modified sequence from YFV__NC_002031.1__SS-prME (polyprotein: M,aa104-778) (opt4)
gggagagggcgcuuggcuugcaaggacccugagcugcggcauugaagcacacccaacccaacucgacugaagucagccucacugaaccggaucugagaaucuucucucucugggcuugccagggcucuccgaaccuagcuagcauccucuucaauuccaacuagaaagcuuaccauggacgugcugaccgugcaguuccugauccugggcaugcugcugaugaccggcggcgugacccuggugagaaagaacagauggcugcugcugaacgugaccagcgaggaccugggcaagaccuucagcgugggcaccggcaacugcaccaccaacauccuggaggccaaguacuggugccccgacagcauggaguacaacugccccaaccugagccccagagaggagcccgacgacaucgacugcuggugcuacggcguggagaacgugagaguggccuacggcaagugcgacagcgccggcagaagcagaagaagcagaagagccaucgaccugcccacccacgagaaccacggccugaagaccagacaggagaaguggaugaccggcagaaugggcgagagacagcugcagaagaucgagagaugguucgugagaaaccccuucuucgccgugaccgcccugaccaucgccuaccuggugggcagcaacaugacccagagaguggugaucgcccugcuggugcuggccgugggccccgccuacagcgcccacugcaucggcaucaccgacagagacuucaucgagggcgugcacggcggcaccugggugagcgccacccuggagcaggacaagugcgugaccgugauggcccccgacaagcccagccuggacaucagccuggagaccguggccaucgacagacccgccgaggugagaaaggugugcuacaacgccgugcugacccacgugaagaucaacgacaagugccccagcaccggcgaggcccaccuggccgaggagaacgagggcgacaacgccugcaagagaaccuacagcgacagaggcuggggcaacggcugcggccuguucggcaagggcagcaucguggccugcgccaaguucaccugcgccaagagcaugagccuguucgagguggaccagaccaagauccaguacgugaucagagcccagcugcacgugggcgccaagcaggagaacuggaacaccgacaucaagacccugaaguucgacgcccugagcggcagccaggagguggaguucaucggcuacggcaaggccacccuggagugccaggugcagaccgccguggacuucggcaacagcuacaucgccgagauggagaccgagagcuggaucguggacagacagugggcccaggaccugacccugcccuggcagagcggcagcggcggcguguggagagagaugcaccaccugguggaguucgagcccccccacgccgccaccaucagagugcuggcccugggcaaccaggagggcagccugaagaccgcccugaccggcgccaugagagugaccaaggacaccaacgacaacaaccuguacaagcugcacggcggccacgugagcugcagagugaagcugagcgcccugacccugaagggcaccagcuacaagaucugcaccgacaagauguucuucgugaagaaccccaccgacaccggccacggcaccguggugaugcaggugaaggugagcaagggcgcccccugcagaauccccgugaucguggccgacgaccugaccgccgccaucaacaagggcauccuggugaccgugaaccccaucgccagcaccaacgacgacgaggugcugaucgaggugaacccccccuucggcgacagcuacaucaucgugggcagaggcgacagcagacugaccuaccaguggcacaaggagggcagcagcaucggcaagcuguucacccagaccaugaagggcguggagagacuggccgugaugggcgacaccgccugggacuucagcagcgccggcggcuucuucaccagcgugggcaagggcauccacaccguguucggcagcgccuuccagggccuguucggcggccugaacuggaucaccaaggugaucaugggcgccgugcugaucugggugggcaucaacaccagaaacaugaccaugagcaugagcaugauccuggugggcgugaucaugauguuccugagccugggcgugggcgccugaggacuaguacuggcugcaucucccuuuccucuguccuccauccuucucccaggauggugaagggggaccugguacccagugauccccaccccaggauccuaaaucaugacuuaccugcuaauaaaaacucauuggaaaagugagaagaucuaaaaaaaaaaaaaaaaaaaaaaaaaaaaaaaaaaaaaaaaaaaaaaaaaaaaaaaaaaaaaaaaugcaucccccccccccccccccccccccccccccccaaaggcucuuuucagagccaccagaauu

SEQ ID NO: 1046 - RNA, 2511 nt, Artificial Sequence
  mRNA product Design h-5 comprising derived and/or modified sequence from YFV__NC_002031.1__SSIgE-prME-XX (polyprotein: aa122-788) (opt4)
gggagagggcgcuuggcuugcaaggacccugagcugcggcauugaagcacacccaacccaacucgacugaagucagccucacugaaccggaucugagaaucuucucucucugggcuugccagggcucuccgaaccuagcuagcauccucuucaauuccaacuagaaagcuuaccauggacuggaccuggauccuguuccugguggccgccgccaccagagugcacagcgugacccuggugagaaagaacagauggcugcugcugaacgugaccagcgaggaccugggcaagaccuucagcgugggcaccggcaacugcaccaccaacauccuggaggccaaguacuggugccccgacagcauggaguacaacugccccaaccugagccccagagaggagcccgacgacaucgacugcuggugcuacggcguggagaacgugagaguggccuacggcaagugcgacagcgccggcagaagcagaagaagcagaagagccaucgaccugcccacccacgagaaccacggccugaagaccagacaggagaaguggaugaccggcagaaugggcgagagacagcugcagaagaucgagagaugguucgugagaaaccccuucuucgccgugaccgcccugaccaucgccuaccuggugggcagcaacaugacccagagaguggugaucgcccugcuggugcuggccgugggccccgccuacagcgcccacugcaucggcaucaccgacagagacuucaucgagggcgugcacggcggcaccugggugagcgccacccuggagcaggacaagugcgugaccgugauggcccccgacaagcccagccuggacaucagccuggagaccguggccaucgacagacccgccgaggugagaaaggugugcuacaacgccgugcugacccacgugaagaucaacgacaagugccccagcaccggcgaggcccaccuggccgaggagaacgagggcgacaacgccugcaagagaaccuacagcgacagaggcuggggcaacggcugcggccuguucggcaagggcagcaucguggccugcgccaaguucaccugcgccaagagcaugagccuguucgagguggaccagaccaagauccaguacgugaucagagcccagcugcacgugggcgccaagcaggagaacuggaacaccgacaucaagacccugaaguucgacgcccugagcggcagccaggagguggaguucaucggcuacggcaaggccacccuggagugccaggugcagaccgccguggacuucggcaacagcuacaucgccgagauggagaccgagagcuggaucguggacagacagugggcccaggaccugacccugcccuggcagagcggcagcggcggcguguggagagagaugcaccaccugguggaguucgagcccccccacgccgccaccaucagagugcuggcccugggcaaccaggagggcagccugaagaccgcccugaccggcgccaugagagugaccaaggacaccaacgacaacaaccuguacaagcugcacggcggccacgugagcugcagagugaagcugagcgcccugacccugaagggcaccagcuacaagaucugcaccgacaagauguucuucgugaagaaccccaccgacaccggccacggcaccguggugaugcaggugaaggugagcaagggcgcccccugcagaauccccgugaucguggccgacgaccugaccgccgccaucaacaagggcauccuggugaccgugaaccccaucgccagcaccaacgacgacgaggugcugaucgaggugaacccccccuucggcgacagcuacaucaucgugggcagaggcgacagcagacugaccuaccaguggcacaaggagggcagcagcaucggcaagcuguucacccagaccaugaagggcguggagagacuggccgugaugggcgacaccgccugggacuucagcagcgccggcggcuucuucaccagcgugggcaagggcauccacaccguguucggcagcgccuuccagggccuguucggcggccugaacuggaucaccaaggugaucaugggcgccgugcugaucugggugggcaucaacaccagaaacaugaccaugagcaugagcaugauccuggugggcgugaucaugauguuccugagccugggcgugggcgccgaccagggcugcgccaucaacuucggcaagugaggacuaguacuggcugcaucucccuuuccucuguccuccauccuucucccaggauggugaagggggaccugguacccagugauccccaccccaggauccuaaaucaugacuuaccugcuaauaaaaacucauuggaaaagugagaagaucuaaaaaaaaaaaaaaaaaaaaaaaaaaaaaaaaaaaaaaaaaaaaaaaaaaaaaaaaaaaaaaaaugcaucccccccccccccccccccccccccccccccaaaggcucuuuucagagccaccagaauu

SEQ ID NO: 1047 - RNA, 2481 nt, Artificial Sequence
  mRNA product Design h-5 comprising derived and/or modified sequence from YFV__NC_002031.1__SSIgE-prME (polyprotein: aa122-778) (opt4)
gggagagggcgcuuggcuugcaaggacccugagcugcggcauugaagcacacccaacccaacucgacugaagucagccucacugaaccggaucugagaaucuucucucucugggcuugccagggcucuccgaaccuagcuagcauccucuucaauuccaacuagaaagcuuaccauggacuggaccuggauccuguuccugguggccgccgccaccagagugcacagcgugacccuggugagaaagaacagauggcugcugcugaacgugaccagcgaggaccugggcaagaccuucagcgugggcaccggcaacugcaccaccaacauccuggaggccaaguacuggugccccgacagcauggaguacaacugccccaaccugagccccagagaggagcccgacgacaucgacugcuggugcuacggcguggagaacgugagaguggccuacggcaagugcgacagcgccggcagaagcagaagaagcagaagagccaucgaccugcccacccacgagaaccacggccugaagaccagacaggagaaguggaugaccggcagaaugggcgagagacagcugcagaagaucgagagaugguucgugagaaaccccuucuucgccgugaccgcccugaccaucgccuaccuggugggcagcaacaugacccagagaguggugaucgcccugcuggugcuggccgugggccccgccuacagcgcccacugcaucggcaucaccgacagagacuucaucgagggcgugcacggcggcaccugggugagcgccacccuggagcaggacaagugcgugaccgugauggcccccgacaagcccagccuggacaucagccuggagaccguggccaucgacagacccgccgaggugagaaaggugugcuacaacgccgugcugacccacgugaagaucaacgacaagugccccagcaccggcgaggcccaccuggccgaggagaacgagggcgacaacgccugcaagagaaccuacagcgacagaggcuggggcaacggcugcggccuguucggcaagggcagcaucguggccugcgccaaguucaccugcgccaagagcaugagccuguucgagguggaccagaccaagauccaguacgugaucagagcccagcugcacgugggcgccaagcaggagaacuggaacaccgacaucaagacccugaaguucgacgcccugagcggcagccaggagguggaguucaucggcuacggcaaggccacccuggagugccaggugcagaccgccguggacuucggcaacagcuacaucgccgagauggagaccgagagcuggaucguggacagacagugggcccaggaccugacccugcccuggcagagcggcagcggcggcguguggagagagaugcaccaccugguggaguucgagcccccccacgccgccaccaucagagugcuggcccugggcaaccaggagggcagccugaagaccgcccugaccggcgccaugagagugaccaaggacaccaacgacaacaaccuguacaagcugcacggcggccacgugagcugcagagugaagcugagcgcccugacccugaagggcaccagcuacaagaucugcaccgacaagauguucuucgugaagaaccccaccgacaccggccacggcaccguggugaugcaggugaaggugagcaagggcgcccccugcagaauccccgugaucguggccgacgaccugaccgccgccaucaacaagggcauccuggugaccgugaaccccaucgccagcaccaacgacgacgaggugcugaucgaggugaacccccccuucggcgacagcuacaucaucgugggcagaggcgacagcagacugaccuaccaguggcacaaggagggcagcagcaucggcaagcuguucacccagaccaugaagggcguggagagacuggccgugaugggcgacaccgccugggacuucagcagcgccggcggcuucuucaccagcgugggcaagggcauccacaccguguucggcagcgccuuccagggccuguucggcggccugaacuggaucaccaaggugaucaugggcgccgugcugaucugggugggcaucaacaccagaaacaugaccaugagcaugagcaugauccuggugggcgugaucaugauguuccugagccugggcgugggcgccugaggacuaguacuggcugcaucucccuuuccucuguccuccauccuucucccaggauggugaagggggaccugguacccagugauccccaccccaggauccuaaaucaugacuuaccugcuaauaaaaacucauuggaaaagugagaagaucuaaaaaaaaaaaaaaaaaaaaaaaaaaaaaaaaaaaaaaaaaaaaaaaaaaaaaaaaaaaaaaaaugcaucccccccccccccccccccccccccccccccaaaggcucuuuucagagccaccagaauu

SEQ ID NO: 1048 - RNA, 2529 nt, Artificial Sequence
  mRNA product Design h-5 comprising derived and/or modified sequence from YFV__NC_002031.1__SSjev-prME-XX (polyprotein: aa122-788) (opt4)
gggagagggcgcuuggcuugcaaggacccugagcugcggcauugaagcacacccaacccaacucgacugaagucagccucacugaaccggaucugagaaucuucucucucugggcuugccagggcucuccgaaccuagcuagcauccucuucaauuccaacuagaaagcuuaccaugggcaagagaagcgccggcagcaucauguggcuggccagccuggccguggugaucgccugcgccggcgccgugacccuggugagaaagaacagauggcugcugcugaacgugaccagcgaggaccugggcaagaccuucagcgugggcaccggcaacugcaccaccaacauccuggaggccaaguacuggugccccgacagcauggaguacaacugccccaaccugagccccagagaggagcccgacgacaucgacugcuggugcuacggcguggagaacgugagaguggccuacggcaagugcgacagcgccggcagaagcagaagaagcagaagagccaucgaccugcccacccacgagaaccacggccugaagaccagacaggagaaguggaugaccggcagaaugggcgagagacagcugcagaagaucgagagaugguucgugagaaaccccuucuucgccgugaccgcccugaccaucgccuaccuggugggcagcaacaugacccagagaguggugaucgcccugcuggugcuggccgugggccccgccuacagcgcccacugcaucggcaucaccgacagagacuucaucgagggcgugcacggcggcaccugggugagcgccacccuggagcaggacaagugcgugaccgugauggcccccgacaagcccagccuggacaucagccuggagaccguggccaucgacagacccgccgaggugagaaaggugugcuacaacgccgugcugacccacgugaagaucaacgacaagugccccagcaccggcgaggcccaccuggccgaggagaacgagggcgacaacgccugcaagagaaccuacagcgacagaggcuggggcaacggcugcggccuguucggcaagggcagcaucguggccugcgccaaguucaccugcgccaagagcaugagccuguucgagguggaccagaccaagauccaguacgugaucagagcccagcugcacgugggcgccaagcaggagaacuggaacaccgacaucaagacccugaaguucgacgcccugagcggcagccaggagguggaguucaucggcuacggcaaggccacccuggagugccaggugcagaccgccguggacuucggcaacagcuacaucgccgagauggagaccgagagcuggaucguggacagacagugggcccaggaccugacccugcccuggcagagcggcagcggcggcguguggagagagaugcaccaccugguggaguucgagcccccccacgccgccaccaucagagugcuggcccugggcaaccaggagggcagccugaagaccgcccugaccggcgccaugagagugaccaaggacaccaacgacaacaaccuguacaagcugcacggcggccacgugagcugcagagugaagcugagcgcccugacccugaagggcaccagcuacaagaucugcaccgacaagauguucuucgugaagaaccccaccgacaccggccacggcaccguggugaugcaggugaaggugagcaagggcgcccccugcagaauccccgugaucguggccgacgaccugaccgccgccaucaacaagggcauccuggugaccgugaaccccaucgccagcaccaacgacgacgaggugcugaucgaggugaacccccccuucggcgacagcuacaucaucgugggcagaggcgacagcagacugaccuaccaguggcacaaggagggcagcagcaucggcaagcuguucacccagaccaugaagggcguggagagacuggccgugaugggcgacaccgccugggacuucagcagcgccggcggcuucuucaccagcgugggcaagggcauccacaccguguucggcagcgccuuccagggccuguucggcggccugaacuggaucaccaaggugaucaugggcgccgugcugaucugggugggcaucaacaccagaaacaugaccaugagcaugagcaugauccuggugggcgugaucaugauguuccugagccugggcgugggcgccgaccagggcugcgccaucaacuucggcaagugaggacuaguacuggcugcaucucccuuuccucuguccuccauccuucucccaggauggugaagggggaccugguacccagugauccccaccccaggauccuaaaucaugacuuaccugcuaauaaaaacucauuggaaaagugagaagaucuaaaaaaaaaaaaaaaaaaaaaaaaaaaaaaaaaaaaaaaaaaaaaaaaaaaaaaaaaaaaaaaaugcaucccccccccccccccccccccccccccccccaaaggcucuuuucagagccaccagaauu

SEQ ID NO: 1049 - RNA, 2499 nt, Artificial Sequence
  mRNA product Design h-5 comprising derived and/or modified sequence from YFV__NC_002031.1__SSjev-prME (polyprotein: aa122-778) (opt4)
gggagagggcgcuuggcuugcaaggacccugagcugcggcauugaagcacacccaacccaacucgacugaagucagccucacugaaccggaucugagaaucuucucucucugggcuugccagggcucuccgaaccuagcuagcauccucuucaauuccaacuagaaagcuuaccaugggcaagagaagcgccggcagcaucauguggcuggccagccuggccguggugaucgccugcgccggcgccgugacccuggugagaaagaacagauggcugcugcugaacgugaccagcgaggaccugggcaagaccuucagcgugggcaccggcaacugcaccaccaacauccuggaggccaaguacuggugccccgacagcauggaguacaacugccccaaccugagccccagagaggagcccgacgacaucgacugcuggugcuacggcguggagaacgugagaguggccuacggcaagugcgacagcgccggcagaagcagaagaagcagaagagccaucgaccugcccacccacgagaaccacggccugaagaccagacaggagaaguggaugaccggcagaaugggcgagagacagcugcagaagaucgagagaugguucgugagaaaccccuucuucgccgugaccgcccugaccaucgccuaccuggugggcagcaacaugacccagagaguggugaucgcccugcuggugcuggccgugggccccgccuacagcgcccacugcaucggcaucaccgacagagacuucaucgagggcgugcacggcggcaccugggugagcgccacccuggagcaggacaagugcgugaccgugauggcccccgacaagcccagccuggacaucagccuggagaccguggccaucgacagacccgccgaggugagaaaggugugcuacaacgccgugcugacccacgugaagaucaacgacaagugccccagcaccggcgaggcccaccuggccgaggagaacgagggcgacaacgccugcaagagaaccuacagcgacagaggcuggggcaacggcugcggccuguucggcaagggcagcaucguggccugcgccaaguucaccugcgccaagagcaugagccuguucgagguggaccagaccaagauccaguacgugaucagagcccagcugcacgugggcgccaagcaggagaacuggaacaccgacaucaagacccugaaguucgacgcccugagcggcagccaggagguggaguucaucggcuacggcaaggccacccuggagugccaggugcagaccgccguggacuucggcaacagcuacaucgccgagauggagaccgagagcuggaucguggacagacagugggcccaggaccugacccugcccuggcagagcggcagcggcggcguguggagagagaugcaccaccugguggaguucgagcccccccacgccgccaccaucagagugcuggcccugggcaaccaggagggcagccugaagaccgcccugaccggcgccaugagagugaccaaggacaccaacgacaacaaccuguacaagcugcacggcggccacgugagcugcagagugaagcugagcgcccugacccugaagggcaccagcuacaagaucugcaccgacaagauguucuucgugaagaaccccaccgacaccggccacggcaccguggugaugcaggugaaggugagcaagggcgcccccugcagaauccccgugaucguggccgacgaccugaccgccgccaucaacaagggcauccuggugaccgugaaccccaucgccagcaccaacgacgacgaggugcugaucgaggugaacccccccuucggcgacagcuacaucaucgugggcagaggcgacagcagacugaccuaccaguggcacaaggagggcagcagcaucggcaagcuguucacccagaccaugaagggcguggagagacuggccgugaugggcgacaccgccugggacuucagcagcgccggcggcuucuucaccagcgugggcaagggcauccacaccguguucggcagcgccuuccagggccuguucggcggccugaacuggaucaccaaggugaucaugggcgccgugcugaucugggugggcaucaacaccagaaacaugaccaugagcaugagcaugauccuggugggcgugaucaugauguuccugagccugggcgugggcgccugaggacuaguacuggcugcaucucccuuuccucuguccuccauccuucucccaggauggugaagggggaccugguacccagugauccccaccccaggauccuaaaucaugacuuaccugcuaauaaaaacucauuggaaaagugagaagaucuaaaaaaaaaaaaaaaaaaaaaaaaaaaaaaaaaaaaaaaaaaaaaaaaaaaaaaaaaaaaaaaaugcaucccccccccccccccccccccccccccccccaaaggcucuuuucagagccaccagaauu

SEQ ID NO: 1050 - RNA, 2547 nt, Artificial Sequence
  mRNA product Design h-5 comprising derived and/or modified sequence from YFV__NC_002031.1__X-SS-prME-XX (polyprotein: aa92-788) (opt5)
gggagagggcgcuuggcuugcaaggacccugagcugcggcauugaagcacacccaacccaacucgacugaagucagccucacugaaccggaucugagaaucuucucucucugggcuugccagggcucuccgaaccuagcuagcauccucuucaauuccaacuagaaagcuuaccaugagaggccugagcucccggaagcgcagaucucacgacgugcucaccguccaguuccugauccuugggaugcugcucaugacaggaggcguuacgcuggugcggaaaaaccgcuggcuucugcucaaugugaccagcgaggaucuggggaagacauuuuccgucggaaccggcaacugcacaaccaauauucuggaagccaaauacuggugucccgacucuauggaguauaacugcccuaaucucagcccgagagaagaacccgaugacaucgauuguuggugcuacgggguggaaaacguucggguggcuuauggaaagugugacuccgccggccgcucuagacggagccgcagagcgauugaucugccuacacaugagaaucacggccuuaaaacccggcaagagaaguggaugacggggcgcaugggagaaagacagcugcagaagaucgagcggugguucguccgcaaccccuuuuucgcugugaccgcccucacaauugccuaccugguuggcuccaauaugacccagagaguggucaucgcccuucuggugcucgcuguggggccugcuuauagcgcccauugcaucggaauuacagaccgggauuuuaucgaaggcguccacgggggaaccuggguuucugcgacgcuggagcaagacaaaugugugacagugauggcccccgauaagccuucccuggacauuagccucgagaccgucgcuaucgauagaccggccgaagugcgcaaaguuugcuacaacgcugugcugacacaugucaagauuaaugacaaaugucccucuaccggcgaggcccaccuugcggaagagaacgaaggcgacaaugccugcaagcggaccuauuccgauagaggguggggaaacggcugugggcuguucggaaagggcagcaucguggcuugcgccaaauuuacaugcgcuaagucuaugucccucuucgagguugaccagacgaaaauucaguacgugauccgcgcccagcugcacgucggggccaagcaagagaauuggaacaccgauaucaaaacacuuaaguuugacgcucugagcggaucccaggaaguggaguucauuggcuacggcaaagcgacccucgaaugucagguccagacagccguggauuuugggaacucuuauaucgcugagauggaaaccgagagcuggauuguugaccggcaaugggcccaggaucugacgcugccuuggcaguccggaagcggcgggguguggagagagaugcaucaccucgucgaguucgagcccccucaugccgcuacaauccgcgugcuggcccuuggaaaucaagaaggcucucugaagaccgcgcucaccggggcuaugcggguuacaaaggacaccaacgauaauaaccuguacaaacuucacggcggacacguguccugcagagucaagcugagcgcccucacacugaaaggcacgucuuauaagauuuguaccgacaaaauguuuuucgugaagaaucccacagauaccgggcauggaacagugguuaugcaggucaaggugagcaaaggcgccccgugccgcaucccugugaucgucgcugacgaccugaccgccgcuauuaacaaggggauccucgugacgguuaaucccauugccuccaccaacgaugacgaggugcugaucgaagucaauccucccuucggagauucuuacauuaucgugggccggggagacagcagacuuacauaucaguggcacaaagagggcuccagcaucggaaagcuguuuacccagacaaugaaaggcguugagcgccucgcggugaugggggauaccgccugggacuucucuuccgcuggaggcuuuuucacgagcgucgggaaggggauucauacaguguuuggcucugccuuccaagggcuguuuggcggacugaacuggaucaccaagguuauuaugggcgcugugcuuaucugggucgggauuaauacacggaacaugaccauguccaugagcaugauccucgugggagugauuaugauguuccugucccugggcgucggggccgaucagggaugugcgaucaauuuuggcaaaugaggacuaguacuggcugcaucucccuuuccucuguccuccauccuucucccaggauggugaagggggaccugguacccagugauccccaccccaggauccuaaaucaugacuuaccugcuaauaaaaacucauuggaaaagugagaagaucuaaaaaaaaaaaaaaaaaaaaaaaaaaaaaaaaaaaaaaaaaaaaaaaaaaaaaaaaaaaaaaaaugcaucccccccccccccccccccccccccccccccaaaggcucuuuucagagccaccagaauu

SEQ ID NO: 1051 - RNA, 2484 nt, Artificial Sequence
  mRNA product Design h-5 comprising derived and/or modified sequence from YFV__NC_002031.1__SS-prME (polyprotein: M,aa104-778) (opt5)
gggagagggcgcuuggcuugcaaggacccugagcugcggcauugaagcacacccaacccaacucgacugaagucagccucacugaaccggaucugagaaucuucucucucugggcuugccagggcucuccgaaccuagcuagcauccucuucaauuccaacuagaaagcuuaccauggacgugcugaccguccaguuccucauccugggcaugcuucugaugacagggggaguuacgcucgugagaaagaaccgguggcugcuucugaaugugaccagcgaggaucucggcaaaacauuuuccgucgggaccggaaacugcacaaccaauauucuggaagccaaguacuggugucccgacucuauggaguauaacugcccuaaucugagcccgcgcgaagaacccgaugacaucgauuguuggugcuacggcguggaaaacguuagaguggcuuaugggaaaugugacuccgccggacggucucgcagaagccggcgcgcgauugaucucccuacacacgagaaucauggccugaagaccagacaagagaaauggaugacgggccggaugggggaacgccagcuucagaagaucgagagaugguucguccggaaccccuuuuucgcugugaccgcccugacaauugccuaccucguuggauccaauaugacccagcgcguggucaucgcucugcuugugcuggccgugggcccugcuuauucugcccacugcaucgggauuacagacagagauuuuaucgaaggaguccauggcgggaccuggguuagcgcgacgcucgagcaagacaagugugugacagugauggcccccgauaaaccuucccuggacauuagccuggagaccgucgcuaucgaucggccggccgaagugcgcaagguuugcuacaacgcugugcucacacacgucaaaauuaaugacaagugucccucuaccggagaggcccaucuggcggaagagaacgaaggcgacaaugccugcaaaagaaccuauuccgaucggggcugggggaacggauguggccuuuucgggaagggaagcaucguggcuugcgccaaguuuacaugcgcuaaaucuaugucccuguucgagguugaccagacgaagauucaguacgugaucagagcccagcuccacgucggcgccaaacaagagaauuggaacaccgauaucaagacacugaaauuugacgcucuuagcgggucucaggaaguggaguucauuggauacggcaaggcgacccuggaaugucagguccagacagccguggauuuuggcaacuccuauaucgcugagauggaaaccgagagcuggauuguugaccgccaaugggcccaggaucucacgcugccuuggcaguccgggucuggaggcguguggcgggagaugcaccaucuggucgaguucgagcccccucacgccgcuacaaucagagugcucgcccuggggaaucaagaaggaagccuuaaaaccgcgcugaccggcgcuaugcgcguuacaaaggacaccaacgauaauaaccucuacaagcugcaugggggccacguguccugccgggucaaacuuagcgcccugacacucaagggaacgucuuauaaaauuuguaccgacaagauguuuuucgugaaaaaucccacagauaccggccacgggacagugguuaugcaggucaagguguccaagggagccccgugcagaaucccugugaucgucgcugacgaccugaccgccgcuauuaacaaaggcauccuggugacgguuaaucccauugccagcaccaacgaugacgaggugcucaucgaagucaauccucccuucggggauucuuacauuaucgugggacgcggcgacagccggcugacauaucaguggcauaaggagggguccucuaucggcaaacuuuuuacccagacaaugaagggaguugagagacuggcggugaugggcgauaccgccugggacuucagcuccgcugggggauuuuucacgagcgucggcaaagggauucacacaguguuuggaucugccuuccaaggccucuuugggggccugaacuggaucaccaagguuauuaugggagcugugcugaucugggucggcauuaauacacgcaacaugaccauguccaugagcaugauccuugugggggugauuaugauguuccucucucugggagucggcgccugaggacuaguacuggcugcaucucccuuuccucuguccuccauccuucucccaggauggugaagggggaccugguacccagugauccccaccccaggauccuaaaucaugacuuaccugcuaauaaaaacucauuggaaaagugagaagaucuaaaaaaaaaaaaaaaaaaaaaaaaaaaaaaaaaaaaaaaaaaaaaaaaaaaaaaaaaaaaaaaaugcaucccccccccccccccccccccccccccccccaaaggcucuuuucagagccaccagaauu

SEQ ID NO: 1052 - RNA, 2511 nt, Artificial Sequence
  mRNA product Design h-5 comprising derived and/or modified sequence from YFV__NC_002031.1__SSIgE-prME-XX (polyprotein: aa122-788) (opt5)
gggagagggcgcuuggcuugcaaggacccugagcugcggcauugaagcacacccaacccaacucgacugaagucagccucacugaaccggaucugagaaucuucucucucugggcuugccagggcucuccgaaccuagcuagcauccucuucaauuccaacuagaaagcuuaccauggacuggaccuggauccuguuccucguggccgcugccacaagaguccacagcguuacgcuggugcggaaaaaccgcuggcuucugcucaaugugaccagcgaggaucuggggaagacauuuuccgucggaaccggcaacugcacaaccaauauucuggaagccaaauacuggugucccgacucuauggaguauaacugcccuaaucucagcccgagagaagaacccgaugacaucgauuguuggugcuacgggguggaaaacguucggguggcuuauggaaagugugacuccgccggccgcucuagacggagccgcagagcgauugaucugccuacacaugagaaucacggccuuaaaacccggcaagagaaguggaugacggggcgcaugggagaaagacagcugcagaagaucgagcggugguucguccgcaaccccuuuuucgcugugaccgcccucacaauugccuaccugguuggcuccaauaugacccagagaguggucaucgcccuucuggugcucgcuguggggccugcuuauagcgcccauugcaucggaauuacagaccgggauuuuaucgaaggcguccacgggggaaccuggguuucugcgacgcuggagcaagacaaaugugugacagugauggcccccgauaagccuucccuggacauuagccucgagaccgucgcuaucgauagaccggccgaagugcgcaaaguuugcuacaacgcugugcugacacaugucaagauuaaugacaaaugucccucuaccggcgaggcccaccuugcggaagagaacgaaggcgacaaugccugcaagcggaccuauuccgauagaggguggggaaacggcugugggcuguucggaaagggcagcaucguggcuugcgccaaauuuacaugcgcuaagucuaugucccucuucgagguugaccagacgaaaauucaguacgugauccgcgcccagcugcacgucggggccaagcaagagaauuggaacaccgauaucaaaacacuuaaguuugacgcucugagcggaucccaggaaguggaguucauuggcuacggcaaagcgacccucgaaugucagguccagacagccguggauuuugggaacucuuauaucgcugagauggaaaccgagagcuggauuguugaccggcaaugggcccaggaucugacgcugccuuggcaguccggaagcggcgggguguggagagagaugcaucaccucgucgaguucgagcccccucaugccgcuacaauccgcgugcuggcccuuggaaaucaagaaggcucucugaagaccgcgcucaccggggcuaugcggguuacaaaggacaccaacgauaauaaccuguacaaacuucacggcggacacguguccugcagagucaagcugagcgcccucacacugaaaggcacgucuuauaagauuuguaccgacaaaauguuuuucgugaagaaucccacagauaccgggcauggaacagugguuaugcaggucaaggugagcaaaggcgccccgugccgcaucccugugaucgucgcugacgaccugaccgccgcuauuaacaaggggauccucgugacgguuaaucccauugccuccaccaacgaugacgaggugcugaucgaagucaauccucccuucggagauucuuacauuaucgugggccggggagacagcagacuuacauaucaguggcacaaagagggcuccagcaucggaaagcuguuuacccagacaaugaaaggcguugagcgccucgcggugaugggggauaccgccugggacuucucuuccgcuggaggcuuuuucacgagcgucgggaaggggauucauacaguguuuggcucugccuuccaagggcuguuuggcggacugaacuggaucaccaagguuauuaugggcgcugugcuuaucugggucgggauuaauacacggaacaugaccauguccaugagcaugauccucgugggagugauuaugauguuccugucccugggcgucggggccgaucagggaugugcgaucaauuuuggcaaaugaggacuaguacuggcugcaucucccuuuccucuguccuccauccuucucccaggauggugaagggggaccugguacccagugauccccaccccaggauccuaaaucaugacuuaccugcuaauaaaaacucauuggaaaagugagaagaucuaaaaaaaaaaaaaaaaaaaaaaaaaaaaaaaaaaaaaaaaaaaaaaaaaaaaaaaaaaaaaaaaugcaucccccccccccccccccccccccccccccccaaaggcucuuuucagagccaccagaauu

SEQ ID NO: 1053 - RNA, 2481 nt, Artificial Sequence
  mRNA product Design h-5 comprising derived and/or modified sequence from YFV__NC_002031.1__SSIgE-prME (polyprotein: aa122-778) (opt5)
gggagagggcgcuuggcuugcaaggacccugagcugcggcauugaagcacacccaacccaacucgacugaagucagccucacugaaccggaucugagaaucuucucucucugggcuugccagggcucuccgaaccuagcuagcauccucuucaauuccaacuagaaagcuuaccauggacuggaccuggauccuguuccucguggccgcugccacaagaguccacagcgugacccuggucagaaagaaccgguggcuccugcuuaauguuacaagcgaggaccugggcaaaacguucuccguggggaccggaaacugcacaaccaauauccucgaagccaaguacuggugucccgauucuauggaguauaacugcccuaaucugagcccgcgcgaggaacccgacgauauugacuguuggugcuacggcguggaaaacgucagaguggcuuaugggaaaugugauuccgccggacggucucgcagaagccggcgcgcgaucgaccuuccuacacacgagaaucauggccugaagaccagacaggagaaauggaugacagggcggaugggagaacgccaacuccagaagauugagagaugguuuguucggaaccccuucuuugcugugaccgcccugacgaucgccuaccuggucggcuccaauaugacccagcgcgugguuauugcucuccuggugcuugccgucggcccugcuuauucugcccacugcaucgggaucacagauagagacuucauugaaggagugcauggcgggaccugggugagcgcgacacuggagcaggauaagugugucaccguuauggcccccgacaaaccuucccucgauaucagccuggagacgguggcuauugaccggccggccgaagugcgcaaggucugcuacaacgcugugcuuacacacguuaaaaucaaugauaagugucccucuaccggagaggcccaucuggcggaagagaacgaaggcgacaaugccugcaaaagaacauauuccgaccggggguggggaaacggcuguggccucuuugggaagggaagcauuguggcuugcgccaaguuuaccugcgcuaaaucuaugucccuguucgaggucgaucaaaccaagauccaguacgugauuagagcccagcugcacguuggcgccaaacaggagaauuggaacacagacaucaagacgcucaaauucgaugcucugagcgggucucaagaaguggaguuuaucggauacggcaaggcgacccuugaaugucagguccagacagccguggacuucgggaacuccuauauugcugagauggaaaccgagagcuggaucgucgaucgccagugggcccaagaccugacacucccuuggcaguccggaucuggcggcguguggcgggagaugcaccaucugguugaauuugagcccccucacgccgcuaccauuagagugcuugcccuggggaaucaggaaggaagccucaaaacggcgcugacaggcgcuaugcgcgucaccaaggauaccaacgacaauaaccuguacaagcuccaugggggacacguguccugccggguuaaacugagcgcccuuacacugaagggcaccucuuauaaaaucuguacagauaagauguucuuugugaaaaaucccacggacaccgggcacggcacagucgugaugcaagugaagguuuccaagggagccccgugccgcauuccugucaucguggcugaugaccucaccgccgcuaucaacaaaggcauucuggugacagucaaucccaucgccagcaccaacgacgaugaggugcuuauugaaguuaauccucccuucggggacucuuacaucauugugggaagaggcgauagccggcugacguaucaguggcauaaggagggguccucuaucggaaaacucuucacccagacaaugaagggcgucgagagacuggcggugaugggggacaccgccugggauuuuagcuccgcuggcggauucuuuacaagcguuggcaaagggauccacaccguguucggaucugccuuucagggccuguucgggggacucaacuggauuacgaaggucaucaugggcgcugugcugauuuggguugggaucaauacacgcaacaugaccauguccaugagcaugauucuugugggcgucaucaugauguuucugucucucggagugggcgccugaggacuaguacuggcugcaucucccuuuccucuguccuccauccuucucccaggauggugaagggggaccugguacccagugauccccaccccaggauccuaaaucaugacuuaccugcuaauaaaaacucauuggaaaagugagaagaucuaaaaaaaaaaaaaaaaaaaaaaaaaaaaaaaaaaaaaaaaaaaaaaaaaaaaaaaaaaaaaaaaugcaucccccccccccccccccccccccccccccccaaaggcucuuuucagagccaccagaauu

SEQ ID NO: 1054 - RNA, 2529 nt, Artificial Sequence
  mRNA product Design h-5 comprising derived and/or modified sequence from YFV__NC_002031.1__SSjev-prME-XX (polyprotein: aa122-788) (opt5)
gggagagggcgcuuggcuugcaaggacccugagcugcggcauugaagcacacccaacccaacucgacugaagucagccucacugaaccggaucugagaaucuucucucucugggcuugccagggcucuccgaaccuagcuagcauccucuucaauuccaacuagaaagcuuaccaugggcaagagaagcgccggguccaucauguggcuggcuucucucgccguggucauugcgugcgcuggagccguuacgcuggugcggaaaaaccgcuggcuucugcucaaugugaccagcgaggaucuggggaagacauuuuccgucggaaccggcaacugcacaaccaauauucuggaagccaaauacuggugucccgacucuauggaguauaacugcccuaaucucagcccgagagaagaacccgaugacaucgauuguuggugcuacgggguggaaaacguucggguggcuuauggaaagugugacuccgccggccgcucuagacggagccgcagagcgauugaucugccuacacaugagaaucacggccuuaaaacccggcaagagaaguggaugacggggcgcaugggagaaagacagcugcagaagaucgagcggugguucguccgcaaccccuuuuucgcugugaccgcccucacaauugccuaccugguuggcuccaauaugacccagagaguggucaucgcccuucuggugcucgcuguggggccugcuuauagcgcccauugcaucggaauuacagaccgggauuuuaucgaaggcguccacgggggaaccuggguuucugcgacgcuggagcaagacaaaugugugacagugauggcccccgauaagccuucccuggacauuagccucgagaccgucgcuaucgauagaccggccgaagugcgcaaaguuugcuacaacgcugugcugacacaugucaagauuaaugacaaaugucccucuaccggcgaggcccaccuugcggaagagaacgaaggcgacaaugccugcaagcggaccuauuccgauagaggguggggaaacggcugugggcuguucggaaagggcagcaucguggcuugcgccaaauuuacaugcgcuaagucuaugucccucuucgagguugaccagacgaaaauucaguacgugauccgcgcccagcugcacgucggggccaagcaagagaauuggaacaccgauaucaaaacacuuaaguuugacgcucugagcggaucccaggaaguggaguucauuggcuacggcaaagcgacccucgaaugucagguccagacagccguggauuuugggaacucuuauaucgcugagauggaaaccgagagcuggauuguugaccggcaaugggcccaggaucugacgcugccuuggcaguccggaagcggcgggguguggagagagaugcaucaccucgucgaguucgagcccccucaugccgcuacaauccgcgugcuggcccuuggaaaucaagaaggcucucugaagaccgcgcucaccggggcuaugcggguuacaaaggacaccaacgauaauaaccuguacaaacuucacggcggacacguguccugcagagucaagcugagcgcccucacacugaaaggcacgucuuauaagauuuguaccgacaaaauguuuuucgugaagaaucccacagauaccgggcauggaacagugguuaugcaggucaaggugagcaaaggcgccccgugccgcaucccugugaucgucgcugacgaccugaccgccgcuauuaacaaggggauccucgugacgguuaaucccauugccuccaccaacgaugacgaggugcugaucgaagucaauccucccuucggagauucuuacauuaucgugggccggggagacagcagacuuacauaucaguggcacaaagagggcuccagcaucggaaagcuguuuacccagacaaugaaaggcguugagcgccucgcggugaugggggauaccgccugggacuucucuuccgcuggaggcuuuuucacgagcgucgggaaggggauucauacaguguuuggcucugccuuccaagggcuguuuggcggacugaacuggaucaccaagguuauuaugggcgcugugcuuaucugggucgggauuaauacacggaacaugaccauguccaugagcaugauccucgugggagugauuaugauguuccugucccugggcgucggggccgaucagggaugugcgaucaauuuuggcaaaugaggacuaguacuggcugcaucucccuuuccucuguccuccauccuucucccaggauggugaagggggaccugguacccagugauccccaccccaggauccuaaaucaugacuuaccugcuaauaaaaacucauuggaaaagugagaagaucuaaaaaaaaaaaaaaaaaaaaaaaaaaaaaaaaaaaaaaaaaaaaaaaaaaaaaaaaaaaaaaaaugcaucccccccccccccccccccccccccccccccaaaggcucuuuucagagccaccagaauu

SEQ ID NO: 1055 - RNA, 2499 nt, Artificial Sequence
  mRNA product Design h-5 comprising derived and/or modified sequence from YFV__NC_002031.1__SSjev-prME (polyprotein: aa122-778) (opt5)
gggagagggcgcuuggcuugcaaggacccugagcugcggcauugaagcacacccaacccaacucgacugaagucagccucacugaaccggaucugagaaucuucucucucugggcuugccagggcucuccgaaccuagcuagcauccucuucaauuccaacuagaaagcuuaccaugggcaagagaagcgccggguccaucauguggcuggcuucucucgccguggucauugcgugcgcuggagccgugacccuggucagaaagaaccgguggcuccugcuuaauguuacaagcgaggaccugggcaaaacguucuccguggggaccggaaacugcacaaccaauauccucgaagccaaguacuggugucccgauucuauggaguauaacugcccuaaucugagcccgcgcgaggaacccgacgauauugacuguuggugcuacggcguggaaaacgucagaguggcuuaugggaaaugugauuccgccggacggucucgcagaagccggcgcgcgaucgaccuuccuacacacgagaaucauggccugaagaccagacaggagaaauggaugacagggcggaugggagaacgccaacuccagaagauugagagaugguuuguucggaaccccuucuuugcugugaccgcccugacgaucgccuaccuggucggcuccaauaugacccagcgcgugguuauugcucuccuggugcuugccgucggcccugcuuauucugcccacugcaucgggaucacagauagagacuucauugaaggagugcauggcgggaccugggugagcgcgacacuggagcaggauaagugugucaccguuauggcccccgacaaaccuucccucgauaucagccuggagacgguggcuauugaccggccggccgaagugcgcaaggucugcuacaacgcugugcuuacacacguuaaaaucaaugauaagugucccucuaccggagaggcccaucuggcggaagagaacgaaggcgacaaugccugcaaaagaacauauuccgaccggggguggggaaacggcuguggccucuuugggaagggaagcauuguggcuugcgccaaguuuaccugcgcuaaaucuaugucccuguucgaggucgaucaaaccaagauccaguacgugauuagagcccagcugcacguuggcgccaaacaggagaauuggaacacagacaucaagacgcucaaauucgaugcucugagcgggucucaagaaguggaguuuaucggauacggcaaggcgacccuugaaugucagguccagacagccguggacuucgggaacuccuauauugcugagauggaaaccgagagcuggaucgucgaucgccagugggcccaagaccugacacucccuuggcaguccggaucuggcggcguguggcgggagaugcaccaucugguugaauuugagcccccucacgccgcuaccauuagagugcuugcccuggggaaucaggaaggaagccucaaaacggcgcugacaggcgcuaugcgcgucaccaaggauaccaacgacaauaaccuguacaagcuccaugggggacacguguccugccggguuaaacugagcgcccuuacacugaagggcaccucuuauaaaaucuguacagauaagauguucuuugugaaaaaucccacggacaccgggcacggcacagucgugaugcaagugaagguuuccaagggagccccgugccgcauuccugucaucguggcugaugaccucaccgccgcuaucaacaaaggcauucuggugacagucaaucccaucgccagcaccaacgacgaugaggugcuuauugaaguuaauccucccuucggggacucuuacaucauugugggaagaggcgauagccggcugacguaucaguggcauaaggagggguccucuaucggaaaacucuucacccagacaaugaagggcgucgagagacuggcggugaugggggacaccgccugggauuuuagcuccgcuggcggauucuuuacaagcguuggcaaagggauccacaccguguucggaucugccuuucagggccuguucgggggacucaacuggauuacgaaggucaucaugggcgcugugcugauuuggguugggaucaauacacgcaacaugaccauguccaugagcaugauucuugugggcgucaucaugauguuucugucucucggagugggcgccugaggacuaguacuggcugcaucucccuuuccucuguccuccauccuucucccaggauggugaagggggaccugguacccagugauccccaccccaggauccuaaaucaugacuuaccugcuaauaaaaacucauuggaaaagugagaagaucuaaaaaaaaaaaaaaaaaaaaaaaaaaaaaaaaaaaaaaaaaaaaaaaaaaaaaaaaaaaaaaaaugcaucccccccccccccccccccccccccccccccaaaggcucuuuucagagccaccagaauu

SEQ ID NO: 1056 - RNA, 2547 nt, Artificial Sequence
  mRNA product Design h-5 comprising derived and/or modified sequence from YFV__NC_002031.1__X-SS-prME-XX (polyprotein: aa92-788) (opt6)
gggagagggcgcuuggcuugcaaggacccugagcugcggcauugaagcacacccaacccaacucgacugaagucagccucacugaaccggaucugagaaucuucucucucugggcuugccagggcucuccgaaccuagcuagcauccucuucaauuccaacuagaaagcuuaccaugagaggauuaucaaguagaaaaagaagaucacaugauguacuaaccgugcaauuuuugaucuuagggaugcucuuaaugacaggagguguuacauuaguaagaaagaaucgauggcugcuuuuaaaugugacaucagaggauuuagggaaaacauuuucgguaggaacaggaaauuguacuacaaauauacuugaagcaaaauauuggugcccagacucuauggaauauaauuguccaaauuuaaguccuagagaagaaccugacgauauagauuguugguguuaugguguagaaaauguaagaguagcauacggcaaaugcgauagugcaggacguucuagacguucaaggagagccauagaucugcccacucacgaaaaucacggauugaaaacacgacaagaaaaauggaugacugggcgaaugggagaaagacaacuacagaaaauugaaagaugguucguuagaaauccauucuuugccguaacagcuuuaacaauagccuauuuaguagguaguaauaugacacaaagaguaguaauagcauugcuaguguuagcaguuggaccagcuuauagugcacauugcauaggaauaacagauagagacuuuauagaaggaguacacgggggaacuuggguaagugccacuuuagaacaagauaaauguguuacagugauggcgccagauaaaccaagucuggacauaaguuuggaaacaguagcgauugauagacccgcagaaguaagaaaaguuuguuauaaugcuguucuaacccauguuaaaauaaaugauaaaugcccuagcaccggagaagcccaucuagcagaagaaaaugaaggagauaacgcauguaaacgaacauacucagauagaggauggggcaacggauguggcuuguuuggaaaagguagcauaguagcaugcgcuaaauuuacaugcgcaaagucaaugucauuauuugaaguagaucaaacaaaaauacaauauguaauaagagcucaauuacacgugggugcaaaacaagaaaauuggaauacagacauaaagacacuaaaguucgacgcauuaaguggaucacaagagguagaauuuauaggguacggaaaagcgacuuuagagugucaaguccaaacagcaguagauuucgguaacucauacauagcagaaauggaaacugaaaguuggauaguagauagacaaugggcacaagacuugacacuaccuuggcaaucaggaagcggaggaguauggagagaaaugcaucauuuaguagaauuugaaccaccucaugcagcaacaauaagaguauuagcccuaggaaaccaagaaggaaguuuaaaaacagcacuaacaggagcuaugagaguaacaaaagauacaaaugacaacaaucuauacaaauuacacggaggacauguaagcugccggguaaaguugagcgcacuaacauuaaaaggaacgaguuauaaaauaugcacagauaaaauguucuuuguuaaaaauccuacagauaccggucauggaacaguaguaaugcaaguaaaaguaaguaaaggcgcucccuguagaauaccuguaauagucgcagacgauuuaaccgcagcaauaaauaaaggaauauuagucacgguaaacccaauagcgucaacaaaugaugaugaaguauuaauagaaguuaacccaccuuuuggagacaguuauauaauagucggaaggggugauaguagacuaacauaccaauggcauaaagaaggaagcucaauaggaaaauuauuuacucaaaccaugaaagguguagaaaggcuagcuguuaugggugacacagcaugggauuuuucaagcgcaggaggguucuuuacaucaguagguaaaggaauacauacaguauuuggaagugcauuucaaggauuauuuggugguuuaaauuggauaacaaaaguaauaaugggcgcaguuuuaauauggguagguauaaacacaagaaauaugacaaugucuaugaguaugauauuggucggaguaauaaugauguuuuuaucacuaggagugggugcagaucaagguugcgcuauuaauuuuggaaaaugaggacuaguacuggcugcaucucccuuuccucuguccuccauccuucucccaggauggugaagggggaccugguacccagugauccccaccccaggauccuaaaucaugacuuaccugcuaauaaaaacucauuggaaaagugagaagaucuaaaaaaaaaaaaaaaaaaaaaaaaaaaaaaaaaaaaaaaaaaaaaaaaaaaaaaaaaaaaaaaaugcaucccccccccccccccccccccccccccccccaaaggcucuuuucagagccaccagaauu

SEQ ID NO: 1057 - RNA, 2484 nt, Artificial Sequence
  mRNA product Design h-5 comprising derived and/or modified sequence from YFV__NC_002031.1__SS-prME (polyprotein: M,aa104-778) (opt6)
gggagagggcgcuuggcuugcaaggacccugagcugcggcauugaagcacacccaacccaacucgacugaagucagccucacugaaccggaucugagaaucuucucucucugggcuugccagggcucuccgaaccuagcuagcauccucuucaauuccaacuagaaagcuuaccauggauguucuaacaguacaauuuuuaauauuagggauguuauuaaugacaggaggcguaacauuaguacgaaagaaucgauggcuauuacuaaacguuacgucugaagauuuaggaaaaacauuuagcguaggaacaggaaauugcaccacgaauaucuuagaagcaaaauauugguguccagauaguauggaauacaauuguccaaauuuaaguccuagagaggaacccgacgauauagauugcugguguuacggaguggaaaauguaagaguagcauauggaaaaugugacagcgcagguagaaguagaagaucacgacgagcaauugaucuacccacucaugagaaccauggacuaaaaacaagacaagaaaaauggaugacagguagaaugggcgaaagacaauuacagaaaauagaaagaugguuuguacgaaauccuuucuuugcugucacugcauuaacuauagcuuauuuaguaggaaguaacaugacucaaagaguaguaauagcacuauuaguacuagcaguaggaccagcuuacagugcacacuguauagggauaacggauagagauuuuauagaaggaguacauggggguacaugggugucugccacuuuagaacaagacaaauguguuacaguuauggccccagauaaacccucuuuagacauaucauuagaaacuguagcaauagauagaccggcggaagugagaaagguauguuauaaugcaguacuaacccauguaaaaauuaaugacaaaugcccaucaacaggagaggcucaucuagcugaagaaaaugaaggagacaaugcuugcaaacguacauauucagacaggggguggggaaauggauguggauuauuugguaaagggucaauaguagcaugugcaaaauuuacaugcgcaaaaaguaugagcuuauuugaaguagaucaaacaaaaauccaauauguaauuagagcucaacuucacguaggagcaaaacaagagaauuggaacacagauauaaaaacauuaaaauuugacgcuuugucuggaagucaagaagucgaauuuauuggcuauggaaaggcaacauuagaaugccaaguucaaaccgcaguagauuuuggaaauucauacauagcagaaauggagacugaaaguuggauaguagauagacagugggcucaagaccuaacuuuaccauggcaaucaggaaguggugguguauggagagaaaugcaucauuuaguagaauuugaaccaccacaugcagcaacaauuagaguacuagcauuaggaaaucaagaagguaguuuaaagacagcgcuuaccggagcaaugagaguuacaaaagauacuaaugacaauaauuuauauaaacuucauggaggacauguuagcuguagagucaaauuaagugcauuaacacucaaaggaacaucauacaaaauauguacagauaaaauguuuuucgucaagaauccaacagauacaggacauggaacaguuguaaugcaaguaaaaguaucaaaaggagcaccuugcagaauaccaguaauaguagcagaugauuuaacagccgcaauuaauaaagggauauuaguaacaguaaacccuauagcaaguacaaaugaugaugaagucuugauagaaguaaauccaccauuuggagauucguauauaauagucggaagaggagauagucgauuaacauaucaauggcauaaagaagguucaucaauaggaaaauuauuuacacaaaccaugaaaggaguugaaagauuagcuguaaugggggacacagcuugggauuuuucuagcgcaggaggauucuuuacauccguaggaaaagguauacacacaguauuuggcucagcauuccaaggguuauuuggugguuuaaauuggauaacaaaagugauuaugggagcagugcuaaucuggguaggaauaaauacaagaaauaugacaaugaguaugagcaugauucucguaggaguaauaaugauguuccuuaguuugggaguuggcgcuugaggacuaguacuggcugcaucucccuuuccucuguccuccauccuucucccaggauggugaagggggaccugguacccagugauccccaccccaggauccuaaaucaugacuuaccugcuaauaaaaacucauuggaaaagugagaagaucuaaaaaaaaaaaaaaaaaaaaaaaaaaaaaaaaaaaaaaaaaaaaaaaaaaaaaaaaaaaaaaaaugcaucccccccccccccccccccccccccccccccaaaggcucuuuucagagccaccagaauu

SEQ ID NO: 1058 - RNA, 2511 nt, Artificial Sequence
  mRNA product Design h-5 comprising derived and/or modified sequence from YFV__NC_002031.1__SSIgE-prME-XX (polyprotein: aa122-788) (opt6)
gggagagggcgcuuggcuugcaaggacccugagcugcggcauugaagcacacccaacccaacucgacugaagucagccucacugaaccggaucugagaaucuucucucucugggcuugccagggcucuccgaaccuagcuagcauccucuucaauuccaacuagaaagcuuaccauggacuggacauggauauuauuuuuaguagcagcagcaacaagaguacauucaguuacauuaguaagaaagaaucgauggcugcuuuuaaaugugacaucagaggauuuagggaaaacauuuucgguaggaacaggaaauuguacuacaaauauacuugaagcaaaauauuggugcccagacucuauggaauauaauuguccaaauuuaaguccuagagaagaaccugacgauauagauuguugguguuaugguguagaaaauguaagaguagcauacggcaaaugcgauagugcaggacguucuagacguucaaggagagccauagaucugcccacucacgaaaaucacggauugaaaacacgacaagaaaaauggaugacugggcgaaugggagaaagacaacuacagaaaauugaaagaugguucguuagaaauccauucuuugccguaacagcuuuaacaauagccuauuuaguagguaguaauaugacacaaagaguaguaauagcauugcuaguguuagcaguuggaccagcuuauagugcacauugcauaggaauaacagauagagacuuuauagaaggaguacacgggggaacuuggguaagugccacuuuagaacaagauaaauguguuacagugauggcgccagauaaaccaagucuggacauaaguuuggaaacaguagcgauugauagacccgcagaaguaagaaaaguuuguuauaaugcuguucuaacccauguuaaaauaaaugauaaaugcccuagcaccggagaagcccaucuagcagaagaaaaugaaggagauaacgcauguaaacgaacauacucagauagaggauggggcaacggauguggcuuguuuggaaaagguagcauaguagcaugcgcuaaauuuacaugcgcaaagucaaugucauuauuugaaguagaucaaacaaaaauacaauauguaauaagagcucaauuacacgugggugcaaaacaagaaaauuggaauacagacauaaagacacuaaaguucgacgcauuaaguggaucacaagagguagaauuuauaggguacggaaaagcgacuuuagagugucaaguccaaacagcaguagauuucgguaacucauacauagcagaaauggaaacugaaaguuggauaguagauagacaaugggcacaagacuugacacuaccuuggcaaucaggaagcggaggaguauggagagaaaugcaucauuuaguagaauuugaaccaccucaugcagcaacaauaagaguauuagcccuaggaaaccaagaaggaaguuuaaaaacagcacuaacaggagcuaugagaguaacaaaagauacaaaugacaacaaucuauacaaauuacacggaggacauguaagcugccggguaaaguugagcgcacuaacauuaaaaggaacgaguuauaaaauaugcacagauaaaauguucuuuguuaaaaauccuacagauaccggucauggaacaguaguaaugcaaguaaaaguaaguaaaggcgcucccuguagaauaccuguaauagucgcagacgauuuaaccgcagcaauaaauaaaggaauauuagucacgguaaacccaauagcgucaacaaaugaugaugaaguauuaauagaaguuaacccaccuuuuggagacaguuauauaauagucggaaggggugauaguagacuaacauaccaauggcauaaagaaggaagcucaauaggaaaauuauuuacucaaaccaugaaagguguagaaaggcuagcuguuaugggugacacagcaugggauuuuucaagcgcaggaggguucuuuacaucaguagguaaaggaauacauacaguauuuggaagugcauuucaaggauuauuuggugguuuaaauuggauaacaaaaguaauaaugggcgcaguuuuaauauggguagguauaaacacaagaaauaugacaaugucuaugaguaugauauuggucggaguaauaaugauguuuuuaucacuaggagugggugcagaucaagguugcgcuauuaauuuuggaaaaugaggacuaguacuggcugcaucucccuuuccucuguccuccauccuucucccaggauggugaagggggaccugguacccagugauccccaccccaggauccuaaaucaugacuuaccugcuaauaaaaacucauuggaaaagugagaagaucuaaaaaaaaaaaaaaaaaaaaaaaaaaaaaaaaaaaaaaaaaaaaaaaaaaaaaaaaaaaaaaaaugcaucccccccccccccccccccccccccccccccaaaggcucuuuucagagccaccagaauu

SEQ ID NO: 1059 - RNA, 2481 nt, Artificial Sequence
  mRNA product Design h-5 comprising derived and/or modified sequence from YFV__NC_002031.1__SSIgE-prME (polyprotein: aa122-778) (opt6)
gggagagggcgcuuggcuugcaaggacccugagcugcggcauugaagcacacccaacccaacucgacugaagucagccucacugaaccggaucugagaaucuucucucucugggcuugccagggcucuccgaaccuagcuagcauccucuucaauuccaacuagaaagcuuaccauggacuggacauggauauuauuuuuaguagcagcagcaacaagaguacauucaguaacauuagucagaaagaacagaugguuauuacugaacguaacaagugaagacuuaggaaaaacauuuaguguaggcacaggaaauugcacaacaaauauacuugaagcaaaauauugguguccagauagcauggaauauaauuguccaaauuuaucaccuagagaggaacccgaugauauagauuguugguguuauggaguugaaaacgugcgaguagcauaugguaaaugugauagcgcaggaagaaguagaagaaguagaagggcaauagacuuaccaacucaugaaaaccauggauuaaaaacaagacaggaaaaauggaugacaggaagaaugggagaacgacaauuacagaaaauagaaagaugguucguaagaaauccauucuuugcaguaacagcauuaacaauagcauaucuaguuggaaguaacaugacucaaagaguaguaauagcauuguuaguacuagcaguaggaccggcuuauagcgcacauuguauagggauaacagauagagacuuuauagaaggagugcacgguggaacauggguuucagcaacgcuagagcaagauaaauguguaacgguaauggcgccggauaaaccaagccuugacauaucacuagaaacgguugcaaucgaucgaccagccgaaguaagaaaaguaugcuauaaugcggucuuaacacacguaaaaauaaaugauaaauguccuucaacgggagaagcacauuuagcagaagaaaacgaaggagacaacgcguguaaaagaacauauucagauaggggcuggggaaacggcugcgguuuauuuggaaaaggaaguauaguagcaugcgcaaaauuuacuugcgcaaaaaguaugaguuuauucgaaguugaucaaacaaagauacaauauguaauacgagcacaauuacauguaggugcaaagcaagaaaauuggaauacagacauaaaaacauugaaauuugacgcuuugaguggaucacaagaaguagaauuuauaggauacggaaaagcuacauuagaaugucaaguacaaacugcaguagauuuuggaaauucguauauagcagaaauggaaacugaaucauggauuguagauaggcaaugggcacaagauuuaaccuugccauggcaaagcggaagcggggguguauggcgggaaaugcaucauuuaguagaguucgaacccccacacgcggcuaccauaagaguacuagcauuaggaaaucaagaagggagucucaagacagcacucacaggugcaaugcgaguaacgaaagauacaaaugacaauaaucuauacaaacuacacggaggacauguaucuugcagaguaaaauuaucugcauuaacacuaaaagggacaaguuacaaaauuuguacagauaagauguucuuugucaaaaacccaacagacacgggacacggaacgguagucaugcaaguuaaaguaagcaaaggagcgccaugcagaauaccaguaaucgucgcagaugauuuaacagccgcaauaaauaaagguauauuaguaacgguaaauccaauagcgaguaccaaugaugaugaaguacuaauagaagugaacccaccauuuggugauagcuauauaauaguagggcgaggagauucaagauuaacauaucaauggcauaaagaagguaguaguauaggaaaauuauuuacacaaacuaugaaaggcguagaaagacuagcagucaugggagauacagcaugggauuucucaagugcaggcggauuuuucacaagcgucggaaaaggaauacauacaguguuugguagugcguuucaaggauuauucggaggacuaaauuggauaacgaaaguaauuaugggagcaguucucauaugggucggaauaaauacaaggaacaugacuaugaguaugagcaugauccuaguaggaguaauaaugauguuucuaagccuaggcguuggugcaugaggacuaguacuggcugcaucucccuuuccucuguccuccauccuucucccaggauggugaagggggaccugguacccagugauccccaccccaggauccuaaaucaugacuuaccugcuaauaaaaacucauuggaaaagugagaagaucuaaaaaaaaaaaaaaaaaaaaaaaaaaaaaaaaaaaaaaaaaaaaaaaaaaaaaaaaaaaaaaaaugcaucccccccccccccccccccccccccccccccaaaggcucuuuucagagccaccagaauu

SEQ ID NO: 1060 - RNA, 2529 nt, Artificial Sequence
  mRNA product Design h-5 comprising derived and/or modified sequence from YFV__NC_002031.1__SSjev-prME-XX (polyprotein: aa122-788) (opt6)
gggagagggcgcuuggcuugcaaggacccugagcugcggcauugaagcacacccaacccaacucgacugaagucagccucacugaaccggaucugagaaucuucucucucugggcuugccagggcucuccgaaccuagcuagcauccucuucaauuccaacuagaaagcuuaccaugggaaaaagaagugcaggaaguauaaugugguuggcaaguuuagcaguaguaauagcaugugcaggagcaguuacauuaguaagaaagaaucgauggcugcuuuuaaaugugacaucagaggauuuagggaaaacauuuucgguaggaacaggaaauuguacuacaaauauacuugaagcaaaauauuggugcccagacucuauggaauauaauuguccaaauuuaaguccuagagaagaaccugacgauauagauuguugguguuaugguguagaaaauguaagaguagcauacggcaaaugcgauagugcaggacguucuagacguucaaggagagccauagaucugcccacucacgaaaaucacggauugaaaacacgacaagaaaaauggaugacugggcgaaugggagaaagacaacuacagaaaauugaaagaugguucguuagaaauccauucuuugccguaacagcuuuaacaauagccuauuuaguagguaguaauaugacacaaagaguaguaauagcauugcuaguguuagcaguuggaccagcuuauagugcacauugcauaggaauaacagauagagacuuuauagaaggaguacacgggggaacuuggguaagugccacuuuagaacaagauaaauguguuacagugauggcgccagauaaaccaagucuggacauaaguuuggaaacaguagcgauugauagacccgcagaaguaagaaaaguuuguuauaaugcuguucuaacccauguuaaaauaaaugauaaaugcccuagcaccggagaagcccaucuagcagaagaaaaugaaggagauaacgcauguaaacgaacauacucagauagaggauggggcaacggauguggcuuguuuggaaaagguagcauaguagcaugcgcuaaauuuacaugcgcaaagucaaugucauuauuugaaguagaucaaacaaaaauacaauauguaauaagagcucaauuacacgugggugcaaaacaagaaaauuggaauacagacauaaagacacuaaaguucgacgcauuaaguggaucacaagagguagaauuuauaggguacggaaaagcgacuuuagagugucaaguccaaacagcaguagauuucgguaacucauacauagcagaaauggaaacugaaaguuggauaguagauagacaaugggcacaagacuugacacuaccuuggcaaucaggaagcggaggaguauggagagaaaugcaucauuuaguagaauuugaaccaccucaugcagcaacaauaagaguauuagcccuaggaaaccaagaaggaaguuuaaaaacagcacuaacaggagcuaugagaguaacaaaagauacaaaugacaacaaucuauacaaauuacacggaggacauguaagcugccggguaaaguugagcgcacuaacauuaaaaggaacgaguuauaaaauaugcacagauaaaauguucuuuguuaaaaauccuacagauaccggucauggaacaguaguaaugcaaguaaaaguaaguaaaggcgcucccuguagaauaccuguaauagucgcagacgauuuaaccgcagcaauaaauaaaggaauauuagucacgguaaacccaauagcgucaacaaaugaugaugaaguauuaauagaaguuaacccaccuuuuggagacaguuauauaauagucggaaggggugauaguagacuaacauaccaauggcauaaagaaggaagcucaauaggaaaauuauuuacucaaaccaugaaagguguagaaaggcuagcuguuaugggugacacagcaugggauuuuucaagcgcaggaggguucuuuacaucaguagguaaaggaauacauacaguauuuggaagugcauuucaaggauuauuuggugguuuaaauuggauaacaaaaguaauaaugggcgcaguuuuaauauggguagguauaaacacaagaaauaugacaaugucuaugaguaugauauuggucggaguaauaaugauguuuuuaucacuaggagugggugcagaucaagguugcgcuauuaauuuuggaaaaugaggacuaguacuggcugcaucucccuuuccucuguccuccauccuucucccaggauggugaagggggaccugguacccagugauccccaccccaggauccuaaaucaugacuuaccugcuaauaaaaacucauuggaaaagugagaagaucuaaaaaaaaaaaaaaaaaaaaaaaaaaaaaaaaaaaaaaaaaaaaaaaaaaaaaaaaaaaaaaaaugcaucccccccccccccccccccccccccccccccaaaggcucuuuucagagccaccagaauu

SEQ ID NO: 1061 - RNA, 2499 nt, Artificial Sequence
  mRNA product Design h-5 comprising derived and/or modified sequence from YFV__NC_002031.1__SSjev-prME (polyprotein: aa122-778) (opt6)
gggagagggcgcuuggcuugcaaggacccugagcugcggcauugaagcacacccaacccaacucgacugaagucagccucacugaaccggaucugagaaucuucucucucugggcuugccagggcucuccgaaccuagcuagcauccucuucaauuccaacuagaaagcuuaccaugggaaaaagaagugcaggaaguauaaugugguuggcaaguuuagcaguaguaauagcaugugcaggagcaguaacauuagucagaaagaacagaugguuauuacugaacguaacaagugaagacuuaggaaaaacauuuaguguaggcacaggaaauugcacaacaaauauacuugaagcaaaauauugguguccagauagcauggaauauaauuguccaaauuuaucaccuagagaggaacccgaugauauagauuguugguguuauggaguugaaaacgugcgaguagcauaugguaaaugugauagcgcaggaagaaguagaagaaguagaagggcaauagacuuaccaacucaugaaaaccauggauuaaaaacaagacaggaaaaauggaugacaggaagaaugggagaacgacaauuacagaaaauagaaagaugguucguaagaaauccauucuuugcaguaacagcauuaacaauagcauaucuaguuggaaguaacaugacucaaagaguaguaauagcauuguuaguacuagcaguaggaccggcuuauagcgcacauuguauagggauaacagauagagacuuuauagaaggagugcacgguggaacauggguuucagcaacgcuagagcaagauaaauguguaacgguaauggcgccggauaaaccaagccuugacauaucacuagaaacgguugcaaucgaucgaccagccgaaguaagaaaaguaugcuauaaugcggucuuaacacacguaaaaauaaaugauaaauguccuucaacgggagaagcacauuuagcagaagaaaacgaaggagacaacgcguguaaaagaacauauucagauaggggcuggggaaacggcugcgguuuauuuggaaaaggaaguauaguagcaugcgcaaaauuuacuugcgcaaaaaguaugaguuuauucgaaguugaucaaacaaagauacaauauguaauacgagcacaauuacauguaggugcaaagcaagaaaauuggaauacagacauaaaaacauugaaauuugacgcuuugaguggaucacaagaaguagaauuuauaggauacggaaaagcuacauuagaaugucaaguacaaacugcaguagauuuuggaaauucguauauagcagaaauggaaacugaaucauggauuguagauaggcaaugggcacaagauuuaaccuugccauggcaaagcggaagcggggguguauggcgggaaaugcaucauuuaguagaguucgaacccccacacgcggcuaccauaagaguacuagcauuaggaaaucaagaagggagucucaagacagcacucacaggugcaaugcgaguaacgaaagauacaaaugacaauaaucuauacaaacuacacggaggacauguaucuugcagaguaaaauuaucugcauuaacacuaaaagggacaaguuacaaaauuuguacagauaagauguucuuugucaaaaacccaacagacacgggacacggaacgguagucaugcaaguuaaaguaagcaaaggagcgccaugcagaauaccaguaaucgucgcagaugauuuaacagccgcaauaaauaaagguauauuaguaacgguaaauccaauagcgaguaccaaugaugaugaaguacuaauagaagugaacccaccauuuggugauagcuauauaauaguagggcgaggagauucaagauuaacauaucaauggcauaaagaagguaguaguauaggaaaauuauuuacacaaacuaugaaaggcguagaaagacuagcagucaugggagauacagcaugggauuucucaagugcaggcggauuuuucacaagcgucggaaaaggaauacauacaguguuugguagugcguuucaaggauuauucggaggacuaaauuggauaacgaaaguaauuaugggagcaguucucauaugggucggaauaaauacaaggaacaugacuaugaguaugagcaugauccuaguaggaguaauaaugauguuucuaagccuaggcguuggugcaugaggacuaguacuggcugcaucucccuuuccucuguccuccauccuucucccaggauggugaagggggaccugguacccagugauccccaccccaggauccuaaaucaugacuuaccugcuaauaaaaacucauuggaaaagugagaagaucuaaaaaaaaaaaaaaaaaaaaaaaaaaaaaaaaaaaaaaaaaaaaaaaaaaaaaaaaaaaaaaaaugcaucccccccccccccccccccccccccccccccaaaggcucuuuucagagccaccagaauu

SEQ ID NO: 1062 - RNA, 2547 nt, Artificial Sequence
  mRNA product Design h-5 comprising derived and/or modified sequence from YFV__NC_002031.1__X-SS-prME-XX (polyprotein: aa92-788) (opt11)
gggagagggcgcuuggcuugcaaggacccugagcugcggcauugaagcacacccaacccaacucgacugaagucagccucacugaaccggaucugagaaucuucucucucugggcuugccagggcucuccgaaccuagcuagcauccucuucaauuccaacuagaaagcuuaccaugcggggacuaagcagcagaaaaagacgcagccacgaugugcucaccgugcaauuccucauacuggggaugcuccuaaugaccggaggcgugacccuaguaaggaaaaacagauggcuacuacuaaacguaaccucagaagaucuaggaaagacauuuucagucggcacaggcaacugcacaaccaacauacuagaagcaaaauauuggugcccagacagcauggaauacaacugucccaaccucagcccaagagaggaaccagacgacauagacugcugguguuacggaguagaaaacguaagaguggcauacggcaaaugcgacagcgcaggcaggagccgaagaucccgcagagccaucgacuugcccacgcacgaaaaccacggccucaaaacacgacaagaaaaauggaugacagggcgaaugggagaacgacagcuccagaaaauagaacgaugguucguccggaacccguucuucgcaguaacggcacuaacaaucgcauaccucguaggcagcaacaugacacaaagaguggucaucgcgcuacucguacuagcaguggggcccgcauacagugcacacugcauaggaaucacagaccgugacuucaucgaaggcguacacggaggaacguggguaagcgcgacacuggaacaagacaaaugcgugacaguaauggcaccagacaaaccaagccuagacauaucccuagaaacggucgccaucgaccgucccgcagaaguacgaaagguaugcuauaaugcaguccucacacacgucaaaauaaacgacaaaugccccagcacgggcgaagcacaccucgccgaagaaaacgaaggggauaacgcgugcaaacgcaccuacuccgacaggggauggggcaacggaugcggacuguucggaaaaggauccauagucgcaugcgcaaaauuuaccugcgcaaaaagcaugagcuuguucgagguagaccaaacgaagauccaauacguaauccgagcucaacuacacguuggggccaagcaagagaacuggaauacggacaucaaaacacuaaaauucgacgcacucuccggcucacaagaagucgaguucaucggcuacggcaaagcaacacuagaaugccaaguacaaacagcgguggacuucggcaacagcuacauagcagaaauggaaacagaaagcuggauaguagaccgacaaugggcacaagaccuaacucugccauggcaaagcggcucaggaggaguguggagagagaugcaccaccugguagaguucgaacccccacacgcagcaacaauaaggguacuggcacuaggcaaccaagaaggcagccuaaaaaccgcacucacaggagccaugcgcgugacgaaggacaccaacgacaacaaccucuacaaacuccacggagggcacguauccugccgcguaaaacuaucagcacuaacgcuaaaaggaacaagcuacaaaauaugcacagacaaaauguucuucgucaaaaaccccacagacacaggccacggcacagucguaaugcaagugaaggucagcaagggggcccccugccgaaucccagucauaguggcagacgaccucacggccgccaucaacaaagggauccugguaacagugaacccaauagcaucgaccaacgacgacgaaguccucauagaagugaaucccccguucggcgacagcuacaucaucguaggacgcggcgacucccgacugacguaccaauggcauaaagaaggcagcagcauuggaaaacuauucacccaaaccaugaagggcgucgaaagacucgcggugaugggagacaccgcaugggacuucucgagcgcaggcggcuucuucacaagcguaggaaaagggauucacacaguauucggauccgcauuccaaggccucuucgggggacuaaacuggauaacgaaaguaauaaugggagcaguucucauauggguaggaaucaacacacgaaacaugacaauguccaugucaaugauacucguaggcguaaucaugauguuucugucacucggagugggagcagaccaagguugcgccauaaacuucggcaagugaggacuaguacuggcugcaucucccuuuccucuguccuccauccuucucccaggauggugaagggggaccugguacccagugauccccaccccaggauccuaaaucaugacuuaccugcuaauaaaaacucauuggaaaagugagaagaucuaaaaaaaaaaaaaaaaaaaaaaaaaaaaaaaaaaaaaaaaaaaaaaaaaaaaaaaaaaaaaaaaugcaucccccccccccccccccccccccccccccccaaaggcucuuuucagagccaccagaauu

SEQ ID NO: 1063 - RNA, 2484 nt, Artificial Sequence
  mRNA product Design h-5 comprising derived and/or modified sequence from YFV__NC_002031.1__SS-prME (polyprotein: M,aa104-778) (opt11)
gggagagggcgcuuggcuugcaaggacccugagcugcggcauugaagcacacccaacccaacucgacugaagucagccucacugaaccggaucugagaaucuucucucucugggcuugccagggcucuccgaaccuagcuagcauccucuucaauuccaacuagaaagcuuaccauggacguccuuacgguacaauuccuaauacuaggaaugcuucucaugaccgggggcgucacccuaguccggaaaaacagauggcuacugcuaaauguuacaagcgaagaccuuggcaagacauucagcguaggcacgggcaacuguacaaccaacauacuagaagcgaaauacuggugcccagacuccauggaguacaacugccccaaccuaagcccacgggaagaacccgacgacauagacugcugguguuacggggucgaaaacguccgcgucgcauacgggaaaugcgauagcgcaggccgcaguagacgcucccgccgcgccauagaccuaccaacgcacgagaaccacggccucaaaacucgccaagaaaaauggaugacagggcgaaugggugaacgccaacuacagaagaucgaaaggugguucgucaggaacccauucuucgcagugaccgcacuaacgauagccuaccuagugggaucaaacaugacgcaacgagucgugaucgcacuccuaguacuggccguaggaccggccuacuccgcgcacugcaucggcauaacggauagggacuucauugaaggaguacauggcggcacgugggucagcgcgacacucgaacaagacaaaugcguaaccgugauggcacccgacaaaccgagucuugacauaagccuggaaacgguagcgauagaucguccagccgaaguaagaaaaguaugcuacaacgcaguccuaacacacguaaaaauaaacgacaaaugcccaagcacaggggaagcccaccucgcagaagagaacgaaggcgacaacgcaugcaaacgcacauacuccgacaggggaugggggaauggcugcggacuauucgggaaaggaagcaucgucgcgugcgccaaauucacaugcgccaagagcaugagccuguucgaagucgaccaaacaaaaauccaauacguaauacgcgcgcaacugcacguaggagcgaaacaggaaaacuggaacacggacauuaaaacccucaaauucgacgcgcucucaggaucacaagaagucgaguucaucggcuacggcaaggcaacgcucgaaugccaaguacaaacagcaguagacuucggaaacagcuacauugccgagauggaaaccgagagcuggauagucgacagacaaugggcccaagaccuaacccugccauggcaaucaggcuccgggggcgucuggcgagagaugcaccaccuaguagaguucgaaccaccccacgccgccacgaucagaguacuggcccugggcaaccaagaaggcucacucaagacggcgcucacaggagcaaugagggucacgaaagacaccaacgacaacaaccucuacaaacuacacggagggcacgugagcugccggguaaaacugagcgcacucacucugaagggaacaagcuacaagauaugcaccgacaaaauguucuucgugaaaaacccaaccgacacuggacacggcacggucguuaugcaagucaagguaucaaaaggagccccaugcagaaucccaguaauaguagcggacgaccuaacagccgccauaaacaaaggaauccuagucacgguaaauccgauagcaucgaccaacgacgacgaaguacuaauagaagugaacccaccauucggcgacagcuacauaauagucgggagaggcgacucgcgacuaaccuaccaauggcacaaggaagggagcucuaucgggaaacuauucacccaaacgaugaagggcguagaaaggcucgcagucaugggcgacaccgcaugggacuucuccagcgcgggaggcuucuuuacuucagugggaaaagggauacacaccgucuucggcagcgcauuccagggccuauucggcggguuaaacuggaucacgaaagugauaaugggggcaguucucaucugggucggaauaaacacacguaacaugaccaugagcaugagcaugauccuagucggggucauaaugauguucuugagcuugggaguaggugcaugaggacuaguacuggcugcaucucccuuuccucuguccuccauccuucucccaggauggugaagggggaccugguacccagugauccccaccccaggauccuaaaucaugacuuaccugcuaauaaaaacucauuggaaaagugagaagaucuaaaaaaaaaaaaaaaaaaaaaaaaaaaaaaaaaaaaaaaaaaaaaaaaaaaaaaaaaaaaaaaaugcaucccccccccccccccccccccccccccccccaaaggcucuuuucagagccaccagaauu

SEQ ID NO: 1064 - RNA, 2511 nt, Artificial Sequence
  mRNA product Design h-5 comprising derived and/or modified sequence from YFV__NC_002031.1__SSIgE-prME-XX (polyprotein: aa122-788) (opt11)
gggagagggcgcuuggcuugcaaggacccugagcugcggcauugaagcacacccaacccaacucgacugaagucagccucacugaaccggaucugagaaucuucucucucugggcuugccagggcucuccgaaccuagcuagcauccucuucaauuccaacuagaaagcuuaccauggauuggacguggauacucuuucucguggccgcggccacgcgcgugcacucggugacccuaguaaggaaaaacagauggcuacuacuaaacguaaccucagaagaucuaggaaagacauuuucagucggcacaggcaacugcacaaccaacauacuagaagcaaaauauuggugcccagacagcauggaauacaacugucccaaccucagcccaagagaggaaccagacgacauagacugcugguguuacggaguagaaaacguaagaguggcauacggcaaaugcgacagcgcaggcaggagccgaagaucccgcagagccaucgacuugcccacgcacgaaaaccacggccucaaaacacgacaagaaaaauggaugacagggcgaaugggagaacgacagcuccagaaaauagaacgaugguucguccggaacccguucuucgcaguaacggcacuaacaaucgcauaccucguaggcagcaacaugacacaaagaguggucaucgcgcuacucguacuagcaguggggcccgcauacagugcacacugcauaggaaucacagaccgugacuucaucgaaggcguacacggaggaacguggguaagcgcgacacuggaacaagacaaaugcgugacaguaauggcaccagacaaaccaagccuagacauaucccuagaaacggucgccaucgaccgucccgcagaaguacgaaagguaugcuauaaugcaguccucacacacgucaaaauaaacgacaaaugccccagcacgggcgaagcacaccucgccgaagaaaacgaaggggauaacgcgugcaaacgcaccuacuccgacaggggauggggcaacggaugcggacuguucggaaaaggauccauagucgcaugcgcaaaauuuaccugcgcaaaaagcaugagcuuguucgagguagaccaaacgaagauccaauacguaauccgagcucaacuacacguuggggccaagcaagagaacuggaauacggacaucaaaacacuaaaauucgacgcacucuccggcucacaagaagucgaguucaucggcuacggcaaagcaacacuagaaugccaaguacaaacagcgguggacuucggcaacagcuacauagcagaaauggaaacagaaagcuggauaguagaccgacaaugggcacaagaccuaacucugccauggcaaagcggcucaggaggaguguggagagagaugcaccaccugguagaguucgaacccccacacgcagcaacaauaaggguacuggcacuaggcaaccaagaaggcagccuaaaaaccgcacucacaggagccaugcgcgugacgaaggacaccaacgacaacaaccucuacaaacuccacggagggcacguauccugccgcguaaaacuaucagcacuaacgcuaaaaggaacaagcuacaaaauaugcacagacaaaauguucuucgucaaaaaccccacagacacaggccacggcacagucguaaugcaagugaaggucagcaagggggcccccugccgaaucccagucauaguggcagacgaccucacggccgccaucaacaaagggauccugguaacagugaacccaauagcaucgaccaacgacgacgaaguccucauagaagugaaucccccguucggcgacagcuacaucaucguaggacgcggcgacucccgacugacguaccaauggcauaaagaaggcagcagcauuggaaaacuauucacccaaaccaugaagggcgucgaaagacucgcggugaugggagacaccgcaugggacuucucgagcgcaggcggcuucuucacaagcguaggaaaagggauucacacaguauucggauccgcauuccaaggccucuucgggggacuaaacuggauaacgaaaguaauaaugggagcaguucucauauggguaggaaucaacacacgaaacaugacaauguccaugucaaugauacucguaggcguaaucaugauguuucugucacucggagugggagcagaccaagguugcgccauaaacuucggcaagugaggacuaguacuggcugcaucucccuuuccucuguccuccauccuucucccaggauggugaagggggaccugguacccagugauccccaccccaggauccuaaaucaugacuuaccugcuaauaaaaacucauuggaaaagugagaagaucuaaaaaaaaaaaaaaaaaaaaaaaaaaaaaaaaaaaaaaaaaaaaaaaaaaaaaaaaaaaaaaaaugcaucccccccccccccccccccccccccccccccaaaggcucuuuucagagccaccagaauu

SEQ ID NO: 1065 - RNA, 2481 nt, Artificial Sequence
  mRNA product Design h-5 comprising derived and/or modified sequence from YFV__NC_002031.1__SSIgE-prME (polyprotein: aa122-778) (opt11)
gggagagggcgcuuggcuugcaaggacccugagcugcggcauugaagcacacccaacccaacucgacugaagucagccucacugaaccggaucugagaaucuucucucucugggcuugccagggcucuccgaaccuagcuagcauccucuucaauuccaacuagaaagcuuaccauggauuggacguggauacucuuucucguggccgcggccacgcgcgugcacucggugacccuaguccgcaaaaacagauggcuacuacuaaacguaacaagcgaagaccugggcaaaacauucagcguuggcacaggcaauugcacgacaaacauacucgaagcaaaauacuggugccccgacagcauggaauacaacugcccaaaucuaagcccacgcgaagaaccagacgacaucgacuguuggugcuacggagucgaaaacgugagggucgcauacgguaaaugcgacagcgcuggcagaagcagacgcucccgacgagccauugaccucccuacccacgaaaaccacggccuaaaaacccggcaggaaaaauggaugacaggccggaugggagaacgccaacuacagaaaauagagaggugguuuguaagaaacccauucuucgccguaaccgcgcucaccaucgcuuaccucguaggaucaaacaugacgcaaagaguagugaucgcgcuacucguacuagcgguaggccccgccuacagcgcacacugcaucggcaucacugacagggacuucauagaaggcguccacgggggcacguggguuagcgccacacucgaacaagacaaaugcgucacagugauggcaccagacaaacccucacuagacaucucacuagaaaccgucgcaaucgaccgcccagcagaagucaggaaagugugcuacaacgccgucuuaacccacguaaaaauaaaugauaaaugcccaagcacgggagaggcacaccuagcggaagaaaacgaaggcgacaacgcgugcaaacguaccuacagcgacagaggguggggcaacggaugcggcuuauucggaaaaggaaguaucguagcaugcgcaaaauuuaccugcgccaaaagcaugucccuauucgaaguagaucaaacaaaaauacaauacgucauccgagcccaacuacacgugggggcaaaacaagaaaacuggaacaccgacaucaaaacacucaaauucgaugcccuaagcggcucccaagaaguagaguucaucgguuacggcaaggccacgcucgagugccaaguccaaacagcaguagacuucgggaacucauacaucgccgagauggaaacggaaucauggauugucgacagacaaugggcacaagaccuaacacuaccauggcaaucaggcagcggaggggucuggcgagaaaugcaccaccuaguagaguucgaacccccacacgccgcaacaauccgaguacuagcccucggaaaccaagaaggaucacuaaaaaccgcacucaccggcgcaaugcgcguaacaaaagauacaaacgacaacaaccuauacaaacuacacggcggacacgucagcugccgcgucaaacuauccgcccuaacacuaaaaggaacaagcuacaaaauaugcacagacaaaauguucuucgucaaaaauccgacugacacgggccacggcacagucguaaugcaaguaaaagucucaaaaggcgcaccaugcagaaucccaguaaucgucgccgaugaccuaacagccgcaaucaacaagggcauccucguaacaguaaaccccauagccagcaccaacgacgacgaaguccuaaucgaagucaacccacccuucggagacagcuacauaauaguaggacgaggggacucacgccuaaccuaccaauggcacaaagaaggauccucaaucggcaaacuguucacacaaacgaugaaaggcguagaaagacucgcaguaaugggcgauacggccugggacuucucaagcgcgggcggcuucuucacgagcgucggaaaaggcauccauacaguauucggaagcgcauuccaaggccuauuuggaggccucaacuggauaacaaaagugaucaugggagcaguacugaucugggucggcaucaacacccgcaacaugacgaugagcaugucaaugauccucgugggaguaauaaugauguuccucagccugggcguaggcgcaugaggacuaguacuggcugcaucucccuuuccucuguccuccauccuucucccaggauggugaagggggaccugguacccagugauccccaccccaggauccuaaaucaugacuuaccugcuaauaaaaacucauuggaaaagugagaagaucuaaaaaaaaaaaaaaaaaaaaaaaaaaaaaaaaaaaaaaaaaaaaaaaaaaaaaaaaaaaaaaaaugcaucccccccccccccccccccccccccccccccaaaggcucuuuucagagccaccagaauu

SEQ ID NO: 1066 - RNA, 2529 nt, Artificial Sequence
  mRNA product Design h-5 comprising derived and/or modified sequence from YFV__NC_002031.1__SSjev-prME-XX (polyprotein: aa122-788) (opt11)
gggagagggcgcuuggcuugcaaggacccugagcugcggcauugaagcacacccaacccaacucgacugaagucagccucacugaaccggaucugagaaucuucucucucugggcuugccagggcucuccgaaccuagcuagcauccucuucaauuccaacuagaaagcuuaccauggggaaaaggagcgcgggcucgauaaugugguuggccucgcucgcggucgugaucgcgugcgcgggcgcggugacccuaguaaggaaaaacagauggcuacuacuaaacguaaccucagaagaucuaggaaagacauuuucagucggcacaggcaacugcacaaccaacauacuagaagcaaaauauuggugcccagacagcauggaauacaacugucccaaccucagcccaagagaggaaccagacgacauagacugcugguguuacggaguagaaaacguaagaguggcauacggcaaaugcgacagcgcaggcaggagccgaagaucccgcagagccaucgacuugcccacgcacgaaaaccacggccucaaaacacgacaagaaaaauggaugacagggcgaaugggagaacgacagcuccagaaaauagaacgaugguucguccggaacccguucuucgcaguaacggcacuaacaaucgcauaccucguaggcagcaacaugacacaaagaguggucaucgcgcuacucguacuagcaguggggcccgcauacagugcacacugcauaggaaucacagaccgugacuucaucgaaggcguacacggaggaacguggguaagcgcgacacuggaacaagacaaaugcgugacaguaauggcaccagacaaaccaagccuagacauaucccuagaaacggucgccaucgaccgucccgcagaaguacgaaagguaugcuauaaugcaguccucacacacgucaaaauaaacgacaaaugccccagcacgggcgaagcacaccucgccgaagaaaacgaaggggauaacgcgugcaaacgcaccuacuccgacaggggauggggcaacggaugcggacuguucggaaaaggauccauagucgcaugcgcaaaauuuaccugcgcaaaaagcaugagcuuguucgagguagaccaaacgaagauccaauacguaauccgagcucaacuacacguuggggccaagcaagagaacuggaauacggacaucaaaacacuaaaauucgacgcacucuccggcucacaagaagucgaguucaucggcuacggcaaagcaacacuagaaugccaaguacaaacagcgguggacuucggcaacagcuacauagcagaaauggaaacagaaagcuggauaguagaccgacaaugggcacaagaccuaacucugccauggcaaagcggcucaggaggaguguggagagagaugcaccaccugguagaguucgaacccccacacgcagcaacaauaaggguacuggcacuaggcaaccaagaaggcagccuaaaaaccgcacucacaggagccaugcgcgugacgaaggacaccaacgacaacaaccucuacaaacuccacggagggcacguauccugccgcguaaaacuaucagcacuaacgcuaaaaggaacaagcuacaaaauaugcacagacaaaauguucuucgucaaaaaccccacagacacaggccacggcacagucguaaugcaagugaaggucagcaagggggcccccugccgaaucccagucauaguggcagacgaccucacggccgccaucaacaaagggauccugguaacagugaacccaauagcaucgaccaacgacgacgaaguccucauagaagugaaucccccguucggcgacagcuacaucaucguaggacgcggcgacucccgacugacguaccaauggcauaaagaaggcagcagcauuggaaaacuauucacccaaaccaugaagggcgucgaaagacucgcggugaugggagacaccgcaugggacuucucgagcgcaggcggcuucuucacaagcguaggaaaagggauucacacaguauucggauccgcauuccaaggccucuucgggggacuaaacuggauaacgaaaguaauaaugggagcaguucucauauggguaggaaucaacacacgaaacaugacaauguccaugucaaugauacucguaggcguaaucaugauguuucugucacucggagugggagcagaccaagguugcgccauaaacuucggcaagugaggacuaguacuggcugcaucucccuuuccucuguccuccauccuucucccaggauggugaagggggaccugguacccagugauccccaccccaggauccuaaaucaugacuuaccugcuaauaaaaacucauuggaaaagugagaagaucuaaaaaaaaaaaaaaaaaaaaaaaaaaaaaaaaaaaaaaaaaaaaaaaaaaaaaaaaaaaaaaaaugcaucccccccccccccccccccccccccccccccaaaggcucuuuucagagccaccagaauu

SEQ ID NO: 1067 - RNA, 2499 nt, Artificial Sequence
  mRNA product Design h-5 comprising derived and/or modified sequence from YFV__NC_002031.1__SSjev-prME (polyprotein: aa122-778) (opt11)
gggagagggcgcuuggcuugcaaggacccugagcugcggcauugaagcacacccaacccaacucgacugaagucagccucacugaaccggaucugagaaucuucucucucugggcuugccagggcucuccgaaccuagcuagcauccucuucaauuccaacuagaaagcuuaccauggggaaaaggagcgcgggcucgauaaugugguuggccucgcucgcggucgugaucgcgugcgcgggcgcggugacccuaguccgcaaaaacagauggcuacuacuaaacguaacaagcgaagaccugggcaaaacauucagcguuggcacaggcaauugcacgacaaacauacucgaagcaaaauacuggugccccgacagcauggaauacaacugcccaaaucuaagcccacgcgaagaaccagacgacaucgacuguuggugcuacggagucgaaaacgugagggucgcauacgguaaaugcgacagcgcuggcagaagcagacgcucccgacgagccauugaccucccuacccacgaaaaccacggccuaaaaacccggcaggaaaaauggaugacaggccggaugggagaacgccaacuacagaaaauagagaggugguuuguaagaaacccauucuucgccguaaccgcgcucaccaucgcuuaccucguaggaucaaacaugacgcaaagaguagugaucgcgcuacucguacuagcgguaggccccgccuacagcgcacacugcaucggcaucacugacagggacuucauagaaggcguccacgggggcacguggguuagcgccacacucgaacaagacaaaugcgucacagugauggcaccagacaaacccucacuagacaucucacuagaaaccgucgcaaucgaccgcccagcagaagucaggaaagugugcuacaacgccgucuuaacccacguaaaaauaaaugauaaaugcccaagcacgggagaggcacaccuagcggaagaaaacgaaggcgacaacgcgugcaaacguaccuacagcgacagaggguggggcaacggaugcggcuuauucggaaaaggaaguaucguagcaugcgcaaaauuuaccugcgccaaaagcaugucccuauucgaaguagaucaaacaaaaauacaauacgucauccgagcccaacuacacgugggggcaaaacaagaaaacuggaacaccgacaucaaaacacucaaauucgaugcccuaagcggcucccaagaaguagaguucaucgguuacggcaaggccacgcucgagugccaaguccaaacagcaguagacuucgggaacucauacaucgccgagauggaaacggaaucauggauugucgacagacaaugggcacaagaccuaacacuaccauggcaaucaggcagcggaggggucuggcgagaaaugcaccaccuaguagaguucgaacccccacacgccgcaacaauccgaguacuagcccucggaaaccaagaaggaucacuaaaaaccgcacucaccggcgcaaugcgcguaacaaaagauacaaacgacaacaaccuauacaaacuacacggcggacacgucagcugccgcgucaaacuauccgcccuaacacuaaaaggaacaagcuacaaaauaugcacagacaaaauguucuucgucaaaaauccgacugacacgggccacggcacagucguaaugcaaguaaaagucucaaaaggcgcaccaugcagaaucccaguaaucgucgccgaugaccuaacagccgcaaucaacaagggcauccucguaacaguaaaccccauagccagcaccaacgacgacgaaguccuaaucgaagucaacccacccuucggagacagcuacauaauaguaggacgaggggacucacgccuaaccuaccaauggcacaaagaaggauccucaaucggcaaacuguucacacaaacgaugaaaggcguagaaagacucgcaguaaugggcgauacggccugggacuucucaagcgcgggcggcuucuucacgagcgucggaaaaggcauccauacaguauucggaagcgcauuccaaggccuauuuggaggccucaacuggauaacaaaagugaucaugggagcaguacugaucugggucggcaucaacacccgcaacaugacgaugagcaugucaaugauccucgugggaguaauaaugauguuccucagccugggcguaggcgcaugaggacuaguacuggcugcaucucccuuuccucuguccuccauccuucucccaggauggugaagggggaccugguacccagugauccccaccccaggauccuaaaucaugacuuaccugcuaauaaaaacucauuggaaaagugagaagaucuaaaaaaaaaaaaaaaaaaaaaaaaaaaaaaaaaaaaaaaaaaaaaaaaaaaaaaaaaaaaaaaaugcaucccccccccccccccccccccccccccccccaaaggcucuuuucagagccaccagaauu

SEQ ID NO: 1068 - RNA, 2476 nt, Artificial Sequence
  mRNA product Design i-2 comprising derived and/or modified sequence from YFV__NC_002031.1__X-SS-prME-XX (polyprotein: aa92-788) (wt)
ggggcgcugccuacggagguggcagccaucuccuucucggcaucaagcuuaccaugagaggauuguccucaaggaaacgccguucccaugauguucugacugugcaauuccuaauuuugggaaugcuguugaugacggguggagugaccuuggugcggaaaaacagaugguugcuccuaaaugugacaucugaggaccucgggaaaacauucucugugggcacaggcaacugcacaacaaacauuuuggaagccaaguacuggugcccagacucaauggaauacaacugucccaaucucaguccaagagaggagccagaugacauugauugcuggugcuaugggguggaaaacguuagagucgcauaugguaagugugacucagcaggcaggucuaggaggucaagaagggccauugacuugccuacgcaugaaaaccaugguuugaagacccggcaagaaaaauggaugacuggaagaaugggugaaaggcaacuccaaaagauugagagaugguucgugaggaaccccuuuuuugcagugacggcucugaccauugccuaccuugugggaagcaacaugacgcaacgagucgugauugcccuacuggucuuggcuguugguccggccuacucagcucacugcauuggaauuacugacagggauuucauugagggggugcauggaggaacuuggguuucagcuacccuggagcaagacaagugugucacuguuauggccccugacaagccuucauuggacaucucacuagagacaguagccauugauagaccugcugaggugaggaaaguguguuacaaugcaguucucacucaugugaagauuaaugacaagugccccagcacuggagaggcccaccuagcugaagagaacgaaggggacaaugcgugcaagcgcacuuauucugauagaggcuggggcaauggcuguggccuauuugggaaagggagcauuguggcaugcgccaaauucacuugugccaaauccaugaguuuguuugagguugaucagaccaaaauucaguaugucaucagagcacaauugcauguaggggccaagcaggaaaauuggaauaccgacauuaagacucucaaguuugaugcccugucaggcucccaggaagucgaguucauuggguauggaaaagcuacacuggaaugccaggugcaaacugcgguggacuuugguaacaguuacaucgcugagauggaaacagagagcuggauaguggacagacagugggcccaggacuugacccugccauggcagaguggaaguggcgggguguggagagagaugcaucaucuugucgaauuugaaccuccgcaugccgccacuaucagaguacuggcccugggaaaccaggaaggcuccuugaaaacagcucuuacuggcgcaaugaggguuacaaaggacacaaaugacaacaaccuuuacaaacuacaugguggacauguuucuugcagagugaaauugucagcuuugacacucaaggggacauccuacaaaauaugcacugacaaaauguuuuuugucaagaacccaacugacacuggccauggcacuguugugaugcaggugaaagugucaaaaggagcccccugcaggauuccagugauaguagcugaugaucuuacagcggcaaucaauaaaggcauuuugguuacaguuaaccccaucgccucaaccaaugaugaugaagugcugauugaggugaacccaccuuuuggagacagcuacauuaucguugggagaggagauucacgucucacuuaccaguggcacaaagagggaagcucaauaggaaaguuguucacucagaccaugaaaggcguggaacgccuggccgucaugggagacaccgccugggauuucagcuccgcuggaggguucuucacuucgguugggaaaggaauccauacgguguuuggcucugccuuucaggggcuauuuggcggcuugaacuggauaacaaaggucaucaugggggcgguacuuauauggguuggcaucaacacaagaaacaugacaauguccaugagcaugaucuugguaggagugaucaugauguuuuugucucuaggaguuggggcggaucaaggaugcgccaucaacuuuggcaaguaaggacuagugcaucacauuuaaaagcaucucagccuaccaugagaauaagagaaagaaaaugaagaucaauagcuuauucaucucuuuuucuuuuucguugguguaaagccaacacccugucuaaaaaacauaaauuucuuuaaucauuuugccucuuuucucugugcuucaauuaauaaaaaauggaaagaaccuagaucuaaaaaaaaaaaaaaaaaaaaaaaaaaaaaaaaaaaaaaaaaaaaaaaaaaaaaaaaaaaaaaaaugcaucccccccccccccccccccccccccccccccaaaggcucuuuucagagccaccagaauu

SEQ ID NO: 1069 - RNA, 2443 nt, Artificial Sequence
  mRNA product Design i-2 comprising derived and/or modified sequence from YFV__NC_002031.1__SS-prME (polyprotein: M,aa104-778) (wt)
ggggcgcugccuacggagguggcagccaucuccuucucggcaucaagcuuaccauggauguucugacugugcaauuccuaauuuugggaaugcuguugaugacggguggagugaccuuggugcggaaaaacagaugguugcuccuaaaugugacaucugaggaccucgggaaaacauucucugugggcacaggcaacugcacaacaaacauuuuggaagccaaguacuggugcccagacucaauggaauacaacugucccaaucucaguccaagagaggagccagaugacauugauugcuggugcuaugggguggaaaacguuagagucgcauaugguaagugugacucagcaggcaggucuaggaggucaagaagggccauugacuugccuacgcaugaaaaccaugguuugaagacccggcaagaaaaauggaugacuggaagaaugggugaaaggcaacuccaaaagauugagagaugguucgugaggaaccccuuuuuugcagugacggcucugaccauugccuaccuugugggaagcaacaugacgcaacgagucgugauugcccuacuggucuuggcuguugguccggccuacucagcucacugcauuggaauuacugacagggauuucauugagggggugcauggaggaacuuggguuucagcuacccuggagcaagacaagugugucacuguuauggccccugacaagccuucauuggacaucucacuagagacaguagccauugauagaccugcugaggugaggaaaguguguuacaaugcaguucucacucaugugaagauuaaugacaagugccccagcacuggagaggcccaccuagcugaagagaacgaaggggacaaugcgugcaagcgcacuuauucugauagaggcuggggcaauggcuguggccuauuugggaaagggagcauuguggcaugcgccaaauucacuugugccaaauccaugaguuuguuugagguugaucagaccaaaauucaguaugucaucagagcacaauugcauguaggggccaagcaggaaaauuggaauaccgacauuaagacucucaaguuugaugcccugucaggcucccaggaagucgaguucauuggguauggaaaagcuacacuggaaugccaggugcaaacugcgguggacuuugguaacaguuacaucgcugagauggaaacagagagcuggauaguggacagacagugggcccaggacuugacccugccauggcagaguggaaguggcgggguguggagagagaugcaucaucuugucgaauuugaaccuccgcaugccgccacuaucagaguacuggcccugggaaaccaggaaggcuccuugaaaacagcucuuacuggcgcaaugaggguuacaaaggacacaaaugacaacaaccuuuacaaacuacaugguggacauguuucuugcagagugaaauugucagcuuugacacucaaggggacauccuacaaaauaugcacugacaaaauguuuuuugucaagaacccaacugacacuggccauggcacuguugugaugcaggugaaagugucaaaaggagcccccugcaggauuccagugauaguagcugaugaucuuacagcggcaaucaauaaaggcauuuugguuacaguuaaccccaucgccucaaccaaugaugaugaagugcugauugaggugaacccaccuuuuggagacagcuacauuaucguugggagaggagauucacgucucacuuaccaguggcacaaagagggaagcucaauaggaaaguuguucacucagaccaugaaaggcguggaacgccuggccgucaugggagacaccgccugggauuucagcuccgcuggaggguucuucacuucgguugggaaaggaauccauacgguguuuggcucugccuuucaggggcuauuuggcggcuugaacuggauaacaaaggucaucaugggggcgguacuuauauggguuggcaucaacacaagaaacaugacaauguccaugagcaugaucuugguaggagugaucaugauguuuuugucucuaggaguuggggcggaucaaggaugcgccaucaacuuuggcaaguaaggacuagugcaucacauuuaaaagcaucucagccuaccaugagaauaagagaaagaaaaugaagaucaauagcuuauucaucucuuuuucuuuuucguugguguaaagccaacacccugucuaaaaaacauaaauuucuuuaaucauuuugccucuuuucucugugcuucaauuaauaaaaaauggaaagaaccuagaucuaaaaaaaaaaaaaaaaaaaaaaaaaaaaaaaaaaaaaaaaaaaaaaaaaaaaaaaaaaaaaaaaugcaucccccccccccccccccccccccccccccccaaaggcucuuuucagagccaccagaauu

SEQ ID NO: 1070 - RNA, 2440 nt, Artificial Sequence
  mRNA product Design i-2 comprising derived and/or modified sequence from YFV__NC_002031.1__SSIgE-prME-XX (polyprotein: aa122-788) (wt)
ggggcgcugccuacggagguggcagccaucuccuucucggcaucaagcuuaccauggacuggaccuggauccuguuccucguggccgccgcgacccgcguccacagcgugaccuuggugcggaaaaacagaugguugcuccuaaaugugacaucugaggaccucgggaaaacauucucugugggcacaggcaacugcacaacaaacauuuuggaagccaaguacuggugcccagacucaauggaauacaacugucccaaucucaguccaagagaggagccagaugacauugauugcuggugcuaugggguggaaaacguuagagucgcauaugguaagugugacucagcaggcaggucuaggaggucaagaagggccauugacuugccuacgcaugaaaaccaugguuugaagacccggcaagaaaaauggaugacuggaagaaugggugaaaggcaacuccaaaagauugagagaugguucgugaggaaccccuuuuuugcagugacggcucugaccauugccuaccuugugggaagcaacaugacgcaacgagucgugauugcccuacuggucuuggcuguugguccggccuacucagcucacugcauuggaauuacugacagggauuucauugagggggugcauggaggaacuuggguuucagcuacccuggagcaagacaagugugucacuguuauggccccugacaagccuucauuggacaucucacuagagacaguagccauugauagaccugcugaggugaggaaaguguguuacaaugcaguucucacucaugugaagauuaaugacaagugccccagcacuggagaggcccaccuagcugaagagaacgaaggggacaaugcgugcaagcgcacuuauucugauagaggcuggggcaauggcuguggccuauuugggaaagggagcauuguggcaugcgccaaauucacuugugccaaauccaugaguuuguuugagguugaucagaccaaaauucaguaugucaucagagcacaauugcauguaggggccaagcaggaaaauuggaauaccgacauuaagacucucaaguuugaugcccugucaggcucccaggaagucgaguucauuggguauggaaaagcuacacuggaaugccaggugcaaacugcgguggacuuugguaacaguuacaucgcugagauggaaacagagagcuggauaguggacagacagugggcccaggacuugacccugccauggcagaguggaaguggcgggguguggagagagaugcaucaucuugucgaauuugaaccuccgcaugccgccacuaucagaguacuggcccugggaaaccaggaaggcuccuugaaaacagcucuuacuggcgcaaugaggguuacaaaggacacaaaugacaacaaccuuuacaaacuacaugguggacauguuucuugcagagugaaauugucagcuuugacacucaaggggacauccuacaaaauaugcacugacaaaauguuuuuugucaagaacccaacugacacuggccauggcacuguugugaugcaggugaaagugucaaaaggagcccccugcaggauuccagugauaguagcugaugaucuuacagcggcaaucaauaaaggcauuuugguuacaguuaaccccaucgccucaaccaaugaugaugaagugcugauugaggugaacccaccuuuuggagacagcuacauuaucguugggagaggagauucacgucucacuuaccaguggcacaaagagggaagcucaauaggaaaguuguucacucagaccaugaaaggcguggaacgccuggccgucaugggagacaccgccugggauuucagcuccgcuggaggguucuucacuucgguugggaaaggaauccauacgguguuuggcucugccuuucaggggcuauuuggcggcuugaacuggauaacaaaggucaucaugggggcgguacuuauauggguuggcaucaacacaagaaacaugacaauguccaugagcaugaucuugguaggagugaucaugauguuuuugucucuaggaguuggggcggaucaaggaugcgccaucaacuuuggcaaguaaggacuagugcaucacauuuaaaagcaucucagccuaccaugagaauaagagaaagaaaaugaagaucaauagcuuauucaucucuuuuucuuuuucguugguguaaagccaacacccugucuaaaaaacauaaauuucuuuaaucauuuugccucuuuucucugugcuucaauuaauaaaaaauggaaagaaccuagaucuaaaaaaaaaaaaaaaaaaaaaaaaaaaaaaaaaaaaaaaaaaaaaaaaaaaaaaaaaaaaaaaaugcaucccccccccccccccccccccccccccccccaaaggcucuuuucagagccaccagaauu

SEQ ID NO: 1071 - RNA, 2410 nt, Artificial Sequence
  mRNA product Design i-2 comprising derived and/or modified sequence from YFV__NC_002031.1__SSIgE-prME (polyprotein: aa122-778) (wt)
ggggcgcugccuacggagguggcagccaucuccuucucggcaucaagcuuaccauggacuggaccuggauccuguuccucguggccgccgcgacccgcguccacagcgugaccuuggugcggaaaaacagaugguugcuccuaaaugugacaucugaggaccucgggaaaacauucucugugggcacaggcaacugcacaacaaacauuuuggaagccaaguacuggugcccagacucaauggaauacaacugucccaaucucaguccaagagaggagccagaugacauugauugcuggugcuaugggguggaaaacguuagagucgcauaugguaagugugacucagcaggcaggucuaggaggucaagaagggccauugacuugccuacgcaugaaaaccaugguuugaagacccggcaagaaaaauggaugacuggaagaaugggugaaaggcaacuccaaaagauugagagaugguucgugaggaaccccuuuuuugcagugacggcucugaccauugccuaccuugugggaagcaacaugacgcaacgagucgugauugcccuacuggucuuggcuguugguccggccuacucagcucacugcauuggaauuacugacagggauuucauugagggggugcauggaggaacuuggguuucagcuacccuggagcaagacaagugugucacuguuauggccccugacaagccuucauuggacaucucacuagagacaguagccauugauagaccugcugaggugaggaaaguguguuacaaugcaguucucacucaugugaagauuaaugacaagugccccagcacuggagaggcccaccuagcugaagagaacgaaggggacaaugcgugcaagcgcacuuauucugauagaggcuggggcaauggcuguggccuauuugggaaagggagcauuguggcaugcgccaaauucacuugugccaaauccaugaguuuguuugagguugaucagaccaaaauucaguaugucaucagagcacaauugcauguaggggccaagcaggaaaauuggaauaccgacauuaagacucucaaguuugaugcccugucaggcucccaggaagucgaguucauuggguauggaaaagcuacacuggaaugccaggugcaaacugcgguggacuuugguaacaguuacaucgcugagauggaaacagagagcuggauaguggacagacagugggcccaggacuugacccugccauggcagaguggaaguggcgggguguggagagagaugcaucaucuugucgaauuugaaccuccgcaugccgccacuaucagaguacuggcccugggaaaccaggaaggcuccuugaaaacagcucuuacuggcgcaaugaggguuacaaaggacacaaaugacaacaaccuuuacaaacuacaugguggacauguuucuugcagagugaaauugucagcuuugacacucaaggggacauccuacaaaauaugcacugacaaaauguuuuuugucaagaacccaacugacacuggccauggcacuguugugaugcaggugaaagugucaaaaggagcccccugcaggauuccagugauaguagcugaugaucuuacagcggcaaucaauaaaggcauuuugguuacaguuaaccccaucgccucaaccaaugaugaugaagugcugauugaggugaacccaccuuuuggagacagcuacauuaucguugggagaggagauucacgucucacuuaccaguggcacaaagagggaagcucaauaggaaaguuguucacucagaccaugaaaggcguggaacgccuggccgucaugggagacaccgccugggauuucagcuccgcuggaggguucuucacuucgguugggaaaggaauucauacgguguuuggcucugccuuucaggggcuauuuggcggcuugaacuggauaacaaaggucaucaugggggcgguacuuauauggguuggcaucaacacaagaaacaugacaauguccaugagcaugaucuugguaggagugaucaugauguuuuugucucuaggaguuggggcguaaggacuagugcaucacauuuaaaagcaucucagccuaccaugagaauaagagaaagaaaaugaagaucaauagcuuauucaucucuuuuucuuuuucguugguguaaagccaacacccugucuaaaaaacauaaauuucuuuaaucauuuugccucuuuucucugugcuucaauuaauaaaaaauggaaagaaccuagaucuaaaaaaaaaaaaaaaaaaaaaaaaaaaaaaaaaaaaaaaaaaaaaaaaaaaaaaaaaaaaaaaaugcaucccccccccccccccccccccccccccccccaaaggcucuuuucagagccaccagaauu

SEQ ID NO: 1072 - RNA, 2458 nt, Artificial Sequence
  mRNA product Design i-2 comprising derived and/or modified sequence from YFV__NC_002031.1__SSjev-prME-XX (polyprotein: aa122-788) (wt)
ggggcgcugccuacggagguggcagccaucuccuucucggcaucaagcuuaccauggguaaacggagcgcuggcucaaucauguggcucgcgagcuuggcaguugucauagcuugugcaggagccgugaccuuggugcggaaaaacagaugguugcuccuaaaugugacaucugaggaccucgggaaaacauucucugugggcacaggcaacugcacaacaaacauuuuggaagccaaguacuggugcccagacucaauggaauacaacugucccaaucucaguccaagagaggagccagaugacauugauugcuggugcuaugggguggaaaacguuagagucgcauaugguaagugugacucagcaggcaggucuaggaggucaagaagggccauugacuugccuacgcaugaaaaccaugguuugaagacccggcaagaaaaauggaugacuggaagaaugggugaaaggcaacuccaaaagauugagagaugguucgugaggaaccccuuuuuugcagugacggcucugaccauugccuaccuugugggaagcaacaugacgcaacgagucgugauugcccuacuggucuuggcuguugguccggccuacucagcucacugcauuggaauuacugacagggauuucauugagggggugcauggaggaacuuggguuucagcuacccuggagcaagacaagugugucacuguuauggccccugacaagccuucauuggacaucucacuagagacaguagccauugauagaccugcugaggugaggaaaguguguuacaaugcaguucucacucaugugaagauuaaugacaagugccccagcacuggagaggcccaccuagcugaagagaacgaaggggacaaugcgugcaagcgcacuuauucugauagaggcuggggcaauggcuguggccuauuugggaaagggagcauuguggcaugcgccaaauucacuugugccaaauccaugaguuuguuugagguugaucagaccaaaauucaguaugucaucagagcacaauugcauguaggggccaagcaggaaaauuggaauaccgacauuaagacucucaaguuugaugcccugucaggcucccaggaagucgaguucauuggguauggaaaagcuacacuggaaugccaggugcaaacugcgguggacuuugguaacaguuacaucgcugagauggaaacagagagcuggauaguggacagacagugggcccaggacuugacccugccauggcagaguggaaguggcgggguguggagagagaugcaucaucuugucgaauuugaaccuccgcaugccgccacuaucagaguacuggcccugggaaaccaggaaggcuccuugaaaacagcucuuacuggcgcaaugaggguuacaaaggacacaaaugacaacaaccuuuacaaacuacaugguggacauguuucuugcagagugaaauugucagcuuugacacucaaggggacauccuacaaaauaugcacugacaaaauguuuuuugucaagaacccaacugacacuggccauggcacuguugugaugcaggugaaagugucaaaaggagcccccugcaggauuccagugauaguagcugaugaucuuacagcggcaaucaauaaaggcauuuugguuacaguuaaccccaucgccucaaccaaugaugaugaagugcugauugaggugaacccaccuuuuggagacagcuacauuaucguugggagaggagauucacgucucacuuaccaguggcacaaagagggaagcucaauaggaaaguuguucacucagaccaugaaaggcguggaacgccuggccgucaugggagacaccgccugggauuucagcuccgcuggaggguucuucacuucgguugggaaaggaauccauacgguguuuggcucugccuuucaggggcuauuuggcggcuugaacuggauaacaaaggucaucaugggggcgguacuuauauggguuggcaucaacacaagaaacaugacaauguccaugagcaugaucuugguaggagugaucaugauguuuuugucucuaggaguuggggcggaucaaggaugcgccaucaacuuuggcaaguaaggacuagugcaucacauuuaaaagcaucucagccuaccaugagaauaagagaaagaaaaugaagaucaauagcuuauucaucucuuuuucuuuuucguugguguaaagccaacacccugucuaaaaaacauaaauuucuuuaaucauuuugccucuuuucucugugcuucaauuaauaaaaaauggaaagaaccuagaucuaaaaaaaaaaaaaaaaaaaaaaaaaaaaaaaaaaaaaaaaaaaaaaaaaaaaaaaaaaaaaaaaugcaucccccccccccccccccccccccccccccccaaaggcucuuuucagagccaccagaauu

SEQ ID NO: 1073 - RNA, 2428 nt, Artificial Sequence
  mRNA product Design i-2 comprising derived and/or modified sequence from YFV__NC_002031.1__SSjev-prME (polyprotein: aa122-778) (wt)
ggggcgcugccuacggagguggcagccaucuccuucucggcaucaagcuuaccauggguaaacggagcgcuggcucaaucauguggcucgcgagcuuggcaguugucauagcuugugcaggagccgugaccuuggugcggaaaaacagaugguugcuccuaaaugugacaucugaggaccucgggaaaacauucucugugggcacaggcaacugcacaacaaacauuuuggaagccaaguacuggugcccagacucaauggaauacaacugucccaaucucaguccaagagaggagccagaugacauugauugcuggugcuaugggguggaaaacguuagagucgcauaugguaagugugacucagcaggcaggucuaggaggucaagaagggccauugacuugccuacgcaugaaaaccaugguuugaagacccggcaagaaaaauggaugacuggaagaaugggugaaaggcaacuccaaaagauugagagaugguucgugaggaaccccuuuuuugcagugacggcucugaccauugccuaccuugugggaagcaacaugacgcaacgagucgugauugcccuacuggucuuggcuguugguccggccuacucagcucacugcauuggaauuacugacagggauuucauugagggggugcauggaggaacuuggguuucagcuacccuggagcaagacaagugugucacuguuauggccccugacaagccuucauuggacaucucacuagagacaguagccauugauagaccugcugaggugaggaaaguguguuacaaugcaguucucacucaugugaagauuaaugacaagugccccagcacuggagaggcccaccuagcugaagagaacgaaggggacaaugcgugcaagcgcacuuauucugauagaggcuggggcaauggcuguggccuauuugggaaagggagcauuguggcaugcgccaaauucacuugugccaaauccaugaguuuguuugagguugaucagaccaaaauucaguaugucaucagagcacaauugcauguaggggccaagcaggaaaauuggaauaccgacauuaagacucucaaguuugaugcccugucaggcucccaggaagucgaguucauuggguauggaaaagcuacacuggaaugccaggugcaaacugcgguggacuuugguaacaguuacaucgcugagauggaaacagagagcuggauaguggacagacagugggcccaggacuugacccugccauggcagaguggaaguggcgggguguggagagagaugcaucaucuugucgaauuugaaccuccgcaugccgccacuaucagaguacuggcccugggaaaccaggaaggcuccuugaaaacagcucuuacuggcgcaaugaggguuacaaaggacacaaaugacaacaaccuuuacaaacuacaugguggacauguuucuugcagagugaaauugucagcuuugacacucaaggggacauccuacaaaauaugcacugacaaaauguuuuuugucaagaacccaacugacacuggccauggcacuguugugaugcaggugaaagugucaaaaggagcccccugcaggauuccagugauaguagcugaugaucuuacagcggcaaucaauaaaggcauuuugguuacaguuaaccccaucgccucaaccaaugaugaugaagugcugauugaggugaacccaccuuuuggagacagcuacauuaucguugggagaggagauucacgucucacuuaccaguggcacaaagagggaagcucaauaggaaaguuguucacucagaccaugaaaggcguggaacgccuggccgucaugggagacaccgccugggauuucagcuccgcuggaggguucuucacuucgguugggaaaggaauucauacgguguuuggcucugccuuucaggggcuauuuggcggcuugaacuggauaacaaaggucaucaugggggcgguacuuauauggguuggcaucaacacaagaaacaugacaauguccaugagcaugaucuugguaggagugaucaugauguuuuugucucuaggaguuggggcguaaggacuagugcaucacauuuaaaagcaucucagccuaccaugagaauaagagaaagaaaaugaagaucaauagcuuauucaucucuuuuucuuuuucguugguguaaagccaacacccugucuaaaaaacauaaauuucuuuaaucauuuugccucuuuucucugugcuucaauuaauaaaaaauggaaagaaccuagaucuaaaaaaaaaaaaaaaaaaaaaaaaaaaaaaaaaaaaaaaaaaaaaaaaaaaaaaaaaaaaaaaaugcaucccccccccccccccccccccccccccccccaaaggcucuuuucagagccaccagaauu

SEQ ID NO: 1074 - RNA, 2476 nt, Artificial Sequence
  mRNA product Design i-2 comprising derived and/or modified sequence from YFV__NC_002031.1__X-SS-prME-XX (polyprotein: aa92-788) (opt1) R2581/R2582/R3911
ggggcgcugccuacggagguggcagccaucuccuucucggcaucaagcuuaccaugcggggccugagcucccgcaagcggcgcagccacgacgugcucaccguccaguuccugauccuggggaugcuccugaugaccggcggggugacgcuggugcggaagaaccgcuggcuccugcugaacgucaccuccgaggaccucggcaagaccuucagcguggggaccggcaacugcacgaccaacauccuggaggccaaguacuggugccccgacuccauggaguacaacugcccgaaccugagcccccgggaggagcccgacgacaucgacugcuggugcuacggcguggagaacguccgcguggccuacgggaagugcgacuccgcgggccggagccgccggucccgccgggccaucgaccuccccacccacgagaaccacgggcugaagacccgccaggagaaguggaugacgggccggaugggggagcgccagcugcagaagaucgagcggugguucgugcgcaacccguucuucgccgucaccgcccucaccaucgccuaccuggugggcagcaacaugacccagcggguggucaucgcgcugcucgugcuggccgugggccccgccuacuccgcccacugcaucgggaucacggaccgcgacuucaucgagggcguccacgggggcaccugggugagcgcgacccuggagcaggacaagugcgugaccgucauggcccccgacaagcccucccucgacaucagccuggagacgguggccaucgaccggccggccgaggugcgcaaggucugcuacaacgccgugcugacccacgugaagaucaacgacaagugccccuccaccggcgaggcgcaccucgccgaggagaacgagggggacaacgccugcaagcggaccuacagcgaccggggcugggggaacggcugcgggcuguucggcaagggcuccaucgucgccugcgccaaguucacgugcgcgaagagcaugucccuguucgagguggaccagaccaagauccaguacgucauccgcgcccagcuccacgugggggccaagcaggagaacuggaacaccgacaucaagacccugaaguucgacgcccugagcggcagccaggagguggaguucaucggguacggcaaggccacgcucgagugccagguccagaccgcgguggacuucgggaacuccuacaucgccgagauggagaccgagagcuggaucguggaccggcagugggcccaggaccugacccugcccuggcaguccggcagcggcggggucuggcgcgagaugcaccaccucguggaguucgagcccccgcacgccgccacgauccgggugcuggcgcugggcaaccaggaggggucccucaagaccgcccugaccggcgccaugcgcgucaccaaggacacgaacgacaacaaccuguacaagcuccacgggggccacgugagcugccgggugaagcuguccgcccugacccucaagggcaccagcuacaagaucugcaccgacaagauguucuucgucaagaaccccacggacaccgggcacggcaccguggugaugcaggucaagguguccaagggggcgcccugccgcaucccggugaucgucgccgacgaccugaccgccgccaucaacaagggcauccuggugaccgugaacccgaucgccagcacgaacgacgacgagguccucaucgaggugaacccccccuucggcgacuccuacaucaucguggggcggggcgacagccgccugaccuaccaguggcacaaggagggguccagcaucggcaagcuguucacccagaccaugaagggggucgagcggcuggcggugaugggcgacacggccugggacuucuccagcgccggcggguucuucaccuccgugggcaaggggauccacaccgucuucggcagcgccuuccaggggcucuucggcggccugaacuggaucaccaaggugaucaugggggccgugcugaucugggucggcaucaacacgcgcaacaugaccauguccaugagcaugauccucgugggggugaucaugauguuccugagccugggcgucggggcggaccagggcugcgccaucaacuucggcaagugaggacuagugcaucacauuuaaaagcaucucagccuaccaugagaauaagagaaagaaaaugaagaucaauagcuuauucaucucuuuuucuuuuucguugguguaaagccaacacccugucuaaaaaacauaaauuucuuuaaucauuuugccucuuuucucugugcuucaauuaauaaaaaauggaaagaaccuagaucuaaaaaaaaaaaaaaaaaaaaaaaaaaaaaaaaaaaaaaaaaaaaaaaaaaaaaaaaaaaaaaaaugcaucccccccccccccccccccccccccccccccaaaggcucuuuucagagccaccagaauu

SEQ ID NO: 1075 - RNA, 2413 nt, Artificial Sequence
  mRNA product Design i-2 comprising derived and/or modified sequence from YFV__NC_002031.1__SS-prME (polyprotein: M,aa104-778) (opt1) R2607/R2608
ggggcgcugccuacggagguggcagccaucuccuucucggcaucaagcuuaccauggacgugcugaccguccaguuccucauccugggcaugcugcucaugaccgggggcgugacccugguccggaagaaccgcuggcuccugcugaacgugaccagcgaggaccucggcaagacguucuccguggggaccggcaacugcaccaccaacauccuggaggccaaguacuggugccccgacagcauggaguacaacugccccaaccuguccccgcgggaggagcccgacgacaucgacugcuggugcuacggggucgagaacgugcgcguggccuacggcaagugcgacagcgcggggcggucccgccggagccgccgggccaucgaccugcccacccacgagaaccacggccucaagacccggcaggagaaguggaugacggggcgcaugggcgagcggcagcugcagaagaucgagcgcugguucgugcggaacccguucuucgccgucaccgcgcugaccaucgccuaccucguggggagcaacaugacccagcgcguggucaucgcccugcuggugcucgccgugggccccgccuacuccgcgcacugcaucgggaucacggaccgggacuucaucgagggcguccacggcgggaccugggugagcgccacccuggagcaggacaagugcgugaccgucauggcccccgacaagcccucccuggacaucagccucgagacgguggccaucgaccgcccggcggaggugcggaaggucugcuacaacgccgugcugacccacgugaagaucaacgacaagugccccuccaccggcgaggcccaccuggccgaggagaacgagggggacaacgccugcaagcgcaccuacagcgaccggggcugggggaacggcugcggccucuucgggaagggcuccaucgucgcgugcgccaaguucacgugcgccaagagcaugucccuguucgagguggaccagaccaagauccaguacgugauccgcgcccagcugcacgucggggccaagcaggagaacuggaacaccgacaucaagacccucaaguucgacgcgcugagcggcucccaggagguggaguucaucggcuacgggaaggccacgcuggagugccaggugcagaccgccgucgacuucggcaacagcuacaucgccgagauggagaccgaguccuggaucguggaccggcagugggcccaggaccucacccugcccuggcagagcggguccggcgggguguggcgcgagaugcaccaccuggucgaguucgagcccccgcacgcggccacgauccgggugcucgcccugggcaaccaggagggcagccugaagaccgcccucaccggggccaugcgcgucaccaaggacacgaacgacaacaaccuguacaagcugcacggcgggcacguguccugccgggugaagcucagcgcgcugacccugaagggcaccuccuacaagaucugcaccgacaagauguucuucgucaagaaccccacggacaccgggcacggcaccguggugaugcaggucaaggugagcaagggcgcccccugccgcaucccggugaucgucgccgacgaccucaccgccgcgaucaacaaggggauccuggugacggugaaccccaucgccagcaccaacgacgacgagguccugaucgaggugaacccgcccuucggcgacuccuacaucaucguggggcggggcgacagccgccucaccuaccaguggcacaaggagggguccagcaucggcaagcuguucacccagacgaugaagggcgucgagcggcuggccgugaugggggacaccgccugggacuucuccagcgccggcggguucuucaccuccgugggcaagggcauccacaccgucuucgggagcgcguuccagggccucuucgggggccugaacuggaucaccaaggugaucaugggggccgugcugaucugggucggcaucaacacgcgcaacaugaccauguccaugagcaugauccucgugggcgugaucaugauguuccugucccugggggucggcgccugaggacuagugcaucacauuuaaaagcaucucagccuaccaugagaauaagagaaagaaaaugaagaucaauagcuuauucaucucuuuuucuuuuucguugguguaaagccaacacccugucuaaaaaacauaaauuucuuuaaucauuuugccucuuuucucugugcuucaauuaauaaaaaauggaaagaaccuagaucuaaaaaaaaaaaaaaaaaaaaaaaaaaaaaaaaaaaaaaaaaaaaaaaaaaaaaaaaaaaaaaaaugcaucccccccccccccccccccccccccccccccaaaggcucuuuucagagccaccagaauu

SEQ ID NO: 1076 - RNA, 2440 nt, Artificial Sequence
  mRNA product Design i-2 comprising derived and/or modified sequence from YFV__NC_002031.1__SSIgE-prME-XX (polyprotein: aa122-788) (opt1)
ggggcgcugccuacggagguggcagccaucuccuucucggcaucaagcuuaccauggacuggaccuggauccuguuccucguggccgccgcgacccgcguccacagcgugacgcuggugcggaagaaccgcuggcuccugcugaacgucaccuccgaggaccucggcaagaccuucagcguggggaccggcaacugcacgaccaacauccuggaggccaaguacuggugccccgacuccauggaguacaacugcccgaaccugagcccccgggaggagcccgacgacaucgacugcuggugcuacggcguggagaacguccgcguggccuacgggaagugcgacuccgcgggccggagccgccggucccgccgggccaucgaccuccccacccacgagaaccacgggcugaagacccgccaggagaaguggaugacgggccggaugggggagcgccagcugcagaagaucgagcggugguucgugcgcaacccguucuucgccgucaccgcccucaccaucgccuaccuggugggcagcaacaugacccagcggguggucaucgcgcugcucgugcuggccgugggccccgccuacuccgcccacugcaucgggaucacggaccgcgacuucaucgagggcguccacgggggcaccugggugagcgcgacccuggagcaggacaagugcgugaccgucauggcccccgacaagcccucccucgacaucagccuggagacgguggccaucgaccggccggccgaggugcgcaaggucugcuacaacgccgugcugacccacgugaagaucaacgacaagugccccuccaccggcgaggcgcaccucgccgaggagaacgagggggacaacgccugcaagcggaccuacagcgaccggggcugggggaacggcugcgggcuguucggcaagggcuccaucgucgccugcgccaaguucacgugcgcgaagagcaugucccuguucgagguggaccagaccaagauccaguacgucauccgcgcccagcuccacgugggggccaagcaggagaacuggaacaccgacaucaagacccugaaguucgacgcccugagcggcagccaggagguggaguucaucggguacggcaaggccacgcucgagugccagguccagaccgcgguggacuucgggaacuccuacaucgccgagauggagaccgagagcuggaucguggaccggcagugggcccaggaccugacccugcccuggcaguccggcagcggcggggucuggcgcgagaugcaccaccucguggaguucgagcccccgcacgccgccacgauccgggugcuggcgcugggcaaccaggaggggucccucaagaccgcccugaccggcgccaugcgcgucaccaaggacacgaacgacaacaaccuguacaagcuccacgggggccacgugagcugccgggugaagcuguccgcccugacccucaagggcaccagcuacaagaucugcaccgacaagauguucuucgucaagaaccccacggacaccgggcacggcaccguggugaugcaggucaagguguccaagggggcgcccugccgcaucccggugaucgucgccgacgaccugaccgccgccaucaacaagggcauccuggugaccgugaacccgaucgccagcacgaacgacgacgagguccucaucgaggugaacccccccuucggcgacuccuacaucaucguggggcggggcgacagccgccugaccuaccaguggcacaaggagggguccagcaucggcaagcuguucacccagaccaugaagggggucgagcggcuggcggugaugggcgacacggccugggacuucuccagcgccggcggguucuucaccuccgugggcaaggggauccacaccgucuucggcagcgccuuccaggggcucuucggcggccugaacuggaucaccaaggugaucaugggggccgugcugaucugggucggcaucaacacgcgcaacaugaccauguccaugagcaugauccucgugggggugaucaugauguuccugagccugggcgucggggcggaccagggcugcgccaucaacuucggcaagugaggacuagugcaucacauuuaaaagcaucucagccuaccaugagaauaagagaaagaaaaugaagaucaauagcuuauucaucucuuuuucuuuuucguugguguaaagccaacacccugucuaaaaaacauaaauuucuuuaaucauuuugccucuuuucucugugcuucaauuaauaaaaaauggaaagaaccuagaucuaaaaaaaaaaaaaaaaaaaaaaaaaaaaaaaaaaaaaaaaaaaaaaaaaaaaaaaaaaaaaaaaugcaucccccccccccccccccccccccccccccccaaaggcucuuuucagagccaccagaauu

SEQ ID NO: 1077 - RNA, 2410 nt, Artificial Sequence
  mRNA product Design i-2 comprising derived and/or modified sequence from YFV__NC_002031.1__SSIgE-prME (polyprotein: aa122-778) (opt1)
ggggcgcugccuacggagguggcagccaucuccuucucggcaucaagcuuaccauggacuggaccuggauccuguuccucguggccgccgcgacccgcguccacagcgugacccugguccgcaagaaccgguggcuccugcugaacgugaccagcgaggaccucggcaagacguucuccguggggaccggcaacugcaccaccaacauccuggaggccaaguacuggugccccgacagcauggaguacaacugcccgaaccuguccccgcgcgaggagcccgacgacaucgacugcuggugcuacggggucgagaacgugcggguggccuacggcaagugcgacagcgcggggcgcucccggcgcagccggcgcgccaucgaccuccccacgcacgagaaccacggccugaagacccggcaggagaaguggaugaccggccgcaugggggagcggcagcugcagaagaucgagcgcugguucguccggaaccccuucuucgccgugaccgcccucacgaucgccuaccuggugggcuccaacaugacccagcgcgucgugaucgcgcugcucgugcuggccgucgggcccgccuacagcgcccacugcaucggcaucaccgaccgggacuucaucgagggggugcacggcggcaccuggguguccgcgacgcuggagcaggacaagugcgucaccgugauggcccccgacaagcccagccucgacaucucccuggagaccguggccaucgaccgcccggccgagguccggaaggugugcuacaacgccgugcugacccacgucaagaucaacgacaagugccccagcacgggggaggcgcaccucgccgaggagaacgagggcgacaacgccugcaagcgcaccuacuccgaccggggguggggcaacggcugcgggcuguucggcaaggggagcaucguggccugcgccaaguucaccugcgcgaaguccaugagccuguucgagguggaccagaccaagauccaguacgucauccgcgcccagcuccacgugggcgccaagcaggagaacuggaacacggacaucaagacccugaaguucgacgcccuguccgggagccaggaggucgaguucaucggcuacggcaaggccacccucgagugccaggugcagaccgcgguggacuucgggaacuccuacaucgccgagauggagacggagagcuggaucgucgaccggcagugggcccaggaccugacccugcccuggcagagcggcuccgggggcguguggcgcgagaugcaccaccucguggaguucgagcccccgcacgccgccaccauccgcguccuggcgcuggggaaccaggagggcagccucaagaccgcccugacgggcgccaugcgggugaccaaggacaccaacgacaacaaccuguacaagcuccacgggggccacguguccugccgcgucaagcugagcgcccugacccucaaggggacguccuacaagaucugcaccgacaagauguucuucgugaagaaccccaccgacaccggccacgggacgguggucaugcaggugaaggugagcaagggcgcgcccugccggauccccgucaucguggccgacgaccugaccgccgccaucaacaagggcauccuggugaccgucaacccgaucgccuccaccaacgacgacgaggugcucaucgaggugaacccgcccuucggggacagcuacaucaucgucggccgcggggacucccggcugaccuaccaguggcacaaggagggcagcuccaucggcaagcuguucacgcagaccaugaaggggguggagcgccucgcggugaugggcgacaccgccugggacuucagcuccgccgggggcuucuucaccagcgucgggaagggcauccacacgguguucggcuccgccuuccaggggcuguucggcgggcugaacuggaucaccaaggugaucaugggcgccguccucaucuggguggggaucaacacccggaacaugaccaugagcauguccaugauccuggugggcgucaucaugauguuccugagccugggcgugggggcgugaggacuagugcaucacauuuaaaagcaucucagccuaccaugagaauaagagaaagaaaaugaagaucaauagcuuauucaucucuuuuucuuuuucguugguguaaagccaacacccugucuaaaaaacauaaauuucuuuaaucauuuugccucuuuucucugugcuucaauuaauaaaaaauggaaagaaccuagaucuaaaaaaaaaaaaaaaaaaaaaaaaaaaaaaaaaaaaaaaaaaaaaaaaaaaaaaaaaaaaaaaaugcaucccccccccccccccccccccccccccccccaaaggcucuuuucagagccaccagaauu

SEQ ID NO: 1078 - RNA, 2458 nt, Artificial Sequence
  mRNA product Design i-2 comprising derived and/or modified sequence from YFV__NC_002031.1__SSjev-prME-XX (polyprotein: aa122-788) (opt1)
ggggcgcugccuacggagguggcagccaucuccuucucggcaucaagcuuaccaugggcaagcgcagcgccggguccaucauguggcuggccagccucgcgguggucaucgccugcgccggcgccgugacgcuggugcggaagaaccgcuggcuccugcugaacgucaccuccgaggaccucggcaagaccuucagcguggggaccggcaacugcacgaccaacauccuggaggccaaguacuggugccccgacuccauggaguacaacugcccgaaccugagcccccgggaggagcccgacgacaucgacugcuggugcuacggcguggagaacguccgcguggccuacgggaagugcgacuccgcgggccggagccgccggucccgccgggccaucgaccuccccacccacgagaaccacgggcugaagacccgccaggagaaguggaugacgggccggaugggggagcgccagcugcagaagaucgagcggugguucgugcgcaacccguucuucgccgucaccgcccucaccaucgccuaccuggugggcagcaacaugacccagcggguggucaucgcgcugcucgugcuggccgugggccccgccuacuccgcccacugcaucgggaucacggaccgcgacuucaucgagggcguccacgggggcaccugggugagcgcgacccuggagcaggacaagugcgugaccgucauggcccccgacaagcccucccucgacaucagccuggagacgguggccaucgaccggccggccgaggugcgcaaggucugcuacaacgccgugcugacccacgugaagaucaacgacaagugccccuccaccggcgaggcgcaccucgccgaggagaacgagggggacaacgccugcaagcggaccuacagcgaccggggcugggggaacggcugcgggcuguucggcaagggcuccaucgucgccugcgccaaguucacgugcgcgaagagcaugucccuguucgagguggaccagaccaagauccaguacgucauccgcgcccagcuccacgugggggccaagcaggagaacuggaacaccgacaucaagacccugaaguucgacgcccugagcggcagccaggagguggaguucaucggguacggcaaggccacgcucgagugccagguccagaccgcgguggacuucgggaacuccuacaucgccgagauggagaccgagagcuggaucguggaccggcagugggcccaggaccugacccugcccuggcaguccggcagcggcggggucuggcgcgagaugcaccaccucguggaguucgagcccccgcacgccgccacgauccgggugcuggcgcugggcaaccaggaggggucccucaagaccgcccugaccggcgccaugcgcgucaccaaggacacgaacgacaacaaccuguacaagcuccacgggggccacgugagcugccgggugaagcuguccgcccugacccucaagggcaccagcuacaagaucugcaccgacaagauguucuucgucaagaaccccacggacaccgggcacggcaccguggugaugcaggucaagguguccaagggggcgcccugccgcaucccggugaucgucgccgacgaccugaccgccgccaucaacaagggcauccuggugaccgugaacccgaucgccagcacgaacgacgacgagguccucaucgaggugaacccccccuucggcgacuccuacaucaucguggggcggggcgacagccgccugaccuaccaguggcacaaggagggguccagcaucggcaagcuguucacccagaccaugaagggggucgagcggcuggcggugaugggcgacacggccugggacuucuccagcgccggcggguucuucaccuccgugggcaaggggauccacaccgucuucggcagcgccuuccaggggcucuucggcggccugaacuggaucaccaaggugaucaugggggccgugcugaucugggucggcaucaacacgcgcaacaugaccauguccaugagcaugauccucgugggggugaucaugauguuccugagccugggcgucggggcggaccagggcugcgccaucaacuucggcaagugaggacuagugcaucacauuuaaaagcaucucagccuaccaugagaauaagagaaagaaaaugaagaucaauagcuuauucaucucuuuuucuuuuucguugguguaaagccaacacccugucuaaaaaacauaaauuucuuuaaucauuuugccucuuuucucugugcuucaauuaauaaaaaauggaaagaaccuagaucuaaaaaaaaaaaaaaaaaaaaaaaaaaaaaaaaaaaaaaaaaaaaaaaaaaaaaaaaaaaaaaaaugcaucccccccccccccccccccccccccccccccaaaggcucuuuucagagccaccagaauu

SEQ ID NO: 1079 - RNA, 2428 nt, Artificial Sequence
  mRNA product Design i-2 comprising derived and/or modified sequence from YFV__NC_002031.1__SSjev-prME (polyprotein: aa122-778) (opt1)
ggggcgcugccuacggagguggcagccaucuccuucucggcaucaagcuuaccaugggcaagcgcagcgccggguccaucauguggcuggccagccucgcgguggucaucgccugcgccggcgccgugacccugguccgcaagaaccgguggcuccugcugaacgugaccagcgaggaccucggcaagacguucuccguggggaccggcaacugcaccaccaacauccuggaggccaaguacuggugccccgacagcauggaguacaacugcccgaaccuguccccgcgcgaggagcccgacgacaucgacugcuggugcuacggggucgagaacgugcggguggccuacggcaagugcgacagcgcggggcgcucccggcgcagccggcgcgccaucgaccuccccacgcacgagaaccacggccugaagacccggcaggagaaguggaugaccggccgcaugggggagcggcagcugcagaagaucgagcgcugguucguccggaaccccuucuucgccgugaccgcccucacgaucgccuaccuggugggcuccaacaugacccagcgcgucgugaucgcgcugcucgugcuggccgucgggcccgccuacagcgcccacugcaucggcaucaccgaccgggacuucaucgagggggugcacggcggcaccuggguguccgcgacgcuggagcaggacaagugcgucaccgugauggcccccgacaagcccagccucgacaucucccuggagaccguggccaucgaccgcccggccgagguccggaaggugugcuacaacgccgugcugacccacgucaagaucaacgacaagugccccagcacgggggaggcgcaccucgccgaggagaacgagggcgacaacgccugcaagcgcaccuacuccgaccggggguggggcaacggcugcgggcuguucggcaaggggagcaucguggccugcgccaaguucaccugcgcgaaguccaugagccuguucgagguggaccagaccaagauccaguacgucauccgcgcccagcuccacgugggcgccaagcaggagaacuggaacacggacaucaagacccugaaguucgacgcccuguccgggagccaggaggucgaguucaucggcuacggcaaggccacccucgagugccaggugcagaccgcgguggacuucgggaacuccuacaucgccgagauggagacggagagcuggaucgucgaccggcagugggcccaggaccugacccugcccuggcagagcggcuccgggggcguguggcgcgagaugcaccaccucguggaguucgagcccccgcacgccgccaccauccgcguccuggcgcuggggaaccaggagggcagccucaagaccgcccugacgggcgccaugcgggugaccaaggacaccaacgacaacaaccuguacaagcuccacgggggccacguguccugccgcgucaagcugagcgcccugacccucaaggggacguccuacaagaucugcaccgacaagauguucuucgugaagaaccccaccgacaccggccacgggacgguggucaugcaggugaaggugagcaagggcgcgcccugccggauccccgucaucguggccgacgaccugaccgccgccaucaacaagggcauccuggugaccgucaacccgaucgccuccaccaacgacgacgaggugcucaucgaggugaacccgcccuucggggacagcuacaucaucgucggccgcggggacucccggcugaccuaccaguggcacaaggagggcagcuccaucggcaagcuguucacgcagaccaugaaggggguggagcgccucgcggugaugggcgacaccgccugggacuucagcuccgccgggggcuucuucaccagcgucgggaagggcauccacacgguguucggcuccgccuuccaggggcuguucggcgggcugaacuggaucaccaaggugaucaugggcgccguccucaucuggguggggaucaacacccggaacaugaccaugagcauguccaugauccuggugggcgucaucaugauguuccugagccugggcgugggggcgugaggacuagugcaucacauuuaaaagcaucucagccuaccaugagaauaagagaaagaaaaugaagaucaauagcuuauucaucucuuuuucuuuuucguugguguaaagccaacacccugucuaaaaaacauaaauuucuuuaaucauuuugccucuuuucucugugcuucaauuaauaaaaaauggaaagaaccuagaucuaaaaaaaaaaaaaaaaaaaaaaaaaaaaaaaaaaaaaaaaaaaaaaaaaaaaaaaaaaaaaaaaugcaucccccccccccccccccccccccccccccccaaaggcucuuuucagagccaccagaauu

SEQ ID NO: 1080 - RNA, 2476 nt, Artificial Sequence
  mRNA product Design i-2 comprising derived and/or modified sequence from YFV__NC_002031.1__X-SS-prME-XX (polyprotein: aa92-788) (opt1)
ggggcgcugccuacggagguggcagccaucuccuucucggcaucaagcuuaccaugcggggccugagcucccgcaagcggcgcagccacgacgugcucaccguccaguuccugauccuggggaugcuccugaugaccggcggggugacgcuggugcggaagaaccgcuggcuccugcugaacgucaccuccgaggaccucggcaagaccuucagcguggggaccggcaacugcacgaccaacauccuggaggccaaguacuggugccccgacuccauggaguacaacugcccgaaccugagcccccgggaggagcccgacgacaucgacugcuggugcuacggcguggagaacguccgcguggccuacgggaagugcgacuccgcgggccggagccgccggucccgccgggccaucgaccuccccacccacgagaaccacgggcugaagacccgccaggagaaguggaugacgggccggaugggggagcgccagcugcagaagaucgagcggugguucgugcgcaacccguucuucgccgucaccgcccucaccaucgccuaccuggugggcagcaacaugacccagcggguggucaucgcgcugcucgugcuggccgugggccccgccuacuccgcccacugcaucgggaucacggaccgcgacuucaucgagggcguccacgggggcaccugggugagcgcgacccuggagcaggacaagugcgugaccgucauggcccccgacaagcccucccucgacaucagccuggagacgguggccaucgaccggccggccgaggugcgcaaggucugcuacaacgccgugcugacccacgugaagaucaacgacaagugccccuccaccggcgaggcgcaccucgccgaggagaacgagggggacaacgccugcaagcggaccuacagcgaccggggcugggggaacggcugcgggcuguucggcaagggcuccaucgucgccugcgccaaguucacgugcgcgaaguccaugagccuguucgagguggaccagaccaagauccaguacgucauccgcgcccagcuccacgugggggccaagcaggagaacuggaacaccgacaucaagacccugaaguucgacgcccugagcggcagccaggagguggaguucaucggguacggcaaggccacgcucgagugccagguccagaccgcgguggacuucgggaacuccuacaucgccgagauggagaccgagagcuggaucguggaccggcagugggcccaggaccugacccugcccuggcaguccggcagcggcggggucuggcgcgagaugcaccaccucguggaguucgagcccccgcacgccgccacgauccgggugcuggcgcugggcaaccaggaggggucccucaagaccgcccugaccggcgccaugcgcgucaccaaggacacgaacgacaacaaccuguacaagcuccacgggggccacgugagcugccgggugaagcuguccgcccugacccucaagggcaccagcuacaagaucugcaccgacaagauguucuucgucaagaaccccacggacaccgggcacggcaccguggugaugcaggucaagguguccaagggggcgcccugccgcaucccggugaucgucgccgacgaccugaccgccgccaucaacaagggcauccuggugaccgugaacccgaucgccagcacgaacgacgacgagguccucaucgaggugaacccccccuucggcgacuccuacaucaucguggggcggggcgacagccgccugaccuaccaguggcacaaggagggguccagcaucggcaagcuguucacccagaccaugaagggggucgagcggcuggcggugaugggcgacacggccugggacuucuccagcgccggcggguucuucaccuccgugggcaaggggauccacaccgucuucggcagcgccuuccaggggcuguucggcggccucaacuggaucaccaaggugaucaugggggccgugcugaucugggucggcaucaacacgcgcaacaugaccauguccaugagcaugauccucgugggggugaucaugauguuccugagccugggcgucggggcggaccagggcugcgccaucaacuucggcaagugaggacuagugcaucacauuuaaaagcaucucagccuaccaugagaauaagagaaagaaaaugaagaucaauagcuuauucaucucuuuuucuuuuucguugguguaaagccaacacccugucuaaaaaacauaaauuucuuuaaucauuuugccucuuuucucugugcuucaauuaauaaaaaauggaaagaaccuagaucuaaaaaaaaaaaaaaaaaaaaaaaaaaaaaaaaaaaaaaaaaaaaaaaaaaaaaaaaaaaaaaaaugcaucccccccccccccccccccccccccccccccaaaggcucuuuucagagccaccagaauu

SEQ ID NO: 1081 - RNA, 2413 nt, Artificial Sequence
  mRNA product Design i-2 comprising derived and/or modified sequence from YFV__NC_002031.1__SS-prME (polyprotein: M,aa104-778) (opt1)
ggggcgcugccuacggagguggcagccaucuccuucucggcaucaagcuuaccauggacgugcucaccguccaguuccugauccuggggaugcuccugaugaccggcggggugacgcuggugcggaagaaccgcuggcuccugcugaacgucaccuccgaggaccucggcaagaccuucagcguggggaccggcaacugcacgaccaacauccuggaggccaaguacuggugccccgacuccauggaguacaacugcccgaaccugagcccccgggaggagcccgacgacaucgacugcuggugcuacggcguggagaacguccgcguggccuacgggaagugcgacuccgcgggccggagccgccggucccgccgggccaucgaccuccccacccacgagaaccacgggcugaagacccgccaggagaaguggaugacgggccggaugggggagcgccagcugcagaagaucgagcggugguucgugcgcaacccguucuucgccgucaccgcccucaccaucgccuaccuggugggcagcaacaugacccagcggguggucaucgcgcugcucgugcuggccgugggccccgccuacuccgcccacugcaucgggaucacggaccgcgacuucaucgagggcguccacgggggcaccugggugagcgcgacccuggagcaggacaagugcgugaccgucauggcccccgacaagcccucccucgacaucagccuggagacgguggccaucgaccggccggccgaggugcgcaaggucugcuacaacgccgugcugacccacgugaagaucaacgacaagugccccuccaccggcgaggcgcaccucgccgaggagaacgagggggacaacgccugcaagcggaccuacagcgaccggggcugggggaacggcugcgggcuguucggcaagggcuccaucgucgccugcgccaaguucacgugcgcgaaguccaugagccuguucgagguggaccagaccaagauccaguacgucauccgcgcccagcuccacgugggggccaagcaggagaacuggaacaccgacaucaagacccugaaguucgacgcccugagcggcagccaggagguggaguucaucggguacggcaaggccacgcucgagugccagguccagaccgcgguggacuucgggaacuccuacaucgccgagauggagaccgagagcuggaucguggaccggcagugggcccaggaccugacccugcccuggcaguccggcagcggcggggucuggcgcgagaugcaccaccucguggaguucgagcccccgcacgccgccacgauccgggugcuggcgcugggcaaccaggaggggucccucaagaccgcccugaccggcgccaugcgcgucaccaaggacacgaacgacaacaaccuguacaagcuccacgggggccacgugagcugccgggugaagcuguccgcccugacccucaagggcaccagcuacaagaucugcaccgacaagauguucuucgucaagaaccccacggacaccgggcacggcaccguggugaugcaggucaagguguccaagggggcgcccugccgcaucccggugaucgucgccgacgaccugaccgccgccaucaacaagggcauccuggugaccgugaacccgaucgccagcacgaacgacgacgagguccucaucgaggugaacccccccuucggcgacuccuacaucaucguggggcggggcgacagccgccugaccuaccaguggcacaaggagggguccagcaucggcaagcuguucacccagaccaugaagggggucgagcggcuggcggugaugggcgacacggccugggacuucuccagcgccggcggguucuucaccuccgugggcaaggggauccacaccgucuucggcagcgccuuccaggggcuguucggcggccucaacuggaucaccaaggugaucaugggggccgugcugaucugggucggcaucaacacgcgcaacaugaccauguccaugagcaugauccucgugggggugaucaugauguuccugagccugggcgucggggcgugaggacuagugcaucacauuuaaaagcaucucagccuaccaugagaauaagagaaagaaaaugaagaucaauagcuuauucaucucuuuuucuuuuucguugguguaaagccaacacccugucuaaaaaacauaaauuucuuuaaucauuuugccucuuuucucugugcuucaauuaauaaaaaauggaaagaaccuagaucuaaaaaaaaaaaaaaaaaaaaaaaaaaaaaaaaaaaaaaaaaaaaaaaaaaaaaaaaaaaaaaaaugcaucccccccccccccccccccccccccccccccaaaggcucuuuucagagccaccagaauu

SEQ ID NO: 1082 - RNA, 2440 nt, Artificial Sequence
  mRNA product Design i-2 comprising derived and/or modified sequence from YFV__NC_002031.1__SSIgE-prME-XX (polyprotein: aa122-788) (opt1)
ggggcgcugccuacggagguggcagccaucuccuucucggcaucaagcuuaccauggacuggaccuggauccuguuccucguggccgccgcgacccgcguccacagcgugacgcuggugcggaagaaccgcuggcuccugcugaacgucaccuccgaggaccucggcaagaccuucagcguggggaccggcaacugcacgaccaacauccuggaggccaaguacuggugccccgacuccauggaguacaacugcccgaaccugagcccccgggaggagcccgacgacaucgacugcuggugcuacggcguggagaacguccgcguggccuacgggaagugcgacuccgcgggccggagccgccggucccgccgggccaucgaccuccccacccacgagaaccacgggcugaagacccgccaggagaaguggaugacgggccggaugggggagcgccagcugcagaagaucgagcggugguucgugcgcaacccguucuucgccgucaccgcccucaccaucgccuaccuggugggcagcaacaugacccagcggguggucaucgcgcugcucgugcuggccgugggccccgccuacuccgcccacugcaucgggaucacggaccgcgacuucaucgagggcguccacgggggcaccugggugagcgcgacccuggagcaggacaagugcgugaccgucauggcccccgacaagcccucccucgacaucagccuggagacgguggccaucgaccggccggccgaggugcgcaaggucugcuacaacgccgugcugacccacgugaagaucaacgacaagugccccuccaccggcgaggcgcaccucgccgaggagaacgagggggacaacgccugcaagcggaccuacagcgaccggggcugggggaacggcugcgggcuguucggcaagggcuccaucgucgccugcgccaaguucacgugcgcgaaguccaugagccuguucgagguggaccagaccaagauccaguacgucauccgcgcccagcuccacgugggggccaagcaggagaacuggaacaccgacaucaagacccugaaguucgacgcccugagcggcagccaggagguggaguucaucggguacggcaaggccacgcucgagugccagguccagaccgcgguggacuucgggaacuccuacaucgccgagauggagaccgagagcuggaucguggaccggcagugggcccaggaccugacccugcccuggcaguccggcagcggcggggucuggcgcgagaugcaccaccucguggaguucgagcccccgcacgccgccacgauccgggugcuggcgcugggcaaccaggaggggucccucaagaccgcccugaccggcgccaugcgcgucaccaaggacacgaacgacaacaaccuguacaagcuccacgggggccacgugagcugccgggugaagcuguccgcccugacccucaagggcaccagcuacaagaucugcaccgacaagauguucuucgucaagaaccccacggacaccgggcacggcaccguggugaugcaggucaagguguccaagggggcgcccugccgcaucccggugaucgucgccgacgaccugaccgccgccaucaacaagggcauccuggugaccgugaacccgaucgccagcacgaacgacgacgagguccucaucgaggugaacccccccuucggcgacuccuacaucaucguggggcggggcgacagccgccugaccuaccaguggcacaaggagggguccagcaucggcaagcuguucacccagaccaugaagggggucgagcggcuggcggugaugggcgacacggccugggacuucuccagcgccggcggguucuucaccuccgugggcaaggggauccacaccgucuucggcagcgccuuccaggggcuguucggcggccucaacuggaucaccaaggugaucaugggggccgugcugaucugggucggcaucaacacgcgcaacaugaccauguccaugagcaugauccucgugggggugaucaugauguuccugagccugggcgucggggcggaccagggcugcgccaucaacuucggcaagugaggacuagugcaucacauuuaaaagcaucucagccuaccaugagaauaagagaaagaaaaugaagaucaauagcuuauucaucucuuuuucuuuuucguugguguaaagccaacacccugucuaaaaaacauaaauuucuuuaaucauuuugccucuuuucucugugcuucaauuaauaaaaaauggaaagaaccuagaucuaaaaaaaaaaaaaaaaaaaaaaaaaaaaaaaaaaaaaaaaaaaaaaaaaaaaaaaaaaaaaaaaugcaucccccccccccccccccccccccccccccccaaaggcucuuuucagagccaccagaauu

SEQ ID NO: 1083 - RNA, 2410 nt, Artificial Sequence
  mRNA product Design i-2 comprising derived and/or modified sequence from YFV__NC_002031.1__SSIgE-prME (polyprotein: aa122-778) (opt1)
ggggcgcugccuacggagguggcagccaucuccuucucggcaucaagcuuaccauggacuggaccuggauccuguuccucguggccgccgcgacccgcguccacagcgugacgcuggugcggaagaaccgcuggcuccugcugaacgucaccuccgaggaccucggcaagaccuucagcguggggaccggcaacugcacgaccaacauccuggaggccaaguacuggugccccgacuccauggaguacaacugcccgaaccugagcccccgggaggagcccgacgacaucgacugcuggugcuacggcguggagaacguccgcguggccuacgggaagugcgacuccgcgggccggagccgccggucccgccgggccaucgaccuccccacccacgagaaccacgggcugaagacccgccaggagaaguggaugacgggccggaugggggagcgccagcugcagaagaucgagcggugguucgugcgcaacccguucuucgccgucaccgcccucaccaucgccuaccuggugggcagcaacaugacccagcggguggucaucgcgcugcucgugcuggccgugggccccgccuacuccgcccacugcaucgggaucacggaccgcgacuucaucgagggcguccacgggggcaccugggugagcgcgacccuggagcaggacaagugcgugaccgucauggcccccgacaagcccucccucgacaucagccuggagacgguggccaucgaccggccggccgaggugcgcaaggucugcuacaacgccgugcugacccacgugaagaucaacgacaagugccccuccaccggcgaggcgcaccucgccgaggagaacgagggggacaacgccugcaagcggaccuacagcgaccggggcugggggaacggcugcgggcuguucggcaagggcuccaucgucgccugcgccaaguucacgugcgcgaaguccaugagccuguucgagguggaccagaccaagauccaguacgucauccgcgcccagcuccacgugggggccaagcaggagaacuggaacaccgacaucaagacccugaaguucgacgcccugagcggcagccaggagguggaguucaucggguacggcaaggccacgcucgagugccagguccagaccgcgguggacuucgggaacuccuacaucgccgagauggagaccgagagcuggaucguggaccggcagugggcccaggaccugacccugcccuggcaguccggcagcggcggggucuggcgcgagaugcaccaccucguggaguucgagcccccgcacgccgccacgauccgggugcuggcgcugggcaaccaggaggggucccucaagaccgcccugaccggcgccaugcgcgucaccaaggacacgaacgacaacaaccuguacaagcuccacgggggccacgugagcugccgggugaagcuguccgcccugacccucaagggcaccagcuacaagaucugcaccgacaagauguucuucgucaagaaccccacggacaccgggcacggcaccguggugaugcaggucaagguguccaagggggcgcccugccgcaucccggugaucgucgccgacgaccugaccgccgccaucaacaagggcauccuggugaccgugaacccgaucgccagcacgaacgacgacgagguccucaucgaggugaacccccccuucggcgacuccuacaucaucguggggcggggcgacagccgccugaccuaccaguggcacaaggagggguccagcaucggcaagcuguucacccagaccaugaagggggucgagcggcuggcggugaugggcgacacggccugggacuucuccagcgccggcggguucuucaccuccgugggcaaggggauccacaccgucuucggcagcgccuuccaggggcuguucggcggccucaacuggaucaccaaggugaucaugggggccgugcugaucugggucggcaucaacacgcgcaacaugaccauguccaugagcaugauccucgugggggugaucaugauguuccugagccugggcgucggggcgugaggacuagugcaucacauuuaaaagcaucucagccuaccaugagaauaagagaaagaaaaugaagaucaauagcuuauucaucucuuuuucuuuuucguugguguaaagccaacacccugucuaaaaaacauaaauuucuuuaaucauuuugccucuuuucucugugcuucaauuaauaaaaaauggaaagaaccuagaucuaaaaaaaaaaaaaaaaaaaaaaaaaaaaaaaaaaaaaaaaaaaaaaaaaaaaaaaaaaaaaaaaugcaucccccccccccccccccccccccccccccccaaaggcucuuuucagagccaccagaauu

SEQ ID NO: 1084 - RNA, 2458 nt, Artificial Sequence
  mRNA product Design i-2 comprising derived and/or modified sequence from YFV__NC_002031.1__SSjev-prME-XX (polyprotein: aa122-788) (opt1)
ggggcgcugccuacggagguggcagccaucuccuucucggcaucaagcuuaccaugggcaagcgcagcgccggguccaucauguggcuggccagccucgcgguggucaucgccugcgccggcgccgugacgcuggugcggaagaaccgcuggcuccugcugaacgucaccuccgaggaccucggcaagaccuucagcguggggaccggcaacugcacgaccaacauccuggaggccaaguacuggugccccgacuccauggaguacaacugcccgaaccugagcccccgggaggagcccgacgacaucgacugcuggugcuacggcguggagaacguccgcguggccuacgggaagugcgacuccgcgggccggagccgccggucccgccgggccaucgaccuccccacccacgagaaccacgggcugaagacccgccaggagaaguggaugacgggccggaugggggagcgccagcugcagaagaucgagcggugguucgugcgcaacccguucuucgccgucaccgcccucaccaucgccuaccuggugggcagcaacaugacccagcggguggucaucgcgcugcucgugcuggccgugggccccgccuacuccgcccacugcaucgggaucacggaccgcgacuucaucgagggcguccacgggggcaccugggugagcgcgacccuggagcaggacaagugcgugaccgucauggcccccgacaagcccucccucgacaucagccuggagacgguggccaucgaccggccggccgaggugcgcaaggucugcuacaacgccgugcugacccacgugaagaucaacgacaagugccccuccaccggcgaggcgcaccucgccgaggagaacgagggggacaacgccugcaagcggaccuacagcgaccggggcugggggaacggcugcgggcuguucggcaagggcuccaucgucgccugcgccaaguucacgugcgcgaaguccaugagccuguucgagguggaccagaccaagauccaguacgucauccgcgcccagcuccacgugggggccaagcaggagaacuggaacaccgacaucaagacccugaaguucgacgcccugagcggcagccaggagguggaguucaucggguacggcaaggccacgcucgagugccagguccagaccgcgguggacuucgggaacuccuacaucgccgagauggagaccgagagcuggaucguggaccggcagugggcccaggaccugacccugcccuggcaguccggcagcggcggggucuggcgcgagaugcaccaccucguggaguucgagcccccgcacgccgccacgauccgggugcuggcgcugggcaaccaggaggggucccucaagaccgcccugaccggcgccaugcgcgucaccaaggacacgaacgacaacaaccuguacaagcuccacgggggccacgugagcugccgggugaagcuguccgcccugacccucaagggcaccagcuacaagaucugcaccgacaagauguucuucgucaagaaccccacggacaccgggcacggcaccguggugaugcaggucaagguguccaagggggcgcccugccgcaucccggugaucgucgccgacgaccugaccgccgccaucaacaagggcauccuggugaccgugaacccgaucgccagcacgaacgacgacgagguccucaucgaggugaacccccccuucggcgacuccuacaucaucguggggcggggcgacagccgccugaccuaccaguggcacaaggagggguccagcaucggcaagcuguucacccagaccaugaagggggucgagcggcuggcggugaugggcgacacggccugggacuucuccagcgccggcggguucuucaccuccgugggcaaggggauccacaccgucuucggcagcgccuuccaggggcuguucggcggccucaacuggaucaccaaggugaucaugggggccgugcugaucugggucggcaucaacacgcgcaacaugaccauguccaugagcaugauccucgugggggugaucaugauguuccugagccugggcgucggggcggaccagggcugcgccaucaacuucggcaagugaggacuagugcaucacauuuaaaagcaucucagccuaccaugagaauaagagaaagaaaaugaagaucaauagcuuauucaucucuuuuucuuuuucguugguguaaagccaacacccugucuaaaaaacauaaauuucuuuaaucauuuugccucuuuucucugugcuucaauuaauaaaaaauggaaagaaccuagaucuaaaaaaaaaaaaaaaaaaaaaaaaaaaaaaaaaaaaaaaaaaaaaaaaaaaaaaaaaaaaaaaaugcaucccccccccccccccccccccccccccccccaaaggcucuuuucagagccaccagaauu

SEQ ID NO: 1085 - RNA, 2428 nt, Artificial Sequence
  mRNA product Design i-2 comprising derived and/or modified sequence from YFV__NC_002031.1__SSjev-prME (polyprotein: aa122-778) (opt1)
ggggcgcugccuacggagguggcagccaucuccuucucggcaucaagcuuaccaugggcaagcgcagcgccggguccaucauguggcuggccagccucgcgguggucaucgccugcgccggcgccgugacgcuggugcggaagaaccgcuggcuccugcugaacgucaccuccgaggaccucggcaagaccuucagcguggggaccggcaacugcacgaccaacauccuggaggccaaguacuggugccccgacuccauggaguacaacugcccgaaccugagcccccgggaggagcccgacgacaucgacugcuggugcuacggcguggagaacguccgcguggccuacgggaagugcgacuccgcgggccggagccgccggucccgccgggccaucgaccuccccacccacgagaaccacgggcugaagacccgccaggagaaguggaugacgggccggaugggggagcgccagcugcagaagaucgagcggugguucgugcgcaacccguucuucgccgucaccgcccucaccaucgccuaccuggugggcagcaacaugacccagcggguggucaucgcgcugcucgugcuggccgugggccccgccuacuccgcccacugcaucgggaucacggaccgcgacuucaucgagggcguccacgggggcaccugggugagcgcgacccuggagcaggacaagugcgugaccgucauggcccccgacaagcccucccucgacaucagccuggagacgguggccaucgaccggccggccgaggugcgcaaggucugcuacaacgccgugcugacccacgugaagaucaacgacaagugccccuccaccggcgaggcgcaccucgccgaggagaacgagggggacaacgccugcaagcggaccuacagcgaccggggcugggggaacggcugcgggcuguucggcaagggcuccaucgucgccugcgccaaguucacgugcgcgaaguccaugagccuguucgagguggaccagaccaagauccaguacgucauccgcgcccagcuccacgugggggccaagcaggagaacuggaacaccgacaucaagacccugaaguucgacgcccugagcggcagccaggagguggaguucaucggguacggcaaggccacgcucgagugccagguccagaccgcgguggacuucgggaacuccuacaucgccgagauggagaccgagagcuggaucguggaccggcagugggcccaggaccugacccugcccuggcaguccggcagcggcggggucuggcgcgagaugcaccaccucguggaguucgagcccccgcacgccgccacgauccgggugcuggcgcugggcaaccaggaggggucccucaagaccgcccugaccggcgccaugcgcgucaccaaggacacgaacgacaacaaccuguacaagcuccacgggggccacgugagcugccgggugaagcuguccgcccugacccucaagggcaccagcuacaagaucugcaccgacaagauguucuucgucaagaaccccacggacaccgggcacggcaccguggugaugcaggucaagguguccaagggggcgcccugccgcaucccggugaucgucgccgacgaccugaccgccgccaucaacaagggcauccuggugaccgugaacccgaucgccagcacgaacgacgacgagguccucaucgaggugaacccccccuucggcgacuccuacaucaucguggggcggggcgacagccgccugaccuaccaguggcacaaggagggguccagcaucggcaagcuguucacccagaccaugaagggggucgagcggcuggcggugaugggcgacacggccugggacuucuccagcgccggcggguucuucaccuccgugggcaaggggauccacaccgucuucggcagcgccuuccaggggcuguucggcggccucaacuggaucaccaaggugaucaugggggccgugcugaucugggucggcaucaacacgcgcaacaugaccauguccaugagcaugauccucgugggggugaucaugauguuccugagccugggcgucggggcgugaggacuagugcaucacauuuaaaagcaucucagccuaccaugagaauaagagaaagaaaaugaagaucaauagcuuauucaucucuuuuucuuuuucguugguguaaagccaacacccugucuaaaaaacauaaauuucuuuaaucauuuugccucuuuucucugugcuucaauuaauaaaaaauggaaagaaccuagaucuaaaaaaaaaaaaaaaaaaaaaaaaaaaaaaaaaaaaaaaaaaaaaaaaaaaaaaaaaaaaaaaaugcaucccccccccccccccccccccccccccccccaaaggcucuuuucagagccaccagaauu

SEQ ID NO: 1086 - RNA, 2476 nt, Artificial Sequence
  mRNA product Design i-2 comprising derived and/or modified sequence from YFV__NC_002031.1__X-SS-prME-XX (polyprotein: aa92-788) (opt1)
ggggcgcugccuacggagguggcagccaucuccuucucggcaucaagcuuaccaugcgcggccugagcucccggaagcgccggagccacgacgugcucaccguccaguuccugauccuggggaugcuccugaugaccggcggggugacgcuggugcgcaagaaccgguggcuccugcugaacgucaccuccgaggaccucggcaagaccuucagcguggggaccggcaacugcacgaccaacauccuggaggccaaguacuggugccccgacuccauggaguacaacugccccaaccugagcccccgcgaggagcccgacgacaucgacugcuggugcuacggcguggagaacguccggguggccuacgggaagugcgacuccgcgggccgcagccggcgcucccggcgcgccaucgaccuccccacccacgagaaccacgggcugaagacccggcaggagaaguggaugacgggccgcaugggggagcggcagcugcagaagaucgagcgcugguucgugcggaacccguucuucgccgucaccgcccucaccaucgccuaccuggugggcagcaacaugacccagcgcguggucaucgcgcugcucgugcuggccgugggccccgccuacuccgcccacugcaucgggaucacggaccgggacuucaucgagggcguccacgggggcaccugggugagcgcgacccuggagcaggacaagugcgugaccgucauggcccccgacaagcccucccucgacaucagccuggagacgguggccaucgaccgcccggccgaggugcggaaggucugcuacaacgccgugcugacccacgugaagaucaacgacaagugccccuccaccggcgaggcgcaccucgccgaggagaacgagggggacaacgccugcaagcgcaccuacagcgaccgcggcugggggaacggcugcgggcuguucggcaagggcuccaucgucgccugcgccaaguucacgugcgccaagagcaugucccuguucgagguggaccagaccaagauccaguacgucauccgggcgcagcuccacgugggggccaagcaggagaacuggaacaccgacaucaagacccugaaguucgacgcccugagcggcagccaggagguggaguucaucggguacggcaaggccacgcucgagugccagguccagaccgcgguggacuucgggaacuccuacaucgccgagauggagaccgagagcuggaucguggaccgccagugggcccaggaccugacccugcccuggcaguccggcagcggcggggucuggcgggagaugcaccaccucguggaguucgagcccccgcacgccgccacgauccgcgugcuggcgcugggcaaccaggaggggucccucaagaccgcccugaccggcgccaugcgggucaccaaggacacgaacgacaacaaccuguacaagcuccacgggggccacgugagcugccgcgugaagcuguccgcccugacccucaagggcaccagcuacaagaucugcaccgacaagauguucuucgucaagaaccccacggacaccgggcacggcaccguggugaugcaggucaagguguccaagggggcgcccugccggauccccgugaucgucgccgacgaccugaccgccgccaucaacaagggcauccuggugaccgugaacccgaucgccagcacgaacgacgacgagguccucaucgaggugaacccgcccuucggcgacuccuacaucaucguggggcgcggcgacagccggcugaccuaccaguggcacaaggagggguccagcaucggcaagcuguucacccagaccaugaagggggucgagcgccucgcggugaugggcgacacggccugggacuucuccagcgccggcggguucuucaccuccgugggcaaggggauccacaccgucuucggcagcgccuuccaggggcuguucggcggccugaacuggaucaccaaggugaucaugggggccgugcugaucugggucggcaucaacacgcggaacaugaccauguccaugagcaugauccucgugggggugaucaugauguuccugagccugggcgucggggcggaccagggcugcgccaucaacuucggcaagugaggacuagugcaucacauuuaaaagcaucucagccuaccaugagaauaagagaaagaaaaugaagaucaauagcuuauucaucucuuuuucuuuuucguugguguaaagccaacacccugucuaaaaaacauaaauuucuuuaaucauuuugccucuuuucucugugcuucaauuaauaaaaaauggaaagaaccuagaucuaaaaaaaaaaaaaaaaaaaaaaaaaaaaaaaaaaaaaaaaaaaaaaaaaaaaaaaaaaaaaaaaugcaucccccccccccccccccccccccccccccccaaaggcucuuuucagagccaccagaauu

SEQ ID NO: 1087 - RNA, 2413 nt, Artificial Sequence
  mRNA product Design i-2 comprising derived and/or modified sequence from YFV__NC_002031.1__SS-prME (polyprotein: M,aa104-778) (opt1)
ggggcgcugccuacggagguggcagccaucuccuucucggcaucaagcuuaccauggacgugcugaccguccaguuccucauccugggcaugcugcucaugaccgggggcgugacgcuggugcgcaagaaccgguggcugcuccugaacgucaccagcgaggaccuggggaagaccuucuccgugggcaccgggaacugcacgaccaacauccucgaggccaaguacuggugccccgacagcauggaguacaacugccccaaccugagcccccgcgaggagcccgacgacaucgacugcuggugcuacggcguggagaacguccggguggccuacggcaagugcgacuccgcggggcgcucccggcgcagccggcgcgccaucgaccugcccacccacgagaaccacggccucaagacccggcaggagaaguggaugacggggcgcaugggcgagcggcagcugcagaagaucgagcgcugguucgugcggaacccguucuucgccgucaccgcccugaccaucgccuaccucgugggguccaacaugacccagcgcguggucaucgcgcugcuggugcucgccgugggccccgccuacagcgcccacugcaucggcaucacggaccgggacuucaucgaggggguccacggcgggaccuggguguccgcgacccuggagcaggacaagugcgugaccgucauggcccccgacaagcccagccuggacaucucccucgagacgguggccaucgaccgcccggccgaggugcggaaggucugcuacaacgccgugcugacccacgugaagaucaacgacaagugccccagcaccggcgaggcgcaccuggccgaggagaacgagggcgacaacgccugcaagcgcaccuacuccgaccggggguggggcaacgggugcggccucuucgggaagggcagcaucgucgccugcgccaaguucacgugcgcgaaguccaugagccuguucgagguggaccagaccaagauccaguacgucauccgcgcccagcugcacgugggcgccaagcaggagaacuggaacaccgacaucaagacccucaaguucgacgcccuguccgggagccaggagguggaguucaucggcuacgggaaggccacgcuggagugccagguccagaccgcgguggacuucggcaacuccuacaucgccgagauggagaccgagagcuggaucguggaccggcagugggcccaggaccucacccugcccuggcagagcggguccggcggcgucuggcgcgagaugcaccaccugguggaguucgagcccccgcacgccgccacgauccgcgugcucgcgcuggggaaccaggagggcagccugaagaccgcccucaccggggccaugcgggucaccaaggacacgaacgacaacaaccuguacaagcugcacggcgggcacguguccugccgcgugaagcucagcgcccugacccugaagggcaccuccuacaagaucugcaccgacaagauguucuucgucaagaaccccacggacaccggccacgggaccguggugaugcaggucaaggugagcaagggcgcgcccugccggauccccgugaucgucgccgacgaccucaccgccgccaucaacaaggggauccuggugaccgugaacccgaucgccuccacgaacgacgacgagguccugaucgaggugaacccgcccuucggcgacagcuacaucaucgugggccgcggggacucccggcucaccuaccaguggcacaaggagggcagcuccaucgggaagcuguucacccagaccaugaagggcgucgagcgccuggcggugaugggggacacggccugggacuucagcuccgccggcggcuucuucaccagcguggggaagggcauccacaccgucuucggguccgccuuccagggccucuucgggggccugaacuggaucaccaaggugaucaugggcgccgugcugaucugggucgggaucaacacgcggaacaugaccaugagcauguccaugauccuggugggcgugaucaugauguuccucagccugggggucggcgcgugaggacuagugcaucacauuuaaaagcaucucagccuaccaugagaauaagagaaagaaaaugaagaucaauagcuuauucaucucuuuuucuuuuucguugguguaaagccaacacccugucuaaaaaacauaaauuucuuuaaucauuuugccucuuuucucugugcuucaauuaauaaaaaauggaaagaaccuagaucuaaaaaaaaaaaaaaaaaaaaaaaaaaaaaaaaaaaaaaaaaaaaaaaaaaaaaaaaaaaaaaaaugcaucccccccccccccccccccccccccccccccaaaggcucuuuucagagccaccagaauu

SEQ ID NO: 1088 - RNA, 2440 nt, Artificial Sequence
  mRNA product Design i-2 comprising derived and/or modified sequence from YFV__NC_002031.1__SSIgE-prME-XX (polyprotein: aa122-788) (opt1)
ggggcgcugccuacggagguggcagccaucuccuucucggcaucaagcuuaccauggacuggaccuggauccuguuccucguggccgccgcgacccgcguccacagcgugacgcuggugcggaagaaccgcuggcugcuccugaacgucaccuccgaggaccugggcaagaccuucagcguggggaccggcaacugcacgaccaacauccucgaggccaaguacuggugccccgacuccauggaguacaacugccccaaccugagcccccgggaggagcccgacgacaucgacugcuggugcuacgggguggagaacguccgcguggccuacggcaagugcgacuccgccgggcggagccgccggucccgccgggccaucgaccugcccacccacgagaaccacggccucaagacccgccaggagaaguggaugacgggccggaugggggagcgccagcugcagaagaucgagcggugguucgugcgcaacccguucuucgcggucaccgcccugaccaucgccuaccucgugggcagcaacaugacccagcggguggucaucgcccugcuggugcucgcgguggggcccgccuacuccgcccacugcaucggcaucacggaccgcgacuucaucgaggggguccacggcggcaccugggugagcgccacccuggagcaggacaagugcgugaccgucauggcccccgacaagcccucccuggacaucagccucgagacgguggcgaucgaccggccggccgaggugcgcaaggucugcuacaacgccgugcugacccacgugaagaucaacgacaagugccccuccaccggggaggcccaccuggccgaggagaacgagggcgacaacgcgugcaagcggaccuacagcgaccgcggguggggcaacggcugcggccucuucgggaagggguccaucgucgccugcgccaaguucacgugcgccaagagcaugucccuguucgagguggaccagaccaagauccaguacgucauccgggcccagcugcacgugggcgcgaagcaggagaacuggaacaccgacaucaagacccucaaguucgacgcccugagcgggucccaggagguggaguucaucggcuacggcaaggccacgcuggagugccagguccagaccgccguggacuucgggaacagcuacaucgccgagauggagaccgagagcuggaucguggaccgccagugggcgcaggaccucacccugcccuggcaguccggcagcgggggcgucuggcgcgagaugcaccaccugguggaguucgagcccccgcacgccgccacgauccgggugcucgcccuggggaaccaggagggcucccugaagaccgcgcucaccggcgccaugcgcgucaccaaggacacgaacgacaacaaccuguacaagcugcacgggggccacgugagcugccgggugaagcucuccgcccugacccugaaggggaccagcuacaagaucugcaccgacaagauguucuucgucaagaaccccacggacaccggccacgggaccguggugaugcaggucaagguguccaagggcgcccccugccgcauccccgugaucgucgccgacgaccucaccgcggccaucaacaagggcauccuggugaccgugaacccgaucgccagcacgaacgacgacgagguccugaucgaggugaacccgcccuucggggacuccuacaucaucgugggccgcggggacagccggcucaccuaccaguggcacaaggagggcuccagcaucggcaagcuguucacccagaccaugaagggggucgagcggcuggccgugaugggcgacacggccugggacuucuccagcgccgggggcuucuucaccuccguggggaagggcauccacaccgucuucggcagcgcguuccaggggcuguucggcgggcucaacuggaucaccaaggugaucaugggcgccgugcugaucugggucgggaucaacacgcgcaacaugaccauguccaugagcaugauccucgugggcgugaucaugauguuccugucccugggcgucggggccgaccagggcugcgccaucaacuucgggaagugaggacuagugcaucacauuuaaaagcaucucagccuaccaugagaauaagagaaagaaaaugaagaucaauagcuuauucaucucuuuuucuuuuucguugguguaaagccaacacccugucuaaaaaacauaaauuucuuuaaucauuuugccucuuuucucugugcuucaauuaauaaaaaauggaaagaaccuagaucuaaaaaaaaaaaaaaaaaaaaaaaaaaaaaaaaaaaaaaaaaaaaaaaaaaaaaaaaaaaaaaaaugcaucccccccccccccccccccccccccccccccaaaggcucuuuucagagccaccagaauu

SEQ ID NO: 1089 - RNA, 2410 nt, Artificial Sequence
  mRNA product Design i-2 comprising derived and/or modified sequence from YFV__NC_002031.1__SSIgE-prME (polyprotein: aa122-778) (opt1)
ggggcgcugccuacggagguggcagccaucuccuucucggcaucaagcuuaccauggacuggaccuggauccuguuccucguggccgccgcgacccgcguccacagcgugacgcuggugcggaagaaccgcuggcugcuccugaacgucaccuccgaggaccugggcaagaccuucagcguggggaccggcaacugcacgaccaacauccucgaggccaaguacuggugccccgacuccauggaguacaacugccccaaccugagcccccgggaggagcccgacgacaucgacugcuggugcuacgggguggagaacguccgcguggccuacggcaagugcgacuccgccgggcggagccgccggucccgccgggccaucgaccugcccacccacgagaaccacggccucaagacccgccaggagaaguggaugacgggccggaugggggagcgccagcugcagaagaucgagcggugguucgugcgcaacccguucuucgcggucaccgcccugaccaucgccuaccucgugggcagcaacaugacccagcggguggucaucgcccugcuggugcucgcgguggggcccgccuacuccgcccacugcaucggcaucacggaccgcgacuucaucgaggggguccacggcggcaccugggugagcgccacccuggagcaggacaagugcgugaccgucauggcccccgacaagcccucccuggacaucagccucgagacgguggcgaucgaccggccggccgaggugcgcaaggucugcuacaacgccgugcugacccacgugaagaucaacgacaagugccccuccaccggggaggcccaccuggccgaggagaacgagggcgacaacgcgugcaagcggaccuacagcgaccgcggguggggcaacggcugcggccucuucgggaagggguccaucgucgccugcgccaaguucacgugcgccaagagcaugucccuguucgagguggaccagaccaagauccaguacgucauccgggcccagcugcacgugggcgcgaagcaggagaacuggaacaccgacaucaagacccucaaguucgacgcccugagcgggucccaggagguggaguucaucggcuacggcaaggccacgcuggagugccagguccagaccgccguggacuucgggaacagcuacaucgccgagauggagaccgagagcuggaucguggaccgccagugggcgcaggaccucacccugcccuggcaguccggcagcgggggcgucuggcgcgagaugcaccaccugguggaguucgagcccccgcacgccgccacgauccgggugcucgcccuggggaaccaggagggcucccugaagaccgcgcucaccggcgccaugcgcgucaccaaggacacgaacgacaacaaccuguacaagcugcacgggggccacgugagcugccgggugaagcucuccgcccugacccugaaggggaccagcuacaagaucugcaccgacaagauguucuucgucaagaaccccacggacaccggccacgggaccguggugaugcaggucaagguguccaagggcgcccccugccgcauccccgugaucgucgccgacgaccucaccgcggccaucaacaagggcauccuggugaccgugaacccgaucgccagcacgaacgacgacgagguccugaucgaggugaacccgcccuucggggacuccuacaucaucgugggccgcggggacagccggcucaccuaccaguggcacaaggagggcuccagcaucggcaagcuguucacccagaccaugaagggggucgagcggcuggccgugaugggcgacacggccugggacuucuccagcgccgggggcuucuucaccuccguggggaagggcauccacaccgucuucggcagcgcguuccaggggcuguucggcgggcucaacuggaucaccaaggugaucaugggcgccgugcugaucugggucgggaucaacacgcgcaacaugaccauguccaugagcaugauccucgugggcgugaucaugauguuccugucccugggcgucggggccugaggacuagugcaucacauuuaaaagcaucucagccuaccaugagaauaagagaaagaaaaugaagaucaauagcuuauucaucucuuuuucuuuuucguugguguaaagccaacacccugucuaaaaaacauaaauuucuuuaaucauuuugccucuuuucucugugcuucaauuaauaaaaaauggaaagaaccuagaucuaaaaaaaaaaaaaaaaaaaaaaaaaaaaaaaaaaaaaaaaaaaaaaaaaaaaaaaaaaaaaaaaugcaucccccccccccccccccccccccccccccccaaaggcucuuuucagagccaccagaauu

SEQ ID NO: 1090 - RNA, 2458 nt, Artificial Sequence
  mRNA product Design i-2 comprising derived and/or modified sequence from YFV__NC_002031.1__SSjev-prME-XX (polyprotein: aa122-788) (opt1)
ggggcgcugccuacggagguggcagccaucuccuucucggcaucaagcuuaccaugggcaagcgcagcgccggguccaucauguggcuggccagccucgcgguggucaucgccugcgccggcgccgugacccuggugcggaagaaccgcuggcugcuccugaacgucaccuccgaggaccuggggaagacguucagcgugggcaccgggaacugcaccaccaacauccucgaggccaaguacuggugccccgacuccauggaguacaacugccccaaccugagcccccgggaggagcccgacgacaucgacugcuggugcuacggcguggagaacguccgcguggcguacggcaagugcgacuccgccgggcggagccgccggucccgccgggccaucgaccugcccacgcacgagaaccacggccucaagacccgccaggagaaguggaugaccgggcggaugggcgagcgccagcugcagaagaucgagcggugguucgugcgcaacccguucuucgccgucaccgcgcugacgaucgccuaccucguggggagcaacaugacccagcggguggucaucgcccugcuggugcucgccgugggccccgccuacuccgcgcacugcaucggcaucaccgaccgcgacuucaucgaggggguccacggcgggaccugggugagcgccacgcuggagcaggacaagugcgugaccgucauggcccccgacaagcccucccuggacaucagccucgagaccguggccaucgaccggccggccgaggugcgcaaggucugcuacaacgcggugcugacccacgugaagaucaacgacaagugccccuccacgggcgaggcccaccuggccgaggagaacgagggcgacaacgccugcaagcggaccuacagcgaccgcggguggggcaacgggugcggccucuucgggaagggcuccaucgucgccugcgcgaaguucacgugcgccaagagcaugucccuguucgagguggaccagaccaagauccaguacgucauccgggcccagcugcacgugggcgccaagcaggagaacuggaacaccgacaucaagacccucaaguucgacgcccugagcgggagccaggagguggaguucaucggcuacgggaaggcgacccuggagugccagguccagaccgccguggacuucggcaacuccuacaucgccgagauggagacggagagcuggaucguggaccgccagugggcccaggaccucacccugcccuggcaguccgggagcggcggcgucuggcgcgagaugcaccaccugguggaguucgagcccccgcacgcggccaccauccgggugcucgcccuggggaaccaggagggcucccugaagaccgcccucacgggggccaugcgcgucaccaaggacaccaacgacaacaaccuguacaagcugcacggcgggcacgugagcugccgggugaagcucuccgcgcugacccugaagggcacgagcuacaagaucugcaccgacaagauguucuucgucaagaaccccaccgacaccggccacgggacgguggugaugcaggucaagguguccaagggcgcccccugccgcauccccgugaucgucgccgacgaccucaccgccgccaucaacaaggggauccuggugaccgugaacccgaucgcgagcaccaacgacgacgagguccugaucgaggugaacccgcccuucggcgacuccuacaucaucgugggccgcggggacagccggcucaccuaccaguggcacaaggagggcuccagcaucgggaagcuguucacgcagaccaugaagggcgucgagcggcuggccgugaugggggacaccgccugggacuucuccagcgccggcggcuucuucaccuccguggggaagggcauccacacggucuucgggagcgccuuccagggccucuucgggggccugaacuggaucaccaaggugaucaugggcgcggugcugaucugggucgggaucaacacccgcaacaugaccauguccaugagcaugauccucgugggcgugaucaugauguuccugagccugggggucggcgccgaccaggggugcgccaucaacuucggcaagugaggacuagugcaucacauuuaaaagcaucucagccuaccaugagaauaagagaaagaaaaugaagaucaauagcuuauucaucucuuuuucuuuuucguugguguaaagccaacacccugucuaaaaaacauaaauuucuuuaaucauuuugccucuuuucucugugcuucaauuaauaaaaaauggaaagaaccuagaucuaaaaaaaaaaaaaaaaaaaaaaaaaaaaaaaaaaaaaaaaaaaaaaaaaaaaaaaaaaaaaaaaugcaucccccccccccccccccccccccccccccccaaaggcucuuuucagagccaccagaauu

SEQ ID NO: 1091 - RNA, 2428 nt, Artificial Sequence
  mRNA product Design i-2 comprising derived and/or modified sequence from YFV__NC_002031.1__SSjev-prME (polyprotein: aa122-778) (opt1)
ggggcgcugccuacggagguggcagccaucuccuucucggcaucaagcuuaccaugggcaagcgcagcgccggguccaucauguggcuggccagccucgcgguggucaucgccugcgccggcgccgugacccuggugcggaagaaccgcuggcugcuccugaacgucaccuccgaggaccuggggaagacguucagcgugggcaccgggaacugcaccaccaacauccucgaggccaaguacuggugccccgacuccauggaguacaacugccccaaccugagcccccgggaggagcccgacgacaucgacugcuggugcuacggcguggagaacguccgcguggcguacggcaagugcgacuccgccgggcggagccgccggucccgccgggccaucgaccugcccacgcacgagaaccacggccucaagacccgccaggagaaguggaugaccgggcggaugggcgagcgccagcugcagaagaucgagcggugguucgugcgcaacccguucuucgccgucaccgcgcugacgaucgccuaccucguggggagcaacaugacccagcggguggucaucgcccugcuggugcucgccgugggccccgccuacuccgcgcacugcaucggcaucaccgaccgcgacuucaucgaggggguccacggcgggaccugggugagcgccacgcuggagcaggacaagugcgugaccgucauggcccccgacaagcccucccuggacaucagccucgagaccguggccaucgaccggccggccgaggugcgcaaggucugcuacaacgcggugcugacccacgugaagaucaacgacaagugccccuccacgggcgaggcccaccuggccgaggagaacgagggcgacaacgccugcaagcggaccuacagcgaccgcggguggggcaacgggugcggccucuucgggaagggcuccaucgucgccugcgcgaaguucacgugcgccaagagcaugucccuguucgagguggaccagaccaagauccaguacgucauccgggcccagcugcacgugggcgccaagcaggagaacuggaacaccgacaucaagacccucaaguucgacgcccugagcgggagccaggagguggaguucaucggcuacgggaaggcgacccuggagugccagguccagaccgccguggacuucggcaacuccuacaucgccgagauggagacggagagcuggaucguggaccgccagugggcccaggaccucacccugcccuggcaguccgggagcggcggcgucuggcgcgagaugcaccaccugguggaguucgagcccccgcacgcggccaccauccgggugcucgcccuggggaaccaggagggcucccugaagaccgcccucacgggggccaugcgcgucaccaaggacaccaacgacaacaaccuguacaagcugcacggcgggcacgugagcugccgggugaagcucuccgcgcugacccugaagggcacgagcuacaagaucugcaccgacaagauguucuucgucaagaaccccaccgacaccggccacgggacgguggugaugcaggucaagguguccaagggcgcccccugccgcauccccgugaucgucgccgacgaccucaccgccgccaucaacaaggggauccuggugaccgugaacccgaucgcgagcaccaacgacgacgagguccugaucgaggugaacccgcccuucggcgacuccuacaucaucgugggccgcggggacagccggcucaccuaccaguggcacaaggagggcuccagcaucgggaagcuguucacgcagaccaugaagggcgucgagcggcuggccgugaugggggacaccgccugggacuucuccagcgccggcggcuucuucaccuccguggggaagggcauccacacggucuucgggagcgccuuccagggccucuucgggggccugaacuggaucaccaaggugaucaugggcgcggugcugaucugggucgggaucaacacccgcaacaugaccauguccaugagcaugauccucgugggcgugaucaugauguuccugagccugggggucggcgccugaggacuagugcaucacauuuaaaagcaucucagccuaccaugagaauaagagaaagaaaaugaagaucaauagcuuauucaucucuuuuucuuuuucguugguguaaagccaacacccugucuaaaaaacauaaauuucuuuaaucauuuugccucuuuucucugugcuucaauuaauaaaaaauggaaagaaccuagaucuaaaaaaaaaaaaaaaaaaaaaaaaaaaaaaaaaaaaaaaaaaaaaaaaaaaaaaaaaaaaaaaaugcaucccccccccccccccccccccccccccccccaaaggcucuuuucagagccaccagaauu

SEQ ID NO: 1092 - RNA, 2476 nt, Artificial Sequence
  mRNA product Design i-2 comprising derived and/or modified sequence from YFV__NC_002031.1__X-SS-prME-XX (polyprotein: aa92-788) (opt2)
ggggcgcugccuacggagguggcagccaucuccuucucggcaucaagcuuaccaugcgcggccucuccucccgcaagcgccgcucccacgacguccucaccguccaguuccucauccucggcaugcuccucaugaccggcggcgucacccucguccgcaagaaccgcuggcuccuccucaacgucaccuccgaggaccucggcaagaccuucuccgucggcaccggcaacugcaccaccaacauccucgaggccaaguacuggugccccgacuccauggaguacaacugccccaaccucuccccccgcgaggagcccgacgacaucgacugcuggugcuacggcgucgagaacguccgcgucgccuacggcaagugcgacuccgccggccgcucccgccgcucccgccgcgccaucgaccuccccacccacgagaaccacggccucaagacccgccaggagaaguggaugaccggccgcaugggcgagcgccagcuccagaagaucgagcgcugguucguccgcaaccccuucuucgccgucaccgcccucaccaucgccuaccucgucggcuccaacaugacccagcgcgucgucaucgcccuccucguccucgccgucggccccgccuacuccgcccacugcaucggcaucaccgaccgcgacuucaucgagggcguccacggcggcaccugggucuccgccacccucgagcaggacaagugcgucaccgucauggcccccgacaagcccucccucgacaucucccucgagaccgucgccaucgaccgccccgccgagguccgcaaggucugcuacaacgccguccucacccacgucaagaucaacgacaagugccccuccaccggcgaggcccaccucgccgaggagaacgagggcgacaacgccugcaagcgcaccuacuccgaccgcggcuggggcaacggcugcggccucuucggcaagggcuccaucgucgccugcgccaaguucaccugcgccaaguccaugucccucuucgaggucgaccagaccaagauccaguacgucauccgcgcccagcuccacgucggcgccaagcaggagaacuggaacaccgacaucaagacccucaaguucgacgcccucuccggcucccaggaggucgaguucaucggcuacggcaaggccacccucgagugccagguccagaccgccgucgacuucggcaacuccuacaucgccgagauggagaccgaguccuggaucgucgaccgccagugggcccaggaccucacccuccccuggcaguccggcuccggcggcgucuggcgcgagaugcaccaccucgucgaguucgagcccccccacgccgccaccauccgcguccucgcccucggcaaccaggagggcucccucaagaccgcccucaccggcgccaugcgcgucaccaaggacaccaacgacaacaaccucuacaagcuccacggcggccacgucuccugccgcgucaagcucuccgcccucacccucaagggcaccuccuacaagaucugcaccgacaagauguucuucgucaagaaccccaccgacaccggccacggcaccgucgucaugcaggucaaggucuccaagggcgcccccugccgcauccccgucaucgucgccgacgaccucaccgccgccaucaacaagggcauccucgucaccgucaaccccaucgccuccaccaacgacgacgagguccucaucgaggucaacccccccuucggcgacuccuacaucaucgucggccgcggcgacucccgccucaccuaccaguggcacaaggagggcuccuccaucggcaagcucuucacccagaccaugaagggcgucgagcgccucgccgucaugggcgacaccgccugggacuucuccuccgccggcggcuucuucaccuccgucggcaagggcauccacaccgucuucggcuccgccuuccagggccucuucggcggccucaacuggaucaccaaggucaucaugggcgccguccucaucugggucggcaucaacacccgcaacaugaccauguccauguccaugauccucgucggcgucaucaugauguuccucucccucggcgucggcgccgaccagggcugcgccaucaacuucggcaagugaggacuagugcaucacauuuaaaagcaucucagccuaccaugagaauaagagaaagaaaaugaagaucaauagcuuauucaucucuuuuucuuuuucguugguguaaagccaacacccugucuaaaaaacauaaauuucuuuaaucauuuugccucuuuucucugugcuucaauuaauaaaaaauggaaagaaccuagaucuaaaaaaaaaaaaaaaaaaaaaaaaaaaaaaaaaaaaaaaaaaaaaaaaaaaaaaaaaaaaaaaaugcaucccccccccccccccccccccccccccccccaaaggcucuuuucagagccaccagaauu

SEQ ID NO: 1093 - RNA, 2413 nt, Artificial Sequence
  mRNA product Design i-2 comprising derived and/or modified sequence from YFV__NC_002031.1__SS-prME (polyprotein: M,aa104-778) (opt2)
ggggcgcugccuacggagguggcagccaucuccuucucggcaucaagcuuaccauggacguccucaccguccaguuccucauccucggcaugcuccucaugaccggcggcgucacccucguccgcaagaaccgcuggcuccuccucaacgucaccuccgaggaccucggcaagaccuucuccgucggcaccggcaacugcaccaccaacauccucgaggccaaguacuggugccccgacuccauggaguacaacugccccaaccucuccccccgcgaggagcccgacgacaucgacugcuggugcuacggcgucgagaacguccgcgucgccuacggcaagugcgacuccgccggccgcucccgccgcucccgccgcgccaucgaccuccccacccacgagaaccacggccucaagacccgccaggagaaguggaugaccggccgcaugggcgagcgccagcuccagaagaucgagcgcugguucguccgcaaccccuucuucgccgucaccgcccucaccaucgccuaccucgucggcuccaacaugacccagcgcgucgucaucgcccuccucguccucgccgucggccccgccuacuccgcccacugcaucggcaucaccgaccgcgacuucaucgagggcguccacggcggcaccugggucuccgccacccucgagcaggacaagugcgucaccgucauggcccccgacaagcccucccucgacaucucccucgagaccgucgccaucgaccgccccgccgagguccgcaaggucugcuacaacgccguccucacccacgucaagaucaacgacaagugccccuccaccggcgaggcccaccucgccgaggagaacgagggcgacaacgccugcaagcgcaccuacuccgaccgcggcuggggcaacggcugcggccucuucggcaagggcuccaucgucgccugcgccaaguucaccugcgccaaguccaugucccucuucgaggucgaccagaccaagauccaguacgucauccgcgcccagcuccacgucggcgccaagcaggagaacuggaacaccgacaucaagacccucaaguucgacgcccucuccggcucccaggaggucgaguucaucggcuacggcaaggccacccucgagugccagguccagaccgccgucgacuucggcaacuccuacaucgccgagauggagaccgaguccuggaucgucgaccgccagugggcccaggaccucacccuccccuggcaguccggcuccggcggcgucuggcgcgagaugcaccaccucgucgaguucgagcccccccacgccgccaccauccgcguccucgcccucggcaaccaggagggcucccucaagaccgcccucaccggcgccaugcgcgucaccaaggacaccaacgacaacaaccucuacaagcuccacggcggccacgucuccugccgcgucaagcucuccgcccucacccucaagggcaccuccuacaagaucugcaccgacaagauguucuucgucaagaaccccaccgacaccggccacggcaccgucgucaugcaggucaaggucuccaagggcgcccccugccgcauccccgucaucgucgccgacgaccucaccgccgccaucaacaagggcauccucgucaccgucaaccccaucgccuccaccaacgacgacgagguccucaucgaggucaacccccccuucggcgacuccuacaucaucgucggccgcggcgacucccgccucaccuaccaguggcacaaggagggcuccuccaucggcaagcucuucacccagaccaugaagggcgucgagcgccucgccgucaugggcgacaccgccugggacuucuccuccgccggcggcuucuucaccuccgucggcaagggcauccacaccgucuucggcuccgccuuccagggccucuucggcggccucaacuggaucaccaaggucaucaugggcgccguccucaucugggucggcaucaacacccgcaacaugaccauguccauguccaugauccucgucggcgucaucaugauguuccucucccucggcgucggcgccugaggacuagugcaucacauuuaaaagcaucucagccuaccaugagaauaagagaaagaaaaugaagaucaauagcuuauucaucucuuuuucuuuuucguugguguaaagccaacacccugucuaaaaaacauaaauuucuuuaaucauuuugccucuuuucucugugcuucaauuaauaaaaaauggaaagaaccuagaucuaaaaaaaaaaaaaaaaaaaaaaaaaaaaaaaaaaaaaaaaaaaaaaaaaaaaaaaaaaaaaaaaugcaucccccccccccccccccccccccccccccccaaaggcucuuuucagagccaccagaauu

SEQ ID NO: 1094 - RNA, 2440 nt, Artificial Sequence
  mRNA product Design i-2 comprising derived and/or modified sequence from YFV__NC_002031.1__SSIgE-prME-XX (polyprotein: aa122-788) (opt2)
ggggcgcugccuacggagguggcagccaucuccuucucggcaucaagcuuaccauggacuggaccuggauccucuuccucgucgccgccgccacccgcguccacuccgucacccucguccgcaagaaccgcuggcuccuccucaacgucaccuccgaggaccucggcaagaccuucuccgucggcaccggcaacugcaccaccaacauccucgaggccaaguacuggugccccgacuccauggaguacaacugccccaaccucuccccccgcgaggagcccgacgacaucgacugcuggugcuacggcgucgagaacguccgcgucgccuacggcaagugcgacuccgccggccgcucccgccgcucccgccgcgccaucgaccuccccacccacgagaaccacggccucaagacccgccaggagaaguggaugaccggccgcaugggcgagcgccagcuccagaagaucgagcgcugguucguccgcaaccccuucuucgccgucaccgcccucaccaucgccuaccucgucggcuccaacaugacccagcgcgucgucaucgcccuccucguccucgccgucggccccgccuacuccgcccacugcaucggcaucaccgaccgcgacuucaucgagggcguccacggcggcaccugggucuccgccacccucgagcaggacaagugcgucaccgucauggcccccgacaagcccucccucgacaucucccucgagaccgucgccaucgaccgccccgccgagguccgcaaggucugcuacaacgccguccucacccacgucaagaucaacgacaagugccccuccaccggcgaggcccaccucgccgaggagaacgagggcgacaacgccugcaagcgcaccuacuccgaccgcggcuggggcaacggcugcggccucuucggcaagggcuccaucgucgccugcgccaaguucaccugcgccaaguccaugucccucuucgaggucgaccagaccaagauccaguacgucauccgcgcccagcuccacgucggcgccaagcaggagaacuggaacaccgacaucaagacccucaaguucgacgcccucuccggcucccaggaggucgaguucaucggcuacggcaaggccacccucgagugccagguccagaccgccgucgacuucggcaacuccuacaucgccgagauggagaccgaguccuggaucgucgaccgccagugggcccaggaccucacccuccccuggcaguccggcuccggcggcgucuggcgcgagaugcaccaccucgucgaguucgagcccccccacgccgccaccauccgcguccucgcccucggcaaccaggagggcucccucaagaccgcccucaccggcgccaugcgcgucaccaaggacaccaacgacaacaaccucuacaagcuccacggcggccacgucuccugccgcgucaagcucuccgcccucacccucaagggcaccuccuacaagaucugcaccgacaagauguucuucgucaagaaccccaccgacaccggccacggcaccgucgucaugcaggucaaggucuccaagggcgcccccugccgcauccccgucaucgucgccgacgaccucaccgccgccaucaacaagggcauccucgucaccgucaaccccaucgccuccaccaacgacgacgagguccucaucgaggucaacccccccuucggcgacuccuacaucaucgucggccgcggcgacucccgccucaccuaccaguggcacaaggagggcuccuccaucggcaagcucuucacccagaccaugaagggcgucgagcgccucgccgucaugggcgacaccgccugggacuucuccuccgccggcggcuucuucaccuccgucggcaagggcauccacaccgucuucggcuccgccuuccagggccucuucggcggccucaacuggaucaccaaggucaucaugggcgccguccucaucugggucggcaucaacacccgcaacaugaccauguccauguccaugauccucgucggcgucaucaugauguuccucucccucggcgucggcgccgaccagggcugcgccaucaacuucggcaagugaggacuagugcaucacauuuaaaagcaucucagccuaccaugagaauaagagaaagaaaaugaagaucaauagcuuauucaucucuuuuucuuuuucguugguguaaagccaacacccugucuaaaaaacauaaauuucuuuaaucauuuugccucuuuucucugugcuucaauuaauaaaaaauggaaagaaccuagaucuaaaaaaaaaaaaaaaaaaaaaaaaaaaaaaaaaaaaaaaaaaaaaaaaaaaaaaaaaaaaaaaaugcaucccccccccccccccccccccccccccccccaaaggcucuuuucagagccaccagaauu

SEQ ID NO: 1095 - RNA, 2410 nt, Artificial Sequence
  mRNA product Design i-2 comprising derived and/or modified sequence from YFV__NC_002031.1__SSIgE-prME (polyprotein: aa122-778) (opt2)
ggggcgcugccuacggagguggcagccaucuccuucucggcaucaagcuuaccauggacuggaccuggauccucuuccucgucgccgccgccacccgcguccacuccgucacccucguccgcaagaaccgcuggcuccuccucaacgucaccuccgaggaccucggcaagaccuucuccgucggcaccggcaacugcaccaccaacauccucgaggccaaguacuggugccccgacuccauggaguacaacugccccaaccucuccccccgcgaggagcccgacgacaucgacugcuggugcuacggcgucgagaacguccgcgucgccuacggcaagugcgacuccgccggccgcucccgccgcucccgccgcgccaucgaccuccccacccacgagaaccacggccucaagacccgccaggagaaguggaugaccggccgcaugggcgagcgccagcuccagaagaucgagcgcugguucguccgcaaccccuucuucgccgucaccgcccucaccaucgccuaccucgucggcuccaacaugacccagcgcgucgucaucgcccuccucguccucgccgucggccccgccuacuccgcccacugcaucggcaucaccgaccgcgacuucaucgagggcguccacggcggcaccugggucuccgccacccucgagcaggacaagugcgucaccgucauggcccccgacaagcccucccucgacaucucccucgagaccgucgccaucgaccgccccgccgagguccgcaaggucugcuacaacgccguccucacccacgucaagaucaacgacaagugccccuccaccggcgaggcccaccucgccgaggagaacgagggcgacaacgccugcaagcgcaccuacuccgaccgcggcuggggcaacggcugcggccucuucggcaagggcuccaucgucgccugcgccaaguucaccugcgccaaguccaugucccucuucgaggucgaccagaccaagauccaguacgucauccgcgcccagcuccacgucggcgccaagcaggagaacuggaacaccgacaucaagacccucaaguucgacgcccucuccggcucccaggaggucgaguucaucggcuacggcaaggccacccucgagugccagguccagaccgccgucgacuucggcaacuccuacaucgccgagauggagaccgaguccuggaucgucgaccgccagugggcccaggaccucacccuccccuggcaguccggcuccggcggcgucuggcgcgagaugcaccaccucgucgaguucgagcccccccacgccgccaccauccgcguccucgcccucggcaaccaggagggcucccucaagaccgcccucaccggcgccaugcgcgucaccaaggacaccaacgacaacaaccucuacaagcuccacggcggccacgucuccugccgcgucaagcucuccgcccucacccucaagggcaccuccuacaagaucugcaccgacaagauguucuucgucaagaaccccaccgacaccggccacggcaccgucgucaugcaggucaaggucuccaagggcgcccccugccgcauccccgucaucgucgccgacgaccucaccgccgccaucaacaagggcauccucgucaccgucaaccccaucgccuccaccaacgacgacgagguccucaucgaggucaacccccccuucggcgacuccuacaucaucgucggccgcggcgacucccgccucaccuaccaguggcacaaggagggcuccuccaucggcaagcucuucacccagaccaugaagggcgucgagcgccucgccgucaugggcgacaccgccugggacuucuccuccgccggcggcuucuucaccuccgucggcaagggcauccacaccgucuucggcuccgccuuccagggccucuucggcggccucaacuggaucaccaaggucaucaugggcgccguccucaucugggucggcaucaacacccgcaacaugaccauguccauguccaugauccucgucggcgucaucaugauguuccucucccucggcgucggcgccugaggacuagugcaucacauuuaaaagcaucucagccuaccaugagaauaagagaaagaaaaugaagaucaauagcuuauucaucucuuuuucuuuuucguugguguaaagccaacacccugucuaaaaaacauaaauuucuuuaaucauuuugccucuuuucucugugcuucaauuaauaaaaaauggaaagaaccuagaucuaaaaaaaaaaaaaaaaaaaaaaaaaaaaaaaaaaaaaaaaaaaaaaaaaaaaaaaaaaaaaaaaugcaucccccccccccccccccccccccccccccccaaaggcucuuuucagagccaccagaauu

SEQ ID NO: 1096 - RNA, 2458 nt, Artificial Sequence
  mRNA product Design i-2 comprising derived and/or modified sequence from YFV__NC_002031.1__SSjev-prME-XX (polyprotein: aa122-788) (opt2)
ggggcgcugccuacggagguggcagccaucuccuucucggcaucaagcuuaccaugggcaagcgcuccgccggcuccaucauguggcucgccucccucgccgucgucaucgccugcgccggcgccgucacccucguccgcaagaaccgcuggcuccuccucaacgucaccuccgaggaccucggcaagaccuucuccgucggcaccggcaacugcaccaccaacauccucgaggccaaguacuggugccccgacuccauggaguacaacugccccaaccucuccccccgcgaggagcccgacgacaucgacugcuggugcuacggcgucgagaacguccgcgucgccuacggcaagugcgacuccgccggccgcucccgccgcucccgccgcgccaucgaccuccccacccacgagaaccacggccucaagacccgccaggagaaguggaugaccggccgcaugggcgagcgccagcuccagaagaucgagcgcugguucguccgcaaccccuucuucgccgucaccgcccucaccaucgccuaccucgucggcuccaacaugacccagcgcgucgucaucgcccuccucguccucgccgucggccccgccuacuccgcccacugcaucggcaucaccgaccgcgacuucaucgagggcguccacggcggcaccugggucuccgccacccucgagcaggacaagugcgucaccgucauggcccccgacaagcccucccucgacaucucccucgagaccgucgccaucgaccgccccgccgagguccgcaaggucugcuacaacgccguccucacccacgucaagaucaacgacaagugccccuccaccggcgaggcccaccucgccgaggagaacgagggcgacaacgccugcaagcgcaccuacuccgaccgcggcuggggcaacggcugcggccucuucggcaagggcuccaucgucgccugcgccaaguucaccugcgccaaguccaugucccucuucgaggucgaccagaccaagauccaguacgucauccgcgcccagcuccacgucggcgccaagcaggagaacuggaacaccgacaucaagacccucaaguucgacgcccucuccggcucccaggaggucgaguucaucggcuacggcaaggccacccucgagugccagguccagaccgccgucgacuucggcaacuccuacaucgccgagauggagaccgaguccuggaucgucgaccgccagugggcccaggaccucacccuccccuggcaguccggcuccggcggcgucuggcgcgagaugcaccaccucgucgaguucgagcccccccacgccgccaccauccgcguccucgcccucggcaaccaggagggcucccucaagaccgcccucaccggcgccaugcgcgucaccaaggacaccaacgacaacaaccucuacaagcuccacggcggccacgucuccugccgcgucaagcucuccgcccucacccucaagggcaccuccuacaagaucugcaccgacaagauguucuucgucaagaaccccaccgacaccggccacggcaccgucgucaugcaggucaaggucuccaagggcgcccccugccgcauccccgucaucgucgccgacgaccucaccgccgccaucaacaagggcauccucgucaccgucaaccccaucgccuccaccaacgacgacgagguccucaucgaggucaacccccccuucggcgacuccuacaucaucgucggccgcggcgacucccgccucaccuaccaguggcacaaggagggcuccuccaucggcaagcucuucacccagaccaugaagggcgucgagcgccucgccgucaugggcgacaccgccugggacuucuccuccgccggcggcuucuucaccuccgucggcaagggcauccacaccgucuucggcuccgccuuccagggccucuucggcggccucaacuggaucaccaaggucaucaugggcgccguccucaucugggucggcaucaacacccgcaacaugaccauguccauguccaugauccucgucggcgucaucaugauguuccucucccucggcgucggcgccgaccagggcugcgccaucaacuucggcaagugaggacuagugcaucacauuuaaaagcaucucagccuaccaugagaauaagagaaagaaaaugaagaucaauagcuuauucaucucuuuuucuuuuucguugguguaaagccaacacccugucuaaaaaacauaaauuucuuuaaucauuuugccucuuuucucugugcuucaauuaauaaaaaauggaaagaaccuagaucuaaaaaaaaaaaaaaaaaaaaaaaaaaaaaaaaaaaaaaaaaaaaaaaaaaaaaaaaaaaaaaaaugcaucccccccccccccccccccccccccccccccaaaggcucuuuucagagccaccagaauu

SEQ ID NO: 1097 - RNA, 2428 nt, Artificial Sequence
  mRNA product Design i-2 comprising derived and/or modified sequence from YFV__NC_002031.1__SSjev-prME (polyprotein: aa122-778) (opt2)
ggggcgcugccuacggagguggcagccaucuccuucucggcaucaagcuuaccaugggcaagcgcuccgccggcuccaucauguggcucgccucccucgccgucgucaucgccugcgccggcgccgucacccucguccgcaagaaccgcuggcuccuccucaacgucaccuccgaggaccucggcaagaccuucuccgucggcaccggcaacugcaccaccaacauccucgaggccaaguacuggugccccgacuccauggaguacaacugccccaaccucuccccccgcgaggagcccgacgacaucgacugcuggugcuacggcgucgagaacguccgcgucgccuacggcaagugcgacuccgccggccgcucccgccgcucccgccgcgccaucgaccuccccacccacgagaaccacggccucaagacccgccaggagaaguggaugaccggccgcaugggcgagcgccagcuccagaagaucgagcgcugguucguccgcaaccccuucuucgccgucaccgcccucaccaucgccuaccucgucggcuccaacaugacccagcgcgucgucaucgcccuccucguccucgccgucggccccgccuacuccgcccacugcaucggcaucaccgaccgcgacuucaucgagggcguccacggcggcaccugggucuccgccacccucgagcaggacaagugcgucaccgucauggcccccgacaagcccucccucgacaucucccucgagaccgucgccaucgaccgccccgccgagguccgcaaggucugcuacaacgccguccucacccacgucaagaucaacgacaagugccccuccaccggcgaggcccaccucgccgaggagaacgagggcgacaacgccugcaagcgcaccuacuccgaccgcggcuggggcaacggcugcggccucuucggcaagggcuccaucgucgccugcgccaaguucaccugcgccaaguccaugucccucuucgaggucgaccagaccaagauccaguacgucauccgcgcccagcuccacgucggcgccaagcaggagaacuggaacaccgacaucaagacccucaaguucgacgcccucuccggcucccaggaggucgaguucaucggcuacggcaaggccacccucgagugccagguccagaccgccgucgacuucggcaacuccuacaucgccgagauggagaccgaguccuggaucgucgaccgccagugggcccaggaccucacccuccccuggcaguccggcuccggcggcgucuggcgcgagaugcaccaccucgucgaguucgagcccccccacgccgccaccauccgcguccucgcccucggcaaccaggagggcucccucaagaccgcccucaccggcgccaugcgcgucaccaaggacaccaacgacaacaaccucuacaagcuccacggcggccacgucuccugccgcgucaagcucuccgcccucacccucaagggcaccuccuacaagaucugcaccgacaagauguucuucgucaagaaccccaccgacaccggccacggcaccgucgucaugcaggucaaggucuccaagggcgcccccugccgcauccccgucaucgucgccgacgaccucaccgccgccaucaacaagggcauccucgucaccgucaaccccaucgccuccaccaacgacgacgagguccucaucgaggucaacccccccuucggcgacuccuacaucaucgucggccgcggcgacucccgccucaccuaccaguggcacaaggagggcuccuccaucggcaagcucuucacccagaccaugaagggcgucgagcgccucgccgucaugggcgacaccgccugggacuucuccuccgccggcggcuucuucaccuccgucggcaagggcauccacaccgucuucggcuccgccuuccagggccucuucggcggccucaacuggaucaccaaggucaucaugggcgccguccucaucugggucggcaucaacacccgcaacaugaccauguccauguccaugauccucgucggcgucaucaugauguuccucucccucggcgucggcgccugaggacuagugcaucacauuuaaaagcaucucagccuaccaugagaauaagagaaagaaaaugaagaucaauagcuuauucaucucuuuuucuuuuucguugguguaaagccaacacccugucuaaaaaacauaaauuucuuuaaucauuuugccucuuuucucugugcuucaauuaauaaaaaauggaaagaaccuagaucuaaaaaaaaaaaaaaaaaaaaaaaaaaaaaaaaaaaaaaaaaaaaaaaaaaaaaaaaaaaaaaaaugcaucccccccccccccccccccccccccccccccaaaggcucuuuucagagccaccagaauu

SEQ ID NO: 1098 - RNA, 2476 nt, Artificial Sequence
  mRNA product Design i-2 comprising derived and/or modified sequence from YFV__NC_002031.1__X-SS-prME-XX (polyprotein: aa92-788) (opt3)
ggggcgcugccuacggagguggcagccaucuccuucucggcaucaagcuuaccaugagaggccugagcuccaggaagcggcgcucucacgacgugcucaccguccaguuccuuauccuggggauguuguuaaugacaggagguguuacucuggugcguaaaaaccgauggcuacuccugaauguaacgucagaggaucuuggcaagaccuuuaguguggggacaggaaacugcacuaccaauauucuggaagccaaauacuggugucccgacagcauggaguauaacugcccuaauuuguccccaagagaggaaccggaugacauagauuguuggugcuacggcgucgaaaacgugaggguugcuuaugguaagugugacucugcagggcggucgcgcagaucaaggcgggccaucgaucuccccacacaugagaaucacggacugaaaacccgccaagagaaguggaugacuggccgaaugggcgaaagacagcugcagaagauugagaggugguucgugcggaacccuuucuucgcggucacagcucucaccaucgccuacuuaguggggagcaauaugacgcagcguguaguuauugcacugcuuguguuggccgucggaccagcuuauagugcacauugcaucgguauaacugaccgcgauuuuaucgaaggcgugcacgggggaaccuggguguccgccacacuggagcaagacaaaugugucacuguuauggcucccgauaagccuucucuagacauuagccucgagaccguggccaucgauagaccagcggaaguaaggaaagugugcuacaacgcaguccugacacaugugaagauuaaugacaaaugucccuccaccggcgaggcccaccuugcugaagagaacgaaggugacaaugccugcaagcggacguauucagaucgaggguggggaaacggcuguggccuguucgggaagggaaguaucguugcaugcgcuaaauuuacuugcgccaagagcaugucuuuguucgagguggaccagacaaaaauacaguacgucauucgcgcgcagcuccacgugggugccaagcaagagaauuggaacaccgauaucaaaacucugaaguuugacgcauuauccggcucacaggaaguagaguucauuggguacggaaaagcuacacuggaaugucagguucagaccgccguggauuuuggcaacagcuauaucgcugagauggaaacggagaguuggaucgucgacagacaaugggcccaggaucucacccuuccuuggcagucugguuccgggggcguguggagggagaugcaucaccuggucgaauuugagccaccgcaugcagccacaauucggguguuggcucuaggaaaucaagaaggcagccugaagacugcgcucaccggggcaaugcgcguuacaaaggacacuaacgauaauaaccuguacaaacuucacggaggucacgugucgugcagaguaaagcugucugccuugacccucaaaggcacauccuauaagauauguaccgacaaaauguuuuucgucaagaaucccacugauacggggcauggaacagugguuaugcaagugaaggucucaaaaggcgcuccuugcaggaucccagugauuguagccgacgaccugaccgcagccaucaacaaggguauauuagugacuguuaaucccauugcuaguaccaacgaugacgagguccugaucgaagugaauccuccauucggggauagcuacaucauugugggccguggagacucccggcuaacauaucaguggcacaaagagggcucuagcaucgggaagcucuuuacccagacuaugaaaggagucgagcgacuggccguuaugggugauacagcaugggacuucucaagugcgggcggguuuuucacguccgugggaaagggcauucauaccguguuugguagcgcuuuccaggggcuuuuuggcggauugaacuggauaacuaagguaaucaugggcgccguccugauuuggguggggaucaauacaagaaacaugaccaugucuaugucaaugauccucguuggagugauuaugauguuccugagucuuggcgucggugcagaucaggggugugccauaaauuuuggaaaaugaggacuagugcaucacauuuaaaagcaucucagccuaccaugagaauaagagaaagaaaaugaagaucaauagcuuauucaucucuuuuucuuuuucguugguguaaagccaacacccugucuaaaaaacauaaauuucuuuaaucauuuugccucuuuucucugugcuucaauuaauaaaaaauggaaagaaccuagaucuaaaaaaaaaaaaaaaaaaaaaaaaaaaaaaaaaaaaaaaaaaaaaaaaaaaaaaaaaaaaaaaaugcaucccccccccccccccccccccccccccccccaaaggcucuuuucagagccaccagaauu

SEQ ID NO: 1099 - RNA, 2413 nt, Artificial Sequence
  mRNA product Design i-2 comprising derived and/or modified sequence from YFV__NC_002031.1__SS-prME (polyprotein: M,aa104-778) (opt3)
ggggcgcugccuacggagguggcagccaucuccuucucggcaucaagcuuaccauggacgugcugaccguccaguuccucauccuuggcaugcuguugaugacagggggaguuacuuuagugagaaagaacagguggcugcuacucaauguaacgagcgaggaucuggguaaaaccuuuuccgugggcacagggaacugcacuaccaauauucuugaagccaaguacuggugucccgacucuauggaguauaacugcccuaaucugucaccacgggaggaaccggaugacauagauuguuggugcuacggagucgaaaacgugcgcguugcuuauggcaaaugugacagugcaggucgaagccguagauccaggcgggccaucgauuugcccacacacgagaaucaugggcucaagacccgccaagagaaauggaugacuggaagaaugggcgaaaggcagcugcagaagauugagcggugguucgugcgcaacccuuucuucgcggucacagcucugaccaucgccuaccucgugggcucuaauaugacgcagcgaguaguuauugcauuacuggugcuugccgucgggccagcuuauucggcacacugcaucggaauaacugacagagauuuuaucgaaggugugcauggcgggaccugggugucagccacauuggagcaagacaagugugucacuguuauggcucccgauaaaccuagccuggacauuagucuagagaccguggccaucgauaggccagcggaaguacggaaggugugcuacaacgcaguccucacacacgugaaaauuaaugacaagugucccuccaccggagaggcccaucuggcugaagagaacgaaggcgacaaugccugcaaacguacguauucugaucgcgguugggggaacggauguggccuuuucggcaaggggagcaucguugcaugcgcuaaguuuacuugcgccaaauccaugucacuguucgagguggaccagacaaagauacaguacgucauuagagcgcaguugcacgugggagccaaacaagagaauuggaacaccgauaucaagacucucaaauuugacgcacugagugguagccaggaaguagaguucauuggcuacgggaaggcuacauuagaaugucagguucagaccgccguggauuuuggaaacucuuauaucgcugagauggaaacggaguccuggaucgucgacaggcaaugggcccaggaucugacccucccuuggcagucaggcagcggugggguguggcgggagaugcaccaucuugucgaauuugagccaccgcacgcagccacaauucgagugcuggcuuugggcaaucaagaaggaagucuaaaaacugcgcugaccggcgcaaugcgcguuacaaaggacacuaacgauaauaaccucuacaagcugcaugggggacacgugucuugcagaguaaaacuuuccgcccugaccuugaaggguacaagcuauaaaauauguaccgacaagauguuuuucgucaaaaaucccacugauacgggccacgggacagugguuaugcaagugaaggucucgaagggagcuccuugcaggaucccagugauuguagccgacgaccucaccgcagccaucaacaaaggcauacuggugacuguuaaucccauugcuucuaccaacgaugacgaggucuuaaucgaagugaauccuccauucggugauuccuacaucauuguggggcggggcgacucacgccugacauaucaguggcauaaggagggaaguagcaucggcaaacuauuuacccagacuaugaagggggucgagagacucgccguuaugggagauacagcaugggacuucuccucugcggguggcuuuuucacgagcguggggaaaggcauucacaccguguuuggaucagcuuuccagggucuguuugggggccuuaacuggauaacuaagguaaucaugggagccgucuugauuugggugggcaucaauacaaggaacaugaccaugaguauguccaugauccugguuggggugauuaugauguuccucagccugggagucggcgcaugaggacuagugcaucacauuuaaaagcaucucagccuaccaugagaauaagagaaagaaaaugaagaucaauagcuuauucaucucuuuuucuuuuucguugguguaaagccaacacccugucuaaaaaacauaaauuucuuuaaucauuuugccucuuuucucugugcuucaauuaauaaaaaauggaaagaaccuagaucuaaaaaaaaaaaaaaaaaaaaaaaaaaaaaaaaaaaaaaaaaaaaaaaaaaaaaaaaaaaaaaaaugcaucccccccccccccccccccccccccccccccaaaggcucuuuucagagccaccagaauu

SEQ ID NO: 1100 - RNA, 2440 nt, Artificial Sequence
  mRNA product Design i-2 comprising derived and/or modified sequence from YFV__NC_002031.1__SSIgE-prME-XX (polyprotein: aa122-788) (opt3)
ggggcgcugccuacggagguggcagccaucuccuucucggcaucaagcuuaccauggacuggaccuggauccuguuccucguggccgcugcaacaagaguccacagcguuacucuggugcguaaaaaccgauggcuacuccugaauguaacgucagaggaucuuggcaagaccuuuaguguggggacaggaaacugcacuaccaauauucuggaagccaaauacuggugucccgacagcauggaguauaacugcccuaauuuguccccaagagaggaaccggaugacauagauuguuggugcuacggcgucgaaaacgugaggguugcuuaugguaagugugacucugcagggcggucgcgcagaucaaggcgggccaucgaucuccccacacaugagaaucacggacugaaaacccgccaagagaaguggaugacuggccgaaugggcgaaagacagcugcagaagauugagaggugguucgugcggaacccuuucuucgcggucacagcucucaccaucgccuacuuaguggggagcaauaugacgcagcguguaguuauugcacugcuuguguuggccgucggaccagcuuauagugcacauugcaucgguauaacugaccgcgauuuuaucgaaggcgugcacgggggaaccuggguguccgccacacuggagcaagacaaaugugucacuguuauggcucccgauaagccuucucuagacauuagccucgagaccguggccaucgauagaccagcggaaguaaggaaagugugcuacaacgcaguccugacacaugugaagauuaaugacaaaugucccuccaccggcgaggcccaccuugcugaagagaacgaaggugacaaugccugcaagcggacguauucagaucgaggguggggaaacggcuguggccuguucgggaagggaaguaucguugcaugcgcuaaauuuacuugcgccaagagcaugucuuuguucgagguggaccagacaaaaauacaguacgucauucgcgcgcagcuccacgugggugccaagcaagagaauuggaacaccgauaucaaaacucugaaguuugacgcauuauccggcucacaggaaguagaguucauuggguacggaaaagcuacacuggaaugucagguucagaccgccguggauuuuggcaacagcuauaucgcugagauggaaacggagaguuggaucgucgacagacaaugggcccaggaucucacccuuccuuggcagucugguuccgggggcguguggagggagaugcaucaccuggucgaauuugagccaccgcaugcagccacaauucggguguuggcucuaggaaaucaagaaggcagccugaagacugcgcucaccggggcaaugcgcguuacaaaggacacuaacgauaauaaccuguacaaacuucacggaggucacgugucgugcagaguaaagcugucugccuugacccucaaaggcacauccuauaagauauguaccgacaaaauguuuuucgucaagaaucccacugauacggggcauggaacagugguuaugcaagugaaggucucaaaaggcgcuccuugcaggaucccagugauuguagccgacgaccugaccgcagccaucaacaaggguauauuagugacuguuaaucccauugcuaguaccaacgaugacgagguccugaucgaagugaauccuccauucggggauagcuacaucauugugggccguggagacucccggcuaacauaucaguggcacaaagagggcucuagcaucgggaagcucuuuacccagacuaugaaaggagucgagcgacuggccguuaugggugauacagcaugggacuucucaagugcgggcggguuuuucacguccgugggaaagggcauucauaccguguuugguagcgcuuuccaggggcuuuuuggcggauugaacuggauaacuaagguaaucaugggcgccguccugauuuggguggggaucaauacaagaaacaugaccaugucuaugucaaugauccucguuggagugauuaugauguuccugagucuuggcgucggugcagaucaggggugugccauaaauuuuggaaaaugaggacuagugcaucacauuuaaaagcaucucagccuaccaugagaauaagagaaagaaaaugaagaucaauagcuuauucaucucuuuuucuuuuucguugguguaaagccaacacccugucuaaaaaacauaaauuucuuuaaucauuuugccucuuuucucugugcuucaauuaauaaaaaauggaaagaaccuagaucuaaaaaaaaaaaaaaaaaaaaaaaaaaaaaaaaaaaaaaaaaaaaaaaaaaaaaaaaaaaaaaaaugcaucccccccccccccccccccccccccccccccaaaggcucuuuucagagccaccagaauu

SEQ ID NO: 1101 - RNA, 2410 nt, Artificial Sequence
  mRNA product Design i-2 comprising derived and/or modified sequence from YFV__NC_002031.1__SSIgE-prME (polyprotein: aa122-778) (opt3)
ggggcgcugccuacggagguggcagccaucuccuucucggcaucaagcuuaccauggacuggaccuggauccuguuccucguggccgcugcaacaagaguccacagcgugacccuggucagaaagaacagguggcuccuucugaauguuacaagcgaggacuugggcaaaacuuucuccguggggacgggaaacugcaccacaaauaucuuagaagccaaguacuggugucccgauucuauggaguauaacugcccuaaucugucaccacgggaggaaccggacgauauugacuguuggugcuacgguguagaaaacgugcgcgucgcuuauggcaaaugugauagugcagggcgaagccguagauccaggcgggccauagaccuacccacucacgagaaucauggacucaagacccgccaggagaaauggaugacaggcagaaugggugaaaggcaacugcagaagaucgagcggugguuugugcgcaacccuuucuuugcgguuaccgcucuuacuauugccuaccugguggggucuaauaugacacagcgagucgugaucgcauugcucguacuggccguuggaccagcuuauucggcacacugcauuggcaucaccgauagagacuucauagaaggcgugcaugggggaacgugggucucagccacucuggagcaggauaagugugugaccgugauggcucccgacaaaccuagccucgauaucaguuuagagacagucgccauugacaggccagcggaaguucggaaggugugcuacaacgcaguacugacucacgugaaaaucaaugauaagugucccuccaccggugaggcccaucuugcugaagagaacgaaggcgacaaugccugcaaacguacauauucugaccgcggguggggaaacggcugugguuuguuugggaagggaagcauugucgcaugcgcuaaguuuaccugcgccaaauccaugucacuguucgagguggaucaaacgaagauccaguacguuauaagagcgcagcuacacgugggcgccaaacaggagaauuggaacacugacauuaagacacucaaauucgaugcacugaguggcagccaagaagucgaguuuaucggguacggaaaggcuacccuugaaugucaggugcagacugccguagacuucgguaacucuuauauugcugagauggaaacagaguccuggaucguugauaggcagugggcccaagaccugaccuugccuuggcagucaggcagcgggggaguguggcgggagaugcaccaucucgucgaauuugagccaccgcacgcagccacgauccgagugcuggcuuuaggcaaucaggaagguagucugaaaaccgcgcucacaggggcaaugcgcgucacuaaggauaccaacgacaauaaccuuuacaagcugcauggcggacacgugucuugcagaguuaaauuguccgcccuaacacugaagggcacuagcuauaaaauuuguaccgauaagauguucuuugugaaaaaucccacagacaccgggcacggaacuguagucaugcaagugaagguuucgaagggugcuccuugcaggauaccagugaucgucgccgaugaccucacggcagccauuaacaaaggcauccuggugacaguaaaucccauagcuucuaccaacgacgaugaggugcuuauugaaguuaauccuccauucggggacuccuacaucaucgucggacggggcgauucacgccugacuuaucaguggcauaaggaggguaguagcauugggaaauuguucacccagacaaugaagggcguggagagacucgccgugaugggagacaccgcaugggauuuuuccucugcgggcggguucuuuacuagcgucggaaaagguauccacacaguuuucggcucagcuuuucaggggcuguucggaggcuuaaacuggauuacgaaggugauaaugggugccgugcugaucuggguagggauuaauaccaggaacaugacuaugaguauguccaugauccuagucggcgugaucaugauguuucucagccugggaguuggcgcaugaggacuagugcaucacauuuaaaagcaucucagccuaccaugagaauaagagaaagaaaaugaagaucaauagcuuauucaucucuuuuucuuuuucguugguguaaagccaacacccugucuaaaaaacauaaauuucuuuaaucauuuugccucuuuucucugugcuucaauuaauaaaaaauggaaagaaccuagaucuaaaaaaaaaaaaaaaaaaaaaaaaaaaaaaaaaaaaaaaaaaaaaaaaaaaaaaaaaaaaaaaaugcaucccccccccccccccccccccccccccccccaaaggcucuuuucagagccaccagaauu

SEQ ID NO: 1102 - RNA, 2458 nt, Artificial Sequence
  mRNA product Design i-2 comprising derived and/or modified sequence from YFV__NC_002031.1__SSjev-prME-XX (polyprotein: aa122-788) (opt3)
ggggcgcugccuacggagguggcagccaucuccuucucggcaucaagcuuaccaugggcaagagaagcgccggguccaucauguggcuggcuucucucgcaguggucauugccugcgcgggagcuguuacucuggugcguaaaaaccgauggcuacuccugaauguaacgucagaggaucuuggcaagaccuuuaguguggggacaggaaacugcacuaccaauauucuggaagccaaauacuggugucccgacagcauggaguauaacugcccuaauuuguccccaagagaggaaccggaugacauagauuguuggugcuacggcgucgaaaacgugaggguugcuuaugguaagugugacucugcagggcggucgcgcagaucaaggcgggccaucgaucuccccacacaugagaaucacggacugaaaacccgccaagagaaguggaugacuggccgaaugggcgaaagacagcugcagaagauugagaggugguucgugcggaacccuuucuucgcggucacagcucucaccaucgccuacuuaguggggagcaauaugacgcagcguguaguuauugcacugcuuguguuggccgucggaccagcuuauagugcacauugcaucgguauaacugaccgcgauuuuaucgaaggcgugcacgggggaaccuggguguccgccacacuggagcaagacaaaugugucacuguuauggcucccgauaagccuucucuagacauuagccucgagaccguggccaucgauagaccagcggaaguaaggaaagugugcuacaacgcaguccugacacaugugaagauuaaugacaaaugucccuccaccggcgaggcccaccuugcugaagagaacgaaggugacaaugccugcaagcggacguauucagaucgaggguggggaaacggcuguggccuguucgggaagggaaguaucguugcaugcgcuaaauuuacuugcgccaagagcaugucuuuguucgagguggaccagacaaaaauacaguacgucauucgcgcgcagcuccacgugggugccaagcaagagaauuggaacaccgauaucaaaacucugaaguuugacgcauuauccggcucacaggaaguagaguucauuggguacggaaaagcuacacuggaaugucagguucagaccgccguggauuuuggcaacagcuauaucgcugagauggaaacggagaguuggaucgucgacagacaaugggcccaggaucucacccuuccuuggcagucugguuccgggggcguguggagggagaugcaucaccuggucgaauuugagccaccgcaugcagccacaauucggguguuggcucuaggaaaucaagaaggcagccugaagacugcgcucaccggggcaaugcgcguuacaaaggacacuaacgauaauaaccuguacaaacuucacggaggucacgugucgugcagaguaaagcugucugccuugacccucaaaggcacauccuauaagauauguaccgacaaaauguuuuucgucaagaaucccacugauacggggcauggaacagugguuaugcaagugaaggucucaaaaggcgcuccuugcaggaucccagugauuguagccgacgaccugaccgcagccaucaacaaggguauauuagugacuguuaaucccauugcuaguaccaacgaugacgagguccugaucgaagugaauccuccauucggggauagcuacaucauugugggccguggagacucccggcuaacauaucaguggcacaaagagggcucuagcaucgggaagcucuuuacccagacuaugaaaggagucgagcgacuggccguuaugggugauacagcaugggacuucucaagugcgggcggguuuuucacguccgugggaaagggcauucauaccguguuugguagcgcuuuccaggggcuuuuuggcggauugaacuggauaacuaagguaaucaugggcgccguccugauuuggguggggaucaauacaagaaacaugaccaugucuaugucaaugauccucguuggagugauuaugauguuccugagucuuggcgucggugcagaucaggggugugccauaaauuuuggaaaaugaggacuagugcaucacauuuaaaagcaucucagccuaccaugagaauaagagaaagaaaaugaagaucaauagcuuauucaucucuuuuucuuuuucguugguguaaagccaacacccugucuaaaaaacauaaauuucuuuaaucauuuugccucuuuucucugugcuucaauuaauaaaaaauggaaagaaccuagaucuaaaaaaaaaaaaaaaaaaaaaaaaaaaaaaaaaaaaaaaaaaaaaaaaaaaaaaaaaaaaaaaaugcaucccccccccccccccccccccccccccccccaaaggcucuuuucagagccaccagaauu

SEQ ID NO: 1103 - RNA, 2428 nt, Artificial Sequence
  mRNA product Design i-2 comprising derived and/or modified sequence from YFV__NC_002031.1__SSjev-prME (polyprotein: aa122-778) (opt3)
ggggcgcugccuacggagguggcagccaucuccuucucggcaucaagcuuaccaugggcaagagaagcgccggguccaucauguggcuggcuucucucgcaguggucauugccugcgcgggagcugugacccuggucagaaagaacagguggcuccuucugaauguuacaagcgaggacuugggcaaaacuuucuccguggggacgggaaacugcaccacaaauaucuuagaagccaaguacuggugucccgauucuauggaguauaacugcccuaaucugucaccacgggaggaaccggacgauauugacuguuggugcuacgguguagaaaacgugcgcgucgcuuauggcaaaugugauagugcagggcgaagccguagauccaggcgggccauagaccuacccacucacgagaaucauggacucaagacccgccaggagaaauggaugacaggcagaaugggugaaaggcaacugcagaagaucgagcggugguuugugcgcaacccuuucuuugcgguuaccgcucuuacuauugccuaccugguggggucuaauaugacacagcgagucgugaucgcauugcucguacuggccguuggaccagcuuauucggcacacugcauuggcaucaccgauagagacuucauagaaggcgugcaugggggaacgugggucucagccacucuggagcaggauaagugugugaccgugauggcucccgacaaaccuagccucgauaucaguuuagagacagucgccauugacaggccagcggaaguucggaaggugugcuacaacgcaguacugacucacgugaaaaucaaugauaagugucccuccaccggugaggcccaucuugcugaagagaacgaaggcgacaaugccugcaaacguacauauucugaccgcggguggggaaacggcugugguuuguuugggaagggaagcauugucgcaugcgcuaaguuuaccugcgccaaauccaugucacuguucgagguggaucaaacgaagauccaguacguuauaagagcgcagcuacacgugggcgccaaacaggagaauuggaacacugacauuaagacacucaaauucgaugcacugaguggcagccaagaagucgaguuuaucggguacggaaaggcuacccuugaaugucaggugcagacugccguagacuucgguaacucuuauauugcugagauggaaacagaguccuggaucguugauaggcagugggcccaagaccugaccuugccuuggcagucaggcagcgggggaguguggcgggagaugcaccaucucgucgaauuugagccaccgcacgcagccacgauccgagugcuggcuuuaggcaaucaggaagguagucugaaaaccgcgcucacaggggcaaugcgcgucacuaaggauaccaacgacaauaaccuuuacaagcugcauggcggacacgugucuugcagaguuaaauuguccgcccuaacacugaagggcacuagcuauaaaauuuguaccgauaagauguucuuugugaaaaaucccacagacaccgggcacggaacuguagucaugcaagugaagguuucgaagggugcuccuugcaggauaccagugaucgucgccgaugaccucacggcagccauuaacaaaggcauccuggugacaguaaaucccauagcuucuaccaacgacgaugaggugcuuauugaaguuaauccuccauucggggacuccuacaucaucgucggacggggcgauucacgccugacuuaucaguggcauaaggaggguaguagcauugggaaauuguucacccagacaaugaagggcguggagagacucgccgugaugggagacaccgcaugggauuuuuccucugcgggcggguucuuuacuagcgucggaaaagguauccacacaguuuucggcucagcuuuucaggggcuguucggaggcuuaaacuggauuacgaaggugauaaugggugccgugcugaucuggguagggauuaauaccaggaacaugacuaugaguauguccaugauccuagucggcgugaucaugauguuucucagccugggaguuggcgcaugaggacuagugcaucacauuuaaaagcaucucagccuaccaugagaauaagagaaagaaaaugaagaucaauagcuuauucaucucuuuuucuuuuucguugguguaaagccaacacccugucuaaaaaacauaaauuucuuuaaucauuuugccucuuuucucugugcuucaauuaauaaaaaauggaaagaaccuagaucuaaaaaaaaaaaaaaaaaaaaaaaaaaaaaaaaaaaaaaaaaaaaaaaaaaaaaaaaaaaaaaaaugcaucccccccccccccccccccccccccccccccaaaggcucuuuucagagccaccagaauu

SEQ ID NO: 1104 - RNA, 2476 nt, Artificial Sequence
  mRNA product Design i-2 comprising derived and/or modified sequence from YFV__NC_002031.1__X-SS-prME-XX (polyprotein: aa92-788) (opt4)
ggggcgcugccuacggagguggcagccaucuccuucucggcaucaagcuuaccaugagaggccugagcagcagaaagagaagaagccacgacgugcugaccgugcaguuccugauccugggcaugcugcugaugaccggcggcgugacccuggugagaaagaacagauggcugcugcugaacgugaccagcgaggaccugggcaagaccuucagcgugggcaccggcaacugcaccaccaacauccuggaggccaaguacuggugccccgacagcauggaguacaacugccccaaccugagccccagagaggagcccgacgacaucgacugcuggugcuacggcguggagaacgugagaguggccuacggcaagugcgacagcgccggcagaagcagaagaagcagaagagccaucgaccugcccacccacgagaaccacggccugaagaccagacaggagaaguggaugaccggcagaaugggcgagagacagcugcagaagaucgagagaugguucgugagaaaccccuucuucgccgugaccgcccugaccaucgccuaccuggugggcagcaacaugacccagagaguggugaucgcccugcuggugcuggccgugggccccgccuacagcgcccacugcaucggcaucaccgacagagacuucaucgagggcgugcacggcggcaccugggugagcgccacccuggagcaggacaagugcgugaccgugauggcccccgacaagcccagccuggacaucagccuggagaccguggccaucgacagacccgccgaggugagaaaggugugcuacaacgccgugcugacccacgugaagaucaacgacaagugccccagcaccggcgaggcccaccuggccgaggagaacgagggcgacaacgccugcaagagaaccuacagcgacagaggcuggggcaacggcugcggccuguucggcaagggcagcaucguggccugcgccaaguucaccugcgccaagagcaugagccuguucgagguggaccagaccaagauccaguacgugaucagagcccagcugcacgugggcgccaagcaggagaacuggaacaccgacaucaagacccugaaguucgacgcccugagcggcagccaggagguggaguucaucggcuacggcaaggccacccuggagugccaggugcagaccgccguggacuucggcaacagcuacaucgccgagauggagaccgagagcuggaucguggacagacagugggcccaggaccugacccugcccuggcagagcggcagcggcggcguguggagagagaugcaccaccugguggaguucgagcccccccacgccgccaccaucagagugcuggcccugggcaaccaggagggcagccugaagaccgcccugaccggcgccaugagagugaccaaggacaccaacgacaacaaccuguacaagcugcacggcggccacgugagcugcagagugaagcugagcgcccugacccugaagggcaccagcuacaagaucugcaccgacaagauguucuucgugaagaaccccaccgacaccggccacggcaccguggugaugcaggugaaggugagcaagggcgcccccugcagaauccccgugaucguggccgacgaccugaccgccgccaucaacaagggcauccuggugaccgugaaccccaucgccagcaccaacgacgacgaggugcugaucgaggugaacccccccuucggcgacagcuacaucaucgugggcagaggcgacagcagacugaccuaccaguggcacaaggagggcagcagcaucggcaagcuguucacccagaccaugaagggcguggagagacuggccgugaugggcgacaccgccugggacuucagcagcgccggcggcuucuucaccagcgugggcaagggcauccacaccguguucggcagcgccuuccagggccuguucggcggccugaacuggaucaccaaggugaucaugggcgccgugcugaucugggugggcaucaacaccagaaacaugaccaugagcaugagcaugauccuggugggcgugaucaugauguuccugagccugggcgugggcgccgaccagggcugcgccaucaacuucggcaagugaggacuagugcaucacauuuaaaagcaucucagccuaccaugagaauaagagaaagaaaaugaagaucaauagcuuauucaucucuuuuucuuuuucguugguguaaagccaacacccugucuaaaaaacauaaauuucuuuaaucauuuugccucuuuucucugugcuucaauuaauaaaaaauggaaagaaccuagaucuaaaaaaaaaaaaaaaaaaaaaaaaaaaaaaaaaaaaaaaaaaaaaaaaaaaaaaaaaaaaaaaaugcaucccccccccccccccccccccccccccccccaaaggcucuuuucagagccaccagaauu

SEQ ID NO: 1105 - RNA, 2413 nt, Artificial Sequence
  mRNA product Design i-2 comprising derived and/or modified sequence from YFV__NC_002031.1__SS-prME (polyprotein: M,aa104-778) (opt4)
ggggcgcugccuacggagguggcagccaucuccuucucggcaucaagcuuaccauggacgugcugaccgugcaguuccugauccugggcaugcugcugaugaccggcggcgugacccuggugagaaagaacagauggcugcugcugaacgugaccagcgaggaccugggcaagaccuucagcgugggcaccggcaacugcaccaccaacauccuggaggccaaguacuggugccccgacagcauggaguacaacugccccaaccugagccccagagaggagcccgacgacaucgacugcuggugcuacggcguggagaacgugagaguggccuacggcaagugcgacagcgccggcagaagcagaagaagcagaagagccaucgaccugcccacccacgagaaccacggccugaagaccagacaggagaaguggaugaccggcagaaugggcgagagacagcugcagaagaucgagagaugguucgugagaaaccccuucuucgccgugaccgcccugaccaucgccuaccuggugggcagcaacaugacccagagaguggugaucgcccugcuggugcuggccgugggccccgccuacagcgcccacugcaucggcaucaccgacagagacuucaucgagggcgugcacggcggcaccugggugagcgccacccuggagcaggacaagugcgugaccgugauggcccccgacaagcccagccuggacaucagccuggagaccguggccaucgacagacccgccgaggugagaaaggugugcuacaacgccgugcugacccacgugaagaucaacgacaagugccccagcaccggcgaggcccaccuggccgaggagaacgagggcgacaacgccugcaagagaaccuacagcgacagaggcuggggcaacggcugcggccuguucggcaagggcagcaucguggccugcgccaaguucaccugcgccaagagcaugagccuguucgagguggaccagaccaagauccaguacgugaucagagcccagcugcacgugggcgccaagcaggagaacuggaacaccgacaucaagacccugaaguucgacgcccugagcggcagccaggagguggaguucaucggcuacggcaaggccacccuggagugccaggugcagaccgccguggacuucggcaacagcuacaucgccgagauggagaccgagagcuggaucguggacagacagugggcccaggaccugacccugcccuggcagagcggcagcggcggcguguggagagagaugcaccaccugguggaguucgagcccccccacgccgccaccaucagagugcuggcccugggcaaccaggagggcagccugaagaccgcccugaccggcgccaugagagugaccaaggacaccaacgacaacaaccuguacaagcugcacggcggccacgugagcugcagagugaagcugagcgcccugacccugaagggcaccagcuacaagaucugcaccgacaagauguucuucgugaagaaccccaccgacaccggccacggcaccguggugaugcaggugaaggugagcaagggcgcccccugcagaauccccgugaucguggccgacgaccugaccgccgccaucaacaagggcauccuggugaccgugaaccccaucgccagcaccaacgacgacgaggugcugaucgaggugaacccccccuucggcgacagcuacaucaucgugggcagaggcgacagcagacugaccuaccaguggcacaaggagggcagcagcaucggcaagcuguucacccagaccaugaagggcguggagagacuggccgugaugggcgacaccgccugggacuucagcagcgccggcggcuucuucaccagcgugggcaagggcauccacaccguguucggcagcgccuuccagggccuguucggcggccugaacuggaucaccaaggugaucaugggcgccgugcugaucugggugggcaucaacaccagaaacaugaccaugagcaugagcaugauccuggugggcgugaucaugauguuccugagccugggcgugggcgccugaggacuagugcaucacauuuaaaagcaucucagccuaccaugagaauaagagaaagaaaaugaagaucaauagcuuauucaucucuuuuucuuuuucguugguguaaagccaacacccugucuaaaaaacauaaauuucuuuaaucauuuugccucuuuucucugugcuucaauuaauaaaaaauggaaagaaccuagaucuaaaaaaaaaaaaaaaaaaaaaaaaaaaaaaaaaaaaaaaaaaaaaaaaaaaaaaaaaaaaaaaaugcaucccccccccccccccccccccccccccccccaaaggcucuuuucagagccaccagaauu

SEQ ID NO: 1106 - RNA, 2440 nt, Artificial Sequence
  mRNA product Design i-2 comprising derived and/or modified sequence from YFV__NC_002031.1__SSIgE-prME-XX (polyprotein: aa122-788) (opt4)
ggggcgcugccuacggagguggcagccaucuccuucucggcaucaagcuuaccauggacuggaccuggauccuguuccugguggccgccgccaccagagugcacagcgugacccuggugagaaagaacagauggcugcugcugaacgugaccagcgaggaccugggcaagaccuucagcgugggcaccggcaacugcaccaccaacauccuggaggccaaguacuggugccccgacagcauggaguacaacugccccaaccugagccccagagaggagcccgacgacaucgacugcuggugcuacggcguggagaacgugagaguggccuacggcaagugcgacagcgccggcagaagcagaagaagcagaagagccaucgaccugcccacccacgagaaccacggccugaagaccagacaggagaaguggaugaccggcagaaugggcgagagacagcugcagaagaucgagagaugguucgugagaaaccccuucuucgccgugaccgcccugaccaucgccuaccuggugggcagcaacaugacccagagaguggugaucgcccugcuggugcuggccgugggccccgccuacagcgcccacugcaucggcaucaccgacagagacuucaucgagggcgugcacggcggcaccugggugagcgccacccuggagcaggacaagugcgugaccgugauggcccccgacaagcccagccuggacaucagccuggagaccguggccaucgacagacccgccgaggugagaaaggugugcuacaacgccgugcugacccacgugaagaucaacgacaagugccccagcaccggcgaggcccaccuggccgaggagaacgagggcgacaacgccugcaagagaaccuacagcgacagaggcuggggcaacggcugcggccuguucggcaagggcagcaucguggccugcgccaaguucaccugcgccaagagcaugagccuguucgagguggaccagaccaagauccaguacgugaucagagcccagcugcacgugggcgccaagcaggagaacuggaacaccgacaucaagacccugaaguucgacgcccugagcggcagccaggagguggaguucaucggcuacggcaaggccacccuggagugccaggugcagaccgccguggacuucggcaacagcuacaucgccgagauggagaccgagagcuggaucguggacagacagugggcccaggaccugacccugcccuggcagagcggcagcggcggcguguggagagagaugcaccaccugguggaguucgagcccccccacgccgccaccaucagagugcuggcccugggcaaccaggagggcagccugaagaccgcccugaccggcgccaugagagugaccaaggacaccaacgacaacaaccuguacaagcugcacggcggccacgugagcugcagagugaagcugagcgcccugacccugaagggcaccagcuacaagaucugcaccgacaagauguucuucgugaagaaccccaccgacaccggccacggcaccguggugaugcaggugaaggugagcaagggcgcccccugcagaauccccgugaucguggccgacgaccugaccgccgccaucaacaagggcauccuggugaccgugaaccccaucgccagcaccaacgacgacgaggugcugaucgaggugaacccccccuucggcgacagcuacaucaucgugggcagaggcgacagcagacugaccuaccaguggcacaaggagggcagcagcaucggcaagcuguucacccagaccaugaagggcguggagagacuggccgugaugggcgacaccgccugggacuucagcagcgccggcggcuucuucaccagcgugggcaagggcauccacaccguguucggcagcgccuuccagggccuguucggcggccugaacuggaucaccaaggugaucaugggcgccgugcugaucugggugggcaucaacaccagaaacaugaccaugagcaugagcaugauccuggugggcgugaucaugauguuccugagccugggcgugggcgccgaccagggcugcgccaucaacuucggcaagugaggacuagugcaucacauuuaaaagcaucucagccuaccaugagaauaagagaaagaaaaugaagaucaauagcuuauucaucucuuuuucuuuuucguugguguaaagccaacacccugucuaaaaaacauaaauuucuuuaaucauuuugccucuuuucucugugcuucaauuaauaaaaaauggaaagaaccuagaucuaaaaaaaaaaaaaaaaaaaaaaaaaaaaaaaaaaaaaaaaaaaaaaaaaaaaaaaaaaaaaaaaugcaucccccccccccccccccccccccccccccccaaaggcucuuuucagagccaccagaauu

SEQ ID NO: 1107 - RNA, 2410 nt, Artificial Sequence
  mRNA product Design i-2 comprising derived and/or modified sequence from YFV__NC_002031.1__SSIgE-prME (polyprotein: aa122-778) (opt4)
ggggcgcugccuacggagguggcagccaucuccuucucggcaucaagcuuaccauggacuggaccuggauccuguuccugguggccgccgccaccagagugcacagcgugacccuggugagaaagaacagauggcugcugcugaacgugaccagcgaggaccugggcaagaccuucagcgugggcaccggcaacugcaccaccaacauccuggaggccaaguacuggugccccgacagcauggaguacaacugccccaaccugagccccagagaggagcccgacgacaucgacugcuggugcuacggcguggagaacgugagaguggccuacggcaagugcgacagcgccggcagaagcagaagaagcagaagagccaucgaccugcccacccacgagaaccacggccugaagaccagacaggagaaguggaugaccggcagaaugggcgagagacagcugcagaagaucgagagaugguucgugagaaaccccuucuucgccgugaccgcccugaccaucgccuaccuggugggcagcaacaugacccagagaguggugaucgcccugcuggugcuggccgugggccccgccuacagcgcccacugcaucggcaucaccgacagagacuucaucgagggcgugcacggcggcaccugggugagcgccacccuggagcaggacaagugcgugaccgugauggcccccgacaagcccagccuggacaucagccuggagaccguggccaucgacagacccgccgaggugagaaaggugugcuacaacgccgugcugacccacgugaagaucaacgacaagugccccagcaccggcgaggcccaccuggccgaggagaacgagggcgacaacgccugcaagagaaccuacagcgacagaggcuggggcaacggcugcggccuguucggcaagggcagcaucguggccugcgccaaguucaccugcgccaagagcaugagccuguucgagguggaccagaccaagauccaguacgugaucagagcccagcugcacgugggcgccaagcaggagaacuggaacaccgacaucaagacccugaaguucgacgcccugagcggcagccaggagguggaguucaucggcuacggcaaggccacccuggagugccaggugcagaccgccguggacuucggcaacagcuacaucgccgagauggagaccgagagcuggaucguggacagacagugggcccaggaccugacccugcccuggcagagcggcagcggcggcguguggagagagaugcaccaccugguggaguucgagcccccccacgccgccaccaucagagugcuggcccugggcaaccaggagggcagccugaagaccgcccugaccggcgccaugagagugaccaaggacaccaacgacaacaaccuguacaagcugcacggcggccacgugagcugcagagugaagcugagcgcccugacccugaagggcaccagcuacaagaucugcaccgacaagauguucuucgugaagaaccccaccgacaccggccacggcaccguggugaugcaggugaaggugagcaagggcgcccccugcagaauccccgugaucguggccgacgaccugaccgccgccaucaacaagggcauccuggugaccgugaaccccaucgccagcaccaacgacgacgaggugcugaucgaggugaacccccccuucggcgacagcuacaucaucgugggcagaggcgacagcagacugaccuaccaguggcacaaggagggcagcagcaucggcaagcuguucacccagaccaugaagggcguggagagacuggccgugaugggcgacaccgccugggacuucagcagcgccggcggcuucuucaccagcgugggcaagggcauccacaccguguucggcagcgccuuccagggccuguucggcggccugaacuggaucaccaaggugaucaugggcgccgugcugaucugggugggcaucaacaccagaaacaugaccaugagcaugagcaugauccuggugggcgugaucaugauguuccugagccugggcgugggcgccugaggacuagugcaucacauuuaaaagcaucucagccuaccaugagaauaagagaaagaaaaugaagaucaauagcuuauucaucucuuuuucuuuuucguugguguaaagccaacacccugucuaaaaaacauaaauuucuuuaaucauuuugccucuuuucucugugcuucaauuaauaaaaaauggaaagaaccuagaucuaaaaaaaaaaaaaaaaaaaaaaaaaaaaaaaaaaaaaaaaaaaaaaaaaaaaaaaaaaaaaaaaugcaucccccccccccccccccccccccccccccccaaaggcucuuuucagagccaccagaauu

SEQ ID NO: 1108 - RNA, 2458 nt, Artificial Sequence
  mRNA product Design i-2 comprising derived and/or modified sequence from YFV__NC_002031.1__SSjev-prME-XX (polyprotein: aa122-788) (opt4)
ggggcgcugccuacggagguggcagccaucuccuucucggcaucaagcuuaccaugggcaagagaagcgccggcagcaucauguggcuggccagccuggccguggugaucgccugcgccggcgccgugacccuggugagaaagaacagauggcugcugcugaacgugaccagcgaggaccugggcaagaccuucagcgugggcaccggcaacugcaccaccaacauccuggaggccaaguacuggugccccgacagcauggaguacaacugccccaaccugagccccagagaggagcccgacgacaucgacugcuggugcuacggcguggagaacgugagaguggccuacggcaagugcgacagcgccggcagaagcagaagaagcagaagagccaucgaccugcccacccacgagaaccacggccugaagaccagacaggagaaguggaugaccggcagaaugggcgagagacagcugcagaagaucgagagaugguucgugagaaaccccuucuucgccgugaccgcccugaccaucgccuaccuggugggcagcaacaugacccagagaguggugaucgcccugcuggugcuggccgugggccccgccuacagcgcccacugcaucggcaucaccgacagagacuucaucgagggcgugcacggcggcaccugggugagcgccacccuggagcaggacaagugcgugaccgugauggcccccgacaagcccagccuggacaucagccuggagaccguggccaucgacagacccgccgaggugagaaaggugugcuacaacgccgugcugacccacgugaagaucaacgacaagugccccagcaccggcgaggcccaccuggccgaggagaacgagggcgacaacgccugcaagagaaccuacagcgacagaggcuggggcaacggcugcggccuguucggcaagggcagcaucguggccugcgccaaguucaccugcgccaagagcaugagccuguucgagguggaccagaccaagauccaguacgugaucagagcccagcugcacgugggcgccaagcaggagaacuggaacaccgacaucaagacccugaaguucgacgcccugagcggcagccaggagguggaguucaucggcuacggcaaggccacccuggagugccaggugcagaccgccguggacuucggcaacagcuacaucgccgagauggagaccgagagcuggaucguggacagacagugggcccaggaccugacccugcccuggcagagcggcagcggcggcguguggagagagaugcaccaccugguggaguucgagcccccccacgccgccaccaucagagugcuggcccugggcaaccaggagggcagccugaagaccgcccugaccggcgccaugagagugaccaaggacaccaacgacaacaaccuguacaagcugcacggcggccacgugagcugcagagugaagcugagcgcccugacccugaagggcaccagcuacaagaucugcaccgacaagauguucuucgugaagaaccccaccgacaccggccacggcaccguggugaugcaggugaaggugagcaagggcgcccccugcagaauccccgugaucguggccgacgaccugaccgccgccaucaacaagggcauccuggugaccgugaaccccaucgccagcaccaacgacgacgaggugcugaucgaggugaacccccccuucggcgacagcuacaucaucgugggcagaggcgacagcagacugaccuaccaguggcacaaggagggcagcagcaucggcaagcuguucacccagaccaugaagggcguggagagacuggccgugaugggcgacaccgccugggacuucagcagcgccggcggcuucuucaccagcgugggcaagggcauccacaccguguucggcagcgccuuccagggccuguucggcggccugaacuggaucaccaaggugaucaugggcgccgugcugaucugggugggcaucaacaccagaaacaugaccaugagcaugagcaugauccuggugggcgugaucaugauguuccugagccugggcgugggcgccgaccagggcugcgccaucaacuucggcaagugaggacuagugcaucacauuuaaaagcaucucagccuaccaugagaauaagagaaagaaaaugaagaucaauagcuuauucaucucuuuuucuuuuucguugguguaaagccaacacccugucuaaaaaacauaaauuucuuuaaucauuuugccucuuuucucugugcuucaauuaauaaaaaauggaaagaaccuagaucuaaaaaaaaaaaaaaaaaaaaaaaaaaaaaaaaaaaaaaaaaaaaaaaaaaaaaaaaaaaaaaaaugcaucccccccccccccccccccccccccccccccaaaggcucuuuucagagccaccagaauu

SEQ ID NO: 1109 - RNA, 2428 nt, Artificial Sequence
  mRNA product Design i-2 comprising derived and/or modified sequence from YFV__NC_002031.1__SSjev-prME (polyprotein: aa122-778) (opt4)
ggggcgcugccuacggagguggcagccaucuccuucucggcaucaagcuuaccaugggcaagagaagcgccggcagcaucauguggcuggccagccuggccguggugaucgccugcgccggcgccgugacccuggugagaaagaacagauggcugcugcugaacgugaccagcgaggaccugggcaagaccuucagcgugggcaccggcaacugcaccaccaacauccuggaggccaaguacuggugccccgacagcauggaguacaacugccccaaccugagccccagagaggagcccgacgacaucgacugcuggugcuacggcguggagaacgugagaguggccuacggcaagugcgacagcgccggcagaagcagaagaagcagaagagccaucgaccugcccacccacgagaaccacggccugaagaccagacaggagaaguggaugaccggcagaaugggcgagagacagcugcagaagaucgagagaugguucgugagaaaccccuucuucgccgugaccgcccugaccaucgccuaccuggugggcagcaacaugacccagagaguggugaucgcccugcuggugcuggccgugggccccgccuacagcgcccacugcaucggcaucaccgacagagacuucaucgagggcgugcacggcggcaccugggugagcgccacccuggagcaggacaagugcgugaccgugauggcccccgacaagcccagccuggacaucagccuggagaccguggccaucgacagacccgccgaggugagaaaggugugcuacaacgccgugcugacccacgugaagaucaacgacaagugccccagcaccggcgaggcccaccuggccgaggagaacgagggcgacaacgccugcaagagaaccuacagcgacagaggcuggggcaacggcugcggccuguucggcaagggcagcaucguggccugcgccaaguucaccugcgccaagagcaugagccuguucgagguggaccagaccaagauccaguacgugaucagagcccagcugcacgugggcgccaagcaggagaacuggaacaccgacaucaagacccugaaguucgacgcccugagcggcagccaggagguggaguucaucggcuacggcaaggccacccuggagugccaggugcagaccgccguggacuucggcaacagcuacaucgccgagauggagaccgagagcuggaucguggacagacagugggcccaggaccugacccugcccuggcagagcggcagcggcggcguguggagagagaugcaccaccugguggaguucgagcccccccacgccgccaccaucagagugcuggcccugggcaaccaggagggcagccugaagaccgcccugaccggcgccaugagagugaccaaggacaccaacgacaacaaccuguacaagcugcacggcggccacgugagcugcagagugaagcugagcgcccugacccugaagggcaccagcuacaagaucugcaccgacaagauguucuucgugaagaaccccaccgacaccggccacggcaccguggugaugcaggugaaggugagcaagggcgcccccugcagaauccccgugaucguggccgacgaccugaccgccgccaucaacaagggcauccuggugaccgugaaccccaucgccagcaccaacgacgacgaggugcugaucgaggugaacccccccuucggcgacagcuacaucaucgugggcagaggcgacagcagacugaccuaccaguggcacaaggagggcagcagcaucggcaagcuguucacccagaccaugaagggcguggagagacuggccgugaugggcgacaccgccugggacuucagcagcgccggcggcuucuucaccagcgugggcaagggcauccacaccguguucggcagcgccuuccagggccuguucggcggccugaacuggaucaccaaggugaucaugggcgccgugcugaucugggugggcaucaacaccagaaacaugaccaugagcaugagcaugauccuggugggcgugaucaugauguuccugagccugggcgugggcgccugaggacuagugcaucacauuuaaaagcaucucagccuaccaugagaauaagagaaagaaaaugaagaucaauagcuuauucaucucuuuuucuuuuucguugguguaaagccaacacccugucuaaaaaacauaaauuucuuuaaucauuuugccucuuuucucugugcuucaauuaauaaaaaauggaaagaaccuagaucuaaaaaaaaaaaaaaaaaaaaaaaaaaaaaaaaaaaaaaaaaaaaaaaaaaaaaaaaaaaaaaaaugcaucccccccccccccccccccccccccccccccaaaggcucuuuucagagccaccagaauu

SEQ ID NO: 1110 - RNA, 2476 nt, Artificial Sequence
  mRNA product Design i-2 comprising derived and/or modified sequence from YFV__NC_002031.1__X-SS-prME-XX (polyprotein: aa92-788) (opt5)
ggggcgcugccuacggagguggcagccaucuccuucucggcaucaagcuuaccaugagaggccugagcucccggaagcgcagaucucacgacgugcucaccguccaguuccugauccuugggaugcugcucaugacaggaggcguuacgcuggugcggaaaaaccgcuggcuucugcucaaugugaccagcgaggaucuggggaagacauuuuccgucggaaccggcaacugcacaaccaauauucuggaagccaaauacuggugucccgacucuauggaguauaacugcccuaaucucagcccgagagaagaacccgaugacaucgauuguuggugcuacgggguggaaaacguucggguggcuuauggaaagugugacuccgccggccgcucuagacggagccgcagagcgauugaucugccuacacaugagaaucacggccuuaaaacccggcaagagaaguggaugacggggcgcaugggagaaagacagcugcagaagaucgagcggugguucguccgcaaccccuuuuucgcugugaccgcccucacaauugccuaccugguuggcuccaauaugacccagagaguggucaucgcccuucuggugcucgcuguggggccugcuuauagcgcccauugcaucggaauuacagaccgggauuuuaucgaaggcguccacgggggaaccuggguuucugcgacgcuggagcaagacaaaugugugacagugauggcccccgauaagccuucccuggacauuagccucgagaccgucgcuaucgauagaccggccgaagugcgcaaaguuugcuacaacgcugugcugacacaugucaagauuaaugacaaaugucccucuaccggcgaggcccaccuugcggaagagaacgaaggcgacaaugccugcaagcggaccuauuccgauagaggguggggaaacggcugugggcuguucggaaagggcagcaucguggcuugcgccaaauuuacaugcgcuaagucuaugucccucuucgagguugaccagacgaaaauucaguacgugauccgcgcccagcugcacgucggggccaagcaagagaauuggaacaccgauaucaaaacacuuaaguuugacgcucugagcggaucccaggaaguggaguucauuggcuacggcaaagcgacccucgaaugucagguccagacagccguggauuuugggaacucuuauaucgcugagauggaaaccgagagcuggauuguugaccggcaaugggcccaggaucugacgcugccuuggcaguccggaagcggcgggguguggagagagaugcaucaccucgucgaguucgagcccccucaugccgcuacaauccgcgugcuggcccuuggaaaucaagaaggcucucugaagaccgcgcucaccggggcuaugcggguuacaaaggacaccaacgauaauaaccuguacaaacuucacggcggacacguguccugcagagucaagcugagcgcccucacacugaaaggcacgucuuauaagauuuguaccgacaaaauguuuuucgugaagaaucccacagauaccgggcauggaacagugguuaugcaggucaaggugagcaaaggcgccccgugccgcaucccugugaucgucgcugacgaccugaccgccgcuauuaacaaggggauccucgugacgguuaaucccauugccuccaccaacgaugacgaggugcugaucgaagucaauccucccuucggagauucuuacauuaucgugggccggggagacagcagacuuacauaucaguggcacaaagagggcuccagcaucggaaagcuguuuacccagacaaugaaaggcguugagcgccucgcggugaugggggauaccgccugggacuucucuuccgcuggaggcuuuuucacgagcgucgggaaggggauucauacaguguuuggcucugccuuccaagggcuguuuggcggacugaacuggaucaccaagguuauuaugggcgcugugcuuaucugggucgggauuaauacacggaacaugaccauguccaugagcaugauccucgugggagugauuaugauguuccugucccugggcgucggggccgaucagggaugugcgaucaauuuuggcaaaugaggacuagugcaucacauuuaaaagcaucucagccuaccaugagaauaagagaaagaaaaugaagaucaauagcuuauucaucucuuuuucuuuuucguugguguaaagccaacacccugucuaaaaaacauaaauuucuuuaaucauuuugccucuuuucucugugcuucaauuaauaaaaaauggaaagaaccuagaucuaaaaaaaaaaaaaaaaaaaaaaaaaaaaaaaaaaaaaaaaaaaaaaaaaaaaaaaaaaaaaaaaugcaucccccccccccccccccccccccccccccccaaaggcucuuuucagagccaccagaauu

SEQ ID NO: 1111 - RNA, 2413 nt, Artificial Sequence
  mRNA product Design i-2 comprising derived and/or modified sequence from YFV__NC_002031.1__SS-prME (polyprotein: M,aa104-778) (opt5)
ggggcgcugccuacggagguggcagccaucuccuucucggcaucaagcuuaccauggacgugcugaccguccaguuccucauccugggcaugcuucugaugacagggggaguuacgcucgugagaaagaaccgguggcugcuucugaaugugaccagcgaggaucucggcaaaacauuuuccgucgggaccggaaacugcacaaccaauauucuggaagccaaguacuggugucccgacucuauggaguauaacugcccuaaucugagcccgcgcgaagaacccgaugacaucgauuguuggugcuacggcguggaaaacguuagaguggcuuaugggaaaugugacuccgccggacggucucgcagaagccggcgcgcgauugaucucccuacacacgagaaucauggccugaagaccagacaagagaaauggaugacgggccggaugggggaacgccagcuucagaagaucgagagaugguucguccggaaccccuuuuucgcugugaccgcccugacaauugccuaccucguuggauccaauaugacccagcgcguggucaucgcucugcuugugcuggccgugggcccugcuuauucugcccacugcaucgggauuacagacagagauuuuaucgaaggaguccauggcgggaccuggguuagcgcgacgcucgagcaagacaagugugugacagugauggcccccgauaaaccuucccuggacauuagccuggagaccgucgcuaucgaucggccggccgaagugcgcaagguuugcuacaacgcugugcucacacacgucaaaauuaaugacaagugucccucuaccggagaggcccaucuggcggaagagaacgaaggcgacaaugccugcaaaagaaccuauuccgaucggggcugggggaacggauguggccuuuucgggaagggaagcaucguggcuugcgccaaguuuacaugcgcuaaaucuaugucccuguucgagguugaccagacgaagauucaguacgugaucagagcccagcuccacgucggcgccaaacaagagaauuggaacaccgauaucaagacacugaaauuugacgcucuuagcgggucucaggaaguggaguucauuggauacggcaaggcgacccuggaaugucagguccagacagccguggauuuuggcaacuccuauaucgcugagauggaaaccgagagcuggauuguugaccgccaaugggcccaggaucucacgcugccuuggcaguccgggucuggaggcguguggcgggagaugcaccaucuggucgaguucgagcccccucacgccgcuacaaucagagugcucgcccuggggaaucaagaaggaagccuuaaaaccgcgcugaccggcgcuaugcgcguuacaaaggacaccaacgauaauaaccucuacaagcugcaugggggccacguguccugccgggucaaacuuagcgcccugacacucaagggaacgucuuauaaaauuuguaccgacaagauguuuuucgugaaaaaucccacagauaccggccacgggacagugguuaugcaggucaagguguccaagggagccccgugcagaaucccugugaucgucgcugacgaccugaccgccgcuauuaacaaaggcauccuggugacgguuaaucccauugccagcaccaacgaugacgaggugcucaucgaagucaauccucccuucggggauucuuacauuaucgugggacgcggcgacagccggcugacauaucaguggcauaaggagggguccucuaucggcaaacuuuuuacccagacaaugaagggaguugagagacuggcggugaugggcgauaccgccugggacuucagcuccgcugggggauuuuucacgagcgucggcaaagggauucacacaguguuuggaucugccuuccaaggccucuuugggggccugaacuggaucaccaagguuauuaugggagcugugcugaucugggucggcauuaauacacgcaacaugaccauguccaugagcaugauccuugugggggugauuaugauguuccucucucugggagucggcgccugaggacuagugcaucacauuuaaaagcaucucagccuaccaugagaauaagagaaagaaaaugaagaucaauagcuuauucaucucuuuuucuuuuucguugguguaaagccaacacccugucuaaaaaacauaaauuucuuuaaucauuuugccucuuuucucugugcuucaauuaauaaaaaauggaaagaaccuagaucuaaaaaaaaaaaaaaaaaaaaaaaaaaaaaaaaaaaaaaaaaaaaaaaaaaaaaaaaaaaaaaaaugcaucccccccccccccccccccccccccccccccaaaggcucuuuucagagccaccagaauu

SEQ ID NO: 1112 - RNA, 2440 nt, Artificial Sequence
  mRNA product Design i-2 comprising derived and/or modified sequence from YFV__NC_002031.1__SSIgE-prME-XX (polyprotein: aa122-788) (opt5)
ggggcgcugccuacggagguggcagccaucuccuucucggcaucaagcuuaccauggacuggaccuggauccuguuccucguggccgcugccacaagaguccacagcguuacgcuggugcggaaaaaccgcuggcuucugcucaaugugaccagcgaggaucuggggaagacauuuuccgucggaaccggcaacugcacaaccaauauucuggaagccaaauacuggugucccgacucuauggaguauaacugcccuaaucucagcccgagagaagaacccgaugacaucgauuguuggugcuacgggguggaaaacguucggguggcuuauggaaagugugacuccgccggccgcucuagacggagccgcagagcgauugaucugccuacacaugagaaucacggccuuaaaacccggcaagagaaguggaugacggggcgcaugggagaaagacagcugcagaagaucgagcggugguucguccgcaaccccuuuuucgcugugaccgcccucacaauugccuaccugguuggcuccaauaugacccagagaguggucaucgcccuucuggugcucgcuguggggccugcuuauagcgcccauugcaucggaauuacagaccgggauuuuaucgaaggcguccacgggggaaccuggguuucugcgacgcuggagcaagacaaaugugugacagugauggcccccgauaagccuucccuggacauuagccucgagaccgucgcuaucgauagaccggccgaagugcgcaaaguuugcuacaacgcugugcugacacaugucaagauuaaugacaaaugucccucuaccggcgaggcccaccuugcggaagagaacgaaggcgacaaugccugcaagcggaccuauuccgauagaggguggggaaacggcugugggcuguucggaaagggcagcaucguggcuugcgccaaauuuacaugcgcuaagucuaugucccucuucgagguugaccagacgaaaauucaguacgugauccgcgcccagcugcacgucggggccaagcaagagaauuggaacaccgauaucaaaacacuuaaguuugacgcucugagcggaucccaggaaguggaguucauuggcuacggcaaagcgacccucgaaugucagguccagacagccguggauuuugggaacucuuauaucgcugagauggaaaccgagagcuggauuguugaccggcaaugggcccaggaucugacgcugccuuggcaguccggaagcggcgggguguggagagagaugcaucaccucgucgaguucgagcccccucaugccgcuacaauccgcgugcuggcccuuggaaaucaagaaggcucucugaagaccgcgcucaccggggcuaugcggguuacaaaggacaccaacgauaauaaccuguacaaacuucacggcggacacguguccugcagagucaagcugagcgcccucacacugaaaggcacgucuuauaagauuuguaccgacaaaauguuuuucgugaagaaucccacagauaccgggcauggaacagugguuaugcaggucaaggugagcaaaggcgccccgugccgcaucccugugaucgucgcugacgaccugaccgccgcuauuaacaaggggauccucgugacgguuaaucccauugccuccaccaacgaugacgaggugcugaucgaagucaauccucccuucggagauucuuacauuaucgugggccggggagacagcagacuuacauaucaguggcacaaagagggcuccagcaucggaaagcuguuuacccagacaaugaaaggcguugagcgccucgcggugaugggggauaccgccugggacuucucuuccgcuggaggcuuuuucacgagcgucgggaaggggauucauacaguguuuggcucugccuuccaagggcuguuuggcggacugaacuggaucaccaagguuauuaugggcgcugugcuuaucugggucgggauuaauacacggaacaugaccauguccaugagcaugauccucgugggagugauuaugauguuccugucccugggcgucggggccgaucagggaugugcgaucaauuuuggcaaaugaggacuagugcaucacauuuaaaagcaucucagccuaccaugagaauaagagaaagaaaaugaagaucaauagcuuauucaucucuuuuucuuuuucguugguguaaagccaacacccugucuaaaaaacauaaauuucuuuaaucauuuugccucuuuucucugugcuucaauuaauaaaaaauggaaagaaccuagaucuaaaaaaaaaaaaaaaaaaaaaaaaaaaaaaaaaaaaaaaaaaaaaaaaaaaaaaaaaaaaaaaaugcaucccccccccccccccccccccccccccccccaaaggcucuuuucagagccaccagaauu

SEQ ID NO: 1113 - RNA, 2410 nt, Artificial Sequence
  mRNA product Design i-2 comprising derived and/or modified sequence from YFV__NC_002031.1__SSIgE-prME (polyprotein: aa122-778) (opt5)
ggggcgcugccuacggagguggcagccaucuccuucucggcaucaagcuuaccauggacuggaccuggauccuguuccucguggccgcugccacaagaguccacagcgugacccuggucagaaagaaccgguggcuccugcuuaauguuacaagcgaggaccugggcaaaacguucuccguggggaccggaaacugcacaaccaauauccucgaagccaaguacuggugucccgauucuauggaguauaacugcccuaaucugagcccgcgcgaggaacccgacgauauugacuguuggugcuacggcguggaaaacgucagaguggcuuaugggaaaugugauuccgccggacggucucgcagaagccggcgcgcgaucgaccuuccuacacacgagaaucauggccugaagaccagacaggagaaauggaugacagggcggaugggagaacgccaacuccagaagauugagagaugguuuguucggaaccccuucuuugcugugaccgcccugacgaucgccuaccuggucggcuccaauaugacccagcgcgugguuauugcucuccuggugcuugccgucggcccugcuuauucugcccacugcaucgggaucacagauagagacuucauugaaggagugcauggcgggaccugggugagcgcgacacuggagcaggauaagugugucaccguuauggcccccgacaaaccuucccucgauaucagccuggagacgguggcuauugaccggccggccgaagugcgcaaggucugcuacaacgcugugcuuacacacguuaaaaucaaugauaagugucccucuaccggagaggcccaucuggcggaagagaacgaaggcgacaaugccugcaaaagaacauauuccgaccggggguggggaaacggcuguggccucuuugggaagggaagcauuguggcuugcgccaaguuuaccugcgcuaaaucuaugucccuguucgaggucgaucaaaccaagauccaguacgugauuagagcccagcugcacguuggcgccaaacaggagaauuggaacacagacaucaagacgcucaaauucgaugcucugagcgggucucaagaaguggaguuuaucggauacggcaaggcgacccuugaaugucagguccagacagccguggacuucgggaacuccuauauugcugagauggaaaccgagagcuggaucgucgaucgccagugggcccaagaccugacacucccuuggcaguccggaucuggcggcguguggcgggagaugcaccaucugguugaauuugagcccccucacgccgcuaccauuagagugcuugcccuggggaaucaggaaggaagccucaaaacggcgcugacaggcgcuaugcgcgucaccaaggauaccaacgacaauaaccuguacaagcuccaugggggacacguguccugccggguuaaacugagcgcccuuacacugaagggcaccucuuauaaaaucuguacagauaagauguucuuugugaaaaaucccacggacaccgggcacggcacagucgugaugcaagugaagguuuccaagggagccccgugccgcauuccugucaucguggcugaugaccucaccgccgcuaucaacaaaggcauucuggugacagucaaucccaucgccagcaccaacgacgaugaggugcuuauugaaguuaauccucccuucggggacucuuacaucauugugggaagaggcgauagccggcugacguaucaguggcauaaggagggguccucuaucggaaaacucuucacccagacaaugaagggcgucgagagacuggcggugaugggggacaccgccugggauuuuagcuccgcuggcggauucuuuacaagcguuggcaaagggauccacaccguguucggaucugccuuucagggccuguucgggggacucaacuggauuacgaaggucaucaugggcgcugugcugauuuggguugggaucaauacacgcaacaugaccauguccaugagcaugauucuugugggcgucaucaugauguuucugucucucggagugggcgccugaggacuagugcaucacauuuaaaagcaucucagccuaccaugagaauaagagaaagaaaaugaagaucaauagcuuauucaucucuuuuucuuuuucguugguguaaagccaacacccugucuaaaaaacauaaauuucuuuaaucauuuugccucuuuucucugugcuucaauuaauaaaaaauggaaagaaccuagaucuaaaaaaaaaaaaaaaaaaaaaaaaaaaaaaaaaaaaaaaaaaaaaaaaaaaaaaaaaaaaaaaaugcaucccccccccccccccccccccccccccccccaaaggcucuuuucagagccaccagaauu

SEQ ID NO: 1114 - RNA, 2458 nt, Artificial Sequence
  mRNA product Design i-2 comprising derived and/or modified sequence from YFV__NC_002031.1__SSjev-prME-XX (polyprotein: aa122-788) (opt5)
ggggcgcugccuacggagguggcagccaucuccuucucggcaucaagcuuaccaugggcaagagaagcgccggguccaucauguggcuggcuucucucgccguggucauugcgugcgcuggagccguuacgcuggugcggaaaaaccgcuggcuucugcucaaugugaccagcgaggaucuggggaagacauuuuccgucggaaccggcaacugcacaaccaauauucuggaagccaaauacuggugucccgacucuauggaguauaacugcccuaaucucagcccgagagaagaacccgaugacaucgauuguuggugcuacgggguggaaaacguucggguggcuuauggaaagugugacuccgccggccgcucuagacggagccgcagagcgauugaucugccuacacaugagaaucacggccuuaaaacccggcaagagaaguggaugacggggcgcaugggagaaagacagcugcagaagaucgagcggugguucguccgcaaccccuuuuucgcugugaccgcccucacaauugccuaccugguuggcuccaauaugacccagagaguggucaucgcccuucuggugcucgcuguggggccugcuuauagcgcccauugcaucggaauuacagaccgggauuuuaucgaaggcguccacgggggaaccuggguuucugcgacgcuggagcaagacaaaugugugacagugauggcccccgauaagccuucccuggacauuagccucgagaccgucgcuaucgauagaccggccgaagugcgcaaaguuugcuacaacgcugugcugacacaugucaagauuaaugacaaaugucccucuaccggcgaggcccaccuugcggaagagaacgaaggcgacaaugccugcaagcggaccuauuccgauagaggguggggaaacggcugugggcuguucggaaagggcagcaucguggcuugcgccaaauuuacaugcgcuaagucuaugucccucuucgagguugaccagacgaaaauucaguacgugauccgcgcccagcugcacgucggggccaagcaagagaauuggaacaccgauaucaaaacacuuaaguuugacgcucugagcggaucccaggaaguggaguucauuggcuacggcaaagcgacccucgaaugucagguccagacagccguggauuuugggaacucuuauaucgcugagauggaaaccgagagcuggauuguugaccggcaaugggcccaggaucugacgcugccuuggcaguccggaagcggcgggguguggagagagaugcaucaccucgucgaguucgagcccccucaugccgcuacaauccgcgugcuggcccuuggaaaucaagaaggcucucugaagaccgcgcucaccggggcuaugcggguuacaaaggacaccaacgauaauaaccuguacaaacuucacggcggacacguguccugcagagucaagcugagcgcccucacacugaaaggcacgucuuauaagauuuguaccgacaaaauguuuuucgugaagaaucccacagauaccgggcauggaacagugguuaugcaggucaaggugagcaaaggcgccccgugccgcaucccugugaucgucgcugacgaccugaccgccgcuauuaacaaggggauccucgugacgguuaaucccauugccuccaccaacgaugacgaggugcugaucgaagucaauccucccuucggagauucuuacauuaucgugggccggggagacagcagacuuacauaucaguggcacaaagagggcuccagcaucggaaagcuguuuacccagacaaugaaaggcguugagcgccucgcggugaugggggauaccgccugggacuucucuuccgcuggaggcuuuuucacgagcgucgggaaggggauucauacaguguuuggcucugccuuccaagggcuguuuggcggacugaacuggaucaccaagguuauuaugggcgcugugcuuaucugggucgggauuaauacacggaacaugaccauguccaugagcaugauccucgugggagugauuaugauguuccugucccugggcgucggggccgaucagggaugugcgaucaauuuuggcaaaugaggacuagugcaucacauuuaaaagcaucucagccuaccaugagaauaagagaaagaaaaugaagaucaauagcuuauucaucucuuuuucuuuuucguugguguaaagccaacacccugucuaaaaaacauaaauuucuuuaaucauuuugccucuuuucucugugcuucaauuaauaaaaaauggaaagaaccuagaucuaaaaaaaaaaaaaaaaaaaaaaaaaaaaaaaaaaaaaaaaaaaaaaaaaaaaaaaaaaaaaaaaugcaucccccccccccccccccccccccccccccccaaaggcucuuuucagagccaccagaauu

SEQ ID NO: 1115 - RNA, 2428 nt, Artificial Sequence
  mRNA product Design i-2 comprising derived and/or modified sequence from YFV__NC_002031.1__SSjev-prME (polyprotein: aa122-778) (opt5)
ggggcgcugccuacggagguggcagccaucuccuucucggcaucaagcuuaccaugggcaagagaagcgccggguccaucauguggcuggcuucucucgccguggucauugcgugcgcuggagccgugacccuggucagaaagaaccgguggcuccugcuuaauguuacaagcgaggaccugggcaaaacguucuccguggggaccggaaacugcacaaccaauauccucgaagccaaguacuggugucccgauucuauggaguauaacugcccuaaucugagcccgcgcgaggaacccgacgauauugacuguuggugcuacggcguggaaaacgucagaguggcuuaugggaaaugugauuccgccggacggucucgcagaagccggcgcgcgaucgaccuuccuacacacgagaaucauggccugaagaccagacaggagaaauggaugacagggcggaugggagaacgccaacuccagaagauugagagaugguuuguucggaaccccuucuuugcugugaccgcccugacgaucgccuaccuggucggcuccaauaugacccagcgcgugguuauugcucuccuggugcuugccgucggcccugcuuauucugcccacugcaucgggaucacagauagagacuucauugaaggagugcauggcgggaccugggugagcgcgacacuggagcaggauaagugugucaccguuauggcccccgacaaaccuucccucgauaucagccuggagacgguggcuauugaccggccggccgaagugcgcaaggucugcuacaacgcugugcuuacacacguuaaaaucaaugauaagugucccucuaccggagaggcccaucuggcggaagagaacgaaggcgacaaugccugcaaaagaacauauuccgaccggggguggggaaacggcuguggccucuuugggaagggaagcauuguggcuugcgccaaguuuaccugcgcuaaaucuaugucccuguucgaggucgaucaaaccaagauccaguacgugauuagagcccagcugcacguuggcgccaaacaggagaauuggaacacagacaucaagacgcucaaauucgaugcucugagcgggucucaagaaguggaguuuaucggauacggcaaggcgacccuugaaugucagguccagacagccguggacuucgggaacuccuauauugcugagauggaaaccgagagcuggaucgucgaucgccagugggcccaagaccugacacucccuuggcaguccggaucuggcggcguguggcgggagaugcaccaucugguugaauuugagcccccucacgccgcuaccauuagagugcuugcccuggggaaucaggaaggaagccucaaaacggcgcugacaggcgcuaugcgcgucaccaaggauaccaacgacaauaaccuguacaagcuccaugggggacacguguccugccggguuaaacugagcgcccuuacacugaagggcaccucuuauaaaaucuguacagauaagauguucuuugugaaaaaucccacggacaccgggcacggcacagucgugaugcaagugaagguuuccaagggagccccgugccgcauuccugucaucguggcugaugaccucaccgccgcuaucaacaaaggcauucuggugacagucaaucccaucgccagcaccaacgacgaugaggugcuuauugaaguuaauccucccuucggggacucuuacaucauugugggaagaggcgauagccggcugacguaucaguggcauaaggagggguccucuaucggaaaacucuucacccagacaaugaagggcgucgagagacuggcggugaugggggacaccgccugggauuuuagcuccgcuggcggauucuuuacaagcguuggcaaagggauccacaccguguucggaucugccuuucagggccuguucgggggacucaacuggauuacgaaggucaucaugggcgcugugcugauuuggguugggaucaauacacgcaacaugaccauguccaugagcaugauucuugugggcgucaucaugauguuucugucucucggagugggcgccugaggacuagugcaucacauuuaaaagcaucucagccuaccaugagaauaagagaaagaaaaugaagaucaauagcuuauucaucucuuuuucuuuuucguugguguaaagccaacacccugucuaaaaaacauaaauuucuuuaaucauuuugccucuuuucucugugcuucaauuaauaaaaaauggaaagaaccuagaucuaaaaaaaaaaaaaaaaaaaaaaaaaaaaaaaaaaaaaaaaaaaaaaaaaaaaaaaaaaaaaaaaugcaucccccccccccccccccccccccccccccccaaaggcucuuuucagagccaccagaauu

SEQ ID NO: 1116 - RNA, 2476 nt, Artificial Sequence
  mRNA product Design i-2 comprising derived and/or modified sequence from YFV__NC_002031.1__X-SS-prME-XX (polyprotein: aa92-788) (opt6)
ggggcgcugccuacggagguggcagccaucuccuucucggcaucaagcuuaccaugagaggauuaucaaguagaaaaagaagaucacaugauguacuaaccgugcaauuuuugaucuuagggaugcucuuaaugacaggagguguuacauuaguaagaaagaaucgauggcugcuuuuaaaugugacaucagaggauuuagggaaaacauuuucgguaggaacaggaaauuguacuacaaauauacuugaagcaaaauauuggugcccagacucuauggaauauaauuguccaaauuuaaguccuagagaagaaccugacgauauagauuguugguguuaugguguagaaaauguaagaguagcauacggcaaaugcgauagugcaggacguucuagacguucaaggagagccauagaucugcccacucacgaaaaucacggauugaaaacacgacaagaaaaauggaugacugggcgaaugggagaaagacaacuacagaaaauugaaagaugguucguuagaaauccauucuuugccguaacagcuuuaacaauagccuauuuaguagguaguaauaugacacaaagaguaguaauagcauugcuaguguuagcaguuggaccagcuuauagugcacauugcauaggaauaacagauagagacuuuauagaaggaguacacgggggaacuuggguaagugccacuuuagaacaagauaaauguguuacagugauggcgccagauaaaccaagucuggacauaaguuuggaaacaguagcgauugauagacccgcagaaguaagaaaaguuuguuauaaugcuguucuaacccauguuaaaauaaaugauaaaugcccuagcaccggagaagcccaucuagcagaagaaaaugaaggagauaacgcauguaaacgaacauacucagauagaggauggggcaacggauguggcuuguuuggaaaagguagcauaguagcaugcgcuaaauuuacaugcgcaaagucaaugucauuauuugaaguagaucaaacaaaaauacaauauguaauaagagcucaauuacacgugggugcaaaacaagaaaauuggaauacagacauaaagacacuaaaguucgacgcauuaaguggaucacaagagguagaauuuauaggguacggaaaagcgacuuuagagugucaaguccaaacagcaguagauuucgguaacucauacauagcagaaauggaaacugaaaguuggauaguagauagacaaugggcacaagacuugacacuaccuuggcaaucaggaagcggaggaguauggagagaaaugcaucauuuaguagaauuugaaccaccucaugcagcaacaauaagaguauuagcccuaggaaaccaagaaggaaguuuaaaaacagcacuaacaggagcuaugagaguaacaaaagauacaaaugacaacaaucuauacaaauuacacggaggacauguaagcugccggguaaaguugagcgcacuaacauuaaaaggaacgaguuauaaaauaugcacagauaaaauguucuuuguuaaaaauccuacagauaccggucauggaacaguaguaaugcaaguaaaaguaaguaaaggcgcucccuguagaauaccuguaauagucgcagacgauuuaaccgcagcaauaaauaaaggaauauuagucacgguaaacccaauagcgucaacaaaugaugaugaaguauuaauagaaguuaacccaccuuuuggagacaguuauauaauagucggaaggggugauaguagacuaacauaccaauggcauaaagaaggaagcucaauaggaaaauuauuuacucaaaccaugaaagguguagaaaggcuagcuguuaugggugacacagcaugggauuuuucaagcgcaggaggguucuuuacaucaguagguaaaggaauacauacaguauuuggaagugcauuucaaggauuauuuggugguuuaaauuggauaacaaaaguaauaaugggcgcaguuuuaauauggguagguauaaacacaagaaauaugacaaugucuaugaguaugauauuggucggaguaauaaugauguuuuuaucacuaggagugggugcagaucaagguugcgcuauuaauuuuggaaaaugaggacuagugcaucacauuuaaaagcaucucagccuaccaugagaauaagagaaagaaaaugaagaucaauagcuuauucaucucuuuuucuuuuucguugguguaaagccaacacccugucuaaaaaacauaaauuucuuuaaucauuuugccucuuuucucugugcuucaauuaauaaaaaauggaaagaaccuagaucuaaaaaaaaaaaaaaaaaaaaaaaaaaaaaaaaaaaaaaaaaaaaaaaaaaaaaaaaaaaaaaaaugcaucccccccccccccccccccccccccccccccaaaggcucuuuucagagccaccagaauu

SEQ ID NO: 1117 - RNA, 2413 nt, Artificial Sequence
  mRNA product Design i-2 comprising derived and/or modified sequence from YFV__NC_002031.1__SS-prME (polyprotein: M,aa104-778) (opt6)
ggggcgcugccuacggagguggcagccaucuccuucucggcaucaagcuuaccauggauguucuaacaguacaauuuuuaauauuagggauguuauuaaugacaggaggcguaacauuaguacgaaagaaucgauggcuauuacuaaacguuacgucugaagauuuaggaaaaacauuuagcguaggaacaggaaauugcaccacgaauaucuuagaagcaaaauauugguguccagauaguauggaauacaauuguccaaauuuaaguccuagagaggaacccgacgauauagauugcugguguuacggaguggaaaauguaagaguagcauauggaaaaugugacagcgcagguagaaguagaagaucacgacgagcaauugaucuacccacucaugagaaccauggacuaaaaacaagacaagaaaaauggaugacagguagaaugggcgaaagacaauuacagaaaauagaaagaugguuuguacgaaauccuuucuuugcugucacugcauuaacuauagcuuauuuaguaggaaguaacaugacucaaagaguaguaauagcacuauuaguacuagcaguaggaccagcuuacagugcacacuguauagggauaacggauagagauuuuauagaaggaguacauggggguacaugggugucugccacuuuagaacaagacaaauguguuacaguuauggccccagauaaacccucuuuagacauaucauuagaaacuguagcaauagauagaccggcggaagugagaaagguauguuauaaugcaguacuaacccauguaaaaauuaaugacaaaugcccaucaacaggagaggcucaucuagcugaagaaaaugaaggagacaaugcuugcaaacguacauauucagacaggggguggggaaauggauguggauuauuugguaaagggucaauaguagcaugugcaaaauuuacaugcgcaaaaaguaugagcuuauuugaaguagaucaaacaaaaauccaauauguaauuagagcucaacuucacguaggagcaaaacaagagaauuggaacacagauauaaaaacauuaaaauuugacgcuuugucuggaagucaagaagucgaauuuauuggcuauggaaaggcaacauuagaaugccaaguucaaaccgcaguagauuuuggaaauucauacauagcagaaauggagacugaaaguuggauaguagauagacagugggcucaagaccuaacuuuaccauggcaaucaggaaguggugguguauggagagaaaugcaucauuuaguagaauuugaaccaccacaugcagcaacaauuagaguacuagcauuaggaaaucaagaagguaguuuaaagacagcgcuuaccggagcaaugagaguuacaaaagauacuaaugacaauaauuuauauaaacuucauggaggacauguuagcuguagagucaaauuaagugcauuaacacucaaaggaacaucauacaaaauauguacagauaaaauguuuuucgucaagaauccaacagauacaggacauggaacaguuguaaugcaaguaaaaguaucaaaaggagcaccuugcagaauaccaguaauaguagcagaugauuuaacagccgcaauuaauaaagggauauuaguaacaguaaacccuauagcaaguacaaaugaugaugaagucuugauagaaguaaauccaccauuuggagauucguauauaauagucggaagaggagauagucgauuaacauaucaauggcauaaagaagguucaucaauaggaaaauuauuuacacaaaccaugaaaggaguugaaagauuagcuguaaugggggacacagcuugggauuuuucuagcgcaggaggauucuuuacauccguaggaaaagguauacacacaguauuuggcucagcauuccaaggguuauuuggugguuuaaauuggauaacaaaagugauuaugggagcagugcuaaucuggguaggaauaaauacaagaaauaugacaaugaguaugagcaugauucucguaggaguaauaaugauguuccuuaguuugggaguuggcgcuugaggacuagugcaucacauuuaaaagcaucucagccuaccaugagaauaagagaaagaaaaugaagaucaauagcuuauucaucucuuuuucuuuuucguugguguaaagccaacacccugucuaaaaaacauaaauuucuuuaaucauuuugccucuuuucucugugcuucaauuaauaaaaaauggaaagaaccuagaucuaaaaaaaaaaaaaaaaaaaaaaaaaaaaaaaaaaaaaaaaaaaaaaaaaaaaaaaaaaaaaaaaugcaucccccccccccccccccccccccccccccccaaaggcucuuuucagagccaccagaauu

SEQ ID NO: 1118 - RNA, 2440 nt, Artificial Sequence
  mRNA product Design i-2 comprising derived and/or modified sequence from YFV__NC_002031.1__SSIgE-prME-XX (polyprotein: aa122-788) (opt6)
ggggcgcugccuacggagguggcagccaucuccuucucggcaucaagcuuaccauggacuggacauggauauuauuuuuaguagcagcagcaacaagaguacauucaguuacauuaguaagaaagaaucgauggcugcuuuuaaaugugacaucagaggauuuagggaaaacauuuucgguaggaacaggaaauuguacuacaaauauacuugaagcaaaauauuggugcccagacucuauggaauauaauuguccaaauuuaaguccuagagaagaaccugacgauauagauuguugguguuaugguguagaaaauguaagaguagcauacggcaaaugcgauagugcaggacguucuagacguucaaggagagccauagaucugcccacucacgaaaaucacggauugaaaacacgacaagaaaaauggaugacugggcgaaugggagaaagacaacuacagaaaauugaaagaugguucguuagaaauccauucuuugccguaacagcuuuaacaauagccuauuuaguagguaguaauaugacacaaagaguaguaauagcauugcuaguguuagcaguuggaccagcuuauagugcacauugcauaggaauaacagauagagacuuuauagaaggaguacacgggggaacuuggguaagugccacuuuagaacaagauaaauguguuacagugauggcgccagauaaaccaagucuggacauaaguuuggaaacaguagcgauugauagacccgcagaaguaagaaaaguuuguuauaaugcuguucuaacccauguuaaaauaaaugauaaaugcccuagcaccggagaagcccaucuagcagaagaaaaugaaggagauaacgcauguaaacgaacauacucagauagaggauggggcaacggauguggcuuguuuggaaaagguagcauaguagcaugcgcuaaauuuacaugcgcaaagucaaugucauuauuugaaguagaucaaacaaaaauacaauauguaauaagagcucaauuacacgugggugcaaaacaagaaaauuggaauacagacauaaagacacuaaaguucgacgcauuaaguggaucacaagagguagaauuuauaggguacggaaaagcgacuuuagagugucaaguccaaacagcaguagauuucgguaacucauacauagcagaaauggaaacugaaaguuggauaguagauagacaaugggcacaagacuugacacuaccuuggcaaucaggaagcggaggaguauggagagaaaugcaucauuuaguagaauuugaaccaccucaugcagcaacaauaagaguauuagcccuaggaaaccaagaaggaaguuuaaaaacagcacuaacaggagcuaugagaguaacaaaagauacaaaugacaacaaucuauacaaauuacacggaggacauguaagcugccggguaaaguugagcgcacuaacauuaaaaggaacgaguuauaaaauaugcacagauaaaauguucuuuguuaaaaauccuacagauaccggucauggaacaguaguaaugcaaguaaaaguaaguaaaggcgcucccuguagaauaccuguaauagucgcagacgauuuaaccgcagcaauaaauaaaggaauauuagucacgguaaacccaauagcgucaacaaaugaugaugaaguauuaauagaaguuaacccaccuuuuggagacaguuauauaauagucggaaggggugauaguagacuaacauaccaauggcauaaagaaggaagcucaauaggaaaauuauuuacucaaaccaugaaagguguagaaaggcuagcuguuaugggugacacagcaugggauuuuucaagcgcaggaggguucuuuacaucaguagguaaaggaauacauacaguauuuggaagugcauuucaaggauuauuuggugguuuaaauuggauaacaaaaguaauaaugggcgcaguuuuaauauggguagguauaaacacaagaaauaugacaaugucuaugaguaugauauuggucggaguaauaaugauguuuuuaucacuaggagugggugcagaucaagguugcgcuauuaauuuuggaaaaugaggacuagugcaucacauuuaaaagcaucucagccuaccaugagaauaagagaaagaaaaugaagaucaauagcuuauucaucucuuuuucuuuuucguugguguaaagccaacacccugucuaaaaaacauaaauuucuuuaaucauuuugccucuuuucucugugcuucaauuaauaaaaaauggaaagaaccuagaucuaaaaaaaaaaaaaaaaaaaaaaaaaaaaaaaaaaaaaaaaaaaaaaaaaaaaaaaaaaaaaaaaugcaucccccccccccccccccccccccccccccccaaaggcucuuuucagagccaccagaauu

SEQ ID NO: 1119 - RNA, 2410 nt, Artificial Sequence
  mRNA product Design i-2 comprising derived and/or modified sequence from YFV__NC_002031.1__SSIgE-prME (polyprotein: aa122-778) (opt6)
ggggcgcugccuacggagguggcagccaucuccuucucggcaucaagcuuaccauggacuggacauggauauuauuuuuaguagcagcagcaacaagaguacauucaguaacauuagucagaaagaacagaugguuauuacugaacguaacaagugaagacuuaggaaaaacauuuaguguaggcacaggaaauugcacaacaaauauacuugaagcaaaauauugguguccagauagcauggaauauaauuguccaaauuuaucaccuagagaggaacccgaugauauagauuguugguguuauggaguugaaaacgugcgaguagcauaugguaaaugugauagcgcaggaagaaguagaagaaguagaagggcaauagacuuaccaacucaugaaaaccauggauuaaaaacaagacaggaaaaauggaugacaggaagaaugggagaacgacaauuacagaaaauagaaagaugguucguaagaaauccauucuuugcaguaacagcauuaacaauagcauaucuaguuggaaguaacaugacucaaagaguaguaauagcauuguuaguacuagcaguaggaccggcuuauagcgcacauuguauagggauaacagauagagacuuuauagaaggagugcacgguggaacauggguuucagcaacgcuagagcaagauaaauguguaacgguaauggcgccggauaaaccaagccuugacauaucacuagaaacgguugcaaucgaucgaccagccgaaguaagaaaaguaugcuauaaugcggucuuaacacacguaaaaauaaaugauaaauguccuucaacgggagaagcacauuuagcagaagaaaacgaaggagacaacgcguguaaaagaacauauucagauaggggcuggggaaacggcugcgguuuauuuggaaaaggaaguauaguagcaugcgcaaaauuuacuugcgcaaaaaguaugaguuuauucgaaguugaucaaacaaagauacaauauguaauacgagcacaauuacauguaggugcaaagcaagaaaauuggaauacagacauaaaaacauugaaauuugacgcuuugaguggaucacaagaaguagaauuuauaggauacggaaaagcuacauuagaaugucaaguacaaacugcaguagauuuuggaaauucguauauagcagaaauggaaacugaaucauggauuguagauaggcaaugggcacaagauuuaaccuugccauggcaaagcggaagcggggguguauggcgggaaaugcaucauuuaguagaguucgaacccccacacgcggcuaccauaagaguacuagcauuaggaaaucaagaagggagucucaagacagcacucacaggugcaaugcgaguaacgaaagauacaaaugacaauaaucuauacaaacuacacggaggacauguaucuugcagaguaaaauuaucugcauuaacacuaaaagggacaaguuacaaaauuuguacagauaagauguucuuugucaaaaacccaacagacacgggacacggaacgguagucaugcaaguuaaaguaagcaaaggagcgccaugcagaauaccaguaaucgucgcagaugauuuaacagccgcaauaaauaaagguauauuaguaacgguaaauccaauagcgaguaccaaugaugaugaaguacuaauagaagugaacccaccauuuggugauagcuauauaauaguagggcgaggagauucaagauuaacauaucaauggcauaaagaagguaguaguauaggaaaauuauuuacacaaacuaugaaaggcguagaaagacuagcagucaugggagauacagcaugggauuucucaagugcaggcggauuuuucacaagcgucggaaaaggaauacauacaguguuugguagugcguuucaaggauuauucggaggacuaaauuggauaacgaaaguaauuaugggagcaguucucauaugggucggaauaaauacaaggaacaugacuaugaguaugagcaugauccuaguaggaguaauaaugauguuucuaagccuaggcguuggugcaugaggacuagugcaucacauuuaaaagcaucucagccuaccaugagaauaagagaaagaaaaugaagaucaauagcuuauucaucucuuuuucuuuuucguugguguaaagccaacacccugucuaaaaaacauaaauuucuuuaaucauuuugccucuuuucucugugcuucaauuaauaaaaaauggaaagaaccuagaucuaaaaaaaaaaaaaaaaaaaaaaaaaaaaaaaaaaaaaaaaaaaaaaaaaaaaaaaaaaaaaaaaugcaucccccccccccccccccccccccccccccccaaaggcucuuuucagagccaccagaauu

SEQ ID NO: 1120 - RNA, 2458 nt, Artificial Sequence
  mRNA product Design i-2 comprising derived and/or modified sequence from YFV__NC_002031.1__SSjev-prME-XX (polyprotein: aa122-788) (opt6)
ggggcgcugccuacggagguggcagccaucuccuucucggcaucaagcuuaccaugggaaaaagaagugcaggaaguauaaugugguuggcaaguuuagcaguaguaauagcaugugcaggagcaguuacauuaguaagaaagaaucgauggcugcuuuuaaaugugacaucagaggauuuagggaaaacauuuucgguaggaacaggaaauuguacuacaaauauacuugaagcaaaauauuggugcccagacucuauggaauauaauuguccaaauuuaaguccuagagaagaaccugacgauauagauuguugguguuaugguguagaaaauguaagaguagcauacggcaaaugcgauagugcaggacguucuagacguucaaggagagccauagaucugcccacucacgaaaaucacggauugaaaacacgacaagaaaaauggaugacugggcgaaugggagaaagacaacuacagaaaauugaaagaugguucguuagaaauccauucuuugccguaacagcuuuaacaauagccuauuuaguagguaguaauaugacacaaagaguaguaauagcauugcuaguguuagcaguuggaccagcuuauagugcacauugcauaggaauaacagauagagacuuuauagaaggaguacacgggggaacuuggguaagugccacuuuagaacaagauaaauguguuacagugauggcgccagauaaaccaagucuggacauaaguuuggaaacaguagcgauugauagacccgcagaaguaagaaaaguuuguuauaaugcuguucuaacccauguuaaaauaaaugauaaaugcccuagcaccggagaagcccaucuagcagaagaaaaugaaggagauaacgcauguaaacgaacauacucagauagaggauggggcaacggauguggcuuguuuggaaaagguagcauaguagcaugcgcuaaauuuacaugcgcaaagucaaugucauuauuugaaguagaucaaacaaaaauacaauauguaauaagagcucaauuacacgugggugcaaaacaagaaaauuggaauacagacauaaagacacuaaaguucgacgcauuaaguggaucacaagagguagaauuuauaggguacggaaaagcgacuuuagagugucaaguccaaacagcaguagauuucgguaacucauacauagcagaaauggaaacugaaaguuggauaguagauagacaaugggcacaagacuugacacuaccuuggcaaucaggaagcggaggaguauggagagaaaugcaucauuuaguagaauuugaaccaccucaugcagcaacaauaagaguauuagcccuaggaaaccaagaaggaaguuuaaaaacagcacuaacaggagcuaugagaguaacaaaagauacaaaugacaacaaucuauacaaauuacacggaggacauguaagcugccggguaaaguugagcgcacuaacauuaaaaggaacgaguuauaaaauaugcacagauaaaauguucuuuguuaaaaauccuacagauaccggucauggaacaguaguaaugcaaguaaaaguaaguaaaggcgcucccuguagaauaccuguaauagucgcagacgauuuaaccgcagcaauaaauaaaggaauauuagucacgguaaacccaauagcgucaacaaaugaugaugaaguauuaauagaaguuaacccaccuuuuggagacaguuauauaauagucggaaggggugauaguagacuaacauaccaauggcauaaagaaggaagcucaauaggaaaauuauuuacucaaaccaugaaagguguagaaaggcuagcuguuaugggugacacagcaugggauuuuucaagcgcaggaggguucuuuacaucaguagguaaaggaauacauacaguauuuggaagugcauuucaaggauuauuuggugguuuaaauuggauaacaaaaguaauaaugggcgcaguuuuaauauggguagguauaaacacaagaaauaugacaaugucuaugaguaugauauuggucggaguaauaaugauguuuuuaucacuaggagugggugcagaucaagguugcgcuauuaauuuuggaaaaugaggacuagugcaucacauuuaaaagcaucucagccuaccaugagaauaagagaaagaaaaugaagaucaauagcuuauucaucucuuuuucuuuuucguugguguaaagccaacacccugucuaaaaaacauaaauuucuuuaaucauuuugccucuuuucucugugcuucaauuaauaaaaaauggaaagaaccuagaucuaaaaaaaaaaaaaaaaaaaaaaaaaaaaaaaaaaaaaaaaaaaaaaaaaaaaaaaaaaaaaaaaugcaucccccccccccccccccccccccccccccccaaaggcucuuuucagagccaccagaauu

SEQ ID NO: 1121 - RNA, 2428 nt, Artificial Sequence
  mRNA product Design i-2 comprising derived and/or modified sequence from YFV__NC_002031.1__SSjev-prME (polyprotein: aa122-778) (opt6)
ggggcgcugccuacggagguggcagccaucuccuucucggcaucaagcuuaccaugggaaaaagaagugcaggaaguauaaugugguuggcaaguuuagcaguaguaauagcaugugcaggagcaguaacauuagucagaaagaacagaugguuauuacugaacguaacaagugaagacuuaggaaaaacauuuaguguaggcacaggaaauugcacaacaaauauacuugaagcaaaauauugguguccagauagcauggaauauaauuguccaaauuuaucaccuagagaggaacccgaugauauagauuguugguguuauggaguugaaaacgugcgaguagcauaugguaaaugugauagcgcaggaagaaguagaagaaguagaagggcaauagacuuaccaacucaugaaaaccauggauuaaaaacaagacaggaaaaauggaugacaggaagaaugggagaacgacaauuacagaaaauagaaagaugguucguaagaaauccauucuuugcaguaacagcauuaacaauagcauaucuaguuggaaguaacaugacucaaagaguaguaauagcauuguuaguacuagcaguaggaccggcuuauagcgcacauuguauagggauaacagauagagacuuuauagaaggagugcacgguggaacauggguuucagcaacgcuagagcaagauaaauguguaacgguaauggcgccggauaaaccaagccuugacauaucacuagaaacgguugcaaucgaucgaccagccgaaguaagaaaaguaugcuauaaugcggucuuaacacacguaaaaauaaaugauaaauguccuucaacgggagaagcacauuuagcagaagaaaacgaaggagacaacgcguguaaaagaacauauucagauaggggcuggggaaacggcugcgguuuauuuggaaaaggaaguauaguagcaugcgcaaaauuuacuugcgcaaaaaguaugaguuuauucgaaguugaucaaacaaagauacaauauguaauacgagcacaauuacauguaggugcaaagcaagaaaauuggaauacagacauaaaaacauugaaauuugacgcuuugaguggaucacaagaaguagaauuuauaggauacggaaaagcuacauuagaaugucaaguacaaacugcaguagauuuuggaaauucguauauagcagaaauggaaacugaaucauggauuguagauaggcaaugggcacaagauuuaaccuugccauggcaaagcggaagcggggguguauggcgggaaaugcaucauuuaguagaguucgaacccccacacgcggcuaccauaagaguacuagcauuaggaaaucaagaagggagucucaagacagcacucacaggugcaaugcgaguaacgaaagauacaaaugacaauaaucuauacaaacuacacggaggacauguaucuugcagaguaaaauuaucugcauuaacacuaaaagggacaaguuacaaaauuuguacagauaagauguucuuugucaaaaacccaacagacacgggacacggaacgguagucaugcaaguuaaaguaagcaaaggagcgccaugcagaauaccaguaaucgucgcagaugauuuaacagccgcaauaaauaaagguauauuaguaacgguaaauccaauagcgaguaccaaugaugaugaaguacuaauagaagugaacccaccauuuggugauagcuauauaauaguagggcgaggagauucaagauuaacauaucaauggcauaaagaagguaguaguauaggaaaauuauuuacacaaacuaugaaaggcguagaaagacuagcagucaugggagauacagcaugggauuucucaagugcaggcggauuuuucacaagcgucggaaaaggaauacauacaguguuugguagugcguuucaaggauuauucggaggacuaaauuggauaacgaaaguaauuaugggagcaguucucauaugggucggaauaaauacaaggaacaugacuaugaguaugagcaugauccuaguaggaguaauaaugauguuucuaagccuaggcguuggugcaugaggacuagugcaucacauuuaaaagcaucucagccuaccaugagaauaagagaaagaaaaugaagaucaauagcuuauucaucucuuuuucuuuuucguugguguaaagccaacacccugucuaaaaaacauaaauuucuuuaaucauuuugccucuuuucucugugcuucaauuaauaaaaaauggaaagaaccuagaucuaaaaaaaaaaaaaaaaaaaaaaaaaaaaaaaaaaaaaaaaaaaaaaaaaaaaaaaaaaaaaaaaugcaucccccccccccccccccccccccccccccccaaaggcucuuuucagagccaccagaauu

SEQ ID NO: 1122 - RNA, 2476 nt, Artificial Sequence
  mRNA product Design i-2 comprising derived and/or modified sequence from YFV__NC_002031.1__X-SS-prME-XX (polyprotein: aa92-788) (opt11)
ggggcgcugccuacggagguggcagccaucuccuucucggcaucaagcuuaccaugcggggacuaagcagcagaaaaagacgcagccacgaugugcucaccgugcaauuccucauacuggggaugcuccuaaugaccggaggcgugacccuaguaaggaaaaacagauggcuacuacuaaacguaaccucagaagaucuaggaaagacauuuucagucggcacaggcaacugcacaaccaacauacuagaagcaaaauauuggugcccagacagcauggaauacaacugucccaaccucagcccaagagaggaaccagacgacauagacugcugguguuacggaguagaaaacguaagaguggcauacggcaaaugcgacagcgcaggcaggagccgaagaucccgcagagccaucgacuugcccacgcacgaaaaccacggccucaaaacacgacaagaaaaauggaugacagggcgaaugggagaacgacagcuccagaaaauagaacgaugguucguccggaacccguucuucgcaguaacggcacuaacaaucgcauaccucguaggcagcaacaugacacaaagaguggucaucgcgcuacucguacuagcaguggggcccgcauacagugcacacugcauaggaaucacagaccgugacuucaucgaaggcguacacggaggaacguggguaagcgcgacacuggaacaagacaaaugcgugacaguaauggcaccagacaaaccaagccuagacauaucccuagaaacggucgccaucgaccgucccgcagaaguacgaaagguaugcuauaaugcaguccucacacacgucaaaauaaacgacaaaugccccagcacgggcgaagcacaccucgccgaagaaaacgaaggggauaacgcgugcaaacgcaccuacuccgacaggggauggggcaacggaugcggacuguucggaaaaggauccauagucgcaugcgcaaaauuuaccugcgcaaaaagcaugagcuuguucgagguagaccaaacgaagauccaauacguaauccgagcucaacuacacguuggggccaagcaagagaacuggaauacggacaucaaaacacuaaaauucgacgcacucuccggcucacaagaagucgaguucaucggcuacggcaaagcaacacuagaaugccaaguacaaacagcgguggacuucggcaacagcuacauagcagaaauggaaacagaaagcuggauaguagaccgacaaugggcacaagaccuaacucugccauggcaaagcggcucaggaggaguguggagagagaugcaccaccugguagaguucgaacccccacacgcagcaacaauaaggguacuggcacuaggcaaccaagaaggcagccuaaaaaccgcacucacaggagccaugcgcgugacgaaggacaccaacgacaacaaccucuacaaacuccacggagggcacguauccugccgcguaaaacuaucagcacuaacgcuaaaaggaacaagcuacaaaauaugcacagacaaaauguucuucgucaaaaaccccacagacacaggccacggcacagucguaaugcaagugaaggucagcaagggggcccccugccgaaucccagucauaguggcagacgaccucacggccgccaucaacaaagggauccugguaacagugaacccaauagcaucgaccaacgacgacgaaguccucauagaagugaaucccccguucggcgacagcuacaucaucguaggacgcggcgacucccgacugacguaccaauggcauaaagaaggcagcagcauuggaaaacuauucacccaaaccaugaagggcgucgaaagacucgcggugaugggagacaccgcaugggacuucucgagcgcaggcggcuucuucacaagcguaggaaaagggauucacacaguauucggauccgcauuccaaggccucuucgggggacuaaacuggauaacgaaaguaauaaugggagcaguucucauauggguaggaaucaacacacgaaacaugacaauguccaugucaaugauacucguaggcguaaucaugauguuucugucacucggagugggagcagaccaagguugcgccauaaacuucggcaagugaggacuagugcaucacauuuaaaagcaucucagccuaccaugagaauaagagaaagaaaaugaagaucaauagcuuauucaucucuuuuucuuuuucguugguguaaagccaacacccugucuaaaaaacauaaauuucuuuaaucauuuugccucuuuucucugugcuucaauuaauaaaaaauggaaagaaccuagaucuaaaaaaaaaaaaaaaaaaaaaaaaaaaaaaaaaaaaaaaaaaaaaaaaaaaaaaaaaaaaaaaaugcaucccccccccccccccccccccccccccccccaaaggcucuuuucagagccaccagaauu

SEQ ID NO: 1123 - RNA, 2413 nt, Artificial Sequence
  mRNA product Design i-2 comprising derived and/or modified sequence from YFV__NC_002031.1__SS-prME (polyprotein: M,aa104-778) (opt11)
ggggcgcugccuacggagguggcagccaucuccuucucggcaucaagcuuaccauggacguccuuacgguacaauuccuaauacuaggaaugcuucucaugaccgggggcgucacccuaguccggaaaaacagauggcuacugcuaaauguuacaagcgaagaccuuggcaagacauucagcguaggcacgggcaacuguacaaccaacauacuagaagcgaaauacuggugcccagacuccauggaguacaacugccccaaccuaagcccacgggaagaacccgacgacauagacugcugguguuacggggucgaaaacguccgcgucgcauacgggaaaugcgauagcgcaggccgcaguagacgcucccgccgcgccauagaccuaccaacgcacgagaaccacggccucaaaacucgccaagaaaaauggaugacagggcgaaugggugaacgccaacuacagaagaucgaaaggugguucgucaggaacccauucuucgcagugaccgcacuaacgauagccuaccuagugggaucaaacaugacgcaacgagucgugaucgcacuccuaguacuggccguaggaccggccuacuccgcgcacugcaucggcauaacggauagggacuucauugaaggaguacauggcggcacgugggucagcgcgacacucgaacaagacaaaugcguaaccgugauggcacccgacaaaccgagucuugacauaagccuggaaacgguagcgauagaucguccagccgaaguaagaaaaguaugcuacaacgcaguccuaacacacguaaaaauaaacgacaaaugcccaagcacaggggaagcccaccucgcagaagagaacgaaggcgacaacgcaugcaaacgcacauacuccgacaggggaugggggaauggcugcggacuauucgggaaaggaagcaucgucgcgugcgccaaauucacaugcgccaagagcaugagccuguucgaagucgaccaaacaaaaauccaauacguaauacgcgcgcaacugcacguaggagcgaaacaggaaaacuggaacacggacauuaaaacccucaaauucgacgcgcucucaggaucacaagaagucgaguucaucggcuacggcaaggcaacgcucgaaugccaaguacaaacagcaguagacuucggaaacagcuacauugccgagauggaaaccgagagcuggauagucgacagacaaugggcccaagaccuaacccugccauggcaaucaggcuccgggggcgucuggcgagagaugcaccaccuaguagaguucgaaccaccccacgccgccacgaucagaguacuggcccugggcaaccaagaaggcucacucaagacggcgcucacaggagcaaugagggucacgaaagacaccaacgacaacaaccucuacaaacuacacggagggcacgugagcugccggguaaaacugagcgcacucacucugaagggaacaagcuacaagauaugcaccgacaaaauguucuucgugaaaaacccaaccgacacuggacacggcacggucguuaugcaagucaagguaucaaaaggagccccaugcagaaucccaguaauaguagcggacgaccuaacagccgccauaaacaaaggaauccuagucacgguaaauccgauagcaucgaccaacgacgacgaaguacuaauagaagugaacccaccauucggcgacagcuacauaauagucgggagaggcgacucgcgacuaaccuaccaauggcacaaggaagggagcucuaucgggaaacuauucacccaaacgaugaagggcguagaaaggcucgcagucaugggcgacaccgcaugggacuucuccagcgcgggaggcuucuuuacuucagugggaaaagggauacacaccgucuucggcagcgcauuccagggccuauucggcggguuaaacuggaucacgaaagugauaaugggggcaguucucaucugggucggaauaaacacacguaacaugaccaugagcaugagcaugauccuagucggggucauaaugauguucuugagcuugggaguaggugcaugaggacuagugcaucacauuuaaaagcaucucagccuaccaugagaauaagagaaagaaaaugaagaucaauagcuuauucaucucuuuuucuuuuucguugguguaaagccaacacccugucuaaaaaacauaaauuucuuuaaucauuuugccucuuuucucugugcuucaauuaauaaaaaauggaaagaaccuagaucuaaaaaaaaaaaaaaaaaaaaaaaaaaaaaaaaaaaaaaaaaaaaaaaaaaaaaaaaaaaaaaaaugcaucccccccccccccccccccccccccccccccaaaggcucuuuucagagccaccagaauu

SEQ ID NO: 1124 - RNA, 2440 nt, Artificial Sequence
  mRNA product Design i-2 comprising derived and/or modified sequence from YFV__NC_002031.1__SSIgE-prME-XX (polyprotein: aa122-788) (opt11)
ggggcgcugccuacggagguggcagccaucuccuucucggcaucaagcuuaccauggauuggacguggauacucuuucucguggccgcggccacgcgcgugcacucggugacccuaguaaggaaaaacagauggcuacuacuaaacguaaccucagaagaucuaggaaagacauuuucagucggcacaggcaacugcacaaccaacauacuagaagcaaaauauuggugcccagacagcauggaauacaacugucccaaccucagcccaagagaggaaccagacgacauagacugcugguguuacggaguagaaaacguaagaguggcauacggcaaaugcgacagcgcaggcaggagccgaagaucccgcagagccaucgacuugcccacgcacgaaaaccacggccucaaaacacgacaagaaaaauggaugacagggcgaaugggagaacgacagcuccagaaaauagaacgaugguucguccggaacccguucuucgcaguaacggcacuaacaaucgcauaccucguaggcagcaacaugacacaaagaguggucaucgcgcuacucguacuagcaguggggcccgcauacagugcacacugcauaggaaucacagaccgugacuucaucgaaggcguacacggaggaacguggguaagcgcgacacuggaacaagacaaaugcgugacaguaauggcaccagacaaaccaagccuagacauaucccuagaaacggucgccaucgaccgucccgcagaaguacgaaagguaugcuauaaugcaguccucacacacgucaaaauaaacgacaaaugccccagcacgggcgaagcacaccucgccgaagaaaacgaaggggauaacgcgugcaaacgcaccuacuccgacaggggauggggcaacggaugcggacuguucggaaaaggauccauagucgcaugcgcaaaauuuaccugcgcaaaaagcaugagcuuguucgagguagaccaaacgaagauccaauacguaauccgagcucaacuacacguuggggccaagcaagagaacuggaauacggacaucaaaacacuaaaauucgacgcacucuccggcucacaagaagucgaguucaucggcuacggcaaagcaacacuagaaugccaaguacaaacagcgguggacuucggcaacagcuacauagcagaaauggaaacagaaagcuggauaguagaccgacaaugggcacaagaccuaacucugccauggcaaagcggcucaggaggaguguggagagagaugcaccaccugguagaguucgaacccccacacgcagcaacaauaaggguacuggcacuaggcaaccaagaaggcagccuaaaaaccgcacucacaggagccaugcgcgugacgaaggacaccaacgacaacaaccucuacaaacuccacggagggcacguauccugccgcguaaaacuaucagcacuaacgcuaaaaggaacaagcuacaaaauaugcacagacaaaauguucuucgucaaaaaccccacagacacaggccacggcacagucguaaugcaagugaaggucagcaagggggcccccugccgaaucccagucauaguggcagacgaccucacggccgccaucaacaaagggauccugguaacagugaacccaauagcaucgaccaacgacgacgaaguccucauagaagugaaucccccguucggcgacagcuacaucaucguaggacgcggcgacucccgacugacguaccaauggcauaaagaaggcagcagcauuggaaaacuauucacccaaaccaugaagggcgucgaaagacucgcggugaugggagacaccgcaugggacuucucgagcgcaggcggcuucuucacaagcguaggaaaagggauucacacaguauucggauccgcauuccaaggccucuucgggggacuaaacuggauaacgaaaguaauaaugggagcaguucucauauggguaggaaucaacacacgaaacaugacaauguccaugucaaugauacucguaggcguaaucaugauguuucugucacucggagugggagcagaccaagguugcgccauaaacuucggcaagugaggacuagugcaucacauuuaaaagcaucucagccuaccaugagaauaagagaaagaaaaugaagaucaauagcuuauucaucucuuuuucuuuuucguugguguaaagccaacacccugucuaaaaaacauaaauuucuuuaaucauuuugccucuuuucucugugcuucaauuaauaaaaaauggaaagaaccuagaucuaaaaaaaaaaaaaaaaaaaaaaaaaaaaaaaaaaaaaaaaaaaaaaaaaaaaaaaaaaaaaaaaugcaucccccccccccccccccccccccccccccccaaaggcucuuuucagagccaccagaauu

SEQ ID NO: 1125 - RNA, 2410 nt, Artificial Sequence
  mRNA product Design i-2 comprising derived and/or modified sequence from YFV__NC_002031.1__SSIgE-prME (polyprotein: aa122-778) (opt11)
ggggcgcugccuacggagguggcagccaucuccuucucggcaucaagcuuaccauggauuggacguggauacucuuucucguggccgcggccacgcgcgugcacucggugacccuaguccgcaaaaacagauggcuacuacuaaacguaacaagcgaagaccugggcaaaacauucagcguuggcacaggcaauugcacgacaaacauacucgaagcaaaauacuggugccccgacagcauggaauacaacugcccaaaucuaagcccacgcgaagaaccagacgacaucgacuguuggugcuacggagucgaaaacgugagggucgcauacgguaaaugcgacagcgcuggcagaagcagacgcucccgacgagccauugaccucccuacccacgaaaaccacggccuaaaaacccggcaggaaaaauggaugacaggccggaugggagaacgccaacuacagaaaauagagaggugguuuguaagaaacccauucuucgccguaaccgcgcucaccaucgcuuaccucguaggaucaaacaugacgcaaagaguagugaucgcgcuacucguacuagcgguaggccccgccuacagcgcacacugcaucggcaucacugacagggacuucauagaaggcguccacgggggcacguggguuagcgccacacucgaacaagacaaaugcgucacagugauggcaccagacaaacccucacuagacaucucacuagaaaccgucgcaaucgaccgcccagcagaagucaggaaagugugcuacaacgccgucuuaacccacguaaaaauaaaugauaaaugcccaagcacgggagaggcacaccuagcggaagaaaacgaaggcgacaacgcgugcaaacguaccuacagcgacagaggguggggcaacggaugcggcuuauucggaaaaggaaguaucguagcaugcgcaaaauuuaccugcgccaaaagcaugucccuauucgaaguagaucaaacaaaaauacaauacgucauccgagcccaacuacacgugggggcaaaacaagaaaacuggaacaccgacaucaaaacacucaaauucgaugcccuaagcggcucccaagaaguagaguucaucgguuacggcaaggccacgcucgagugccaaguccaaacagcaguagacuucgggaacucauacaucgccgagauggaaacggaaucauggauugucgacagacaaugggcacaagaccuaacacuaccauggcaaucaggcagcggaggggucuggcgagaaaugcaccaccuaguagaguucgaacccccacacgccgcaacaauccgaguacuagcccucggaaaccaagaaggaucacuaaaaaccgcacucaccggcgcaaugcgcguaacaaaagauacaaacgacaacaaccuauacaaacuacacggcggacacgucagcugccgcgucaaacuauccgcccuaacacuaaaaggaacaagcuacaaaauaugcacagacaaaauguucuucgucaaaaauccgacugacacgggccacggcacagucguaaugcaaguaaaagucucaaaaggcgcaccaugcagaaucccaguaaucgucgccgaugaccuaacagccgcaaucaacaagggcauccucguaacaguaaaccccauagccagcaccaacgacgacgaaguccuaaucgaagucaacccacccuucggagacagcuacauaauaguaggacgaggggacucacgccuaaccuaccaauggcacaaagaaggauccucaaucggcaaacuguucacacaaacgaugaaaggcguagaaagacucgcaguaaugggcgauacggccugggacuucucaagcgcgggcggcuucuucacgagcgucggaaaaggcauccauacaguauucggaagcgcauuccaaggccuauuuggaggccucaacuggauaacaaaagugaucaugggagcaguacugaucugggucggcaucaacacccgcaacaugacgaugagcaugucaaugauccucgugggaguaauaaugauguuccucagccugggcguaggcgcaugaggacuagugcaucacauuuaaaagcaucucagccuaccaugagaauaagagaaagaaaaugaagaucaauagcuuauucaucucuuuuucuuuuucguugguguaaagccaacacccugucuaaaaaacauaaauuucuuuaaucauuuugccucuuuucucugugcuucaauuaauaaaaaauggaaagaaccuagaucuaaaaaaaaaaaaaaaaaaaaaaaaaaaaaaaaaaaaaaaaaaaaaaaaaaaaaaaaaaaaaaaaugcaucccccccccccccccccccccccccccccccaaaggcucuuuucagagccaccagaauu

SEQ ID NO: 1126 - RNA, 2458 nt, Artificial Sequence
  mRNA product Design i-2 comprising derived and/or modified sequence from YFV__NC_002031.1__SSjev-prME-XX (polyprotein: aa122-788) (opt11)
ggggcgcugccuacggagguggcagccaucuccuucucggcaucaagcuuaccauggggaaaaggagcgcgggcucgauaaugugguuggccucgcucgcggucgugaucgcgugcgcgggcgcggugacccuaguaaggaaaaacagauggcuacuacuaaacguaaccucagaagaucuaggaaagacauuuucagucggcacaggcaacugcacaaccaacauacuagaagcaaaauauuggugcccagacagcauggaauacaacugucccaaccucagcccaagagaggaaccagacgacauagacugcugguguuacggaguagaaaacguaagaguggcauacggcaaaugcgacagcgcaggcaggagccgaagaucccgcagagccaucgacuugcccacgcacgaaaaccacggccucaaaacacgacaagaaaaauggaugacagggcgaaugggagaacgacagcuccagaaaauagaacgaugguucguccggaacccguucuucgcaguaacggcacuaacaaucgcauaccucguaggcagcaacaugacacaaagaguggucaucgcgcuacucguacuagcaguggggcccgcauacagugcacacugcauaggaaucacagaccgugacuucaucgaaggcguacacggaggaacguggguaagcgcgacacuggaacaagacaaaugcgugacaguaauggcaccagacaaaccaagccuagacauaucccuagaaacggucgccaucgaccgucccgcagaaguacgaaagguaugcuauaaugcaguccucacacacgucaaaauaaacgacaaaugccccagcacgggcgaagcacaccucgccgaagaaaacgaaggggauaacgcgugcaaacgcaccuacuccgacaggggauggggcaacggaugcggacuguucggaaaaggauccauagucgcaugcgcaaaauuuaccugcgcaaaaagcaugagcuuguucgagguagaccaaacgaagauccaauacguaauccgagcucaacuacacguuggggccaagcaagagaacuggaauacggacaucaaaacacuaaaauucgacgcacucuccggcucacaagaagucgaguucaucggcuacggcaaagcaacacuagaaugccaaguacaaacagcgguggacuucggcaacagcuacauagcagaaauggaaacagaaagcuggauaguagaccgacaaugggcacaagaccuaacucugccauggcaaagcggcucaggaggaguguggagagagaugcaccaccugguagaguucgaacccccacacgcagcaacaauaaggguacuggcacuaggcaaccaagaaggcagccuaaaaaccgcacucacaggagccaugcgcgugacgaaggacaccaacgacaacaaccucuacaaacuccacggagggcacguauccugccgcguaaaacuaucagcacuaacgcuaaaaggaacaagcuacaaaauaugcacagacaaaauguucuucgucaaaaaccccacagacacaggccacggcacagucguaaugcaagugaaggucagcaagggggcccccugccgaaucccagucauaguggcagacgaccucacggccgccaucaacaaagggauccugguaacagugaacccaauagcaucgaccaacgacgacgaaguccucauagaagugaaucccccguucggcgacagcuacaucaucguaggacgcggcgacucccgacugacguaccaauggcauaaagaaggcagcagcauuggaaaacuauucacccaaaccaugaagggcgucgaaagacucgcggugaugggagacaccgcaugggacuucucgagcgcaggcggcuucuucacaagcguaggaaaagggauucacacaguauucggauccgcauuccaaggccucuucgggggacuaaacuggauaacgaaaguaauaaugggagcaguucucauauggguaggaaucaacacacgaaacaugacaauguccaugucaaugauacucguaggcguaaucaugauguuucugucacucggagugggagcagaccaagguugcgccauaaacuucggcaagugaggacuagugcaucacauuuaaaagcaucucagccuaccaugagaauaagagaaagaaaaugaagaucaauagcuuauucaucucuuuuucuuuuucguugguguaaagccaacacccugucuaaaaaacauaaauuucuuuaaucauuuugccucuuuucucugugcuucaauuaauaaaaaauggaaagaaccuagaucuaaaaaaaaaaaaaaaaaaaaaaaaaaaaaaaaaaaaaaaaaaaaaaaaaaaaaaaaaaaaaaaaugcaucccccccccccccccccccccccccccccccaaaggcucuuuucagagccaccagaauu

SEQ ID NO: 1127 - RNA, 2428 nt, Artificial Sequence
  mRNA product Design i-2 comprising derived and/or modified sequence from YFV__NC_002031.1__SSjev-prME (polyprotein: aa122-778) (opt11)
ggggcgcugccuacggagguggcagccaucuccuucucggcaucaagcuuaccauggggaaaaggagcgcgggcucgauaaugugguuggccucgcucgcggucgugaucgcgugcgcgggcgcggugacccuaguccgcaaaaacagauggcuacuacuaaacguaacaagcgaagaccugggcaaaacauucagcguuggcacaggcaauugcacgacaaacauacucgaagcaaaauacuggugccccgacagcauggaauacaacugcccaaaucuaagcccacgcgaagaaccagacgacaucgacuguuggugcuacggagucgaaaacgugagggucgcauacgguaaaugcgacagcgcuggcagaagcagacgcucccgacgagccauugaccucccuacccacgaaaaccacggccuaaaaacccggcaggaaaaauggaugacaggccggaugggagaacgccaacuacagaaaauagagaggugguuuguaagaaacccauucuucgccguaaccgcgcucaccaucgcuuaccucguaggaucaaacaugacgcaaagaguagugaucgcgcuacucguacuagcgguaggccccgccuacagcgcacacugcaucggcaucacugacagggacuucauagaaggcguccacgggggcacguggguuagcgccacacucgaacaagacaaaugcgucacagugauggcaccagacaaacccucacuagacaucucacuagaaaccgucgcaaucgaccgcccagcagaagucaggaaagugugcuacaacgccgucuuaacccacguaaaaauaaaugauaaaugcccaagcacgggagaggcacaccuagcggaagaaaacgaaggcgacaacgcgugcaaacguaccuacagcgacagaggguggggcaacggaugcggcuuauucggaaaaggaaguaucguagcaugcgcaaaauuuaccugcgccaaaagcaugucccuauucgaaguagaucaaacaaaaauacaauacgucauccgagcccaacuacacgugggggcaaaacaagaaaacuggaacaccgacaucaaaacacucaaauucgaugcccuaagcggcucccaagaaguagaguucaucgguuacggcaaggccacgcucgagugccaaguccaaacagcaguagacuucgggaacucauacaucgccgagauggaaacggaaucauggauugucgacagacaaugggcacaagaccuaacacuaccauggcaaucaggcagcggaggggucuggcgagaaaugcaccaccuaguagaguucgaacccccacacgccgcaacaauccgaguacuagcccucggaaaccaagaaggaucacuaaaaaccgcacucaccggcgcaaugcgcguaacaaaagauacaaacgacaacaaccuauacaaacuacacggcggacacgucagcugccgcgucaaacuauccgcccuaacacuaaaaggaacaagcuacaaaauaugcacagacaaaauguucuucgucaaaaauccgacugacacgggccacggcacagucguaaugcaaguaaaagucucaaaaggcgcaccaugcagaaucccaguaaucgucgccgaugaccuaacagccgcaaucaacaagggcauccucguaacaguaaaccccauagccagcaccaacgacgacgaaguccuaaucgaagucaacccacccuucggagacagcuacauaauaguaggacgaggggacucacgccuaaccuaccaauggcacaaagaaggauccucaaucggcaaacuguucacacaaacgaugaaaggcguagaaagacucgcaguaaugggcgauacggccugggacuucucaagcgcgggcggcuucuucacgagcgucggaaaaggcauccauacaguauucggaagcgcauuccaaggccuauuuggaggccucaacuggauaacaaaagugaucaugggagcaguacugaucugggucggcaucaacacccgcaacaugacgaugagcaugucaaugauccucgugggaguaauaaugauguuccucagccugggcguaggcgcaugaggacuagugcaucacauuuaaaagcaucucagccuaccaugagaauaagagaaagaaaaugaagaucaauagcuuauucaucucuuuuucuuuuucguugguguaaagccaacacccugucuaaaaaacauaaauuucuuuaaucauuuugccucuuuucucugugcuucaauuaauaaaaaauggaaagaaccuagaucuaaaaaaaaaaaaaaaaaaaaaaaaaaaaaaaaaaaaaaaaaaaaaaaaaaaaaaaaaaaaaaaaugcaucccccccccccccccccccccccccccccccaaaggcucuuuucagagccaccagaauu

SEQ ID NO: 1128 - RNA, 2480 nt, Artificial Sequence
  mRNA product Design i-2 comprising derived and/or modified sequence from YFV__NC_002031.1__X-SS-prME-XX (polyprotein: aa92-788) (wt)
gggagaggcgcugccuacggagguggcagccaucuccuucucggcaucaagcuuaccaugagaggauuguccucaaggaaacgccguucccaugauguucugacugugcaauuccuaauuuugggaaugcuguugaugacggguggagugaccuuggugcggaaaaacagaugguugcuccuaaaugugacaucugaggaccucgggaaaacauucucugugggcacaggcaacugcacaacaaacauuuuggaagccaaguacuggugcccagacucaauggaauacaacugucccaaucucaguccaagagaggagccagaugacauugauugcuggugcuaugggguggaaaacguuagagucgcauaugguaagugugacucagcaggcaggucuaggaggucaagaagggccauugacuugccuacgcaugaaaaccaugguuugaagacccggcaagaaaaauggaugacuggaagaaugggugaaaggcaacuccaaaagauugagagaugguucgugaggaaccccuuuuuugcagugacggcucugaccauugccuaccuugugggaagcaacaugacgcaacgagucgugauugcccuacuggucuuggcuguugguccggccuacucagcucacugcauuggaauuacugacagggauuucauugagggggugcauggaggaacuuggguuucagcuacccuggagcaagacaagugugucacuguuauggccccugacaagccuucauuggacaucucacuagagacaguagccauugauagaccugcugaggugaggaaaguguguuacaaugcaguucucacucaugugaagauuaaugacaagugccccagcacuggagaggcccaccuagcugaagagaacgaaggggacaaugcgugcaagcgcacuuauucugauagaggcuggggcaauggcuguggccuauuugggaaagggagcauuguggcaugcgccaaauucacuugugccaaauccaugaguuuguuugagguugaucagaccaaaauucaguaugucaucagagcacaauugcauguaggggccaagcaggaaaauuggaauaccgacauuaagacucucaaguuugaugcccugucaggcucccaggaagucgaguucauuggguauggaaaagcuacacuggaaugccaggugcaaacugcgguggacuuugguaacaguuacaucgcugagauggaaacagagagcuggauaguggacagacagugggcccaggacuugacccugccauggcagaguggaaguggcgggguguggagagagaugcaucaucuugucgaauuugaaccuccgcaugccgccacuaucagaguacuggcccugggaaaccaggaaggcuccuugaaaacagcucuuacuggcgcaaugaggguuacaaaggacacaaaugacaacaaccuuuacaaacuacaugguggacauguuucuugcagagugaaauugucagcuuugacacucaaggggacauccuacaaaauaugcacugacaaaauguuuuuugucaagaacccaacugacacuggccauggcacuguugugaugcaggugaaagugucaaaaggagcccccugcaggauuccagugauaguagcugaugaucuuacagcggcaaucaauaaaggcauuuugguuacaguuaaccccaucgccucaaccaaugaugaugaagugcugauugaggugaacccaccuuuuggagacagcuacauuaucguugggagaggagauucacgucucacuuaccaguggcacaaagagggaagcucaauaggaaaguuguucacucagaccaugaaaggcguggaacgccuggccgucaugggagacaccgccugggauuucagcuccgcuggaggguucuucacuucgguugggaaaggaauccauacgguguuuggcucugccuuucaggggcuauuuggcggcuugaacuggauaacaaaggucaucaugggggcgguacuuauauggguuggcaucaacacaagaaacaugacaauguccaugagcaugaucuugguaggagugaucaugauguuuuugucucuaggaguuggggcggaucaaggaugcgccaucaacuuuggcaaguaaggacuagugcaucacauuuaaaagcaucucagccuaccaugagaauaagagaaagaaaaugaagaucaauagcuuauucaucucuuuuucuuuuucguugguguaaagccaacacccugucuaaaaaacauaaauuucuuuaaucauuuugccucuuuucucugugcuucaauuaauaaaaaauggaaagaaccuagaucuaaaaaaaaaaaaaaaaaaaaaaaaaaaaaaaaaaaaaaaaaaaaaaaaaaaaaaaaaaaaaaaaugcaucccccccccccccccccccccccccccccccaaaggcucuuuucagagccaccagaauu

SEQ ID NO: 1129 - RNA, 2447 nt, Artificial Sequence
  mRNA product Design i-2 comprising derived and/or modified sequence from YFV__NC_002031.1__SS-prME (polyprotein: M,aa104-778) (wt)
gggagaggcgcugccuacggagguggcagccaucuccuucucggcaucaagcuuaccauggauguucugacugugcaauuccuaauuuugggaaugcuguugaugacggguggagugaccuuggugcggaaaaacagaugguugcuccuaaaugugacaucugaggaccucgggaaaacauucucugugggcacaggcaacugcacaacaaacauuuuggaagccaaguacuggugcccagacucaauggaauacaacugucccaaucucaguccaagagaggagccagaugacauugauugcuggugcuaugggguggaaaacguuagagucgcauaugguaagugugacucagcaggcaggucuaggaggucaagaagggccauugacuugccuacgcaugaaaaccaugguuugaagacccggcaagaaaaauggaugacuggaagaaugggugaaaggcaacuccaaaagauugagagaugguucgugaggaaccccuuuuuugcagugacggcucugaccauugccuaccuugugggaagcaacaugacgcaacgagucgugauugcccuacuggucuuggcuguugguccggccuacucagcucacugcauuggaauuacugacagggauuucauugagggggugcauggaggaacuuggguuucagcuacccuggagcaagacaagugugucacuguuauggccccugacaagccuucauuggacaucucacuagagacaguagccauugauagaccugcugaggugaggaaaguguguuacaaugcaguucucacucaugugaagauuaaugacaagugccccagcacuggagaggcccaccuagcugaagagaacgaaggggacaaugcgugcaagcgcacuuauucugauagaggcuggggcaauggcuguggccuauuugggaaagggagcauuguggcaugcgccaaauucacuugugccaaauccaugaguuuguuugagguugaucagaccaaaauucaguaugucaucagagcacaauugcauguaggggccaagcaggaaaauuggaauaccgacauuaagacucucaaguuugaugcccugucaggcucccaggaagucgaguucauuggguauggaaaagcuacacuggaaugccaggugcaaacugcgguggacuuugguaacaguuacaucgcugagauggaaacagagagcuggauaguggacagacagugggcccaggacuugacccugccauggcagaguggaaguggcgggguguggagagagaugcaucaucuugucgaauuugaaccuccgcaugccgccacuaucagaguacuggcccugggaaaccaggaaggcuccuugaaaacagcucuuacuggcgcaaugaggguuacaaaggacacaaaugacaacaaccuuuacaaacuacaugguggacauguuucuugcagagugaaauugucagcuuugacacucaaggggacauccuacaaaauaugcacugacaaaauguuuuuugucaagaacccaacugacacuggccauggcacuguugugaugcaggugaaagugucaaaaggagcccccugcaggauuccagugauaguagcugaugaucuuacagcggcaaucaauaaaggcauuuugguuacaguuaaccccaucgccucaaccaaugaugaugaagugcugauugaggugaacccaccuuuuggagacagcuacauuaucguugggagaggagauucacgucucacuuaccaguggcacaaagagggaagcucaauaggaaaguuguucacucagaccaugaaaggcguggaacgccuggccgucaugggagacaccgccugggauuucagcuccgcuggaggguucuucacuucgguugggaaaggaauccauacgguguuuggcucugccuuucaggggcuauuuggcggcuugaacuggauaacaaaggucaucaugggggcgguacuuauauggguuggcaucaacacaagaaacaugacaauguccaugagcaugaucuugguaggagugaucaugauguuuuugucucuaggaguuggggcggaucaaggaugcgccaucaacuuuggcaaguaaggacuagugcaucacauuuaaaagcaucucagccuaccaugagaauaagagaaagaaaaugaagaucaauagcuuauucaucucuuuuucuuuuucguugguguaaagccaacacccugucuaaaaaacauaaauuucuuuaaucauuuugccucuuuucucugugcuucaauuaauaaaaaauggaaagaaccuagaucuaaaaaaaaaaaaaaaaaaaaaaaaaaaaaaaaaaaaaaaaaaaaaaaaaaaaaaaaaaaaaaaaugcaucccccccccccccccccccccccccccccccaaaggcucuuuucagagccaccagaauu

SEQ ID NO: 1130 - RNA, 2444 nt, Artificial Sequence
  mRNA product Design i-2 comprising derived and/or modified sequence from YFV__NC_002031.1__SSIgE-prME-XX (polyprotein: aa122-788) (wt)
gggagaggcgcugccuacggagguggcagccaucuccuucucggcaucaagcuuaccauggacuggaccuggauccuguuccucguggccgccgcgacccgcguccacagcgugaccuuggugcggaaaaacagaugguugcuccuaaaugugacaucugaggaccucgggaaaacauucucugugggcacaggcaacugcacaacaaacauuuuggaagccaaguacuggugcccagacucaauggaauacaacugucccaaucucaguccaagagaggagccagaugacauugauugcuggugcuaugggguggaaaacguuagagucgcauaugguaagugugacucagcaggcaggucuaggaggucaagaagggccauugacuugccuacgcaugaaaaccaugguuugaagacccggcaagaaaaauggaugacuggaagaaugggugaaaggcaacuccaaaagauugagagaugguucgugaggaaccccuuuuuugcagugacggcucugaccauugccuaccuugugggaagcaacaugacgcaacgagucgugauugcccuacuggucuuggcuguugguccggccuacucagcucacugcauuggaauuacugacagggauuucauugagggggugcauggaggaacuuggguuucagcuacccuggagcaagacaagugugucacuguuauggccccugacaagccuucauuggacaucucacuagagacaguagccauugauagaccugcugaggugaggaaaguguguuacaaugcaguucucacucaugugaagauuaaugacaagugccccagcacuggagaggcccaccuagcugaagagaacgaaggggacaaugcgugcaagcgcacuuauucugauagaggcuggggcaauggcuguggccuauuugggaaagggagcauuguggcaugcgccaaauucacuugugccaaauccaugaguuuguuugagguugaucagaccaaaauucaguaugucaucagagcacaauugcauguaggggccaagcaggaaaauuggaauaccgacauuaagacucucaaguuugaugcccugucaggcucccaggaagucgaguucauuggguauggaaaagcuacacuggaaugccaggugcaaacugcgguggacuuugguaacaguuacaucgcugagauggaaacagagagcuggauaguggacagacagugggcccaggacuugacccugccauggcagaguggaaguggcgggguguggagagagaugcaucaucuugucgaauuugaaccuccgcaugccgccacuaucagaguacuggcccugggaaaccaggaaggcuccuugaaaacagcucuuacuggcgcaaugaggguuacaaaggacacaaaugacaacaaccuuuacaaacuacaugguggacauguuucuugcagagugaaauugucagcuuugacacucaaggggacauccuacaaaauaugcacugacaaaauguuuuuugucaagaacccaacugacacuggccauggcacuguugugaugcaggugaaagugucaaaaggagcccccugcaggauuccagugauaguagcugaugaucuuacagcggcaaucaauaaaggcauuuugguuacaguuaaccccaucgccucaaccaaugaugaugaagugcugauugaggugaacccaccuuuuggagacagcuacauuaucguugggagaggagauucacgucucacuuaccaguggcacaaagagggaagcucaauaggaaaguuguucacucagaccaugaaaggcguggaacgccuggccgucaugggagacaccgccugggauuucagcuccgcuggaggguucuucacuucgguugggaaaggaauccauacgguguuuggcucugccuuucaggggcuauuuggcggcuugaacuggauaacaaaggucaucaugggggcgguacuuauauggguuggcaucaacacaagaaacaugacaauguccaugagcaugaucuugguaggagugaucaugauguuuuugucucuaggaguuggggcggaucaaggaugcgccaucaacuuuggcaaguaaggacuagugcaucacauuuaaaagcaucucagccuaccaugagaauaagagaaagaaaaugaagaucaauagcuuauucaucucuuuuucuuuuucguugguguaaagccaacacccugucuaaaaaacauaaauuucuuuaaucauuuugccucuuuucucugugcuucaauuaauaaaaaauggaaagaaccuagaucuaaaaaaaaaaaaaaaaaaaaaaaaaaaaaaaaaaaaaaaaaaaaaaaaaaaaaaaaaaaaaaaaugcaucccccccccccccccccccccccccccccccaaaggcucuuuucagagccaccagaauu

SEQ ID NO: 1131 - RNA, 2414 nt, Artificial Sequence
  mRNA product Design i-2 comprising derived and/or modified sequence from YFV__NC_002031.1__SSIgE-prME (polyprotein: aa122-778) (wt)
gggagaggcgcugccuacggagguggcagccaucuccuucucggcaucaagcuuaccauggacuggaccuggauccuguuccucguggccgccgcgacccgcguccacagcgugaccuuggugcggaaaaacagaugguugcuccuaaaugugacaucugaggaccucgggaaaacauucucugugggcacaggcaacugcacaacaaacauuuuggaagccaaguacuggugcccagacucaauggaauacaacugucccaaucucaguccaagagaggagccagaugacauugauugcuggugcuaugggguggaaaacguuagagucgcauaugguaagugugacucagcaggcaggucuaggaggucaagaagggccauugacuugccuacgcaugaaaaccaugguuugaagacccggcaagaaaaauggaugacuggaagaaugggugaaaggcaacuccaaaagauugagagaugguucgugaggaaccccuuuuuugcagugacggcucugaccauugccuaccuugugggaagcaacaugacgcaacgagucgugauugcccuacuggucuuggcuguugguccggccuacucagcucacugcauuggaauuacugacagggauuucauugagggggugcauggaggaacuuggguuucagcuacccuggagcaagacaagugugucacuguuauggccccugacaagccuucauuggacaucucacuagagacaguagccauugauagaccugcugaggugaggaaaguguguuacaaugcaguucucacucaugugaagauuaaugacaagugccccagcacuggagaggcccaccuagcugaagagaacgaaggggacaaugcgugcaagcgcacuuauucugauagaggcuggggcaauggcuguggccuauuugggaaagggagcauuguggcaugcgccaaauucacuugugccaaauccaugaguuuguuugagguugaucagaccaaaauucaguaugucaucagagcacaauugcauguaggggccaagcaggaaaauuggaauaccgacauuaagacucucaaguuugaugcccugucaggcucccaggaagucgaguucauuggguauggaaaagcuacacuggaaugccaggugcaaacugcgguggacuuugguaacaguuacaucgcugagauggaaacagagagcuggauaguggacagacagugggcccaggacuugacccugccauggcagaguggaaguggcgggguguggagagagaugcaucaucuugucgaauuugaaccuccgcaugccgccacuaucagaguacuggcccugggaaaccaggaaggcuccuugaaaacagcucuuacuggcgcaaugaggguuacaaaggacacaaaugacaacaaccuuuacaaacuacaugguggacauguuucuugcagagugaaauugucagcuuugacacucaaggggacauccuacaaaauaugcacugacaaaauguuuuuugucaagaacccaacugacacuggccauggcacuguugugaugcaggugaaagugucaaaaggagcccccugcaggauuccagugauaguagcugaugaucuuacagcggcaaucaauaaaggcauuuugguuacaguuaaccccaucgccucaaccaaugaugaugaagugcugauugaggugaacccaccuuuuggagacagcuacauuaucguugggagaggagauucacgucucacuuaccaguggcacaaagagggaagcucaauaggaaaguuguucacucagaccaugaaaggcguggaacgccuggccgucaugggagacaccgccugggauuucagcuccgcuggaggguucuucacuucgguugggaaaggaauucauacgguguuuggcucugccuuucaggggcuauuuggcggcuugaacuggauaacaaaggucaucaugggggcgguacuuauauggguuggcaucaacacaagaaacaugacaauguccaugagcaugaucuugguaggagugaucaugauguuuuugucucuaggaguuggggcguaaggacuagugcaucacauuuaaaagcaucucagccuaccaugagaauaagagaaagaaaaugaagaucaauagcuuauucaucucuuuuucuuuuucguugguguaaagccaacacccugucuaaaaaacauaaauuucuuuaaucauuuugccucuuuucucugugcuucaauuaauaaaaaauggaaagaaccuagaucuaaaaaaaaaaaaaaaaaaaaaaaaaaaaaaaaaaaaaaaaaaaaaaaaaaaaaaaaaaaaaaaaugcaucccccccccccccccccccccccccccccccaaaggcucuuuucagagccaccagaauu

SEQ ID NO: 1132 - RNA, 2462 nt, Artificial Sequence
  mRNA product Design i-2 comprising derived and/or modified sequence from YFV__NC_002031.1__SSjev-prME-XX (polyprotein: aa122-788) (wt)
gggagaggcgcugccuacggagguggcagccaucuccuucucggcaucaagcuuaccauggguaaacggagcgcuggcucaaucauguggcucgcgagcuuggcaguugucauagcuugugcaggagccgugaccuuggugcggaaaaacagaugguugcuccuaaaugugacaucugaggaccucgggaaaacauucucugugggcacaggcaacugcacaacaaacauuuuggaagccaaguacuggugcccagacucaauggaauacaacugucccaaucucaguccaagagaggagccagaugacauugauugcuggugcuaugggguggaaaacguuagagucgcauaugguaagugugacucagcaggcaggucuaggaggucaagaagggccauugacuugccuacgcaugaaaaccaugguuugaagacccggcaagaaaaauggaugacuggaagaaugggugaaaggcaacuccaaaagauugagagaugguucgugaggaaccccuuuuuugcagugacggcucugaccauugccuaccuugugggaagcaacaugacgcaacgagucgugauugcccuacuggucuuggcuguugguccggccuacucagcucacugcauuggaauuacugacagggauuucauugagggggugcauggaggaacuuggguuucagcuacccuggagcaagacaagugugucacuguuauggccccugacaagccuucauuggacaucucacuagagacaguagccauugauagaccugcugaggugaggaaaguguguuacaaugcaguucucacucaugugaagauuaaugacaagugccccagcacuggagaggcccaccuagcugaagagaacgaaggggacaaugcgugcaagcgcacuuauucugauagaggcuggggcaauggcuguggccuauuugggaaagggagcauuguggcaugcgccaaauucacuugugccaaauccaugaguuuguuugagguugaucagaccaaaauucaguaugucaucagagcacaauugcauguaggggccaagcaggaaaauuggaauaccgacauuaagacucucaaguuugaugcccugucaggcucccaggaagucgaguucauuggguauggaaaagcuacacuggaaugccaggugcaaacugcgguggacuuugguaacaguuacaucgcugagauggaaacagagagcuggauaguggacagacagugggcccaggacuugacccugccauggcagaguggaaguggcgggguguggagagagaugcaucaucuugucgaauuugaaccuccgcaugccgccacuaucagaguacuggcccugggaaaccaggaaggcuccuugaaaacagcucuuacuggcgcaaugaggguuacaaaggacacaaaugacaacaaccuuuacaaacuacaugguggacauguuucuugcagagugaaauugucagcuuugacacucaaggggacauccuacaaaauaugcacugacaaaauguuuuuugucaagaacccaacugacacuggccauggcacuguugugaugcaggugaaagugucaaaaggagcccccugcaggauuccagugauaguagcugaugaucuuacagcggcaaucaauaaaggcauuuugguuacaguuaaccccaucgccucaaccaaugaugaugaagugcugauugaggugaacccaccuuuuggagacagcuacauuaucguugggagaggagauucacgucucacuuaccaguggcacaaagagggaagcucaauaggaaaguuguucacucagaccaugaaaggcguggaacgccuggccgucaugggagacaccgccugggauuucagcuccgcuggaggguucuucacuucgguugggaaaggaauccauacgguguuuggcucugccuuucaggggcuauuuggcggcuugaacuggauaacaaaggucaucaugggggcgguacuuauauggguuggcaucaacacaagaaacaugacaauguccaugagcaugaucuugguaggagugaucaugauguuuuugucucuaggaguuggggcggaucaaggaugcgccaucaacuuuggcaaguaaggacuagugcaucacauuuaaaagcaucucagccuaccaugagaauaagagaaagaaaaugaagaucaauagcuuauucaucucuuuuucuuuuucguugguguaaagccaacacccugucuaaaaaacauaaauuucuuuaaucauuuugccucuuuucucugugcuucaauuaauaaaaaauggaaagaaccuagaucuaaaaaaaaaaaaaaaaaaaaaaaaaaaaaaaaaaaaaaaaaaaaaaaaaaaaaaaaaaaaaaaaugcaucccccccccccccccccccccccccccccccaaaggcucuuuucagagccaccagaauu

SEQ ID NO: 1133 - RNA, 2432 nt, Artificial Sequence
  mRNA product Design i-2 comprising derived and/or modified sequence from YFV__NC_002031.1__SSjev-prME (polyprotein: aa122-778) (wt)
gggagaggcgcugccuacggagguggcagccaucuccuucucggcaucaagcuuaccauggguaaacggagcgcuggcucaaucauguggcucgcgagcuuggcaguugucauagcuugugcaggagccgugaccuuggugcggaaaaacagaugguugcuccuaaaugugacaucugaggaccucgggaaaacauucucugugggcacaggcaacugcacaacaaacauuuuggaagccaaguacuggugcccagacucaauggaauacaacugucccaaucucaguccaagagaggagccagaugacauugauugcuggugcuaugggguggaaaacguuagagucgcauaugguaagugugacucagcaggcaggucuaggaggucaagaagggccauugacuugccuacgcaugaaaaccaugguuugaagacccggcaagaaaaauggaugacuggaagaaugggugaaaggcaacuccaaaagauugagagaugguucgugaggaaccccuuuuuugcagugacggcucugaccauugccuaccuugugggaagcaacaugacgcaacgagucgugauugcccuacuggucuuggcuguugguccggccuacucagcucacugcauuggaauuacugacagggauuucauugagggggugcauggaggaacuuggguuucagcuacccuggagcaagacaagugugucacuguuauggccccugacaagccuucauuggacaucucacuagagacaguagccauugauagaccugcugaggugaggaaaguguguuacaaugcaguucucacucaugugaagauuaaugacaagugccccagcacuggagaggcccaccuagcugaagagaacgaaggggacaaugcgugcaagcgcacuuauucugauagaggcuggggcaauggcuguggccuauuugggaaagggagcauuguggcaugcgccaaauucacuugugccaaauccaugaguuuguuugagguugaucagaccaaaauucaguaugucaucagagcacaauugcauguaggggccaagcaggaaaauuggaauaccgacauuaagacucucaaguuugaugcccugucaggcucccaggaagucgaguucauuggguauggaaaagcuacacuggaaugccaggugcaaacugcgguggacuuugguaacaguuacaucgcugagauggaaacagagagcuggauaguggacagacagugggcccaggacuugacccugccauggcagaguggaaguggcgggguguggagagagaugcaucaucuugucgaauuugaaccuccgcaugccgccacuaucagaguacuggcccugggaaaccaggaaggcuccuugaaaacagcucuuacuggcgcaaugaggguuacaaaggacacaaaugacaacaaccuuuacaaacuacaugguggacauguuucuugcagagugaaauugucagcuuugacacucaaggggacauccuacaaaauaugcacugacaaaauguuuuuugucaagaacccaacugacacuggccauggcacuguugugaugcaggugaaagugucaaaaggagcccccugcaggauuccagugauaguagcugaugaucuuacagcggcaaucaauaaaggcauuuugguuacaguuaaccccaucgccucaaccaaugaugaugaagugcugauugaggugaacccaccuuuuggagacagcuacauuaucguugggagaggagauucacgucucacuuaccaguggcacaaagagggaagcucaauaggaaaguuguucacucagaccaugaaaggcguggaacgccuggccgucaugggagacaccgccugggauuucagcuccgcuggaggguucuucacuucgguugggaaaggaauucauacgguguuuggcucugccuuucaggggcuauuuggcggcuugaacuggauaacaaaggucaucaugggggcgguacuuauauggguuggcaucaacacaagaaacaugacaauguccaugagcaugaucuugguaggagugaucaugauguuuuugucucuaggaguuggggcguaaggacuagugcaucacauuuaaaagcaucucagccuaccaugagaauaagagaaagaaaaugaagaucaauagcuuauucaucucuuuuucuuuuucguugguguaaagccaacacccugucuaaaaaacauaaauuucuuuaaucauuuugccucuuuucucugugcuucaauuaauaaaaaauggaaagaaccuagaucuaaaaaaaaaaaaaaaaaaaaaaaaaaaaaaaaaaaaaaaaaaaaaaaaaaaaaaaaaaaaaaaaugcaucccccccccccccccccccccccccccccccaaaggcucuuuucagagccaccagaauu

SEQ ID NO: 1134 - RNA, 2480 nt, Artificial Sequence
  mRNA product Design i-2 comprising derived and/or modified sequence from YFV__NC_002031.1__X-SS-prME-XX (polyprotein: aa92-788) (opt1)
gggagaggcgcugccuacggagguggcagccaucuccuucucggcaucaagcuuaccaugcggggccugagcucccgcaagcggcgcagccacgacgugcucaccguccaguuccugauccuggggaugcuccugaugaccggcggggugacgcuggugcggaagaaccgcuggcuccugcugaacgucaccuccgaggaccucggcaagaccuucagcguggggaccggcaacugcacgaccaacauccuggaggccaaguacuggugccccgacuccauggaguacaacugcccgaaccugagcccccgggaggagcccgacgacaucgacugcuggugcuacggcguggagaacguccgcguggccuacgggaagugcgacuccgcgggccggagccgccggucccgccgggccaucgaccuccccacccacgagaaccacgggcugaagacccgccaggagaaguggaugacgggccggaugggggagcgccagcugcagaagaucgagcggugguucgugcgcaacccguucuucgccgucaccgcccucaccaucgccuaccuggugggcagcaacaugacccagcggguggucaucgcgcugcucgugcuggccgugggccccgccuacuccgcccacugcaucgggaucacggaccgcgacuucaucgagggcguccacgggggcaccugggugagcgcgacccuggagcaggacaagugcgugaccgucauggcccccgacaagcccucccucgacaucagccuggagacgguggccaucgaccggccggccgaggugcgcaaggucugcuacaacgccgugcugacccacgugaagaucaacgacaagugccccuccaccggcgaggcgcaccucgccgaggagaacgagggggacaacgccugcaagcggaccuacagcgaccggggcugggggaacggcugcgggcuguucggcaagggcuccaucgucgccugcgccaaguucacgugcgcgaagagcaugucccuguucgagguggaccagaccaagauccaguacgucauccgcgcccagcuccacgugggggccaagcaggagaacuggaacaccgacaucaagacccugaaguucgacgcccugagcggcagccaggagguggaguucaucggguacggcaaggccacgcucgagugccagguccagaccgcgguggacuucgggaacuccuacaucgccgagauggagaccgagagcuggaucguggaccggcagugggcccaggaccugacccugcccuggcaguccggcagcggcggggucuggcgcgagaugcaccaccucguggaguucgagcccccgcacgccgccacgauccgggugcuggcgcugggcaaccaggaggggucccucaagaccgcccugaccggcgccaugcgcgucaccaaggacacgaacgacaacaaccuguacaagcuccacgggggccacgugagcugccgggugaagcuguccgcccugacccucaagggcaccagcuacaagaucugcaccgacaagauguucuucgucaagaaccccacggacaccgggcacggcaccguggugaugcaggucaagguguccaagggggcgcccugccgcaucccggugaucgucgccgacgaccugaccgccgccaucaacaagggcauccuggugaccgugaacccgaucgccagcacgaacgacgacgagguccucaucgaggugaacccccccuucggcgacuccuacaucaucguggggcggggcgacagccgccugaccuaccaguggcacaaggagggguccagcaucggcaagcuguucacccagaccaugaagggggucgagcggcuggcggugaugggcgacacggccugggacuucuccagcgccggcggguucuucaccuccgugggcaaggggauccacaccgucuucggcagcgccuuccaggggcucuucggcggccugaacuggaucaccaaggugaucaugggggccgugcugaucugggucggcaucaacacgcgcaacaugaccauguccaugagcaugauccucgugggggugaucaugauguuccugagccugggcgucggggcggaccagggcugcgccaucaacuucggcaagugaggacuagugcaucacauuuaaaagcaucucagccuaccaugagaauaagagaaagaaaaugaagaucaauagcuuauucaucucuuuuucuuuuucguugguguaaagccaacacccugucuaaaaaacauaaauuucuuuaaucauuuugccucuuuucucugugcuucaauuaauaaaaaauggaaagaaccuagaucuaaaaaaaaaaaaaaaaaaaaaaaaaaaaaaaaaaaaaaaaaaaaaaaaaaaaaaaaaaaaaaaaugcaucccccccccccccccccccccccccccccccaaaggcucuuuucagagccaccagaauu

SEQ ID NO: 1135 - RNA, 2417 nt, Artificial Sequence
  mRNA product Design i-2 comprising derived and/or modified sequence from YFV__NC_002031.1__SS-prME (polyprotein: M,aa104-778) (opt1)
gggagaggcgcugccuacggagguggcagccaucuccuucucggcaucaagcuuaccauggacgugcugaccguccaguuccucauccugggcaugcugcucaugaccgggggcgugacccugguccggaagaaccgcuggcuccugcugaacgugaccagcgaggaccucggcaagacguucuccguggggaccggcaacugcaccaccaacauccuggaggccaaguacuggugccccgacagcauggaguacaacugccccaaccuguccccgcgggaggagcccgacgacaucgacugcuggugcuacggggucgagaacgugcgcguggccuacggcaagugcgacagcgcggggcggucccgccggagccgccgggccaucgaccugcccacccacgagaaccacggccucaagacccggcaggagaaguggaugacggggcgcaugggcgagcggcagcugcagaagaucgagcgcugguucgugcggaacccguucuucgccgucaccgcgcugaccaucgccuaccucguggggagcaacaugacccagcgcguggucaucgcccugcuggugcucgccgugggccccgccuacuccgcgcacugcaucgggaucacggaccgggacuucaucgagggcguccacggcgggaccugggugagcgccacccuggagcaggacaagugcgugaccgucauggcccccgacaagcccucccuggacaucagccucgagacgguggccaucgaccgcccggcggaggugcggaaggucugcuacaacgccgugcugacccacgugaagaucaacgacaagugccccuccaccggcgaggcccaccuggccgaggagaacgagggggacaacgccugcaagcgcaccuacagcgaccggggcugggggaacggcugcggccucuucgggaagggcuccaucgucgcgugcgccaaguucacgugcgccaagagcaugucccuguucgagguggaccagaccaagauccaguacgugauccgcgcccagcugcacgucggggccaagcaggagaacuggaacaccgacaucaagacccucaaguucgacgcgcugagcggcucccaggagguggaguucaucggcuacgggaaggccacgcuggagugccaggugcagaccgccgucgacuucggcaacagcuacaucgccgagauggagaccgaguccuggaucguggaccggcagugggcccaggaccucacccugcccuggcagagcggguccggcgggguguggcgcgagaugcaccaccuggucgaguucgagcccccgcacgcggccacgauccgggugcucgcccugggcaaccaggagggcagccugaagaccgcccucaccggggccaugcgcgucaccaaggacacgaacgacaacaaccuguacaagcugcacggcgggcacguguccugccgggugaagcucagcgcgcugacccugaagggcaccuccuacaagaucugcaccgacaagauguucuucgucaagaaccccacggacaccgggcacggcaccguggugaugcaggucaaggugagcaagggcgcccccugccgcaucccggugaucgucgccgacgaccucaccgccgcgaucaacaaggggauccuggugacggugaaccccaucgccagcaccaacgacgacgagguccugaucgaggugaacccgcccuucggcgacuccuacaucaucguggggcggggcgacagccgccucaccuaccaguggcacaaggagggguccagcaucggcaagcuguucacccagacgaugaagggcgucgagcggcuggccgugaugggggacaccgccugggacuucuccagcgccggcggguucuucaccuccgugggcaagggcauccacaccgucuucgggagcgcguuccagggccucuucgggggccugaacuggaucaccaaggugaucaugggggccgugcugaucugggucggcaucaacacgcgcaacaugaccauguccaugagcaugauccucgugggcgugaucaugauguuccugucccugggggucggcgccugaggacuagugcaucacauuuaaaagcaucucagccuaccaugagaauaagagaaagaaaaugaagaucaauagcuuauucaucucuuuuucuuuuucguugguguaaagccaacacccugucuaaaaaacauaaauuucuuuaaucauuuugccucuuuucucugugcuucaauuaauaaaaaauggaaagaaccuagaucuaaaaaaaaaaaaaaaaaaaaaaaaaaaaaaaaaaaaaaaaaaaaaaaaaaaaaaaaaaaaaaaaugcaucccccccccccccccccccccccccccccccaaaggcucuuuucagagccaccagaauu

SEQ ID NO: 1136 - RNA, 2444 nt, Artificial Sequence
  mRNA product Design i-2 comprising derived and/or modified sequence from YFV__NC_002031.1__SSIgE-prME-XX (polyprotein: aa122-788) (opt1)
gggagaggcgcugccuacggagguggcagccaucuccuucucggcaucaagcuuaccauggacuggaccuggauccuguuccucguggccgccgcgacccgcguccacagcgugacgcuggugcggaagaaccgcuggcuccugcugaacgucaccuccgaggaccucggcaagaccuucagcguggggaccggcaacugcacgaccaacauccuggaggccaaguacuggugccccgacuccauggaguacaacugcccgaaccugagcccccgggaggagcccgacgacaucgacugcuggugcuacggcguggagaacguccgcguggccuacgggaagugcgacuccgcgggccggagccgccggucccgccgggccaucgaccuccccacccacgagaaccacgggcugaagacccgccaggagaaguggaugacgggccggaugggggagcgccagcugcagaagaucgagcggugguucgugcgcaacccguucuucgccgucaccgcccucaccaucgccuaccuggugggcagcaacaugacccagcggguggucaucgcgcugcucgugcuggccgugggccccgccuacuccgcccacugcaucgggaucacggaccgcgacuucaucgagggcguccacgggggcaccugggugagcgcgacccuggagcaggacaagugcgugaccgucauggcccccgacaagcccucccucgacaucagccuggagacgguggccaucgaccggccggccgaggugcgcaaggucugcuacaacgccgugcugacccacgugaagaucaacgacaagugccccuccaccggcgaggcgcaccucgccgaggagaacgagggggacaacgccugcaagcggaccuacagcgaccggggcugggggaacggcugcgggcuguucggcaagggcuccaucgucgccugcgccaaguucacgugcgcgaagagcaugucccuguucgagguggaccagaccaagauccaguacgucauccgcgcccagcuccacgugggggccaagcaggagaacuggaacaccgacaucaagacccugaaguucgacgcccugagcggcagccaggagguggaguucaucggguacggcaaggccacgcucgagugccagguccagaccgcgguggacuucgggaacuccuacaucgccgagauggagaccgagagcuggaucguggaccggcagugggcccaggaccugacccugcccuggcaguccggcagcggcggggucuggcgcgagaugcaccaccucguggaguucgagcccccgcacgccgccacgauccgggugcuggcgcugggcaaccaggaggggucccucaagaccgcccugaccggcgccaugcgcgucaccaaggacacgaacgacaacaaccuguacaagcuccacgggggccacgugagcugccgggugaagcuguccgcccugacccucaagggcaccagcuacaagaucugcaccgacaagauguucuucgucaagaaccccacggacaccgggcacggcaccguggugaugcaggucaagguguccaagggggcgcccugccgcaucccggugaucgucgccgacgaccugaccgccgccaucaacaagggcauccuggugaccgugaacccgaucgccagcacgaacgacgacgagguccucaucgaggugaacccccccuucggcgacuccuacaucaucguggggcggggcgacagccgccugaccuaccaguggcacaaggagggguccagcaucggcaagcuguucacccagaccaugaagggggucgagcggcuggcggugaugggcgacacggccugggacuucuccagcgccggcggguucuucaccuccgugggcaaggggauccacaccgucuucggcagcgccuuccaggggcucuucggcggccugaacuggaucaccaaggugaucaugggggccgugcugaucugggucggcaucaacacgcgcaacaugaccauguccaugagcaugauccucgugggggugaucaugauguuccugagccugggcgucggggcggaccagggcugcgccaucaacuucggcaagugaggacuagugcaucacauuuaaaagcaucucagccuaccaugagaauaagagaaagaaaaugaagaucaauagcuuauucaucucuuuuucuuuuucguugguguaaagccaacacccugucuaaaaaacauaaauuucuuuaaucauuuugccucuuuucucugugcuucaauuaauaaaaaauggaaagaaccuagaucuaaaaaaaaaaaaaaaaaaaaaaaaaaaaaaaaaaaaaaaaaaaaaaaaaaaaaaaaaaaaaaaaugcaucccccccccccccccccccccccccccccccaaaggcucuuuucagagccaccagaauu

SEQ ID NO: 1137 - RNA, 2414 nt, Artificial Sequence
  mRNA product Design i-2 comprising derived and/or modified sequence from YFV__NC_002031.1__SSIgE-prME (polyprotein: aa122-778) (opt1)
gggagaggcgcugccuacggagguggcagccaucuccuucucggcaucaagcuuaccauggacuggaccuggauccuguuccucguggccgccgcgacccgcguccacagcgugacccugguccgcaagaaccgguggcuccugcugaacgugaccagcgaggaccucggcaagacguucuccguggggaccggcaacugcaccaccaacauccuggaggccaaguacuggugccccgacagcauggaguacaacugcccgaaccuguccccgcgcgaggagcccgacgacaucgacugcuggugcuacggggucgagaacgugcggguggccuacggcaagugcgacagcgcggggcgcucccggcgcagccggcgcgccaucgaccuccccacgcacgagaaccacggccugaagacccggcaggagaaguggaugaccggccgcaugggggagcggcagcugcagaagaucgagcgcugguucguccggaaccccuucuucgccgugaccgcccucacgaucgccuaccuggugggcuccaacaugacccagcgcgucgugaucgcgcugcucgugcuggccgucgggcccgccuacagcgcccacugcaucggcaucaccgaccgggacuucaucgagggggugcacggcggcaccuggguguccgcgacgcuggagcaggacaagugcgucaccgugauggcccccgacaagcccagccucgacaucucccuggagaccguggccaucgaccgcccggccgagguccggaaggugugcuacaacgccgugcugacccacgucaagaucaacgacaagugccccagcacgggggaggcgcaccucgccgaggagaacgagggcgacaacgccugcaagcgcaccuacuccgaccggggguggggcaacggcugcgggcuguucggcaaggggagcaucguggccugcgccaaguucaccugcgcgaaguccaugagccuguucgagguggaccagaccaagauccaguacgucauccgcgcccagcuccacgugggcgccaagcaggagaacuggaacacggacaucaagacccugaaguucgacgcccuguccgggagccaggaggucgaguucaucggcuacggcaaggccacccucgagugccaggugcagaccgcgguggacuucgggaacuccuacaucgccgagauggagacggagagcuggaucgucgaccggcagugggcccaggaccugacccugcccuggcagagcggcuccgggggcguguggcgcgagaugcaccaccucguggaguucgagcccccgcacgccgccaccauccgcguccuggcgcuggggaaccaggagggcagccucaagaccgcccugacgggcgccaugcgggugaccaaggacaccaacgacaacaaccuguacaagcuccacgggggccacguguccugccgcgucaagcugagcgcccugacccucaaggggacguccuacaagaucugcaccgacaagauguucuucgugaagaaccccaccgacaccggccacgggacgguggucaugcaggugaaggugagcaagggcgcgcccugccggauccccgucaucguggccgacgaccugaccgccgccaucaacaagggcauccuggugaccgucaacccgaucgccuccaccaacgacgacgaggugcucaucgaggugaacccgcccuucggggacagcuacaucaucgucggccgcggggacucccggcugaccuaccaguggcacaaggagggcagcuccaucggcaagcuguucacgcagaccaugaaggggguggagcgccucgcggugaugggcgacaccgccugggacuucagcuccgccgggggcuucuucaccagcgucgggaagggcauccacacgguguucggcuccgccuuccaggggcuguucggcgggcugaacuggaucaccaaggugaucaugggcgccguccucaucuggguggggaucaacacccggaacaugaccaugagcauguccaugauccuggugggcgucaucaugauguuccugagccugggcgugggggcgugaggacuagugcaucacauuuaaaagcaucucagccuaccaugagaauaagagaaagaaaaugaagaucaauagcuuauucaucucuuuuucuuuuucguugguguaaagccaacacccugucuaaaaaacauaaauuucuuuaaucauuuugccucuuuucucugugcuucaauuaauaaaaaauggaaagaaccuagaucuaaaaaaaaaaaaaaaaaaaaaaaaaaaaaaaaaaaaaaaaaaaaaaaaaaaaaaaaaaaaaaaaugcaucccccccccccccccccccccccccccccccaaaggcucuuuucagagccaccagaauu

SEQ ID NO: 1138 - RNA, 2462 nt, Artificial Sequence
  mRNA product Design i-2 comprising derived and/or modified sequence from YFV__NC_002031.1__SSjev-prME-XX (polyprotein: aa122-788) (opt1)
gggagaggcgcugccuacggagguggcagccaucuccuucucggcaucaagcuuaccaugggcaagcgcagcgccggguccaucauguggcuggccagccucgcgguggucaucgccugcgccggcgccgugacgcuggugcggaagaaccgcuggcuccugcugaacgucaccuccgaggaccucggcaagaccuucagcguggggaccggcaacugcacgaccaacauccuggaggccaaguacuggugccccgacuccauggaguacaacugcccgaaccugagcccccgggaggagcccgacgacaucgacugcuggugcuacggcguggagaacguccgcguggccuacgggaagugcgacuccgcgggccggagccgccggucccgccgggccaucgaccuccccacccacgagaaccacgggcugaagacccgccaggagaaguggaugacgggccggaugggggagcgccagcugcagaagaucgagcggugguucgugcgcaacccguucuucgccgucaccgcccucaccaucgccuaccuggugggcagcaacaugacccagcggguggucaucgcgcugcucgugcuggccgugggccccgccuacuccgcccacugcaucgggaucacggaccgcgacuucaucgagggcguccacgggggcaccugggugagcgcgacccuggagcaggacaagugcgugaccgucauggcccccgacaagcccucccucgacaucagccuggagacgguggccaucgaccggccggccgaggugcgcaaggucugcuacaacgccgugcugacccacgugaagaucaacgacaagugccccuccaccggcgaggcgcaccucgccgaggagaacgagggggacaacgccugcaagcggaccuacagcgaccggggcugggggaacggcugcgggcuguucggcaagggcuccaucgucgccugcgccaaguucacgugcgcgaagagcaugucccuguucgagguggaccagaccaagauccaguacgucauccgcgcccagcuccacgugggggccaagcaggagaacuggaacaccgacaucaagacccugaaguucgacgcccugagcggcagccaggagguggaguucaucggguacggcaaggccacgcucgagugccagguccagaccgcgguggacuucgggaacuccuacaucgccgagauggagaccgagagcuggaucguggaccggcagugggcccaggaccugacccugcccuggcaguccggcagcggcggggucuggcgcgagaugcaccaccucguggaguucgagcccccgcacgccgccacgauccgggugcuggcgcugggcaaccaggaggggucccucaagaccgcccugaccggcgccaugcgcgucaccaaggacacgaacgacaacaaccuguacaagcuccacgggggccacgugagcugccgggugaagcuguccgcccugacccucaagggcaccagcuacaagaucugcaccgacaagauguucuucgucaagaaccccacggacaccgggcacggcaccguggugaugcaggucaagguguccaagggggcgcccugccgcaucccggugaucgucgccgacgaccugaccgccgccaucaacaagggcauccuggugaccgugaacccgaucgccagcacgaacgacgacgagguccucaucgaggugaacccccccuucggcgacuccuacaucaucguggggcggggcgacagccgccugaccuaccaguggcacaaggagggguccagcaucggcaagcuguucacccagaccaugaagggggucgagcggcuggcggugaugggcgacacggccugggacuucuccagcgccggcggguucuucaccuccgugggcaaggggauccacaccgucuucggcagcgccuuccaggggcucuucggcggccugaacuggaucaccaaggugaucaugggggccgugcugaucugggucggcaucaacacgcgcaacaugaccauguccaugagcaugauccucgugggggugaucaugauguuccugagccugggcgucggggcggaccagggcugcgccaucaacuucggcaagugaggacuagugcaucacauuuaaaagcaucucagccuaccaugagaauaagagaaagaaaaugaagaucaauagcuuauucaucucuuuuucuuuuucguugguguaaagccaacacccugucuaaaaaacauaaauuucuuuaaucauuuugccucuuuucucugugcuucaauuaauaaaaaauggaaagaaccuagaucuaaaaaaaaaaaaaaaaaaaaaaaaaaaaaaaaaaaaaaaaaaaaaaaaaaaaaaaaaaaaaaaaugcaucccccccccccccccccccccccccccccccaaaggcucuuuucagagccaccagaauu

SEQ ID NO: 1139 - RNA, 2432 nt, Artificial Sequence
  mRNA product Design i-2 comprising derived and/or modified sequence from YFV__NC_002031.1__SSjev-prME (polyprotein: aa122-778) (opt1)
gggagaggcgcugccuacggagguggcagccaucuccuucucggcaucaagcuuaccaugggcaagcgcagcgccggguccaucauguggcuggccagccucgcgguggucaucgccugcgccggcgccgugacccugguccgcaagaaccgguggcuccugcugaacgugaccagcgaggaccucggcaagacguucuccguggggaccggcaacugcaccaccaacauccuggaggccaaguacuggugccccgacagcauggaguacaacugcccgaaccuguccccgcgcgaggagcccgacgacaucgacugcuggugcuacggggucgagaacgugcggguggccuacggcaagugcgacagcgcggggcgcucccggcgcagccggcgcgccaucgaccuccccacgcacgagaaccacggccugaagacccggcaggagaaguggaugaccggccgcaugggggagcggcagcugcagaagaucgagcgcugguucguccggaaccccuucuucgccgugaccgcccucacgaucgccuaccuggugggcuccaacaugacccagcgcgucgugaucgcgcugcucgugcuggccgucgggcccgccuacagcgcccacugcaucggcaucaccgaccgggacuucaucgagggggugcacggcggcaccuggguguccgcgacgcuggagcaggacaagugcgucaccgugauggcccccgacaagcccagccucgacaucucccuggagaccguggccaucgaccgcccggccgagguccggaaggugugcuacaacgccgugcugacccacgucaagaucaacgacaagugccccagcacgggggaggcgcaccucgccgaggagaacgagggcgacaacgccugcaagcgcaccuacuccgaccggggguggggcaacggcugcgggcuguucggcaaggggagcaucguggccugcgccaaguucaccugcgcgaaguccaugagccuguucgagguggaccagaccaagauccaguacgucauccgcgcccagcuccacgugggcgccaagcaggagaacuggaacacggacaucaagacccugaaguucgacgcccuguccgggagccaggaggucgaguucaucggcuacggcaaggccacccucgagugccaggugcagaccgcgguggacuucgggaacuccuacaucgccgagauggagacggagagcuggaucgucgaccggcagugggcccaggaccugacccugcccuggcagagcggcuccgggggcguguggcgcgagaugcaccaccucguggaguucgagcccccgcacgccgccaccauccgcguccuggcgcuggggaaccaggagggcagccucaagaccgcccugacgggcgccaugcgggugaccaaggacaccaacgacaacaaccuguacaagcuccacgggggccacguguccugccgcgucaagcugagcgcccugacccucaaggggacguccuacaagaucugcaccgacaagauguucuucgugaagaaccccaccgacaccggccacgggacgguggucaugcaggugaaggugagcaagggcgcgcccugccggauccccgucaucguggccgacgaccugaccgccgccaucaacaagggcauccuggugaccgucaacccgaucgccuccaccaacgacgacgaggugcucaucgaggugaacccgcccuucggggacagcuacaucaucgucggccgcggggacucccggcugaccuaccaguggcacaaggagggcagcuccaucggcaagcuguucacgcagaccaugaaggggguggagcgccucgcggugaugggcgacaccgccugggacuucagcuccgccgggggcuucuucaccagcgucgggaagggcauccacacgguguucggcuccgccuuccaggggcuguucggcgggcugaacuggaucaccaaggugaucaugggcgccguccucaucuggguggggaucaacacccggaacaugaccaugagcauguccaugauccuggugggcgucaucaugauguuccugagccugggcgugggggcgugaggacuagugcaucacauuuaaaagcaucucagccuaccaugagaauaagagaaagaaaaugaagaucaauagcuuauucaucucuuuuucuuuuucguugguguaaagccaacacccugucuaaaaaacauaaauuucuuuaaucauuuugccucuuuucucugugcuucaauuaauaaaaaauggaaagaaccuagaucuaaaaaaaaaaaaaaaaaaaaaaaaaaaaaaaaaaaaaaaaaaaaaaaaaaaaaaaaaaaaaaaaugcaucccccccccccccccccccccccccccccccaaaggcucuuuucagagccaccagaauu

SEQ ID NO: 1140 - RNA, 2480 nt, Artificial Sequence
  mRNA product Design i-2 comprising derived and/or modified sequence from YFV__NC_002031.1__X-SS-prME-XX (polyprotein: aa92-788) (opt1)
gggagaggcgcugccuacggagguggcagccaucuccuucucggcaucaagcuuaccaugcggggccugagcucccgcaagcggcgcagccacgacgugcucaccguccaguuccugauccuggggaugcuccugaugaccggcggggugacgcuggugcggaagaaccgcuggcuccugcugaacgucaccuccgaggaccucggcaagaccuucagcguggggaccggcaacugcacgaccaacauccuggaggccaaguacuggugccccgacuccauggaguacaacugcccgaaccugagcccccgggaggagcccgacgacaucgacugcuggugcuacggcguggagaacguccgcguggccuacgggaagugcgacuccgcgggccggagccgccggucccgccgggccaucgaccuccccacccacgagaaccacgggcugaagacccgccaggagaaguggaugacgggccggaugggggagcgccagcugcagaagaucgagcggugguucgugcgcaacccguucuucgccgucaccgcccucaccaucgccuaccuggugggcagcaacaugacccagcggguggucaucgcgcugcucgugcuggccgugggccccgccuacuccgcccacugcaucgggaucacggaccgcgacuucaucgagggcguccacgggggcaccugggugagcgcgacccuggagcaggacaagugcgugaccgucauggcccccgacaagcccucccucgacaucagccuggagacgguggccaucgaccggccggccgaggugcgcaaggucugcuacaacgccgugcugacccacgugaagaucaacgacaagugccccuccaccggcgaggcgcaccucgccgaggagaacgagggggacaacgccugcaagcggaccuacagcgaccggggcugggggaacggcugcgggcuguucggcaagggcuccaucgucgccugcgccaaguucacgugcgcgaaguccaugagccuguucgagguggaccagaccaagauccaguacgucauccgcgcccagcuccacgugggggccaagcaggagaacuggaacaccgacaucaagacccugaaguucgacgcccugagcggcagccaggagguggaguucaucggguacggcaaggccacgcucgagugccagguccagaccgcgguggacuucgggaacuccuacaucgccgagauggagaccgagagcuggaucguggaccggcagugggcccaggaccugacccugcccuggcaguccggcagcggcggggucuggcgcgagaugcaccaccucguggaguucgagcccccgcacgccgccacgauccgggugcuggcgcugggcaaccaggaggggucccucaagaccgcccugaccggcgccaugcgcgucaccaaggacacgaacgacaacaaccuguacaagcuccacgggggccacgugagcugccgggugaagcuguccgcccugacccucaagggcaccagcuacaagaucugcaccgacaagauguucuucgucaagaaccccacggacaccgggcacggcaccguggugaugcaggucaagguguccaagggggcgcccugccgcaucccggugaucgucgccgacgaccugaccgccgccaucaacaagggcauccuggugaccgugaacccgaucgccagcacgaacgacgacgagguccucaucgaggugaacccccccuucggcgacuccuacaucaucguggggcggggcgacagccgccugaccuaccaguggcacaaggagggguccagcaucggcaagcuguucacccagaccaugaagggggucgagcggcuggcggugaugggcgacacggccugggacuucuccagcgccggcggguucuucaccuccgugggcaaggggauccacaccgucuucggcagcgccuuccaggggcuguucggcggccucaacuggaucaccaaggugaucaugggggccgugcugaucugggucggcaucaacacgcgcaacaugaccauguccaugagcaugauccucgugggggugaucaugauguuccugagccugggcgucggggcggaccagggcugcgccaucaacuucggcaagugaggacuagugcaucacauuuaaaagcaucucagccuaccaugagaauaagagaaagaaaaugaagaucaauagcuuauucaucucuuuuucuuuuucguugguguaaagccaacacccugucuaaaaaacauaaauuucuuuaaucauuuugccucuuuucucugugcuucaauuaauaaaaaauggaaagaaccuagaucuaaaaaaaaaaaaaaaaaaaaaaaaaaaaaaaaaaaaaaaaaaaaaaaaaaaaaaaaaaaaaaaaugcaucccccccccccccccccccccccccccccccaaaggcucuuuucagagccaccagaauu

SEQ ID NO: 1141 - RNA, 2417 nt, Artificial Sequence
  mRNA product Design i-2 comprising derived and/or modified sequence from YFV__NC_002031.1__SS-prME (polyprotein: M,aa104-778) (opt1)
gggagaggcgcugccuacggagguggcagccaucuccuucucggcaucaagcuuaccauggacgugcucaccguccaguuccugauccuggggaugcuccugaugaccggcggggugacgcuggugcggaagaaccgcuggcuccugcugaacgucaccuccgaggaccucggcaagaccuucagcguggggaccggcaacugcacgaccaacauccuggaggccaaguacuggugccccgacuccauggaguacaacugcccgaaccugagcccccgggaggagcccgacgacaucgacugcuggugcuacggcguggagaacguccgcguggccuacgggaagugcgacuccgcgggccggagccgccggucccgccgggccaucgaccuccccacccacgagaaccacgggcugaagacccgccaggagaaguggaugacgggccggaugggggagcgccagcugcagaagaucgagcggugguucgugcgcaacccguucuucgccgucaccgcccucaccaucgccuaccuggugggcagcaacaugacccagcggguggucaucgcgcugcucgugcuggccgugggccccgccuacuccgcccacugcaucgggaucacggaccgcgacuucaucgagggcguccacgggggcaccugggugagcgcgacccuggagcaggacaagugcgugaccgucauggcccccgacaagcccucccucgacaucagccuggagacgguggccaucgaccggccggccgaggugcgcaaggucugcuacaacgccgugcugacccacgugaagaucaacgacaagugccccuccaccggcgaggcgcaccucgccgaggagaacgagggggacaacgccugcaagcggaccuacagcgaccggggcugggggaacggcugcgggcuguucggcaagggcuccaucgucgccugcgccaaguucacgugcgcgaaguccaugagccuguucgagguggaccagaccaagauccaguacgucauccgcgcccagcuccacgugggggccaagcaggagaacuggaacaccgacaucaagacccugaaguucgacgcccugagcggcagccaggagguggaguucaucggguacggcaaggccacgcucgagugccagguccagaccgcgguggacuucgggaacuccuacaucgccgagauggagaccgagagcuggaucguggaccggcagugggcccaggaccugacccugcccuggcaguccggcagcggcggggucuggcgcgagaugcaccaccucguggaguucgagcccccgcacgccgccacgauccgggugcuggcgcugggcaaccaggaggggucccucaagaccgcccugaccggcgccaugcgcgucaccaaggacacgaacgacaacaaccuguacaagcuccacgggggccacgugagcugccgggugaagcuguccgcccugacccucaagggcaccagcuacaagaucugcaccgacaagauguucuucgucaagaaccccacggacaccgggcacggcaccguggugaugcaggucaagguguccaagggggcgcccugccgcaucccggugaucgucgccgacgaccugaccgccgccaucaacaagggcauccuggugaccgugaacccgaucgccagcacgaacgacgacgagguccucaucgaggugaacccccccuucggcgacuccuacaucaucguggggcggggcgacagccgccugaccuaccaguggcacaaggagggguccagcaucggcaagcuguucacccagaccaugaagggggucgagcggcuggcggugaugggcgacacggccugggacuucuccagcgccggcggguucuucaccuccgugggcaaggggauccacaccgucuucggcagcgccuuccaggggcuguucggcggccucaacuggaucaccaaggugaucaugggggccgugcugaucugggucggcaucaacacgcgcaacaugaccauguccaugagcaugauccucgugggggugaucaugauguuccugagccugggcgucggggcgugaggacuagugcaucacauuuaaaagcaucucagccuaccaugagaauaagagaaagaaaaugaagaucaauagcuuauucaucucuuuuucuuuuucguugguguaaagccaacacccugucuaaaaaacauaaauuucuuuaaucauuuugccucuuuucucugugcuucaauuaauaaaaaauggaaagaaccuagaucuaaaaaaaaaaaaaaaaaaaaaaaaaaaaaaaaaaaaaaaaaaaaaaaaaaaaaaaaaaaaaaaaugcaucccccccccccccccccccccccccccccccaaaggcucuuuucagagccaccagaauu

SEQ ID NO: 1142 - RNA, 2444 nt, Artificial Sequence
  mRNA product Design i-2 comprising derived and/or modified sequence from YFV__NC_002031.1__SSIgE-prME-XX (polyprotein: aa122-788) (opt1)
gggagaggcgcugccuacggagguggcagccaucuccuucucggcaucaagcuuaccauggacuggaccuggauccuguuccucguggccgccgcgacccgcguccacagcgugacgcuggugcggaagaaccgcuggcuccugcugaacgucaccuccgaggaccucggcaagaccuucagcguggggaccggcaacugcacgaccaacauccuggaggccaaguacuggugccccgacuccauggaguacaacugcccgaaccugagcccccgggaggagcccgacgacaucgacugcuggugcuacggcguggagaacguccgcguggccuacgggaagugcgacuccgcgggccggagccgccggucccgccgggccaucgaccuccccacccacgagaaccacgggcugaagacccgccaggagaaguggaugacgggccggaugggggagcgccagcugcagaagaucgagcggugguucgugcgcaacccguucuucgccgucaccgcccucaccaucgccuaccuggugggcagcaacaugacccagcggguggucaucgcgcugcucgugcuggccgugggccccgccuacuccgcccacugcaucgggaucacggaccgcgacuucaucgagggcguccacgggggcaccugggugagcgcgacccuggagcaggacaagugcgugaccgucauggcccccgacaagcccucccucgacaucagccuggagacgguggccaucgaccggccggccgaggugcgcaaggucugcuacaacgccgugcugacccacgugaagaucaacgacaagugccccuccaccggcgaggcgcaccucgccgaggagaacgagggggacaacgccugcaagcggaccuacagcgaccggggcugggggaacggcugcgggcuguucggcaagggcuccaucgucgccugcgccaaguucacgugcgcgaaguccaugagccuguucgagguggaccagaccaagauccaguacgucauccgcgcccagcuccacgugggggccaagcaggagaacuggaacaccgacaucaagacccugaaguucgacgcccugagcggcagccaggagguggaguucaucggguacggcaaggccacgcucgagugccagguccagaccgcgguggacuucgggaacuccuacaucgccgagauggagaccgagagcuggaucguggaccggcagugggcccaggaccugacccugcccuggcaguccggcagcggcggggucuggcgcgagaugcaccaccucguggaguucgagcccccgcacgccgccacgauccgggugcuggcgcugggcaaccaggaggggucccucaagaccgcccugaccggcgccaugcgcgucaccaaggacacgaacgacaacaaccuguacaagcuccacgggggccacgugagcugccgggugaagcuguccgcccugacccucaagggcaccagcuacaagaucugcaccgacaagauguucuucgucaagaaccccacggacaccgggcacggcaccguggugaugcaggucaagguguccaagggggcgcccugccgcaucccggugaucgucgccgacgaccugaccgccgccaucaacaagggcauccuggugaccgugaacccgaucgccagcacgaacgacgacgagguccucaucgaggugaacccccccuucggcgacuccuacaucaucguggggcggggcgacagccgccugaccuaccaguggcacaaggagggguccagcaucggcaagcuguucacccagaccaugaagggggucgagcggcuggcggugaugggcgacacggccugggacuucuccagcgccggcggguucuucaccuccgugggcaaggggauccacaccgucuucggcagcgccuuccaggggcuguucggcggccucaacuggaucaccaaggugaucaugggggccgugcugaucugggucggcaucaacacgcgcaacaugaccauguccaugagcaugauccucgugggggugaucaugauguuccugagccugggcgucggggcggaccagggcugcgccaucaacuucggcaagugaggacuagugcaucacauuuaaaagcaucucagccuaccaugagaauaagagaaagaaaaugaagaucaauagcuuauucaucucuuuuucuuuuucguugguguaaagccaacacccugucuaaaaaacauaaauuucuuuaaucauuuugccucuuuucucugugcuucaauuaauaaaaaauggaaagaaccuagaucuaaaaaaaaaaaaaaaaaaaaaaaaaaaaaaaaaaaaaaaaaaaaaaaaaaaaaaaaaaaaaaaaugcaucccccccccccccccccccccccccccccccaaaggcucuuuucagagccaccagaauu

SEQ ID NO: 1143 - RNA, 2414 nt, Artificial Sequence
  mRNA product Design i-2 comprising derived and/or modified sequence from YFV__NC_002031.1__SSIgE-prME (polyprotein: aa122-778) (opt1)
gggagaggcgcugccuacggagguggcagccaucuccuucucggcaucaagcuuaccauggacuggaccuggauccuguuccucguggccgccgcgacccgcguccacagcgugacgcuggugcggaagaaccgcuggcuccugcugaacgucaccuccgaggaccucggcaagaccuucagcguggggaccggcaacugcacgaccaacauccuggaggccaaguacuggugccccgacuccauggaguacaacugcccgaaccugagcccccgggaggagcccgacgacaucgacugcuggugcuacggcguggagaacguccgcguggccuacgggaagugcgacuccgcgggccggagccgccggucccgccgggccaucgaccuccccacccacgagaaccacgggcugaagacccgccaggagaaguggaugacgggccggaugggggagcgccagcugcagaagaucgagcggugguucgugcgcaacccguucuucgccgucaccgcccucaccaucgccuaccuggugggcagcaacaugacccagcggguggucaucgcgcugcucgugcuggccgugggccccgccuacuccgcccacugcaucgggaucacggaccgcgacuucaucgagggcguccacgggggcaccugggugagcgcgacccuggagcaggacaagugcgugaccgucauggcccccgacaagcccucccucgacaucagccuggagacgguggccaucgaccggccggccgaggugcgcaaggucugcuacaacgccgugcugacccacgugaagaucaacgacaagugccccuccaccggcgaggcgcaccucgccgaggagaacgagggggacaacgccugcaagcggaccuacagcgaccggggcugggggaacggcugcgggcuguucggcaagggcuccaucgucgccugcgccaaguucacgugcgcgaaguccaugagccuguucgagguggaccagaccaagauccaguacgucauccgcgcccagcuccacgugggggccaagcaggagaacuggaacaccgacaucaagacccugaaguucgacgcccugagcggcagccaggagguggaguucaucggguacggcaaggccacgcucgagugccagguccagaccgcgguggacuucgggaacuccuacaucgccgagauggagaccgagagcuggaucguggaccggcagugggcccaggaccugacccugcccuggcaguccggcagcggcggggucuggcgcgagaugcaccaccucguggaguucgagcccccgcacgccgccacgauccgggugcuggcgcugggcaaccaggaggggucccucaagaccgcccugaccggcgccaugcgcgucaccaaggacacgaacgacaacaaccuguacaagcuccacgggggccacgugagcugccgggugaagcuguccgcccugacccucaagggcaccagcuacaagaucugcaccgacaagauguucuucgucaagaaccccacggacaccgggcacggcaccguggugaugcaggucaagguguccaagggggcgcccugccgcaucccggugaucgucgccgacgaccugaccgccgccaucaacaagggcauccuggugaccgugaacccgaucgccagcacgaacgacgacgagguccucaucgaggugaacccccccuucggcgacuccuacaucaucguggggcggggcgacagccgccugaccuaccaguggcacaaggagggguccagcaucggcaagcuguucacccagaccaugaagggggucgagcggcuggcggugaugggcgacacggccugggacuucuccagcgccggcggguucuucaccuccgugggcaaggggauccacaccgucuucggcagcgccuuccaggggcuguucggcggccucaacuggaucaccaaggugaucaugggggccgugcugaucugggucggcaucaacacgcgcaacaugaccauguccaugagcaugauccucgugggggugaucaugauguuccugagccugggcgucggggcgugaggacuagugcaucacauuuaaaagcaucucagccuaccaugagaauaagagaaagaaaaugaagaucaauagcuuauucaucucuuuuucuuuuucguugguguaaagccaacacccugucuaaaaaacauaaauuucuuuaaucauuuugccucuuuucucugugcuucaauuaauaaaaaauggaaagaaccuagaucuaaaaaaaaaaaaaaaaaaaaaaaaaaaaaaaaaaaaaaaaaaaaaaaaaaaaaaaaaaaaaaaaugcaucccccccccccccccccccccccccccccccaaaggcucuuuucagagccaccagaauu

SEQ ID NO: 1144 - RNA, 2462 nt, Artificial Sequence
  mRNA product Design i-2 comprising derived and/or modified sequence from YFV__NC_002031.1__SSjev-prME-XX (polyprotein: aa122-788) (opt1)
gggagaggcgcugccuacggagguggcagccaucuccuucucggcaucaagcuuaccaugggcaagcgcagcgccggguccaucauguggcuggccagccucgcgguggucaucgccugcgccggcgccgugacgcuggugcggaagaaccgcuggcuccugcugaacgucaccuccgaggaccucggcaagaccuucagcguggggaccggcaacugcacgaccaacauccuggaggccaaguacuggugccccgacuccauggaguacaacugcccgaaccugagcccccgggaggagcccgacgacaucgacugcuggugcuacggcguggagaacguccgcguggccuacgggaagugcgacuccgcgggccggagccgccggucccgccgggccaucgaccuccccacccacgagaaccacgggcugaagacccgccaggagaaguggaugacgggccggaugggggagcgccagcugcagaagaucgagcggugguucgugcgcaacccguucuucgccgucaccgcccucaccaucgccuaccuggugggcagcaacaugacccagcggguggucaucgcgcugcucgugcuggccgugggccccgccuacuccgcccacugcaucgggaucacggaccgcgacuucaucgagggcguccacgggggcaccugggugagcgcgacccuggagcaggacaagugcgugaccgucauggcccccgacaagcccucccucgacaucagccuggagacgguggccaucgaccggccggccgaggugcgcaaggucugcuacaacgccgugcugacccacgugaagaucaacgacaagugccccuccaccggcgaggcgcaccucgccgaggagaacgagggggacaacgccugcaagcggaccuacagcgaccggggcugggggaacggcugcgggcuguucggcaagggcuccaucgucgccugcgccaaguucacgugcgcgaaguccaugagccuguucgagguggaccagaccaagauccaguacgucauccgcgcccagcuccacgugggggccaagcaggagaacuggaacaccgacaucaagacccugaaguucgacgcccugagcggcagccaggagguggaguucaucggguacggcaaggccacgcucgagugccagguccagaccgcgguggacuucgggaacuccuacaucgccgagauggagaccgagagcuggaucguggaccggcagugggcccaggaccugacccugcccuggcaguccggcagcggcggggucuggcgcgagaugcaccaccucguggaguucgagcccccgcacgccgccacgauccgggugcuggcgcugggcaaccaggaggggucccucaagaccgcccugaccggcgccaugcgcgucaccaaggacacgaacgacaacaaccuguacaagcuccacgggggccacgugagcugccgggugaagcuguccgcccugacccucaagggcaccagcuacaagaucugcaccgacaagauguucuucgucaagaaccccacggacaccgggcacggcaccguggugaugcaggucaagguguccaagggggcgcccugccgcaucccggugaucgucgccgacgaccugaccgccgccaucaacaagggcauccuggugaccgugaacccgaucgccagcacgaacgacgacgagguccucaucgaggugaacccccccuucggcgacuccuacaucaucguggggcggggcgacagccgccugaccuaccaguggcacaaggagggguccagcaucggcaagcuguucacccagaccaugaagggggucgagcggcuggcggugaugggcgacacggccugggacuucuccagcgccggcggguucuucaccuccgugggcaaggggauccacaccgucuucggcagcgccuuccaggggcuguucggcggccucaacuggaucaccaaggugaucaugggggccgugcugaucugggucggcaucaacacgcgcaacaugaccauguccaugagcaugauccucgugggggugaucaugauguuccugagccugggcgucggggcggaccagggcugcgccaucaacuucggcaagugaggacuagugcaucacauuuaaaagcaucucagccuaccaugagaauaagagaaagaaaaugaagaucaauagcuuauucaucucuuuuucuuuuucguugguguaaagccaacacccugucuaaaaaacauaaauuucuuuaaucauuuugccucuuuucucugugcuucaauuaauaaaaaauggaaagaaccuagaucuaaaaaaaaaaaaaaaaaaaaaaaaaaaaaaaaaaaaaaaaaaaaaaaaaaaaaaaaaaaaaaaaugcaucccccccccccccccccccccccccccccccaaaggcucuuuucagagccaccagaauu

SEQ ID NO: 1145 - RNA, 2432 nt, Artificial Sequence
  mRNA product Design i-2 comprising derived and/or modified sequence from YFV__NC_002031.1__SSjev-prME (polyprotein: aa122-778) (opt1)
gggagaggcgcugccuacggagguggcagccaucuccuucucggcaucaagcuuaccaugggcaagcgcagcgccggguccaucauguggcuggccagccucgcgguggucaucgccugcgccggcgccgugacgcuggugcggaagaaccgcuggcuccugcugaacgucaccuccgaggaccucggcaagaccuucagcguggggaccggcaacugcacgaccaacauccuggaggccaaguacuggugccccgacuccauggaguacaacugcccgaaccugagcccccgggaggagcccgacgacaucgacugcuggugcuacggcguggagaacguccgcguggccuacgggaagugcgacuccgcgggccggagccgccggucccgccgggccaucgaccuccccacccacgagaaccacgggcugaagacccgccaggagaaguggaugacgggccggaugggggagcgccagcugcagaagaucgagcggugguucgugcgcaacccguucuucgccgucaccgcccucaccaucgccuaccuggugggcagcaacaugacccagcggguggucaucgcgcugcucgugcuggccgugggccccgccuacuccgcccacugcaucgggaucacggaccgcgacuucaucgagggcguccacgggggcaccugggugagcgcgacccuggagcaggacaagugcgugaccgucauggcccccgacaagcccucccucgacaucagccuggagacgguggccaucgaccggccggccgaggugcgcaaggucugcuacaacgccgugcugacccacgugaagaucaacgacaagugccccuccaccggcgaggcgcaccucgccgaggagaacgagggggacaacgccugcaagcggaccuacagcgaccggggcugggggaacggcugcgggcuguucggcaagggcuccaucgucgccugcgccaaguucacgugcgcgaaguccaugagccuguucgagguggaccagaccaagauccaguacgucauccgcgcccagcuccacgugggggccaagcaggagaacuggaacaccgacaucaagacccugaaguucgacgcccugagcggcagccaggagguggaguucaucggguacggcaaggccacgcucgagugccagguccagaccgcgguggacuucgggaacuccuacaucgccgagauggagaccgagagcuggaucguggaccggcagugggcccaggaccugacccugcccuggcaguccggcagcggcggggucuggcgcgagaugcaccaccucguggaguucgagcccccgcacgccgccacgauccgggugcuggcgcugggcaaccaggaggggucccucaagaccgcccugaccggcgccaugcgcgucaccaaggacacgaacgacaacaaccuguacaagcuccacgggggccacgugagcugccgggugaagcuguccgcccugacccucaagggcaccagcuacaagaucugcaccgacaagauguucuucgucaagaaccccacggacaccgggcacggcaccguggugaugcaggucaagguguccaagggggcgcccugccgcaucccggugaucgucgccgacgaccugaccgccgccaucaacaagggcauccuggugaccgugaacccgaucgccagcacgaacgacgacgagguccucaucgaggugaacccccccuucggcgacuccuacaucaucguggggcggggcgacagccgccugaccuaccaguggcacaaggagggguccagcaucggcaagcuguucacccagaccaugaagggggucgagcggcuggcggugaugggcgacacggccugggacuucuccagcgccggcggguucuucaccuccgugggcaaggggauccacaccgucuucggcagcgccuuccaggggcuguucggcggccucaacuggaucaccaaggugaucaugggggccgugcugaucugggucggcaucaacacgcgcaacaugaccauguccaugagcaugauccucgugggggugaucaugauguuccugagccugggcgucggggcgugaggacuagugcaucacauuuaaaagcaucucagccuaccaugagaauaagagaaagaaaaugaagaucaauagcuuauucaucucuuuuucuuuuucguugguguaaagccaacacccugucuaaaaaacauaaauuucuuuaaucauuuugccucuuuucucugugcuucaauuaauaaaaaauggaaagaaccuagaucuaaaaaaaaaaaaaaaaaaaaaaaaaaaaaaaaaaaaaaaaaaaaaaaaaaaaaaaaaaaaaaaaugcaucccccccccccccccccccccccccccccccaaaggcucuuuucagagccaccagaauu

SEQ ID NO: 1146 - RNA, 2480 nt, Artificial Sequence
  mRNA product Design i-2 comprising derived and/or modified sequence from YFV__NC_002031.1__X-SS-prME-XX (polyprotein: aa92-788) (opt1)
gggagaggcgcugccuacggagguggcagccaucuccuucucggcaucaagcuuaccaugcgcggccugagcucccggaagcgccggagccacgacgugcucaccguccaguuccugauccuggggaugcuccugaugaccggcggggugacgcuggugcgcaagaaccgguggcuccugcugaacgucaccuccgaggaccucggcaagaccuucagcguggggaccggcaacugcacgaccaacauccuggaggccaaguacuggugccccgacuccauggaguacaacugccccaaccugagcccccgcgaggagcccgacgacaucgacugcuggugcuacggcguggagaacguccggguggccuacgggaagugcgacuccgcgggccgcagccggcgcucccggcgcgccaucgaccuccccacccacgagaaccacgggcugaagacccggcaggagaaguggaugacgggccgcaugggggagcggcagcugcagaagaucgagcgcugguucgugcggaacccguucuucgccgucaccgcccucaccaucgccuaccuggugggcagcaacaugacccagcgcguggucaucgcgcugcucgugcuggccgugggccccgccuacuccgcccacugcaucgggaucacggaccgggacuucaucgagggcguccacgggggcaccugggugagcgcgacccuggagcaggacaagugcgugaccgucauggcccccgacaagcccucccucgacaucagccuggagacgguggccaucgaccgcccggccgaggugcggaaggucugcuacaacgccgugcugacccacgugaagaucaacgacaagugccccuccaccggcgaggcgcaccucgccgaggagaacgagggggacaacgccugcaagcgcaccuacagcgaccgcggcugggggaacggcugcgggcuguucggcaagggcuccaucgucgccugcgccaaguucacgugcgccaagagcaugucccuguucgagguggaccagaccaagauccaguacgucauccgggcgcagcuccacgugggggccaagcaggagaacuggaacaccgacaucaagacccugaaguucgacgcccugagcggcagccaggagguggaguucaucggguacggcaaggccacgcucgagugccagguccagaccgcgguggacuucgggaacuccuacaucgccgagauggagaccgagagcuggaucguggaccgccagugggcccaggaccugacccugcccuggcaguccggcagcggcggggucuggcgggagaugcaccaccucguggaguucgagcccccgcacgccgccacgauccgcgugcuggcgcugggcaaccaggaggggucccucaagaccgcccugaccggcgccaugcgggucaccaaggacacgaacgacaacaaccuguacaagcuccacgggggccacgugagcugccgcgugaagcuguccgcccugacccucaagggcaccagcuacaagaucugcaccgacaagauguucuucgucaagaaccccacggacaccgggcacggcaccguggugaugcaggucaagguguccaagggggcgcccugccggauccccgugaucgucgccgacgaccugaccgccgccaucaacaagggcauccuggugaccgugaacccgaucgccagcacgaacgacgacgagguccucaucgaggugaacccgcccuucggcgacuccuacaucaucguggggcgcggcgacagccggcugaccuaccaguggcacaaggagggguccagcaucggcaagcuguucacccagaccaugaagggggucgagcgccucgcggugaugggcgacacggccugggacuucuccagcgccggcggguucuucaccuccgugggcaaggggauccacaccgucuucggcagcgccuuccaggggcuguucggcggccugaacuggaucaccaaggugaucaugggggccgugcugaucugggucggcaucaacacgcggaacaugaccauguccaugagcaugauccucgugggggugaucaugauguuccugagccugggcgucggggcggaccagggcugcgccaucaacuucggcaagugaggacuagugcaucacauuuaaaagcaucucagccuaccaugagaauaagagaaagaaaaugaagaucaauagcuuauucaucucuuuuucuuuuucguugguguaaagccaacacccugucuaaaaaacauaaauuucuuuaaucauuuugccucuuuucucugugcuucaauuaauaaaaaauggaaagaaccuagaucuaaaaaaaaaaaaaaaaaaaaaaaaaaaaaaaaaaaaaaaaaaaaaaaaaaaaaaaaaaaaaaaaugcaucccccccccccccccccccccccccccccccaaaggcucuuuucagagccaccagaauu

SEQ ID NO: 1147 - RNA, 2417 nt, Artificial Sequence
  mRNA product Design i-2 comprising derived and/or modified sequence from YFV__NC_002031.1__SS-prME (polyprotein: M,aa104-778) (opt1)
gggagaggcgcugccuacggagguggcagccaucuccuucucggcaucaagcuuaccauggacgugcugaccguccaguuccucauccugggcaugcugcucaugaccgggggcgugacgcuggugcgcaagaaccgguggcugcuccugaacgucaccagcgaggaccuggggaagaccuucuccgugggcaccgggaacugcacgaccaacauccucgaggccaaguacuggugccccgacagcauggaguacaacugccccaaccugagcccccgcgaggagcccgacgacaucgacugcuggugcuacggcguggagaacguccggguggccuacggcaagugcgacuccgcggggcgcucccggcgcagccggcgcgccaucgaccugcccacccacgagaaccacggccucaagacccggcaggagaaguggaugacggggcgcaugggcgagcggcagcugcagaagaucgagcgcugguucgugcggaacccguucuucgccgucaccgcccugaccaucgccuaccucgugggguccaacaugacccagcgcguggucaucgcgcugcuggugcucgccgugggccccgccuacagcgcccacugcaucggcaucacggaccgggacuucaucgaggggguccacggcgggaccuggguguccgcgacccuggagcaggacaagugcgugaccgucauggcccccgacaagcccagccuggacaucucccucgagacgguggccaucgaccgcccggccgaggugcggaaggucugcuacaacgccgugcugacccacgugaagaucaacgacaagugccccagcaccggcgaggcgcaccuggccgaggagaacgagggcgacaacgccugcaagcgcaccuacuccgaccggggguggggcaacgggugcggccucuucgggaagggcagcaucgucgccugcgccaaguucacgugcgcgaaguccaugagccuguucgagguggaccagaccaagauccaguacgucauccgcgcccagcugcacgugggcgccaagcaggagaacuggaacaccgacaucaagacccucaaguucgacgcccuguccgggagccaggagguggaguucaucggcuacgggaaggccacgcuggagugccagguccagaccgcgguggacuucggcaacuccuacaucgccgagauggagaccgagagcuggaucguggaccggcagugggcccaggaccucacccugcccuggcagagcggguccggcggcgucuggcgcgagaugcaccaccugguggaguucgagcccccgcacgccgccacgauccgcgugcucgcgcuggggaaccaggagggcagccugaagaccgcccucaccggggccaugcgggucaccaaggacacgaacgacaacaaccuguacaagcugcacggcgggcacguguccugccgcgugaagcucagcgcccugacccugaagggcaccuccuacaagaucugcaccgacaagauguucuucgucaagaaccccacggacaccggccacgggaccguggugaugcaggucaaggugagcaagggcgcgcccugccggauccccgugaucgucgccgacgaccucaccgccgccaucaacaaggggauccuggugaccgugaacccgaucgccuccacgaacgacgacgagguccugaucgaggugaacccgcccuucggcgacagcuacaucaucgugggccgcggggacucccggcucaccuaccaguggcacaaggagggcagcuccaucgggaagcuguucacccagaccaugaagggcgucgagcgccuggcggugaugggggacacggccugggacuucagcuccgccggcggcuucuucaccagcguggggaagggcauccacaccgucuucggguccgccuuccagggccucuucgggggccugaacuggaucaccaaggugaucaugggcgccgugcugaucugggucgggaucaacacgcggaacaugaccaugagcauguccaugauccuggugggcgugaucaugauguuccucagccugggggucggcgcgugaggacuagugcaucacauuuaaaagcaucucagccuaccaugagaauaagagaaagaaaaugaagaucaauagcuuauucaucucuuuuucuuuuucguugguguaaagccaacacccugucuaaaaaacauaaauuucuuuaaucauuuugccucuuuucucugugcuucaauuaauaaaaaauggaaagaaccuagaucuaaaaaaaaaaaaaaaaaaaaaaaaaaaaaaaaaaaaaaaaaaaaaaaaaaaaaaaaaaaaaaaaugcaucccccccccccccccccccccccccccccccaaaggcucuuuucagagccaccagaauu

SEQ ID NO: 1148 - RNA, 2444 nt, Artificial Sequence
  mRNA product Design i-2 comprising derived and/or modified sequence from YFV__NC_002031.1__SSIgE-prME-XX (polyprotein: aa122-788) (opt1)
gggagaggcgcugccuacggagguggcagccaucuccuucucggcaucaagcuuaccauggacuggaccuggauccuguuccucguggccgccgcgacccgcguccacagcgugacgcuggugcggaagaaccgcuggcugcuccugaacgucaccuccgaggaccugggcaagaccuucagcguggggaccggcaacugcacgaccaacauccucgaggccaaguacuggugccccgacuccauggaguacaacugccccaaccugagcccccgggaggagcccgacgacaucgacugcuggugcuacgggguggagaacguccgcguggccuacggcaagugcgacuccgccgggcggagccgccggucccgccgggccaucgaccugcccacccacgagaaccacggccucaagacccgccaggagaaguggaugacgggccggaugggggagcgccagcugcagaagaucgagcggugguucgugcgcaacccguucuucgcggucaccgcccugaccaucgccuaccucgugggcagcaacaugacccagcggguggucaucgcccugcuggugcucgcgguggggcccgccuacuccgcccacugcaucggcaucacggaccgcgacuucaucgaggggguccacggcggcaccugggugagcgccacccuggagcaggacaagugcgugaccgucauggcccccgacaagcccucccuggacaucagccucgagacgguggcgaucgaccggccggccgaggugcgcaaggucugcuacaacgccgugcugacccacgugaagaucaacgacaagugccccuccaccggggaggcccaccuggccgaggagaacgagggcgacaacgcgugcaagcggaccuacagcgaccgcggguggggcaacggcugcggccucuucgggaagggguccaucgucgccugcgccaaguucacgugcgccaagagcaugucccuguucgagguggaccagaccaagauccaguacgucauccgggcccagcugcacgugggcgcgaagcaggagaacuggaacaccgacaucaagacccucaaguucgacgcccugagcgggucccaggagguggaguucaucggcuacggcaaggccacgcuggagugccagguccagaccgccguggacuucgggaacagcuacaucgccgagauggagaccgagagcuggaucguggaccgccagugggcgcaggaccucacccugcccuggcaguccggcagcgggggcgucuggcgcgagaugcaccaccugguggaguucgagcccccgcacgccgccacgauccgggugcucgcccuggggaaccaggagggcucccugaagaccgcgcucaccggcgccaugcgcgucaccaaggacacgaacgacaacaaccuguacaagcugcacgggggccacgugagcugccgggugaagcucuccgcccugacccugaaggggaccagcuacaagaucugcaccgacaagauguucuucgucaagaaccccacggacaccggccacgggaccguggugaugcaggucaagguguccaagggcgcccccugccgcauccccgugaucgucgccgacgaccucaccgcggccaucaacaagggcauccuggugaccgugaacccgaucgccagcacgaacgacgacgagguccugaucgaggugaacccgcccuucggggacuccuacaucaucgugggccgcggggacagccggcucaccuaccaguggcacaaggagggcuccagcaucggcaagcuguucacccagaccaugaagggggucgagcggcuggccgugaugggcgacacggccugggacuucuccagcgccgggggcuucuucaccuccguggggaagggcauccacaccgucuucggcagcgcguuccaggggcuguucggcgggcucaacuggaucaccaaggugaucaugggcgccgugcugaucugggucgggaucaacacgcgcaacaugaccauguccaugagcaugauccucgugggcgugaucaugauguuccugucccugggcgucggggccgaccagggcugcgccaucaacuucgggaagugaggacuagugcaucacauuuaaaagcaucucagccuaccaugagaauaagagaaagaaaaugaagaucaauagcuuauucaucucuuuuucuuuuucguugguguaaagccaacacccugucuaaaaaacauaaauuucuuuaaucauuuugccucuuuucucugugcuucaauuaauaaaaaauggaaagaaccuagaucuaaaaaaaaaaaaaaaaaaaaaaaaaaaaaaaaaaaaaaaaaaaaaaaaaaaaaaaaaaaaaaaaugcaucccccccccccccccccccccccccccccccaaaggcucuuuucagagccaccagaauu

SEQ ID NO: 1149 - RNA, 2414 nt, Artificial Sequence
  mRNA product Design i-2 comprising derived and/or modified sequence from YFV__NC_002031.1__SSIgE-prME (polyprotein: aa122-778) (opt1)
gggagaggcgcugccuacggagguggcagccaucuccuucucggcaucaagcuuaccauggacuggaccuggauccuguuccucguggccgccgcgacccgcguccacagcgugacgcuggugcggaagaaccgcuggcugcuccugaacgucaccuccgaggaccugggcaagaccuucagcguggggaccggcaacugcacgaccaacauccucgaggccaaguacuggugccccgacuccauggaguacaacugccccaaccugagcccccgggaggagcccgacgacaucgacugcuggugcuacgggguggagaacguccgcguggccuacggcaagugcgacuccgccgggcggagccgccggucccgccgggccaucgaccugcccacccacgagaaccacggccucaagacccgccaggagaaguggaugacgggccggaugggggagcgccagcugcagaagaucgagcggugguucgugcgcaacccguucuucgcggucaccgcccugaccaucgccuaccucgugggcagcaacaugacccagcggguggucaucgcccugcuggugcucgcgguggggcccgccuacuccgcccacugcaucggcaucacggaccgcgacuucaucgaggggguccacggcggcaccugggugagcgccacccuggagcaggacaagugcgugaccgucauggcccccgacaagcccucccuggacaucagccucgagacgguggcgaucgaccggccggccgaggugcgcaaggucugcuacaacgccgugcugacccacgugaagaucaacgacaagugccccuccaccggggaggcccaccuggccgaggagaacgagggcgacaacgcgugcaagcggaccuacagcgaccgcggguggggcaacggcugcggccucuucgggaagggguccaucgucgccugcgccaaguucacgugcgccaagagcaugucccuguucgagguggaccagaccaagauccaguacgucauccgggcccagcugcacgugggcgcgaagcaggagaacuggaacaccgacaucaagacccucaaguucgacgcccugagcgggucccaggagguggaguucaucggcuacggcaaggccacgcuggagugccagguccagaccgccguggacuucgggaacagcuacaucgccgagauggagaccgagagcuggaucguggaccgccagugggcgcaggaccucacccugcccuggcaguccggcagcgggggcgucuggcgcgagaugcaccaccugguggaguucgagcccccgcacgccgccacgauccgggugcucgcccuggggaaccaggagggcucccugaagaccgcgcucaccggcgccaugcgcgucaccaaggacacgaacgacaacaaccuguacaagcugcacgggggccacgugagcugccgggugaagcucuccgcccugacccugaaggggaccagcuacaagaucugcaccgacaagauguucuucgucaagaaccccacggacaccggccacgggaccguggugaugcaggucaagguguccaagggcgcccccugccgcauccccgugaucgucgccgacgaccucaccgcggccaucaacaagggcauccuggugaccgugaacccgaucgccagcacgaacgacgacgagguccugaucgaggugaacccgcccuucggggacuccuacaucaucgugggccgcggggacagccggcucaccuaccaguggcacaaggagggcuccagcaucggcaagcuguucacccagaccaugaagggggucgagcggcuggccgugaugggcgacacggccugggacuucuccagcgccgggggcuucuucaccuccguggggaagggcauccacaccgucuucggcagcgcguuccaggggcuguucggcgggcucaacuggaucaccaaggugaucaugggcgccgugcugaucugggucgggaucaacacgcgcaacaugaccauguccaugagcaugauccucgugggcgugaucaugauguuccugucccugggcgucggggccugaggacuagugcaucacauuuaaaagcaucucagccuaccaugagaauaagagaaagaaaaugaagaucaauagcuuauucaucucuuuuucuuuuucguugguguaaagccaacacccugucuaaaaaacauaaauuucuuuaaucauuuugccucuuuucucugugcuucaauuaauaaaaaauggaaagaaccuagaucuaaaaaaaaaaaaaaaaaaaaaaaaaaaaaaaaaaaaaaaaaaaaaaaaaaaaaaaaaaaaaaaaugcaucccccccccccccccccccccccccccccccaaaggcucuuuucagagccaccagaauu

SEQ ID NO: 1150 - RNA, 2462 nt, Artificial Sequence
  mRNA product Design i-2 comprising derived and/or modified sequence from YFV__NC_002031.1__SSjev-prME-XX (polyprotein: aa122-788) (opt1)
gggagaggcgcugccuacggagguggcagccaucuccuucucggcaucaagcuuaccaugggcaagcgcagcgccggguccaucauguggcuggccagccucgcgguggucaucgccugcgccggcgccgugacccuggugcggaagaaccgcuggcugcuccugaacgucaccuccgaggaccuggggaagacguucagcgugggcaccgggaacugcaccaccaacauccucgaggccaaguacuggugccccgacuccauggaguacaacugccccaaccugagcccccgggaggagcccgacgacaucgacugcuggugcuacggcguggagaacguccgcguggcguacggcaagugcgacuccgccgggcggagccgccggucccgccgggccaucgaccugcccacgcacgagaaccacggccucaagacccgccaggagaaguggaugaccgggcggaugggcgagcgccagcugcagaagaucgagcggugguucgugcgcaacccguucuucgccgucaccgcgcugacgaucgccuaccucguggggagcaacaugacccagcggguggucaucgcccugcuggugcucgccgugggccccgccuacuccgcgcacugcaucggcaucaccgaccgcgacuucaucgaggggguccacggcgggaccugggugagcgccacgcuggagcaggacaagugcgugaccgucauggcccccgacaagcccucccuggacaucagccucgagaccguggccaucgaccggccggccgaggugcgcaaggucugcuacaacgcggugcugacccacgugaagaucaacgacaagugccccuccacgggcgaggcccaccuggccgaggagaacgagggcgacaacgccugcaagcggaccuacagcgaccgcggguggggcaacgggugcggccucuucgggaagggcuccaucgucgccugcgcgaaguucacgugcgccaagagcaugucccuguucgagguggaccagaccaagauccaguacgucauccgggcccagcugcacgugggcgccaagcaggagaacuggaacaccgacaucaagacccucaaguucgacgcccugagcgggagccaggagguggaguucaucggcuacgggaaggcgacccuggagugccagguccagaccgccguggacuucggcaacuccuacaucgccgagauggagacggagagcuggaucguggaccgccagugggcccaggaccucacccugcccuggcaguccgggagcggcggcgucuggcgcgagaugcaccaccugguggaguucgagcccccgcacgcggccaccauccgggugcucgcccuggggaaccaggagggcucccugaagaccgcccucacgggggccaugcgcgucaccaaggacaccaacgacaacaaccuguacaagcugcacggcgggcacgugagcugccgggugaagcucuccgcgcugacccugaagggcacgagcuacaagaucugcaccgacaagauguucuucgucaagaaccccaccgacaccggccacgggacgguggugaugcaggucaagguguccaagggcgcccccugccgcauccccgugaucgucgccgacgaccucaccgccgccaucaacaaggggauccuggugaccgugaacccgaucgcgagcaccaacgacgacgagguccugaucgaggugaacccgcccuucggcgacuccuacaucaucgugggccgcggggacagccggcucaccuaccaguggcacaaggagggcuccagcaucgggaagcuguucacgcagaccaugaagggcgucgagcggcuggccgugaugggggacaccgccugggacuucuccagcgccggcggcuucuucaccuccguggggaagggcauccacacggucuucgggagcgccuuccagggccucuucgggggccugaacuggaucaccaaggugaucaugggcgcggugcugaucugggucgggaucaacacccgcaacaugaccauguccaugagcaugauccucgugggcgugaucaugauguuccugagccugggggucggcgccgaccaggggugcgccaucaacuucggcaagugaggacuagugcaucacauuuaaaagcaucucagccuaccaugagaauaagagaaagaaaaugaagaucaauagcuuauucaucucuuuuucuuuuucguugguguaaagccaacacccugucuaaaaaacauaaauuucuuuaaucauuuugccucuuuucucugugcuucaauuaauaaaaaauggaaagaaccuagaucuaaaaaaaaaaaaaaaaaaaaaaaaaaaaaaaaaaaaaaaaaaaaaaaaaaaaaaaaaaaaaaaaugcaucccccccccccccccccccccccccccccccaaaggcucuuuucagagccaccagaauu

SEQ ID NO: 1151 - RNA, 2432 nt, Artificial Sequence
  mRNA product Design i-2 comprising derived and/or modified sequence from YFV__NC_002031.1__SSjev-prME (polyprotein: aa122-778) (opt1)
gggagaggcgcugccuacggagguggcagccaucuccuucucggcaucaagcuuaccaugggcaagcgcagcgccggguccaucauguggcuggccagccucgcgguggucaucgccugcgccggcgccgugacccuggugcggaagaaccgcuggcugcuccugaacgucaccuccgaggaccuggggaagacguucagcgugggcaccgggaacugcaccaccaacauccucgaggccaaguacuggugccccgacuccauggaguacaacugccccaaccugagcccccgggaggagcccgacgacaucgacugcuggugcuacggcguggagaacguccgcguggcguacggcaagugcgacuccgccgggcggagccgccggucccgccgggccaucgaccugcccacgcacgagaaccacggccucaagacccgccaggagaaguggaugaccgggcggaugggcgagcgccagcugcagaagaucgagcggugguucgugcgcaacccguucuucgccgucaccgcgcugacgaucgccuaccucguggggagcaacaugacccagcggguggucaucgcccugcuggugcucgccgugggccccgccuacuccgcgcacugcaucggcaucaccgaccgcgacuucaucgaggggguccacggcgggaccugggugagcgccacgcuggagcaggacaagugcgugaccgucauggcccccgacaagcccucccuggacaucagccucgagaccguggccaucgaccggccggccgaggugcgcaaggucugcuacaacgcggugcugacccacgugaagaucaacgacaagugccccuccacgggcgaggcccaccuggccgaggagaacgagggcgacaacgccugcaagcggaccuacagcgaccgcggguggggcaacgggugcggccucuucgggaagggcuccaucgucgccugcgcgaaguucacgugcgccaagagcaugucccuguucgagguggaccagaccaagauccaguacgucauccgggcccagcugcacgugggcgccaagcaggagaacuggaacaccgacaucaagacccucaaguucgacgcccugagcgggagccaggagguggaguucaucggcuacgggaaggcgacccuggagugccagguccagaccgccguggacuucggcaacuccuacaucgccgagauggagacggagagcuggaucguggaccgccagugggcccaggaccucacccugcccuggcaguccgggagcggcggcgucuggcgcgagaugcaccaccugguggaguucgagcccccgcacgcggccaccauccgggugcucgcccuggggaaccaggagggcucccugaagaccgcccucacgggggccaugcgcgucaccaaggacaccaacgacaacaaccuguacaagcugcacggcgggcacgugagcugccgggugaagcucuccgcgcugacccugaagggcacgagcuacaagaucugcaccgacaagauguucuucgucaagaaccccaccgacaccggccacgggacgguggugaugcaggucaagguguccaagggcgcccccugccgcauccccgugaucgucgccgacgaccucaccgccgccaucaacaaggggauccuggugaccgugaacccgaucgcgagcaccaacgacgacgagguccugaucgaggugaacccgcccuucggcgacuccuacaucaucgugggccgcggggacagccggcucaccuaccaguggcacaaggagggcuccagcaucgggaagcuguucacgcagaccaugaagggcgucgagcggcuggccgugaugggggacaccgccugggacuucuccagcgccggcggcuucuucaccuccguggggaagggcauccacacggucuucgggagcgccuuccagggccucuucgggggccugaacuggaucaccaaggugaucaugggcgcggugcugaucugggucgggaucaacacccgcaacaugaccauguccaugagcaugauccucgugggcgugaucaugauguuccugagccugggggucggcgccugaggacuagugcaucacauuuaaaagcaucucagccuaccaugagaauaagagaaagaaaaugaagaucaauagcuuauucaucucuuuuucuuuuucguugguguaaagccaacacccugucuaaaaaacauaaauuucuuuaaucauuuugccucuuuucucugugcuucaauuaauaaaaaauggaaagaaccuagaucuaaaaaaaaaaaaaaaaaaaaaaaaaaaaaaaaaaaaaaaaaaaaaaaaaaaaaaaaaaaaaaaaugcaucccccccccccccccccccccccccccccccaaaggcucuuuucagagccaccagaauu

SEQ ID NO: 1152 - RNA, 2480 nt, Artificial Sequence
  mRNA product Design i-2 comprising derived and/or modified sequence from YFV__NC_002031.1__X-SS-prME-XX (polyprotein: aa92-788) (opt2)
gggagaggcgcugccuacggagguggcagccaucuccuucucggcaucaagcuuaccaugcgcggccucuccucccgcaagcgccgcucccacgacguccucaccguccaguuccucauccucggcaugcuccucaugaccggcggcgucacccucguccgcaagaaccgcuggcuccuccucaacgucaccuccgaggaccucggcaagaccuucuccgucggcaccggcaacugcaccaccaacauccucgaggccaaguacuggugccccgacuccauggaguacaacugccccaaccucuccccccgcgaggagcccgacgacaucgacugcuggugcuacggcgucgagaacguccgcgucgccuacggcaagugcgacuccgccggccgcucccgccgcucccgccgcgccaucgaccuccccacccacgagaaccacggccucaagacccgccaggagaaguggaugaccggccgcaugggcgagcgccagcuccagaagaucgagcgcugguucguccgcaaccccuucuucgccgucaccgcccucaccaucgccuaccucgucggcuccaacaugacccagcgcgucgucaucgcccuccucguccucgccgucggccccgccuacuccgcccacugcaucggcaucaccgaccgcgacuucaucgagggcguccacggcggcaccugggucuccgccacccucgagcaggacaagugcgucaccgucauggcccccgacaagcccucccucgacaucucccucgagaccgucgccaucgaccgccccgccgagguccgcaaggucugcuacaacgccguccucacccacgucaagaucaacgacaagugccccuccaccggcgaggcccaccucgccgaggagaacgagggcgacaacgccugcaagcgcaccuacuccgaccgcggcuggggcaacggcugcggccucuucggcaagggcuccaucgucgccugcgccaaguucaccugcgccaaguccaugucccucuucgaggucgaccagaccaagauccaguacgucauccgcgcccagcuccacgucggcgccaagcaggagaacuggaacaccgacaucaagacccucaaguucgacgcccucuccggcucccaggaggucgaguucaucggcuacggcaaggccacccucgagugccagguccagaccgccgucgacuucggcaacuccuacaucgccgagauggagaccgaguccuggaucgucgaccgccagugggcccaggaccucacccuccccuggcaguccggcuccggcggcgucuggcgcgagaugcaccaccucgucgaguucgagcccccccacgccgccaccauccgcguccucgcccucggcaaccaggagggcucccucaagaccgcccucaccggcgccaugcgcgucaccaaggacaccaacgacaacaaccucuacaagcuccacggcggccacgucuccugccgcgucaagcucuccgcccucacccucaagggcaccuccuacaagaucugcaccgacaagauguucuucgucaagaaccccaccgacaccggccacggcaccgucgucaugcaggucaaggucuccaagggcgcccccugccgcauccccgucaucgucgccgacgaccucaccgccgccaucaacaagggcauccucgucaccgucaaccccaucgccuccaccaacgacgacgagguccucaucgaggucaacccccccuucggcgacuccuacaucaucgucggccgcggcgacucccgccucaccuaccaguggcacaaggagggcuccuccaucggcaagcucuucacccagaccaugaagggcgucgagcgccucgccgucaugggcgacaccgccugggacuucuccuccgccggcggcuucuucaccuccgucggcaagggcauccacaccgucuucggcuccgccuuccagggccucuucggcggccucaacuggaucaccaaggucaucaugggcgccguccucaucugggucggcaucaacacccgcaacaugaccauguccauguccaugauccucgucggcgucaucaugauguuccucucccucggcgucggcgccgaccagggcugcgccaucaacuucggcaagugaggacuagugcaucacauuuaaaagcaucucagccuaccaugagaauaagagaaagaaaaugaagaucaauagcuuauucaucucuuuuucuuuuucguugguguaaagccaacacccugucuaaaaaacauaaauuucuuuaaucauuuugccucuuuucucugugcuucaauuaauaaaaaauggaaagaaccuagaucuaaaaaaaaaaaaaaaaaaaaaaaaaaaaaaaaaaaaaaaaaaaaaaaaaaaaaaaaaaaaaaaaugcaucccccccccccccccccccccccccccccccaaaggcucuuuucagagccaccagaauu

SEQ ID NO: 1153 - RNA, 2417 nt, Artificial Sequence
  mRNA product Design i-2 comprising derived and/or modified sequence from YFV__NC_002031.1__SS-prME (polyprotein: M,aa104-778) (opt2)
gggagaggcgcugccuacggagguggcagccaucuccuucucggcaucaagcuuaccauggacguccucaccguccaguuccucauccucggcaugcuccucaugaccggcggcgucacccucguccgcaagaaccgcuggcuccuccucaacgucaccuccgaggaccucggcaagaccuucuccgucggcaccggcaacugcaccaccaacauccucgaggccaaguacuggugccccgacuccauggaguacaacugccccaaccucuccccccgcgaggagcccgacgacaucgacugcuggugcuacggcgucgagaacguccgcgucgccuacggcaagugcgacuccgccggccgcucccgccgcucccgccgcgccaucgaccuccccacccacgagaaccacggccucaagacccgccaggagaaguggaugaccggccgcaugggcgagcgccagcuccagaagaucgagcgcugguucguccgcaaccccuucuucgccgucaccgcccucaccaucgccuaccucgucggcuccaacaugacccagcgcgucgucaucgcccuccucguccucgccgucggccccgccuacuccgcccacugcaucggcaucaccgaccgcgacuucaucgagggcguccacggcggcaccugggucuccgccacccucgagcaggacaagugcgucaccgucauggcccccgacaagcccucccucgacaucucccucgagaccgucgccaucgaccgccccgccgagguccgcaaggucugcuacaacgccguccucacccacgucaagaucaacgacaagugccccuccaccggcgaggcccaccucgccgaggagaacgagggcgacaacgccugcaagcgcaccuacuccgaccgcggcuggggcaacggcugcggccucuucggcaagggcuccaucgucgccugcgccaaguucaccugcgccaaguccaugucccucuucgaggucgaccagaccaagauccaguacgucauccgcgcccagcuccacgucggcgccaagcaggagaacuggaacaccgacaucaagacccucaaguucgacgcccucuccggcucccaggaggucgaguucaucggcuacggcaaggccacccucgagugccagguccagaccgccgucgacuucggcaacuccuacaucgccgagauggagaccgaguccuggaucgucgaccgccagugggcccaggaccucacccuccccuggcaguccggcuccggcggcgucuggcgcgagaugcaccaccucgucgaguucgagcccccccacgccgccaccauccgcguccucgcccucggcaaccaggagggcucccucaagaccgcccucaccggcgccaugcgcgucaccaaggacaccaacgacaacaaccucuacaagcuccacggcggccacgucuccugccgcgucaagcucuccgcccucacccucaagggcaccuccuacaagaucugcaccgacaagauguucuucgucaagaaccccaccgacaccggccacggcaccgucgucaugcaggucaaggucuccaagggcgcccccugccgcauccccgucaucgucgccgacgaccucaccgccgccaucaacaagggcauccucgucaccgucaaccccaucgccuccaccaacgacgacgagguccucaucgaggucaacccccccuucggcgacuccuacaucaucgucggccgcggcgacucccgccucaccuaccaguggcacaaggagggcuccuccaucggcaagcucuucacccagaccaugaagggcgucgagcgccucgccgucaugggcgacaccgccugggacuucuccuccgccggcggcuucuucaccuccgucggcaagggcauccacaccgucuucggcuccgccuuccagggccucuucggcggccucaacuggaucaccaaggucaucaugggcgccguccucaucugggucggcaucaacacccgcaacaugaccauguccauguccaugauccucgucggcgucaucaugauguuccucucccucggcgucggcgccugaggacuagugcaucacauuuaaaagcaucucagccuaccaugagaauaagagaaagaaaaugaagaucaauagcuuauucaucucuuuuucuuuuucguugguguaaagccaacacccugucuaaaaaacauaaauuucuuuaaucauuuugccucuuuucucugugcuucaauuaauaaaaaauggaaagaaccuagaucuaaaaaaaaaaaaaaaaaaaaaaaaaaaaaaaaaaaaaaaaaaaaaaaaaaaaaaaaaaaaaaaaugcaucccccccccccccccccccccccccccccccaaaggcucuuuucagagccaccagaauu

SEQ ID NO: 1154 - RNA, 2444 nt, Artificial Sequence
  mRNA product Design i-2 comprising derived and/or modified sequence from YFV__NC_002031.1__SSIgE-prME-XX (polyprotein: aa122-788) (opt2)
gggagaggcgcugccuacggagguggcagccaucuccuucucggcaucaagcuuaccauggacuggaccuggauccucuuccucgucgccgccgccacccgcguccacuccgucacccucguccgcaagaaccgcuggcuccuccucaacgucaccuccgaggaccucggcaagaccuucuccgucggcaccggcaacugcaccaccaacauccucgaggccaaguacuggugccccgacuccauggaguacaacugccccaaccucuccccccgcgaggagcccgacgacaucgacugcuggugcuacggcgucgagaacguccgcgucgccuacggcaagugcgacuccgccggccgcucccgccgcucccgccgcgccaucgaccuccccacccacgagaaccacggccucaagacccgccaggagaaguggaugaccggccgcaugggcgagcgccagcuccagaagaucgagcgcugguucguccgcaaccccuucuucgccgucaccgcccucaccaucgccuaccucgucggcuccaacaugacccagcgcgucgucaucgcccuccucguccucgccgucggccccgccuacuccgcccacugcaucggcaucaccgaccgcgacuucaucgagggcguccacggcggcaccugggucuccgccacccucgagcaggacaagugcgucaccgucauggcccccgacaagcccucccucgacaucucccucgagaccgucgccaucgaccgccccgccgagguccgcaaggucugcuacaacgccguccucacccacgucaagaucaacgacaagugccccuccaccggcgaggcccaccucgccgaggagaacgagggcgacaacgccugcaagcgcaccuacuccgaccgcggcuggggcaacggcugcggccucuucggcaagggcuccaucgucgccugcgccaaguucaccugcgccaaguccaugucccucuucgaggucgaccagaccaagauccaguacgucauccgcgcccagcuccacgucggcgccaagcaggagaacuggaacaccgacaucaagacccucaaguucgacgcccucuccggcucccaggaggucgaguucaucggcuacggcaaggccacccucgagugccagguccagaccgccgucgacuucggcaacuccuacaucgccgagauggagaccgaguccuggaucgucgaccgccagugggcccaggaccucacccuccccuggcaguccggcuccggcggcgucuggcgcgagaugcaccaccucgucgaguucgagcccccccacgccgccaccauccgcguccucgcccucggcaaccaggagggcucccucaagaccgcccucaccggcgccaugcgcgucaccaaggacaccaacgacaacaaccucuacaagcuccacggcggccacgucuccugccgcgucaagcucuccgcccucacccucaagggcaccuccuacaagaucugcaccgacaagauguucuucgucaagaaccccaccgacaccggccacggcaccgucgucaugcaggucaaggucuccaagggcgcccccugccgcauccccgucaucgucgccgacgaccucaccgccgccaucaacaagggcauccucgucaccgucaaccccaucgccuccaccaacgacgacgagguccucaucgaggucaacccccccuucggcgacuccuacaucaucgucggccgcggcgacucccgccucaccuaccaguggcacaaggagggcuccuccaucggcaagcucuucacccagaccaugaagggcgucgagcgccucgccgucaugggcgacaccgccugggacuucuccuccgccggcggcuucuucaccuccgucggcaagggcauccacaccgucuucggcuccgccuuccagggccucuucggcggccucaacuggaucaccaaggucaucaugggcgccguccucaucugggucggcaucaacacccgcaacaugaccauguccauguccaugauccucgucggcgucaucaugauguuccucucccucggcgucggcgccgaccagggcugcgccaucaacuucggcaagugaggacuagugcaucacauuuaaaagcaucucagccuaccaugagaauaagagaaagaaaaugaagaucaauagcuuauucaucucuuuuucuuuuucguugguguaaagccaacacccugucuaaaaaacauaaauuucuuuaaucauuuugccucuuuucucugugcuucaauuaauaaaaaauggaaagaaccuagaucuaaaaaaaaaaaaaaaaaaaaaaaaaaaaaaaaaaaaaaaaaaaaaaaaaaaaaaaaaaaaaaaaugcaucccccccccccccccccccccccccccccccaaaggcucuuuucagagccaccagaauu

SEQ ID NO: 1155 - RNA, 2414 nt, Artificial Sequence
  mRNA product Design i-2 comprising derived and/or modified sequence from YFV__NC_002031.1__SSIgE-prME (polyprotein: aa122-778) (opt2)
gggagaggcgcugccuacggagguggcagccaucuccuucucggcaucaagcuuaccauggacuggaccuggauccucuuccucgucgccgccgccacccgcguccacuccgucacccucguccgcaagaaccgcuggcuccuccucaacgucaccuccgaggaccucggcaagaccuucuccgucggcaccggcaacugcaccaccaacauccucgaggccaaguacuggugccccgacuccauggaguacaacugccccaaccucuccccccgcgaggagcccgacgacaucgacugcuggugcuacggcgucgagaacguccgcgucgccuacggcaagugcgacuccgccggccgcucccgccgcucccgccgcgccaucgaccuccccacccacgagaaccacggccucaagacccgccaggagaaguggaugaccggccgcaugggcgagcgccagcuccagaagaucgagcgcugguucguccgcaaccccuucuucgccgucaccgcccucaccaucgccuaccucgucggcuccaacaugacccagcgcgucgucaucgcccuccucguccucgccgucggccccgccuacuccgcccacugcaucggcaucaccgaccgcgacuucaucgagggcguccacggcggcaccugggucuccgccacccucgagcaggacaagugcgucaccgucauggcccccgacaagcccucccucgacaucucccucgagaccgucgccaucgaccgccccgccgagguccgcaaggucugcuacaacgccguccucacccacgucaagaucaacgacaagugccccuccaccggcgaggcccaccucgccgaggagaacgagggcgacaacgccugcaagcgcaccuacuccgaccgcggcuggggcaacggcugcggccucuucggcaagggcuccaucgucgccugcgccaaguucaccugcgccaaguccaugucccucuucgaggucgaccagaccaagauccaguacgucauccgcgcccagcuccacgucggcgccaagcaggagaacuggaacaccgacaucaagacccucaaguucgacgcccucuccggcucccaggaggucgaguucaucggcuacggcaaggccacccucgagugccagguccagaccgccgucgacuucggcaacuccuacaucgccgagauggagaccgaguccuggaucgucgaccgccagugggcccaggaccucacccuccccuggcaguccggcuccggcggcgucuggcgcgagaugcaccaccucgucgaguucgagcccccccacgccgccaccauccgcguccucgcccucggcaaccaggagggcucccucaagaccgcccucaccggcgccaugcgcgucaccaaggacaccaacgacaacaaccucuacaagcuccacggcggccacgucuccugccgcgucaagcucuccgcccucacccucaagggcaccuccuacaagaucugcaccgacaagauguucuucgucaagaaccccaccgacaccggccacggcaccgucgucaugcaggucaaggucuccaagggcgcccccugccgcauccccgucaucgucgccgacgaccucaccgccgccaucaacaagggcauccucgucaccgucaaccccaucgccuccaccaacgacgacgagguccucaucgaggucaacccccccuucggcgacuccuacaucaucgucggccgcggcgacucccgccucaccuaccaguggcacaaggagggcuccuccaucggcaagcucuucacccagaccaugaagggcgucgagcgccucgccgucaugggcgacaccgccugggacuucuccuccgccggcggcuucuucaccuccgucggcaagggcauccacaccgucuucggcuccgccuuccagggccucuucggcggccucaacuggaucaccaaggucaucaugggcgccguccucaucugggucggcaucaacacccgcaacaugaccauguccauguccaugauccucgucggcgucaucaugauguuccucucccucggcgucggcgccugaggacuagugcaucacauuuaaaagcaucucagccuaccaugagaauaagagaaagaaaaugaagaucaauagcuuauucaucucuuuuucuuuuucguugguguaaagccaacacccugucuaaaaaacauaaauuucuuuaaucauuuugccucuuuucucugugcuucaauuaauaaaaaauggaaagaaccuagaucuaaaaaaaaaaaaaaaaaaaaaaaaaaaaaaaaaaaaaaaaaaaaaaaaaaaaaaaaaaaaaaaaugcaucccccccccccccccccccccccccccccccaaaggcucuuuucagagccaccagaauu

SEQ ID NO: 1156 - RNA, 2462 nt, Artificial Sequence
  mRNA product Design i-2 comprising derived and/or modified sequence from YFV__NC_002031.1__SSjev-prME-XX (polyprotein: aa122-788) (opt2)
gggagaggcgcugccuacggagguggcagccaucuccuucucggcaucaagcuuaccaugggcaagcgcuccgccggcuccaucauguggcucgccucccucgccgucgucaucgccugcgccggcgccgucacccucguccgcaagaaccgcuggcuccuccucaacgucaccuccgaggaccucggcaagaccuucuccgucggcaccggcaacugcaccaccaacauccucgaggccaaguacuggugccccgacuccauggaguacaacugccccaaccucuccccccgcgaggagcccgacgacaucgacugcuggugcuacggcgucgagaacguccgcgucgccuacggcaagugcgacuccgccggccgcucccgccgcucccgccgcgccaucgaccuccccacccacgagaaccacggccucaagacccgccaggagaaguggaugaccggccgcaugggcgagcgccagcuccagaagaucgagcgcugguucguccgcaaccccuucuucgccgucaccgcccucaccaucgccuaccucgucggcuccaacaugacccagcgcgucgucaucgcccuccucguccucgccgucggccccgccuacuccgcccacugcaucggcaucaccgaccgcgacuucaucgagggcguccacggcggcaccugggucuccgccacccucgagcaggacaagugcgucaccgucauggcccccgacaagcccucccucgacaucucccucgagaccgucgccaucgaccgccccgccgagguccgcaaggucugcuacaacgccguccucacccacgucaagaucaacgacaagugccccuccaccggcgaggcccaccucgccgaggagaacgagggcgacaacgccugcaagcgcaccuacuccgaccgcggcuggggcaacggcugcggccucuucggcaagggcuccaucgucgccugcgccaaguucaccugcgccaaguccaugucccucuucgaggucgaccagaccaagauccaguacgucauccgcgcccagcuccacgucggcgccaagcaggagaacuggaacaccgacaucaagacccucaaguucgacgcccucuccggcucccaggaggucgaguucaucggcuacggcaaggccacccucgagugccagguccagaccgccgucgacuucggcaacuccuacaucgccgagauggagaccgaguccuggaucgucgaccgccagugggcccaggaccucacccuccccuggcaguccggcuccggcggcgucuggcgcgagaugcaccaccucgucgaguucgagcccccccacgccgccaccauccgcguccucgcccucggcaaccaggagggcucccucaagaccgcccucaccggcgccaugcgcgucaccaaggacaccaacgacaacaaccucuacaagcuccacggcggccacgucuccugccgcgucaagcucuccgcccucacccucaagggcaccuccuacaagaucugcaccgacaagauguucuucgucaagaaccccaccgacaccggccacggcaccgucgucaugcaggucaaggucuccaagggcgcccccugccgcauccccgucaucgucgccgacgaccucaccgccgccaucaacaagggcauccucgucaccgucaaccccaucgccuccaccaacgacgacgagguccucaucgaggucaacccccccuucggcgacuccuacaucaucgucggccgcggcgacucccgccucaccuaccaguggcacaaggagggcuccuccaucggcaagcucuucacccagaccaugaagggcgucgagcgccucgccgucaugggcgacaccgccugggacuucuccuccgccggcggcuucuucaccuccgucggcaagggcauccacaccgucuucggcuccgccuuccagggccucuucggcggccucaacuggaucaccaaggucaucaugggcgccguccucaucugggucggcaucaacacccgcaacaugaccauguccauguccaugauccucgucggcgucaucaugauguuccucucccucggcgucggcgccgaccagggcugcgccaucaacuucggcaagugaggacuagugcaucacauuuaaaagcaucucagccuaccaugagaauaagagaaagaaaaugaagaucaauagcuuauucaucucuuuuucuuuuucguugguguaaagccaacacccugucuaaaaaacauaaauuucuuuaaucauuuugccucuuuucucugugcuucaauuaauaaaaaauggaaagaaccuagaucuaaaaaaaaaaaaaaaaaaaaaaaaaaaaaaaaaaaaaaaaaaaaaaaaaaaaaaaaaaaaaaaaugcaucccccccccccccccccccccccccccccccaaaggcucuuuucagagccaccagaauu

SEQ ID NO: 1157 - RNA, 2432 nt, Artificial Sequence
  mRNA product Design i-2 comprising derived and/or modified sequence from YFV__NC_002031.1__SSjev-prME (polyprotein: aa122-778) (opt2)
gggagaggcgcugccuacggagguggcagccaucuccuucucggcaucaagcuuaccaugggcaagcgcuccgccggcuccaucauguggcucgccucccucgccgucgucaucgccugcgccggcgccgucacccucguccgcaagaaccgcuggcuccuccucaacgucaccuccgaggaccucggcaagaccuucuccgucggcaccggcaacugcaccaccaacauccucgaggccaaguacuggugccccgacuccauggaguacaacugccccaaccucuccccccgcgaggagcccgacgacaucgacugcuggugcuacggcgucgagaacguccgcgucgccuacggcaagugcgacuccgccggccgcucccgccgcucccgccgcgccaucgaccuccccacccacgagaaccacggccucaagacccgccaggagaaguggaugaccggccgcaugggcgagcgccagcuccagaagaucgagcgcugguucguccgcaaccccuucuucgccgucaccgcccucaccaucgccuaccucgucggcuccaacaugacccagcgcgucgucaucgcccuccucguccucgccgucggccccgccuacuccgcccacugcaucggcaucaccgaccgcgacuucaucgagggcguccacggcggcaccugggucuccgccacccucgagcaggacaagugcgucaccgucauggcccccgacaagcccucccucgacaucucccucgagaccgucgccaucgaccgccccgccgagguccgcaaggucugcuacaacgccguccucacccacgucaagaucaacgacaagugccccuccaccggcgaggcccaccucgccgaggagaacgagggcgacaacgccugcaagcgcaccuacuccgaccgcggcuggggcaacggcugcggccucuucggcaagggcuccaucgucgccugcgccaaguucaccugcgccaaguccaugucccucuucgaggucgaccagaccaagauccaguacgucauccgcgcccagcuccacgucggcgccaagcaggagaacuggaacaccgacaucaagacccucaaguucgacgcccucuccggcucccaggaggucgaguucaucggcuacggcaaggccacccucgagugccagguccagaccgccgucgacuucggcaacuccuacaucgccgagauggagaccgaguccuggaucgucgaccgccagugggcccaggaccucacccuccccuggcaguccggcuccggcggcgucuggcgcgagaugcaccaccucgucgaguucgagcccccccacgccgccaccauccgcguccucgcccucggcaaccaggagggcucccucaagaccgcccucaccggcgccaugcgcgucaccaaggacaccaacgacaacaaccucuacaagcuccacggcggccacgucuccugccgcgucaagcucuccgcccucacccucaagggcaccuccuacaagaucugcaccgacaagauguucuucgucaagaaccccaccgacaccggccacggcaccgucgucaugcaggucaaggucuccaagggcgcccccugccgcauccccgucaucgucgccgacgaccucaccgccgccaucaacaagggcauccucgucaccgucaaccccaucgccuccaccaacgacgacgagguccucaucgaggucaacccccccuucggcgacuccuacaucaucgucggccgcggcgacucccgccucaccuaccaguggcacaaggagggcuccuccaucggcaagcucuucacccagaccaugaagggcgucgagcgccucgccgucaugggcgacaccgccugggacuucuccuccgccggcggcuucuucaccuccgucggcaagggcauccacaccgucuucggcuccgccuuccagggccucuucggcggccucaacuggaucaccaaggucaucaugggcgccguccucaucugggucggcaucaacacccgcaacaugaccauguccauguccaugauccucgucggcgucaucaugauguuccucucccucggcgucggcgccugaggacuagugcaucacauuuaaaagcaucucagccuaccaugagaauaagagaaagaaaaugaagaucaauagcuuauucaucucuuuuucuuuuucguugguguaaagccaacacccugucuaaaaaacauaaauuucuuuaaucauuuugccucuuuucucugugcuucaauuaauaaaaaauggaaagaaccuagaucuaaaaaaaaaaaaaaaaaaaaaaaaaaaaaaaaaaaaaaaaaaaaaaaaaaaaaaaaaaaaaaaaugcaucccccccccccccccccccccccccccccccaaaggcucuuuucagagccaccagaauu

SEQ ID NO: 1158 - RNA, 2480 nt, Artificial Sequence
  mRNA product Design i-2 comprising derived and/or modified sequence from YFV__NC_002031.1__X-SS-prME-XX (polyprotein: aa92-788) (opt3)
gggagaggcgcugccuacggagguggcagccaucuccuucucggcaucaagcuuaccaugagaggccugagcuccaggaagcggcgcucucacgacgugcucaccguccaguuccuuauccuggggauguuguuaaugacaggagguguuacucuggugcguaaaaaccgauggcuacuccugaauguaacgucagaggaucuuggcaagaccuuuaguguggggacaggaaacugcacuaccaauauucuggaagccaaauacuggugucccgacagcauggaguauaacugcccuaauuuguccccaagagaggaaccggaugacauagauuguuggugcuacggcgucgaaaacgugaggguugcuuaugguaagugugacucugcagggcggucgcgcagaucaaggcgggccaucgaucuccccacacaugagaaucacggacugaaaacccgccaagagaaguggaugacuggccgaaugggcgaaagacagcugcagaagauugagaggugguucgugcggaacccuuucuucgcggucacagcucucaccaucgccuacuuaguggggagcaauaugacgcagcguguaguuauugcacugcuuguguuggccgucggaccagcuuauagugcacauugcaucgguauaacugaccgcgauuuuaucgaaggcgugcacgggggaaccuggguguccgccacacuggagcaagacaaaugugucacuguuauggcucccgauaagccuucucuagacauuagccucgagaccguggccaucgauagaccagcggaaguaaggaaagugugcuacaacgcaguccugacacaugugaagauuaaugacaaaugucccuccaccggcgaggcccaccuugcugaagagaacgaaggugacaaugccugcaagcggacguauucagaucgaggguggggaaacggcuguggccuguucgggaagggaaguaucguugcaugcgcuaaauuuacuugcgccaagagcaugucuuuguucgagguggaccagacaaaaauacaguacgucauucgcgcgcagcuccacgugggugccaagcaagagaauuggaacaccgauaucaaaacucugaaguuugacgcauuauccggcucacaggaaguagaguucauuggguacggaaaagcuacacuggaaugucagguucagaccgccguggauuuuggcaacagcuauaucgcugagauggaaacggagaguuggaucgucgacagacaaugggcccaggaucucacccuuccuuggcagucugguuccgggggcguguggagggagaugcaucaccuggucgaauuugagccaccgcaugcagccacaauucggguguuggcucuaggaaaucaagaaggcagccugaagacugcgcucaccggggcaaugcgcguuacaaaggacacuaacgauaauaaccuguacaaacuucacggaggucacgugucgugcagaguaaagcugucugccuugacccucaaaggcacauccuauaagauauguaccgacaaaauguuuuucgucaagaaucccacugauacggggcauggaacagugguuaugcaagugaaggucucaaaaggcgcuccuugcaggaucccagugauuguagccgacgaccugaccgcagccaucaacaaggguauauuagugacuguuaaucccauugcuaguaccaacgaugacgagguccugaucgaagugaauccuccauucggggauagcuacaucauugugggccguggagacucccggcuaacauaucaguggcacaaagagggcucuagcaucgggaagcucuuuacccagacuaugaaaggagucgagcgacuggccguuaugggugauacagcaugggacuucucaagugcgggcggguuuuucacguccgugggaaagggcauucauaccguguuugguagcgcuuuccaggggcuuuuuggcggauugaacuggauaacuaagguaaucaugggcgccguccugauuuggguggggaucaauacaagaaacaugaccaugucuaugucaaugauccucguuggagugauuaugauguuccugagucuuggcgucggugcagaucaggggugugccauaaauuuuggaaaaugaggacuagugcaucacauuuaaaagcaucucagccuaccaugagaauaagagaaagaaaaugaagaucaauagcuuauucaucucuuuuucuuuuucguugguguaaagccaacacccugucuaaaaaacauaaauuucuuuaaucauuuugccucuuuucucugugcuucaauuaauaaaaaauggaaagaaccuagaucuaaaaaaaaaaaaaaaaaaaaaaaaaaaaaaaaaaaaaaaaaaaaaaaaaaaaaaaaaaaaaaaaugcaucccccccccccccccccccccccccccccccaaaggcucuuuucagagccaccagaauu

SEQ ID NO: 1159 - RNA, 2417 nt, Artificial Sequence
  mRNA product Design i-2 comprising derived and/or modified sequence from YFV__NC_002031.1__SS-prME (polyprotein: M,aa104-778) (opt3)
gggagaggcgcugccuacggagguggcagccaucuccuucucggcaucaagcuuaccauggacgugcugaccguccaguuccucauccuuggcaugcuguugaugacagggggaguuacuuuagugagaaagaacagguggcugcuacucaauguaacgagcgaggaucuggguaaaaccuuuuccgugggcacagggaacugcacuaccaauauucuugaagccaaguacuggugucccgacucuauggaguauaacugcccuaaucugucaccacgggaggaaccggaugacauagauuguuggugcuacggagucgaaaacgugcgcguugcuuauggcaaaugugacagugcaggucgaagccguagauccaggcgggccaucgauuugcccacacacgagaaucaugggcucaagacccgccaagagaaauggaugacuggaagaaugggcgaaaggcagcugcagaagauugagcggugguucgugcgcaacccuuucuucgcggucacagcucugaccaucgccuaccucgugggcucuaauaugacgcagcgaguaguuauugcauuacuggugcuugccgucgggccagcuuauucggcacacugcaucggaauaacugacagagauuuuaucgaaggugugcauggcgggaccugggugucagccacauuggagcaagacaagugugucacuguuauggcucccgauaaaccuagccuggacauuagucuagagaccguggccaucgauaggccagcggaaguacggaaggugugcuacaacgcaguccucacacacgugaaaauuaaugacaagugucccuccaccggagaggcccaucuggcugaagagaacgaaggcgacaaugccugcaaacguacguauucugaucgcgguugggggaacggauguggccuuuucggcaaggggagcaucguugcaugcgcuaaguuuacuugcgccaaauccaugucacuguucgagguggaccagacaaagauacaguacgucauuagagcgcaguugcacgugggagccaaacaagagaauuggaacaccgauaucaagacucucaaauuugacgcacugagugguagccaggaaguagaguucauuggcuacgggaaggcuacauuagaaugucagguucagaccgccguggauuuuggaaacucuuauaucgcugagauggaaacggaguccuggaucgucgacaggcaaugggcccaggaucugacccucccuuggcagucaggcagcggugggguguggcgggagaugcaccaucuugucgaauuugagccaccgcacgcagccacaauucgagugcuggcuuugggcaaucaagaaggaagucuaaaaacugcgcugaccggcgcaaugcgcguuacaaaggacacuaacgauaauaaccucuacaagcugcaugggggacacgugucuugcagaguaaaacuuuccgcccugaccuugaaggguacaagcuauaaaauauguaccgacaagauguuuuucgucaaaaaucccacugauacgggccacgggacagugguuaugcaagugaaggucucgaagggagcuccuugcaggaucccagugauuguagccgacgaccucaccgcagccaucaacaaaggcauacuggugacuguuaaucccauugcuucuaccaacgaugacgaggucuuaaucgaagugaauccuccauucggugauuccuacaucauuguggggcggggcgacucacgccugacauaucaguggcauaaggagggaaguagcaucggcaaacuauuuacccagacuaugaagggggucgagagacucgccguuaugggagauacagcaugggacuucuccucugcggguggcuuuuucacgagcguggggaaaggcauucacaccguguuuggaucagcuuuccagggucuguuugggggccuuaacuggauaacuaagguaaucaugggagccgucuugauuugggugggcaucaauacaaggaacaugaccaugaguauguccaugauccugguuggggugauuaugauguuccucagccugggagucggcgcaugaggacuagugcaucacauuuaaaagcaucucagccuaccaugagaauaagagaaagaaaaugaagaucaauagcuuauucaucucuuuuucuuuuucguugguguaaagccaacacccugucuaaaaaacauaaauuucuuuaaucauuuugccucuuuucucugugcuucaauuaauaaaaaauggaaagaaccuagaucuaaaaaaaaaaaaaaaaaaaaaaaaaaaaaaaaaaaaaaaaaaaaaaaaaaaaaaaaaaaaaaaaugcaucccccccccccccccccccccccccccccccaaaggcucuuuucagagccaccagaauu

SEQ ID NO: 1160 - RNA, 2444 nt, Artificial Sequence
  mRNA product Design i-2 comprising derived and/or modified sequence from YFV__NC_002031.1__SSIgE-prME-XX (polyprotein: aa122-788) (opt3)
gggagaggcgcugccuacggagguggcagccaucuccuucucggcaucaagcuuaccauggacuggaccuggauccuguuccucguggccgcugcaacaagaguccacagcguuacucuggugcguaaaaaccgauggcuacuccugaauguaacgucagaggaucuuggcaagaccuuuaguguggggacaggaaacugcacuaccaauauucuggaagccaaauacuggugucccgacagcauggaguauaacugcccuaauuuguccccaagagaggaaccggaugacauagauuguuggugcuacggcgucgaaaacgugaggguugcuuaugguaagugugacucugcagggcggucgcgcagaucaaggcgggccaucgaucuccccacacaugagaaucacggacugaaaacccgccaagagaaguggaugacuggccgaaugggcgaaagacagcugcagaagauugagaggugguucgugcggaacccuuucuucgcggucacagcucucaccaucgccuacuuaguggggagcaauaugacgcagcguguaguuauugcacugcuuguguuggccgucggaccagcuuauagugcacauugcaucgguauaacugaccgcgauuuuaucgaaggcgugcacgggggaaccuggguguccgccacacuggagcaagacaaaugugucacuguuauggcucccgauaagccuucucuagacauuagccucgagaccguggccaucgauagaccagcggaaguaaggaaagugugcuacaacgcaguccugacacaugugaagauuaaugacaaaugucccuccaccggcgaggcccaccuugcugaagagaacgaaggugacaaugccugcaagcggacguauucagaucgaggguggggaaacggcuguggccuguucgggaagggaaguaucguugcaugcgcuaaauuuacuugcgccaagagcaugucuuuguucgagguggaccagacaaaaauacaguacgucauucgcgcgcagcuccacgugggugccaagcaagagaauuggaacaccgauaucaaaacucugaaguuugacgcauuauccggcucacaggaaguagaguucauuggguacggaaaagcuacacuggaaugucagguucagaccgccguggauuuuggcaacagcuauaucgcugagauggaaacggagaguuggaucgucgacagacaaugggcccaggaucucacccuuccuuggcagucugguuccgggggcguguggagggagaugcaucaccuggucgaauuugagccaccgcaugcagccacaauucggguguuggcucuaggaaaucaagaaggcagccugaagacugcgcucaccggggcaaugcgcguuacaaaggacacuaacgauaauaaccuguacaaacuucacggaggucacgugucgugcagaguaaagcugucugccuugacccucaaaggcacauccuauaagauauguaccgacaaaauguuuuucgucaagaaucccacugauacggggcauggaacagugguuaugcaagugaaggucucaaaaggcgcuccuugcaggaucccagugauuguagccgacgaccugaccgcagccaucaacaaggguauauuagugacuguuaaucccauugcuaguaccaacgaugacgagguccugaucgaagugaauccuccauucggggauagcuacaucauugugggccguggagacucccggcuaacauaucaguggcacaaagagggcucuagcaucgggaagcucuuuacccagacuaugaaaggagucgagcgacuggccguuaugggugauacagcaugggacuucucaagugcgggcggguuuuucacguccgugggaaagggcauucauaccguguuugguagcgcuuuccaggggcuuuuuggcggauugaacuggauaacuaagguaaucaugggcgccguccugauuuggguggggaucaauacaagaaacaugaccaugucuaugucaaugauccucguuggagugauuaugauguuccugagucuuggcgucggugcagaucaggggugugccauaaauuuuggaaaaugaggacuagugcaucacauuuaaaagcaucucagccuaccaugagaauaagagaaagaaaaugaagaucaauagcuuauucaucucuuuuucuuuuucguugguguaaagccaacacccugucuaaaaaacauaaauuucuuuaaucauuuugccucuuuucucugugcuucaauuaauaaaaaauggaaagaaccuagaucuaaaaaaaaaaaaaaaaaaaaaaaaaaaaaaaaaaaaaaaaaaaaaaaaaaaaaaaaaaaaaaaaugcaucccccccccccccccccccccccccccccccaaaggcucuuuucagagccaccagaauu

SEQ ID NO: 1161 - RNA, 2414 nt, Artificial Sequence
  mRNA product Design i-2 comprising derived and/or modified sequence from YFV__NC_002031.1__SSIgE-prME (polyprotein: aa122-778) (opt3)
gggagaggcgcugccuacggagguggcagccaucuccuucucggcaucaagcuuaccauggacuggaccuggauccuguuccucguggccgcugcaacaagaguccacagcgugacccuggucagaaagaacagguggcuccuucugaauguuacaagcgaggacuugggcaaaacuuucuccguggggacgggaaacugcaccacaaauaucuuagaagccaaguacuggugucccgauucuauggaguauaacugcccuaaucugucaccacgggaggaaccggacgauauugacuguuggugcuacgguguagaaaacgugcgcgucgcuuauggcaaaugugauagugcagggcgaagccguagauccaggcgggccauagaccuacccacucacgagaaucauggacucaagacccgccaggagaaauggaugacaggcagaaugggugaaaggcaacugcagaagaucgagcggugguuugugcgcaacccuuucuuugcgguuaccgcucuuacuauugccuaccugguggggucuaauaugacacagcgagucgugaucgcauugcucguacuggccguuggaccagcuuauucggcacacugcauuggcaucaccgauagagacuucauagaaggcgugcaugggggaacgugggucucagccacucuggagcaggauaagugugugaccgugauggcucccgacaaaccuagccucgauaucaguuuagagacagucgccauugacaggccagcggaaguucggaaggugugcuacaacgcaguacugacucacgugaaaaucaaugauaagugucccuccaccggugaggcccaucuugcugaagagaacgaaggcgacaaugccugcaaacguacauauucugaccgcggguggggaaacggcugugguuuguuugggaagggaagcauugucgcaugcgcuaaguuuaccugcgccaaauccaugucacuguucgagguggaucaaacgaagauccaguacguuauaagagcgcagcuacacgugggcgccaaacaggagaauuggaacacugacauuaagacacucaaauucgaugcacugaguggcagccaagaagucgaguuuaucggguacggaaaggcuacccuugaaugucaggugcagacugccguagacuucgguaacucuuauauugcugagauggaaacagaguccuggaucguugauaggcagugggcccaagaccugaccuugccuuggcagucaggcagcgggggaguguggcgggagaugcaccaucucgucgaauuugagccaccgcacgcagccacgauccgagugcuggcuuuaggcaaucaggaagguagucugaaaaccgcgcucacaggggcaaugcgcgucacuaaggauaccaacgacaauaaccuuuacaagcugcauggcggacacgugucuugcagaguuaaauuguccgcccuaacacugaagggcacuagcuauaaaauuuguaccgauaagauguucuuugugaaaaaucccacagacaccgggcacggaacuguagucaugcaagugaagguuucgaagggugcuccuugcaggauaccagugaucgucgccgaugaccucacggcagccauuaacaaaggcauccuggugacaguaaaucccauagcuucuaccaacgacgaugaggugcuuauugaaguuaauccuccauucggggacuccuacaucaucgucggacggggcgauucacgccugacuuaucaguggcauaaggaggguaguagcauugggaaauuguucacccagacaaugaagggcguggagagacucgccgugaugggagacaccgcaugggauuuuuccucugcgggcggguucuuuacuagcgucggaaaagguauccacacaguuuucggcucagcuuuucaggggcuguucggaggcuuaaacuggauuacgaaggugauaaugggugccgugcugaucuggguagggauuaauaccaggaacaugacuaugaguauguccaugauccuagucggcgugaucaugauguuucucagccugggaguuggcgcaugaggacuagugcaucacauuuaaaagcaucucagccuaccaugagaauaagagaaagaaaaugaagaucaauagcuuauucaucucuuuuucuuuuucguugguguaaagccaacacccugucuaaaaaacauaaauuucuuuaaucauuuugccucuuuucucugugcuucaauuaauaaaaaauggaaagaaccuagaucuaaaaaaaaaaaaaaaaaaaaaaaaaaaaaaaaaaaaaaaaaaaaaaaaaaaaaaaaaaaaaaaaugcaucccccccccccccccccccccccccccccccaaaggcucuuuucagagccaccagaauu

SEQ ID NO: 1162 - RNA, 2462 nt, Artificial Sequence
  mRNA product Design i-2 comprising derived and/or modified sequence from YFV__NC_002031.1__SSjev-prME-XX (polyprotein: aa122-788) (opt3)
gggagaggcgcugccuacggagguggcagccaucuccuucucggcaucaagcuuaccaugggcaagagaagcgccggguccaucauguggcuggcuucucucgcaguggucauugccugcgcgggagcuguuacucuggugcguaaaaaccgauggcuacuccugaauguaacgucagaggaucuuggcaagaccuuuaguguggggacaggaaacugcacuaccaauauucuggaagccaaauacuggugucccgacagcauggaguauaacugcccuaauuuguccccaagagaggaaccggaugacauagauuguuggugcuacggcgucgaaaacgugaggguugcuuaugguaagugugacucugcagggcggucgcgcagaucaaggcgggccaucgaucuccccacacaugagaaucacggacugaaaacccgccaagagaaguggaugacuggccgaaugggcgaaagacagcugcagaagauugagaggugguucgugcggaacccuuucuucgcggucacagcucucaccaucgccuacuuaguggggagcaauaugacgcagcguguaguuauugcacugcuuguguuggccgucggaccagcuuauagugcacauugcaucgguauaacugaccgcgauuuuaucgaaggcgugcacgggggaaccuggguguccgccacacuggagcaagacaaaugugucacuguuauggcucccgauaagccuucucuagacauuagccucgagaccguggccaucgauagaccagcggaaguaaggaaagugugcuacaacgcaguccugacacaugugaagauuaaugacaaaugucccuccaccggcgaggcccaccuugcugaagagaacgaaggugacaaugccugcaagcggacguauucagaucgaggguggggaaacggcuguggccuguucgggaagggaaguaucguugcaugcgcuaaauuuacuugcgccaagagcaugucuuuguucgagguggaccagacaaaaauacaguacgucauucgcgcgcagcuccacgugggugccaagcaagagaauuggaacaccgauaucaaaacucugaaguuugacgcauuauccggcucacaggaaguagaguucauuggguacggaaaagcuacacuggaaugucagguucagaccgccguggauuuuggcaacagcuauaucgcugagauggaaacggagaguuggaucgucgacagacaaugggcccaggaucucacccuuccuuggcagucugguuccgggggcguguggagggagaugcaucaccuggucgaauuugagccaccgcaugcagccacaauucggguguuggcucuaggaaaucaagaaggcagccugaagacugcgcucaccggggcaaugcgcguuacaaaggacacuaacgauaauaaccuguacaaacuucacggaggucacgugucgugcagaguaaagcugucugccuugacccucaaaggcacauccuauaagauauguaccgacaaaauguuuuucgucaagaaucccacugauacggggcauggaacagugguuaugcaagugaaggucucaaaaggcgcuccuugcaggaucccagugauuguagccgacgaccugaccgcagccaucaacaaggguauauuagugacuguuaaucccauugcuaguaccaacgaugacgagguccugaucgaagugaauccuccauucggggauagcuacaucauugugggccguggagacucccggcuaacauaucaguggcacaaagagggcucuagcaucgggaagcucuuuacccagacuaugaaaggagucgagcgacuggccguuaugggugauacagcaugggacuucucaagugcgggcggguuuuucacguccgugggaaagggcauucauaccguguuugguagcgcuuuccaggggcuuuuuggcggauugaacuggauaacuaagguaaucaugggcgccguccugauuuggguggggaucaauacaagaaacaugaccaugucuaugucaaugauccucguuggagugauuaugauguuccugagucuuggcgucggugcagaucaggggugugccauaaauuuuggaaaaugaggacuagugcaucacauuuaaaagcaucucagccuaccaugagaauaagagaaagaaaaugaagaucaauagcuuauucaucucuuuuucuuuuucguugguguaaagccaacacccugucuaaaaaacauaaauuucuuuaaucauuuugccucuuuucucugugcuucaauuaauaaaaaauggaaagaaccuagaucuaaaaaaaaaaaaaaaaaaaaaaaaaaaaaaaaaaaaaaaaaaaaaaaaaaaaaaaaaaaaaaaaugcaucccccccccccccccccccccccccccccccaaaggcucuuuucagagccaccagaauu

SEQ ID NO: 1163 - RNA, 2432 nt, Artificial Sequence
  mRNA product Design i-2 comprising derived and/or modified sequence from YFV__NC_002031.1__SSjev-prME (polyprotein: aa122-778) (opt3)
gggagaggcgcugccuacggagguggcagccaucuccuucucggcaucaagcuuaccaugggcaagagaagcgccggguccaucauguggcuggcuucucucgcaguggucauugccugcgcgggagcugugacccuggucagaaagaacagguggcuccuucugaauguuacaagcgaggacuugggcaaaacuuucuccguggggacgggaaacugcaccacaaauaucuuagaagccaaguacuggugucccgauucuauggaguauaacugcccuaaucugucaccacgggaggaaccggacgauauugacuguuggugcuacgguguagaaaacgugcgcgucgcuuauggcaaaugugauagugcagggcgaagccguagauccaggcgggccauagaccuacccacucacgagaaucauggacucaagacccgccaggagaaauggaugacaggcagaaugggugaaaggcaacugcagaagaucgagcggugguuugugcgcaacccuuucuuugcgguuaccgcucuuacuauugccuaccugguggggucuaauaugacacagcgagucgugaucgcauugcucguacuggccguuggaccagcuuauucggcacacugcauuggcaucaccgauagagacuucauagaaggcgugcaugggggaacgugggucucagccacucuggagcaggauaagugugugaccgugauggcucccgacaaaccuagccucgauaucaguuuagagacagucgccauugacaggccagcggaaguucggaaggugugcuacaacgcaguacugacucacgugaaaaucaaugauaagugucccuccaccggugaggcccaucuugcugaagagaacgaaggcgacaaugccugcaaacguacauauucugaccgcggguggggaaacggcugugguuuguuugggaagggaagcauugucgcaugcgcuaaguuuaccugcgccaaauccaugucacuguucgagguggaucaaacgaagauccaguacguuauaagagcgcagcuacacgugggcgccaaacaggagaauuggaacacugacauuaagacacucaaauucgaugcacugaguggcagccaagaagucgaguuuaucggguacggaaaggcuacccuugaaugucaggugcagacugccguagacuucgguaacucuuauauugcugagauggaaacagaguccuggaucguugauaggcagugggcccaagaccugaccuugccuuggcagucaggcagcgggggaguguggcgggagaugcaccaucucgucgaauuugagccaccgcacgcagccacgauccgagugcuggcuuuaggcaaucaggaagguagucugaaaaccgcgcucacaggggcaaugcgcgucacuaaggauaccaacgacaauaaccuuuacaagcugcauggcggacacgugucuugcagaguuaaauuguccgcccuaacacugaagggcacuagcuauaaaauuuguaccgauaagauguucuuugugaaaaaucccacagacaccgggcacggaacuguagucaugcaagugaagguuucgaagggugcuccuugcaggauaccagugaucgucgccgaugaccucacggcagccauuaacaaaggcauccuggugacaguaaaucccauagcuucuaccaacgacgaugaggugcuuauugaaguuaauccuccauucggggacuccuacaucaucgucggacggggcgauucacgccugacuuaucaguggcauaaggaggguaguagcauugggaaauuguucacccagacaaugaagggcguggagagacucgccgugaugggagacaccgcaugggauuuuuccucugcgggcggguucuuuacuagcgucggaaaagguauccacacaguuuucggcucagcuuuucaggggcuguucggaggcuuaaacuggauuacgaaggugauaaugggugccgugcugaucuggguagggauuaauaccaggaacaugacuaugaguauguccaugauccuagucggcgugaucaugauguuucucagccugggaguuggcgcaugaggacuagugcaucacauuuaaaagcaucucagccuaccaugagaauaagagaaagaaaaugaagaucaauagcuuauucaucucuuuuucuuuuucguugguguaaagccaacacccugucuaaaaaacauaaauuucuuuaaucauuuugccucuuuucucugugcuucaauuaauaaaaaauggaaagaaccuagaucuaaaaaaaaaaaaaaaaaaaaaaaaaaaaaaaaaaaaaaaaaaaaaaaaaaaaaaaaaaaaaaaaugcaucccccccccccccccccccccccccccccccaaaggcucuuuucagagccaccagaauu

SEQ ID NO: 1164 - RNA, 2480 nt, Artificial Sequence
  mRNA product Design i-2 comprising derived and/or modified sequence from YFV__NC_002031.1__X-SS-prME-XX (polyprotein: aa92-788) (opt4)
gggagaggcgcugccuacggagguggcagccaucuccuucucggcaucaagcuuaccaugagaggccugagcagcagaaagagaagaagccacgacgugcugaccgugcaguuccugauccugggcaugcugcugaugaccggcggcgugacccuggugagaaagaacagauggcugcugcugaacgugaccagcgaggaccugggcaagaccuucagcgugggcaccggcaacugcaccaccaacauccuggaggccaaguacuggugccccgacagcauggaguacaacugccccaaccugagccccagagaggagcccgacgacaucgacugcuggugcuacggcguggagaacgugagaguggccuacggcaagugcgacagcgccggcagaagcagaagaagcagaagagccaucgaccugcccacccacgagaaccacggccugaagaccagacaggagaaguggaugaccggcagaaugggcgagagacagcugcagaagaucgagagaugguucgugagaaaccccuucuucgccgugaccgcccugaccaucgccuaccuggugggcagcaacaugacccagagaguggugaucgcccugcuggugcuggccgugggccccgccuacagcgcccacugcaucggcaucaccgacagagacuucaucgagggcgugcacggcggcaccugggugagcgccacccuggagcaggacaagugcgugaccgugauggcccccgacaagcccagccuggacaucagccuggagaccguggccaucgacagacccgccgaggugagaaaggugugcuacaacgccgugcugacccacgugaagaucaacgacaagugccccagcaccggcgaggcccaccuggccgaggagaacgagggcgacaacgccugcaagagaaccuacagcgacagaggcuggggcaacggcugcggccuguucggcaagggcagcaucguggccugcgccaaguucaccugcgccaagagcaugagccuguucgagguggaccagaccaagauccaguacgugaucagagcccagcugcacgugggcgccaagcaggagaacuggaacaccgacaucaagacccugaaguucgacgcccugagcggcagccaggagguggaguucaucggcuacggcaaggccacccuggagugccaggugcagaccgccguggacuucggcaacagcuacaucgccgagauggagaccgagagcuggaucguggacagacagugggcccaggaccugacccugcccuggcagagcggcagcggcggcguguggagagagaugcaccaccugguggaguucgagcccccccacgccgccaccaucagagugcuggcccugggcaaccaggagggcagccugaagaccgcccugaccggcgccaugagagugaccaaggacaccaacgacaacaaccuguacaagcugcacggcggccacgugagcugcagagugaagcugagcgcccugacccugaagggcaccagcuacaagaucugcaccgacaagauguucuucgugaagaaccccaccgacaccggccacggcaccguggugaugcaggugaaggugagcaagggcgcccccugcagaauccccgugaucguggccgacgaccugaccgccgccaucaacaagggcauccuggugaccgugaaccccaucgccagcaccaacgacgacgaggugcugaucgaggugaacccccccuucggcgacagcuacaucaucgugggcagaggcgacagcagacugaccuaccaguggcacaaggagggcagcagcaucggcaagcuguucacccagaccaugaagggcguggagagacuggccgugaugggcgacaccgccugggacuucagcagcgccggcggcuucuucaccagcgugggcaagggcauccacaccguguucggcagcgccuuccagggccuguucggcggccugaacuggaucaccaaggugaucaugggcgccgugcugaucugggugggcaucaacaccagaaacaugaccaugagcaugagcaugauccuggugggcgugaucaugauguuccugagccugggcgugggcgccgaccagggcugcgccaucaacuucggcaagugaggacuagugcaucacauuuaaaagcaucucagccuaccaugagaauaagagaaagaaaaugaagaucaauagcuuauucaucucuuuuucuuuuucguugguguaaagccaacacccugucuaaaaaacauaaauuucuuuaaucauuuugccucuuuucucugugcuucaauuaauaaaaaauggaaagaaccuagaucuaaaaaaaaaaaaaaaaaaaaaaaaaaaaaaaaaaaaaaaaaaaaaaaaaaaaaaaaaaaaaaaaugcaucccccccccccccccccccccccccccccccaaaggcucuuuucagagccaccagaauu

SEQ ID NO: 1165 - RNA, 2417 nt, Artificial Sequence
  mRNA product Design i-2 comprising derived and/or modified sequence from YFV__NC_002031.1__SS-prME (polyprotein: M,aa104-778) (opt4)
gggagaggcgcugccuacggagguggcagccaucuccuucucggcaucaagcuuaccauggacgugcugaccgugcaguuccugauccugggcaugcugcugaugaccggcggcgugacccuggugagaaagaacagauggcugcugcugaacgugaccagcgaggaccugggcaagaccuucagcgugggcaccggcaacugcaccaccaacauccuggaggccaaguacuggugccccgacagcauggaguacaacugccccaaccugagccccagagaggagcccgacgacaucgacugcuggugcuacggcguggagaacgugagaguggccuacggcaagugcgacagcgccggcagaagcagaagaagcagaagagccaucgaccugcccacccacgagaaccacggccugaagaccagacaggagaaguggaugaccggcagaaugggcgagagacagcugcagaagaucgagagaugguucgugagaaaccccuucuucgccgugaccgcccugaccaucgccuaccuggugggcagcaacaugacccagagaguggugaucgcccugcuggugcuggccgugggccccgccuacagcgcccacugcaucggcaucaccgacagagacuucaucgagggcgugcacggcggcaccugggugagcgccacccuggagcaggacaagugcgugaccgugauggcccccgacaagcccagccuggacaucagccuggagaccguggccaucgacagacccgccgaggugagaaaggugugcuacaacgccgugcugacccacgugaagaucaacgacaagugccccagcaccggcgaggcccaccuggccgaggagaacgagggcgacaacgccugcaagagaaccuacagcgacagaggcuggggcaacggcugcggccuguucggcaagggcagcaucguggccugcgccaaguucaccugcgccaagagcaugagccuguucgagguggaccagaccaagauccaguacgugaucagagcccagcugcacgugggcgccaagcaggagaacuggaacaccgacaucaagacccugaaguucgacgcccugagcggcagccaggagguggaguucaucggcuacggcaaggccacccuggagugccaggugcagaccgccguggacuucggcaacagcuacaucgccgagauggagaccgagagcuggaucguggacagacagugggcccaggaccugacccugcccuggcagagcggcagcggcggcguguggagagagaugcaccaccugguggaguucgagcccccccacgccgccaccaucagagugcuggcccugggcaaccaggagggcagccugaagaccgcccugaccggcgccaugagagugaccaaggacaccaacgacaacaaccuguacaagcugcacggcggccacgugagcugcagagugaagcugagcgcccugacccugaagggcaccagcuacaagaucugcaccgacaagauguucuucgugaagaaccccaccgacaccggccacggcaccguggugaugcaggugaaggugagcaagggcgcccccugcagaauccccgugaucguggccgacgaccugaccgccgccaucaacaagggcauccuggugaccgugaaccccaucgccagcaccaacgacgacgaggugcugaucgaggugaacccccccuucggcgacagcuacaucaucgugggcagaggcgacagcagacugaccuaccaguggcacaaggagggcagcagcaucggcaagcuguucacccagaccaugaagggcguggagagacuggccgugaugggcgacaccgccugggacuucagcagcgccggcggcuucuucaccagcgugggcaagggcauccacaccguguucggcagcgccuuccagggccuguucggcggccugaacuggaucaccaaggugaucaugggcgccgugcugaucugggugggcaucaacaccagaaacaugaccaugagcaugagcaugauccuggugggcgugaucaugauguuccugagccugggcgugggcgccugaggacuagugcaucacauuuaaaagcaucucagccuaccaugagaauaagagaaagaaaaugaagaucaauagcuuauucaucucuuuuucuuuuucguugguguaaagccaacacccugucuaaaaaacauaaauuucuuuaaucauuuugccucuuuucucugugcuucaauuaauaaaaaauggaaagaaccuagaucuaaaaaaaaaaaaaaaaaaaaaaaaaaaaaaaaaaaaaaaaaaaaaaaaaaaaaaaaaaaaaaaaugcaucccccccccccccccccccccccccccccccaaaggcucuuuucagagccaccagaauu

SEQ ID NO: 1166 - RNA, 2444 nt, Artificial Sequence
  mRNA product Design i-2 comprising derived and/or modified sequence from YFV__NC_002031.1__SSIgE-prME-XX (polyprotein: aa122-788) (opt4)
gggagaggcgcugccuacggagguggcagccaucuccuucucggcaucaagcuuaccauggacuggaccuggauccuguuccugguggccgccgccaccagagugcacagcgugacccuggugagaaagaacagauggcugcugcugaacgugaccagcgaggaccugggcaagaccuucagcgugggcaccggcaacugcaccaccaacauccuggaggccaaguacuggugccccgacagcauggaguacaacugccccaaccugagccccagagaggagcccgacgacaucgacugcuggugcuacggcguggagaacgugagaguggccuacggcaagugcgacagcgccggcagaagcagaagaagcagaagagccaucgaccugcccacccacgagaaccacggccugaagaccagacaggagaaguggaugaccggcagaaugggcgagagacagcugcagaagaucgagagaugguucgugagaaaccccuucuucgccgugaccgcccugaccaucgccuaccuggugggcagcaacaugacccagagaguggugaucgcccugcuggugcuggccgugggccccgccuacagcgcccacugcaucggcaucaccgacagagacuucaucgagggcgugcacggcggcaccugggugagcgccacccuggagcaggacaagugcgugaccgugauggcccccgacaagcccagccuggacaucagccuggagaccguggccaucgacagacccgccgaggugagaaaggugugcuacaacgccgugcugacccacgugaagaucaacgacaagugccccagcaccggcgaggcccaccuggccgaggagaacgagggcgacaacgccugcaagagaaccuacagcgacagaggcuggggcaacggcugcggccuguucggcaagggcagcaucguggccugcgccaaguucaccugcgccaagagcaugagccuguucgagguggaccagaccaagauccaguacgugaucagagcccagcugcacgugggcgccaagcaggagaacuggaacaccgacaucaagacccugaaguucgacgcccugagcggcagccaggagguggaguucaucggcuacggcaaggccacccuggagugccaggugcagaccgccguggacuucggcaacagcuacaucgccgagauggagaccgagagcuggaucguggacagacagugggcccaggaccugacccugcccuggcagagcggcagcggcggcguguggagagagaugcaccaccugguggaguucgagcccccccacgccgccaccaucagagugcuggcccugggcaaccaggagggcagccugaagaccgcccugaccggcgccaugagagugaccaaggacaccaacgacaacaaccuguacaagcugcacggcggccacgugagcugcagagugaagcugagcgcccugacccugaagggcaccagcuacaagaucugcaccgacaagauguucuucgugaagaaccccaccgacaccggccacggcaccguggugaugcaggugaaggugagcaagggcgcccccugcagaauccccgugaucguggccgacgaccugaccgccgccaucaacaagggcauccuggugaccgugaaccccaucgccagcaccaacgacgacgaggugcugaucgaggugaacccccccuucggcgacagcuacaucaucgugggcagaggcgacagcagacugaccuaccaguggcacaaggagggcagcagcaucggcaagcuguucacccagaccaugaagggcguggagagacuggccgugaugggcgacaccgccugggacuucagcagcgccggcggcuucuucaccagcgugggcaagggcauccacaccguguucggcagcgccuuccagggccuguucggcggccugaacuggaucaccaaggugaucaugggcgccgugcugaucugggugggcaucaacaccagaaacaugaccaugagcaugagcaugauccuggugggcgugaucaugauguuccugagccugggcgugggcgccgaccagggcugcgccaucaacuucggcaagugaggacuagugcaucacauuuaaaagcaucucagccuaccaugagaauaagagaaagaaaaugaagaucaauagcuuauucaucucuuuuucuuuuucguugguguaaagccaacacccugucuaaaaaacauaaauuucuuuaaucauuuugccucuuuucucugugcuucaauuaauaaaaaauggaaagaaccuagaucuaaaaaaaaaaaaaaaaaaaaaaaaaaaaaaaaaaaaaaaaaaaaaaaaaaaaaaaaaaaaaaaaugcaucccccccccccccccccccccccccccccccaaaggcucuuuucagagccaccagaauu

SEQ ID NO: 1167 - RNA, 2414 nt, Artificial Sequence
  mRNA product Design i-2 comprising derived and/or modified sequence from YFV__NC_002031.1__SSIgE-prME (polyprotein: aa122-778) (opt4)
gggagaggcgcugccuacggagguggcagccaucuccuucucggcaucaagcuuaccauggacuggaccuggauccuguuccugguggccgccgccaccagagugcacagcgugacccuggugagaaagaacagauggcugcugcugaacgugaccagcgaggaccugggcaagaccuucagcgugggcaccggcaacugcaccaccaacauccuggaggccaaguacuggugccccgacagcauggaguacaacugccccaaccugagccccagagaggagcccgacgacaucgacugcuggugcuacggcguggagaacgugagaguggccuacggcaagugcgacagcgccggcagaagcagaagaagcagaagagccaucgaccugcccacccacgagaaccacggccugaagaccagacaggagaaguggaugaccggcagaaugggcgagagacagcugcagaagaucgagagaugguucgugagaaaccccuucuucgccgugaccgcccugaccaucgccuaccuggugggcagcaacaugacccagagaguggugaucgcccugcuggugcuggccgugggccccgccuacagcgcccacugcaucggcaucaccgacagagacuucaucgagggcgugcacggcggcaccugggugagcgccacccuggagcaggacaagugcgugaccgugauggcccccgacaagcccagccuggacaucagccuggagaccguggccaucgacagacccgccgaggugagaaaggugugcuacaacgccgugcugacccacgugaagaucaacgacaagugccccagcaccggcgaggcccaccuggccgaggagaacgagggcgacaacgccugcaagagaaccuacagcgacagaggcuggggcaacggcugcggccuguucggcaagggcagcaucguggccugcgccaaguucaccugcgccaagagcaugagccuguucgagguggaccagaccaagauccaguacgugaucagagcccagcugcacgugggcgccaagcaggagaacuggaacaccgacaucaagacccugaaguucgacgcccugagcggcagccaggagguggaguucaucggcuacggcaaggccacccuggagugccaggugcagaccgccguggacuucggcaacagcuacaucgccgagauggagaccgagagcuggaucguggacagacagugggcccaggaccugacccugcccuggcagagcggcagcggcggcguguggagagagaugcaccaccugguggaguucgagcccccccacgccgccaccaucagagugcuggcccugggcaaccaggagggcagccugaagaccgcccugaccggcgccaugagagugaccaaggacaccaacgacaacaaccuguacaagcugcacggcggccacgugagcugcagagugaagcugagcgcccugacccugaagggcaccagcuacaagaucugcaccgacaagauguucuucgugaagaaccccaccgacaccggccacggcaccguggugaugcaggugaaggugagcaagggcgcccccugcagaauccccgugaucguggccgacgaccugaccgccgccaucaacaagggcauccuggugaccgugaaccccaucgccagcaccaacgacgacgaggugcugaucgaggugaacccccccuucggcgacagcuacaucaucgugggcagaggcgacagcagacugaccuaccaguggcacaaggagggcagcagcaucggcaagcuguucacccagaccaugaagggcguggagagacuggccgugaugggcgacaccgccugggacuucagcagcgccggcggcuucuucaccagcgugggcaagggcauccacaccguguucggcagcgccuuccagggccuguucggcggccugaacuggaucaccaaggugaucaugggcgccgugcugaucugggugggcaucaacaccagaaacaugaccaugagcaugagcaugauccuggugggcgugaucaugauguuccugagccugggcgugggcgccugaggacuagugcaucacauuuaaaagcaucucagccuaccaugagaauaagagaaagaaaaugaagaucaauagcuuauucaucucuuuuucuuuuucguugguguaaagccaacacccugucuaaaaaacauaaauuucuuuaaucauuuugccucuuuucucugugcuucaauuaauaaaaaauggaaagaaccuagaucuaaaaaaaaaaaaaaaaaaaaaaaaaaaaaaaaaaaaaaaaaaaaaaaaaaaaaaaaaaaaaaaaugcaucccccccccccccccccccccccccccccccaaaggcucuuuucagagccaccagaauu

SEQ ID NO: 1168 - RNA, 2462 nt, Artificial Sequence
  mRNA product Design i-2 comprising derived and/or modified sequence from YFV__NC_002031.1__SSjev-prME-XX (polyprotein: aa122-788) (opt4)
gggagaggcgcugccuacggagguggcagccaucuccuucucggcaucaagcuuaccaugggcaagagaagcgccggcagcaucauguggcuggccagccuggccguggugaucgccugcgccggcgccgugacccuggugagaaagaacagauggcugcugcugaacgugaccagcgaggaccugggcaagaccuucagcgugggcaccggcaacugcaccaccaacauccuggaggccaaguacuggugccccgacagcauggaguacaacugccccaaccugagccccagagaggagcccgacgacaucgacugcuggugcuacggcguggagaacgugagaguggccuacggcaagugcgacagcgccggcagaagcagaagaagcagaagagccaucgaccugcccacccacgagaaccacggccugaagaccagacaggagaaguggaugaccggcagaaugggcgagagacagcugcagaagaucgagagaugguucgugagaaaccccuucuucgccgugaccgcccugaccaucgccuaccuggugggcagcaacaugacccagagaguggugaucgcccugcuggugcuggccgugggccccgccuacagcgcccacugcaucggcaucaccgacagagacuucaucgagggcgugcacggcggcaccugggugagcgccacccuggagcaggacaagugcgugaccgugauggcccccgacaagcccagccuggacaucagccuggagaccguggccaucgacagacccgccgaggugagaaaggugugcuacaacgccgugcugacccacgugaagaucaacgacaagugccccagcaccggcgaggcccaccuggccgaggagaacgagggcgacaacgccugcaagagaaccuacagcgacagaggcuggggcaacggcugcggccuguucggcaagggcagcaucguggccugcgccaaguucaccugcgccaagagcaugagccuguucgagguggaccagaccaagauccaguacgugaucagagcccagcugcacgugggcgccaagcaggagaacuggaacaccgacaucaagacccugaaguucgacgcccugagcggcagccaggagguggaguucaucggcuacggcaaggccacccuggagugccaggugcagaccgccguggacuucggcaacagcuacaucgccgagauggagaccgagagcuggaucguggacagacagugggcccaggaccugacccugcccuggcagagcggcagcggcggcguguggagagagaugcaccaccugguggaguucgagcccccccacgccgccaccaucagagugcuggcccugggcaaccaggagggcagccugaagaccgcccugaccggcgccaugagagugaccaaggacaccaacgacaacaaccuguacaagcugcacggcggccacgugagcugcagagugaagcugagcgcccugacccugaagggcaccagcuacaagaucugcaccgacaagauguucuucgugaagaaccccaccgacaccggccacggcaccguggugaugcaggugaaggugagcaagggcgcccccugcagaauccccgugaucguggccgacgaccugaccgccgccaucaacaagggcauccuggugaccgugaaccccaucgccagcaccaacgacgacgaggugcugaucgaggugaacccccccuucggcgacagcuacaucaucgugggcagaggcgacagcagacugaccuaccaguggcacaaggagggcagcagcaucggcaagcuguucacccagaccaugaagggcguggagagacuggccgugaugggcgacaccgccugggacuucagcagcgccggcggcuucuucaccagcgugggcaagggcauccacaccguguucggcagcgccuuccagggccuguucggcggccugaacuggaucaccaaggugaucaugggcgccgugcugaucugggugggcaucaacaccagaaacaugaccaugagcaugagcaugauccuggugggcgugaucaugauguuccugagccugggcgugggcgccgaccagggcugcgccaucaacuucggcaagugaggacuagugcaucacauuuaaaagcaucucagccuaccaugagaauaagagaaagaaaaugaagaucaauagcuuauucaucucuuuuucuuuuucguugguguaaagccaacacccugucuaaaaaacauaaauuucuuuaaucauuuugccucuuuucucugugcuucaauuaauaaaaaauggaaagaaccuagaucuaaaaaaaaaaaaaaaaaaaaaaaaaaaaaaaaaaaaaaaaaaaaaaaaaaaaaaaaaaaaaaaaugcaucccccccccccccccccccccccccccccccaaaggcucuuuucagagccaccagaauu

SEQ ID NO: 1169 - RNA, 2432 nt, Artificial Sequence
  mRNA product Design i-2 comprising derived and/or modified sequence from YFV__NC_002031.1__SSjev-prME (polyprotein: aa122-778) (opt4)
gggagaggcgcugccuacggagguggcagccaucuccuucucggcaucaagcuuaccaugggcaagagaagcgccggcagcaucauguggcuggccagccuggccguggugaucgccugcgccggcgccgugacccuggugagaaagaacagauggcugcugcugaacgugaccagcgaggaccugggcaagaccuucagcgugggcaccggcaacugcaccaccaacauccuggaggccaaguacuggugccccgacagcauggaguacaacugccccaaccugagccccagagaggagcccgacgacaucgacugcuggugcuacggcguggagaacgugagaguggccuacggcaagugcgacagcgccggcagaagcagaagaagcagaagagccaucgaccugcccacccacgagaaccacggccugaagaccagacaggagaaguggaugaccggcagaaugggcgagagacagcugcagaagaucgagagaugguucgugagaaaccccuucuucgccgugaccgcccugaccaucgccuaccuggugggcagcaacaugacccagagaguggugaucgcccugcuggugcuggccgugggccccgccuacagcgcccacugcaucggcaucaccgacagagacuucaucgagggcgugcacggcggcaccugggugagcgccacccuggagcaggacaagugcgugaccgugauggcccccgacaagcccagccuggacaucagccuggagaccguggccaucgacagacccgccgaggugagaaaggugugcuacaacgccgugcugacccacgugaagaucaacgacaagugccccagcaccggcgaggcccaccuggccgaggagaacgagggcgacaacgccugcaagagaaccuacagcgacagaggcuggggcaacggcugcggccuguucggcaagggcagcaucguggccugcgccaaguucaccugcgccaagagcaugagccuguucgagguggaccagaccaagauccaguacgugaucagagcccagcugcacgugggcgccaagcaggagaacuggaacaccgacaucaagacccugaaguucgacgcccugagcggcagccaggagguggaguucaucggcuacggcaaggccacccuggagugccaggugcagaccgccguggacuucggcaacagcuacaucgccgagauggagaccgagagcuggaucguggacagacagugggcccaggaccugacccugcccuggcagagcggcagcggcggcguguggagagagaugcaccaccugguggaguucgagcccccccacgccgccaccaucagagugcuggcccugggcaaccaggagggcagccugaagaccgcccugaccggcgccaugagagugaccaaggacaccaacgacaacaaccuguacaagcugcacggcggccacgugagcugcagagugaagcugagcgcccugacccugaagggcaccagcuacaagaucugcaccgacaagauguucuucgugaagaaccccaccgacaccggccacggcaccguggugaugcaggugaaggugagcaagggcgcccccugcagaauccccgugaucguggccgacgaccugaccgccgccaucaacaagggcauccuggugaccgugaaccccaucgccagcaccaacgacgacgaggugcugaucgaggugaacccccccuucggcgacagcuacaucaucgugggcagaggcgacagcagacugaccuaccaguggcacaaggagggcagcagcaucggcaagcuguucacccagaccaugaagggcguggagagacuggccgugaugggcgacaccgccugggacuucagcagcgccggcggcuucuucaccagcgugggcaagggcauccacaccguguucggcagcgccuuccagggccuguucggcggccugaacuggaucaccaaggugaucaugggcgccgugcugaucugggugggcaucaacaccagaaacaugaccaugagcaugagcaugauccuggugggcgugaucaugauguuccugagccugggcgugggcgccugaggacuagugcaucacauuuaaaagcaucucagccuaccaugagaauaagagaaagaaaaugaagaucaauagcuuauucaucucuuuuucuuuuucguugguguaaagccaacacccugucuaaaaaacauaaauuucuuuaaucauuuugccucuuuucucugugcuucaauuaauaaaaaauggaaagaaccuagaucuaaaaaaaaaaaaaaaaaaaaaaaaaaaaaaaaaaaaaaaaaaaaaaaaaaaaaaaaaaaaaaaaugcaucccccccccccccccccccccccccccccccaaaggcucuuuucagagccaccagaauu

SEQ ID NO: 1170 - RNA, 2480 nt, Artificial Sequence
  mRNA product Design i-2 comprising derived and/or modified sequence from YFV__NC_002031.1__X-SS-prME-XX (polyprotein: aa92-788) (opt5)
gggagaggcgcugccuacggagguggcagccaucuccuucucggcaucaagcuuaccaugagaggccugagcucccggaagcgcagaucucacgacgugcucaccguccaguuccugauccuugggaugcugcucaugacaggaggcguuacgcuggugcggaaaaaccgcuggcuucugcucaaugugaccagcgaggaucuggggaagacauuuuccgucggaaccggcaacugcacaaccaauauucuggaagccaaauacuggugucccgacucuauggaguauaacugcccuaaucucagcccgagagaagaacccgaugacaucgauuguuggugcuacgggguggaaaacguucggguggcuuauggaaagugugacuccgccggccgcucuagacggagccgcagagcgauugaucugccuacacaugagaaucacggccuuaaaacccggcaagagaaguggaugacggggcgcaugggagaaagacagcugcagaagaucgagcggugguucguccgcaaccccuuuuucgcugugaccgcccucacaauugccuaccugguuggcuccaauaugacccagagaguggucaucgcccuucuggugcucgcuguggggccugcuuauagcgcccauugcaucggaauuacagaccgggauuuuaucgaaggcguccacgggggaaccuggguuucugcgacgcuggagcaagacaaaugugugacagugauggcccccgauaagccuucccuggacauuagccucgagaccgucgcuaucgauagaccggccgaagugcgcaaaguuugcuacaacgcugugcugacacaugucaagauuaaugacaaaugucccucuaccggcgaggcccaccuugcggaagagaacgaaggcgacaaugccugcaagcggaccuauuccgauagaggguggggaaacggcugugggcuguucggaaagggcagcaucguggcuugcgccaaauuuacaugcgcuaagucuaugucccucuucgagguugaccagacgaaaauucaguacgugauccgcgcccagcugcacgucggggccaagcaagagaauuggaacaccgauaucaaaacacuuaaguuugacgcucugagcggaucccaggaaguggaguucauuggcuacggcaaagcgacccucgaaugucagguccagacagccguggauuuugggaacucuuauaucgcugagauggaaaccgagagcuggauuguugaccggcaaugggcccaggaucugacgcugccuuggcaguccggaagcggcgggguguggagagagaugcaucaccucgucgaguucgagcccccucaugccgcuacaauccgcgugcuggcccuuggaaaucaagaaggcucucugaagaccgcgcucaccggggcuaugcggguuacaaaggacaccaacgauaauaaccuguacaaacuucacggcggacacguguccugcagagucaagcugagcgcccucacacugaaaggcacgucuuauaagauuuguaccgacaaaauguuuuucgugaagaaucccacagauaccgggcauggaacagugguuaugcaggucaaggugagcaaaggcgccccgugccgcaucccugugaucgucgcugacgaccugaccgccgcuauuaacaaggggauccucgugacgguuaaucccauugccuccaccaacgaugacgaggugcugaucgaagucaauccucccuucggagauucuuacauuaucgugggccggggagacagcagacuuacauaucaguggcacaaagagggcuccagcaucggaaagcuguuuacccagacaaugaaaggcguugagcgccucgcggugaugggggauaccgccugggacuucucuuccgcuggaggcuuuuucacgagcgucgggaaggggauucauacaguguuuggcucugccuuccaagggcuguuuggcggacugaacuggaucaccaagguuauuaugggcgcugugcuuaucugggucgggauuaauacacggaacaugaccauguccaugagcaugauccucgugggagugauuaugauguuccugucccugggcgucggggccgaucagggaugugcgaucaauuuuggcaaaugaggacuagugcaucacauuuaaaagcaucucagccuaccaugagaauaagagaaagaaaaugaagaucaauagcuuauucaucucuuuuucuuuuucguugguguaaagccaacacccugucuaaaaaacauaaauuucuuuaaucauuuugccucuuuucucugugcuucaauuaauaaaaaauggaaagaaccuagaucuaaaaaaaaaaaaaaaaaaaaaaaaaaaaaaaaaaaaaaaaaaaaaaaaaaaaaaaaaaaaaaaaugcaucccccccccccccccccccccccccccccccaaaggcucuuuucagagccaccagaauu

SEQ ID NO: 1171 - RNA, 2417 nt, Artificial Sequence
  mRNA product Design i-2 comprising derived and/or modified sequence from YFV__NC_002031.1__SS-prME (polyprotein: M,aa104-778) (opt5)
gggagaggcgcugccuacggagguggcagccaucuccuucucggcaucaagcuuaccauggacgugcugaccguccaguuccucauccugggcaugcuucugaugacagggggaguuacgcucgugagaaagaaccgguggcugcuucugaaugugaccagcgaggaucucggcaaaacauuuuccgucgggaccggaaacugcacaaccaauauucuggaagccaaguacuggugucccgacucuauggaguauaacugcccuaaucugagcccgcgcgaagaacccgaugacaucgauuguuggugcuacggcguggaaaacguuagaguggcuuaugggaaaugugacuccgccggacggucucgcagaagccggcgcgcgauugaucucccuacacacgagaaucauggccugaagaccagacaagagaaauggaugacgggccggaugggggaacgccagcuucagaagaucgagagaugguucguccggaaccccuuuuucgcugugaccgcccugacaauugccuaccucguuggauccaauaugacccagcgcguggucaucgcucugcuugugcuggccgugggcccugcuuauucugcccacugcaucgggauuacagacagagauuuuaucgaaggaguccauggcgggaccuggguuagcgcgacgcucgagcaagacaagugugugacagugauggcccccgauaaaccuucccuggacauuagccuggagaccgucgcuaucgaucggccggccgaagugcgcaagguuugcuacaacgcugugcucacacacgucaaaauuaaugacaagugucccucuaccggagaggcccaucuggcggaagagaacgaaggcgacaaugccugcaaaagaaccuauuccgaucggggcugggggaacggauguggccuuuucgggaagggaagcaucguggcuugcgccaaguuuacaugcgcuaaaucuaugucccuguucgagguugaccagacgaagauucaguacgugaucagagcccagcuccacgucggcgccaaacaagagaauuggaacaccgauaucaagacacugaaauuugacgcucuuagcgggucucaggaaguggaguucauuggauacggcaaggcgacccuggaaugucagguccagacagccguggauuuuggcaacuccuauaucgcugagauggaaaccgagagcuggauuguugaccgccaaugggcccaggaucucacgcugccuuggcaguccgggucuggaggcguguggcgggagaugcaccaucuggucgaguucgagcccccucacgccgcuacaaucagagugcucgcccuggggaaucaagaaggaagccuuaaaaccgcgcugaccggcgcuaugcgcguuacaaaggacaccaacgauaauaaccucuacaagcugcaugggggccacguguccugccgggucaaacuuagcgcccugacacucaagggaacgucuuauaaaauuuguaccgacaagauguuuuucgugaaaaaucccacagauaccggccacgggacagugguuaugcaggucaagguguccaagggagccccgugcagaaucccugugaucgucgcugacgaccugaccgccgcuauuaacaaaggcauccuggugacgguuaaucccauugccagcaccaacgaugacgaggugcucaucgaagucaauccucccuucggggauucuuacauuaucgugggacgcggcgacagccggcugacauaucaguggcauaaggagggguccucuaucggcaaacuuuuuacccagacaaugaagggaguugagagacuggcggugaugggcgauaccgccugggacuucagcuccgcugggggauuuuucacgagcgucggcaaagggauucacacaguguuuggaucugccuuccaaggccucuuugggggccugaacuggaucaccaagguuauuaugggagcugugcugaucugggucggcauuaauacacgcaacaugaccauguccaugagcaugauccuugugggggugauuaugauguuccucucucugggagucggcgccugaggacuagugcaucacauuuaaaagcaucucagccuaccaugagaauaagagaaagaaaaugaagaucaauagcuuauucaucucuuuuucuuuuucguugguguaaagccaacacccugucuaaaaaacauaaauuucuuuaaucauuuugccucuuuucucugugcuucaauuaauaaaaaauggaaagaaccuagaucuaaaaaaaaaaaaaaaaaaaaaaaaaaaaaaaaaaaaaaaaaaaaaaaaaaaaaaaaaaaaaaaaugcaucccccccccccccccccccccccccccccccaaaggcucuuuucagagccaccagaauu

SEQ ID NO: 1172 - RNA, 2444 nt, Artificial Sequence
  mRNA product Design i-2 comprising derived and/or modified sequence from YFV__NC_002031.1__SSIgE-prME-XX (polyprotein: aa122-788) (opt5)
gggagaggcgcugccuacggagguggcagccaucuccuucucggcaucaagcuuaccauggacuggaccuggauccuguuccucguggccgcugccacaagaguccacagcguuacgcuggugcggaaaaaccgcuggcuucugcucaaugugaccagcgaggaucuggggaagacauuuuccgucggaaccggcaacugcacaaccaauauucuggaagccaaauacuggugucccgacucuauggaguauaacugcccuaaucucagcccgagagaagaacccgaugacaucgauuguuggugcuacgggguggaaaacguucggguggcuuauggaaagugugacuccgccggccgcucuagacggagccgcagagcgauugaucugccuacacaugagaaucacggccuuaaaacccggcaagagaaguggaugacggggcgcaugggagaaagacagcugcagaagaucgagcggugguucguccgcaaccccuuuuucgcugugaccgcccucacaauugccuaccugguuggcuccaauaugacccagagaguggucaucgcccuucuggugcucgcuguggggccugcuuauagcgcccauugcaucggaauuacagaccgggauuuuaucgaaggcguccacgggggaaccuggguuucugcgacgcuggagcaagacaaaugugugacagugauggcccccgauaagccuucccuggacauuagccucgagaccgucgcuaucgauagaccggccgaagugcgcaaaguuugcuacaacgcugugcugacacaugucaagauuaaugacaaaugucccucuaccggcgaggcccaccuugcggaagagaacgaaggcgacaaugccugcaagcggaccuauuccgauagaggguggggaaacggcugugggcuguucggaaagggcagcaucguggcuugcgccaaauuuacaugcgcuaagucuaugucccucuucgagguugaccagacgaaaauucaguacgugauccgcgcccagcugcacgucggggccaagcaagagaauuggaacaccgauaucaaaacacuuaaguuugacgcucugagcggaucccaggaaguggaguucauuggcuacggcaaagcgacccucgaaugucagguccagacagccguggauuuugggaacucuuauaucgcugagauggaaaccgagagcuggauuguugaccggcaaugggcccaggaucugacgcugccuuggcaguccggaagcggcgggguguggagagagaugcaucaccucgucgaguucgagcccccucaugccgcuacaauccgcgugcuggcccuuggaaaucaagaaggcucucugaagaccgcgcucaccggggcuaugcggguuacaaaggacaccaacgauaauaaccuguacaaacuucacggcggacacguguccugcagagucaagcugagcgcccucacacugaaaggcacgucuuauaagauuuguaccgacaaaauguuuuucgugaagaaucccacagauaccgggcauggaacagugguuaugcaggucaaggugagcaaaggcgccccgugccgcaucccugugaucgucgcugacgaccugaccgccgcuauuaacaaggggauccucgugacgguuaaucccauugccuccaccaacgaugacgaggugcugaucgaagucaauccucccuucggagauucuuacauuaucgugggccggggagacagcagacuuacauaucaguggcacaaagagggcuccagcaucggaaagcuguuuacccagacaaugaaaggcguugagcgccucgcggugaugggggauaccgccugggacuucucuuccgcuggaggcuuuuucacgagcgucgggaaggggauucauacaguguuuggcucugccuuccaagggcuguuuggcggacugaacuggaucaccaagguuauuaugggcgcugugcuuaucugggucgggauuaauacacggaacaugaccauguccaugagcaugauccucgugggagugauuaugauguuccugucccugggcgucggggccgaucagggaugugcgaucaauuuuggcaaaugaggacuagugcaucacauuuaaaagcaucucagccuaccaugagaauaagagaaagaaaaugaagaucaauagcuuauucaucucuuuuucuuuuucguugguguaaagccaacacccugucuaaaaaacauaaauuucuuuaaucauuuugccucuuuucucugugcuucaauuaauaaaaaauggaaagaaccuagaucuaaaaaaaaaaaaaaaaaaaaaaaaaaaaaaaaaaaaaaaaaaaaaaaaaaaaaaaaaaaaaaaaugcaucccccccccccccccccccccccccccccccaaaggcucuuuucagagccaccagaauu

SEQ ID NO: 1173 - RNA, 2414 nt, Artificial Sequence
  mRNA product Design i-2 comprising derived and/or modified sequence from YFV__NC_002031.1__SSIgE-prME (polyprotein: aa122-778) (opt5)
gggagaggcgcugccuacggagguggcagccaucuccuucucggcaucaagcuuaccauggacuggaccuggauccuguuccucguggccgcugccacaagaguccacagcgugacccuggucagaaagaaccgguggcuccugcuuaauguuacaagcgaggaccugggcaaaacguucuccguggggaccggaaacugcacaaccaauauccucgaagccaaguacuggugucccgauucuauggaguauaacugcccuaaucugagcccgcgcgaggaacccgacgauauugacuguuggugcuacggcguggaaaacgucagaguggcuuaugggaaaugugauuccgccggacggucucgcagaagccggcgcgcgaucgaccuuccuacacacgagaaucauggccugaagaccagacaggagaaauggaugacagggcggaugggagaacgccaacuccagaagauugagagaugguuuguucggaaccccuucuuugcugugaccgcccugacgaucgccuaccuggucggcuccaauaugacccagcgcgugguuauugcucuccuggugcuugccgucggcccugcuuauucugcccacugcaucgggaucacagauagagacuucauugaaggagugcauggcgggaccugggugagcgcgacacuggagcaggauaagugugucaccguuauggcccccgacaaaccuucccucgauaucagccuggagacgguggcuauugaccggccggccgaagugcgcaaggucugcuacaacgcugugcuuacacacguuaaaaucaaugauaagugucccucuaccggagaggcccaucuggcggaagagaacgaaggcgacaaugccugcaaaagaacauauuccgaccggggguggggaaacggcuguggccucuuugggaagggaagcauuguggcuugcgccaaguuuaccugcgcuaaaucuaugucccuguucgaggucgaucaaaccaagauccaguacgugauuagagcccagcugcacguuggcgccaaacaggagaauuggaacacagacaucaagacgcucaaauucgaugcucugagcgggucucaagaaguggaguuuaucggauacggcaaggcgacccuugaaugucagguccagacagccguggacuucgggaacuccuauauugcugagauggaaaccgagagcuggaucgucgaucgccagugggcccaagaccugacacucccuuggcaguccggaucuggcggcguguggcgggagaugcaccaucugguugaauuugagcccccucacgccgcuaccauuagagugcuugcccuggggaaucaggaaggaagccucaaaacggcgcugacaggcgcuaugcgcgucaccaaggauaccaacgacaauaaccuguacaagcuccaugggggacacguguccugccggguuaaacugagcgcccuuacacugaagggcaccucuuauaaaaucuguacagauaagauguucuuugugaaaaaucccacggacaccgggcacggcacagucgugaugcaagugaagguuuccaagggagccccgugccgcauuccugucaucguggcugaugaccucaccgccgcuaucaacaaaggcauucuggugacagucaaucccaucgccagcaccaacgacgaugaggugcuuauugaaguuaauccucccuucggggacucuuacaucauugugggaagaggcgauagccggcugacguaucaguggcauaaggagggguccucuaucggaaaacucuucacccagacaaugaagggcgucgagagacuggcggugaugggggacaccgccugggauuuuagcuccgcuggcggauucuuuacaagcguuggcaaagggauccacaccguguucggaucugccuuucagggccuguucgggggacucaacuggauuacgaaggucaucaugggcgcugugcugauuuggguugggaucaauacacgcaacaugaccauguccaugagcaugauucuugugggcgucaucaugauguuucugucucucggagugggcgccugaggacuagugcaucacauuuaaaagcaucucagccuaccaugagaauaagagaaagaaaaugaagaucaauagcuuauucaucucuuuuucuuuuucguugguguaaagccaacacccugucuaaaaaacauaaauuucuuuaaucauuuugccucuuuucucugugcuucaauuaauaaaaaauggaaagaaccuagaucuaaaaaaaaaaaaaaaaaaaaaaaaaaaaaaaaaaaaaaaaaaaaaaaaaaaaaaaaaaaaaaaaugcaucccccccccccccccccccccccccccccccaaaggcucuuuucagagccaccagaauu

SEQ ID NO: 1174 - RNA, 2462 nt, Artificial Sequence
  mRNA product Design i-2 comprising derived and/or modified sequence from YFV__NC_002031.1__SSjev-prME-XX (polyprotein: aa122-788) (opt5)
gggagaggcgcugccuacggagguggcagccaucuccuucucggcaucaagcuuaccaugggcaagagaagcgccggguccaucauguggcuggcuucucucgccguggucauugcgugcgcuggagccguuacgcuggugcggaaaaaccgcuggcuucugcucaaugugaccagcgaggaucuggggaagacauuuuccgucggaaccggcaacugcacaaccaauauucuggaagccaaauacuggugucccgacucuauggaguauaacugcccuaaucucagcccgagagaagaacccgaugacaucgauuguuggugcuacgggguggaaaacguucggguggcuuauggaaagugugacuccgccggccgcucuagacggagccgcagagcgauugaucugccuacacaugagaaucacggccuuaaaacccggcaagagaaguggaugacggggcgcaugggagaaagacagcugcagaagaucgagcggugguucguccgcaaccccuuuuucgcugugaccgcccucacaauugccuaccugguuggcuccaauaugacccagagaguggucaucgcccuucuggugcucgcuguggggccugcuuauagcgcccauugcaucggaauuacagaccgggauuuuaucgaaggcguccacgggggaaccuggguuucugcgacgcuggagcaagacaaaugugugacagugauggcccccgauaagccuucccuggacauuagccucgagaccgucgcuaucgauagaccggccgaagugcgcaaaguuugcuacaacgcugugcugacacaugucaagauuaaugacaaaugucccucuaccggcgaggcccaccuugcggaagagaacgaaggcgacaaugccugcaagcggaccuauuccgauagaggguggggaaacggcugugggcuguucggaaagggcagcaucguggcuugcgccaaauuuacaugcgcuaagucuaugucccucuucgagguugaccagacgaaaauucaguacgugauccgcgcccagcugcacgucggggccaagcaagagaauuggaacaccgauaucaaaacacuuaaguuugacgcucugagcggaucccaggaaguggaguucauuggcuacggcaaagcgacccucgaaugucagguccagacagccguggauuuugggaacucuuauaucgcugagauggaaaccgagagcuggauuguugaccggcaaugggcccaggaucugacgcugccuuggcaguccggaagcggcgggguguggagagagaugcaucaccucgucgaguucgagcccccucaugccgcuacaauccgcgugcuggcccuuggaaaucaagaaggcucucugaagaccgcgcucaccggggcuaugcggguuacaaaggacaccaacgauaauaaccuguacaaacuucacggcggacacguguccugcagagucaagcugagcgcccucacacugaaaggcacgucuuauaagauuuguaccgacaaaauguuuuucgugaagaaucccacagauaccgggcauggaacagugguuaugcaggucaaggugagcaaaggcgccccgugccgcaucccugugaucgucgcugacgaccugaccgccgcuauuaacaaggggauccucgugacgguuaaucccauugccuccaccaacgaugacgaggugcugaucgaagucaauccucccuucggagauucuuacauuaucgugggccggggagacagcagacuuacauaucaguggcacaaagagggcuccagcaucggaaagcuguuuacccagacaaugaaaggcguugagcgccucgcggugaugggggauaccgccugggacuucucuuccgcuggaggcuuuuucacgagcgucgggaaggggauucauacaguguuuggcucugccuuccaagggcuguuuggcggacugaacuggaucaccaagguuauuaugggcgcugugcuuaucugggucgggauuaauacacggaacaugaccauguccaugagcaugauccucgugggagugauuaugauguuccugucccugggcgucggggccgaucagggaugugcgaucaauuuuggcaaaugaggacuagugcaucacauuuaaaagcaucucagccuaccaugagaauaagagaaagaaaaugaagaucaauagcuuauucaucucuuuuucuuuuucguugguguaaagccaacacccugucuaaaaaacauaaauuucuuuaaucauuuugccucuuuucucugugcuucaauuaauaaaaaauggaaagaaccuagaucuaaaaaaaaaaaaaaaaaaaaaaaaaaaaaaaaaaaaaaaaaaaaaaaaaaaaaaaaaaaaaaaaugcaucccccccccccccccccccccccccccccccaaaggcucuuuucagagccaccagaauu

SEQ ID NO: 1175 - RNA, 2432 nt, Artificial Sequence
  mRNA product Design i-2 comprising derived and/or modified sequence from YFV__NC_002031.1__SSjev-prME (polyprotein: aa122-778) (opt5)
gggagaggcgcugccuacggagguggcagccaucuccuucucggcaucaagcuuaccaugggcaagagaagcgccggguccaucauguggcuggcuucucucgccguggucauugcgugcgcuggagccgugacccuggucagaaagaaccgguggcuccugcuuaauguuacaagcgaggaccugggcaaaacguucuccguggggaccggaaacugcacaaccaauauccucgaagccaaguacuggugucccgauucuauggaguauaacugcccuaaucugagcccgcgcgaggaacccgacgauauugacuguuggugcuacggcguggaaaacgucagaguggcuuaugggaaaugugauuccgccggacggucucgcagaagccggcgcgcgaucgaccuuccuacacacgagaaucauggccugaagaccagacaggagaaauggaugacagggcggaugggagaacgccaacuccagaagauugagagaugguuuguucggaaccccuucuuugcugugaccgcccugacgaucgccuaccuggucggcuccaauaugacccagcgcgugguuauugcucuccuggugcuugccgucggcccugcuuauucugcccacugcaucgggaucacagauagagacuucauugaaggagugcauggcgggaccugggugagcgcgacacuggagcaggauaagugugucaccguuauggcccccgacaaaccuucccucgauaucagccuggagacgguggcuauugaccggccggccgaagugcgcaaggucugcuacaacgcugugcuuacacacguuaaaaucaaugauaagugucccucuaccggagaggcccaucuggcggaagagaacgaaggcgacaaugccugcaaaagaacauauuccgaccggggguggggaaacggcuguggccucuuugggaagggaagcauuguggcuugcgccaaguuuaccugcgcuaaaucuaugucccuguucgaggucgaucaaaccaagauccaguacgugauuagagcccagcugcacguuggcgccaaacaggagaauuggaacacagacaucaagacgcucaaauucgaugcucugagcgggucucaagaaguggaguuuaucggauacggcaaggcgacccuugaaugucagguccagacagccguggacuucgggaacuccuauauugcugagauggaaaccgagagcuggaucgucgaucgccagugggcccaagaccugacacucccuuggcaguccggaucuggcggcguguggcgggagaugcaccaucugguugaauuugagcccccucacgccgcuaccauuagagugcuugcccuggggaaucaggaaggaagccucaaaacggcgcugacaggcgcuaugcgcgucaccaaggauaccaacgacaauaaccuguacaagcuccaugggggacacguguccugccggguuaaacugagcgcccuuacacugaagggcaccucuuauaaaaucuguacagauaagauguucuuugugaaaaaucccacggacaccgggcacggcacagucgugaugcaagugaagguuuccaagggagccccgugccgcauuccugucaucguggcugaugaccucaccgccgcuaucaacaaaggcauucuggugacagucaaucccaucgccagcaccaacgacgaugaggugcuuauugaaguuaauccucccuucggggacucuuacaucauugugggaagaggcgauagccggcugacguaucaguggcauaaggagggguccucuaucggaaaacucuucacccagacaaugaagggcgucgagagacuggcggugaugggggacaccgccugggauuuuagcuccgcuggcggauucuuuacaagcguuggcaaagggauccacaccguguucggaucugccuuucagggccuguucgggggacucaacuggauuacgaaggucaucaugggcgcugugcugauuuggguugggaucaauacacgcaacaugaccauguccaugagcaugauucuugugggcgucaucaugauguuucugucucucggagugggcgccugaggacuagugcaucacauuuaaaagcaucucagccuaccaugagaauaagagaaagaaaaugaagaucaauagcuuauucaucucuuuuucuuuuucguugguguaaagccaacacccugucuaaaaaacauaaauuucuuuaaucauuuugccucuuuucucugugcuucaauuaauaaaaaauggaaagaaccuagaucuaaaaaaaaaaaaaaaaaaaaaaaaaaaaaaaaaaaaaaaaaaaaaaaaaaaaaaaaaaaaaaaaugcaucccccccccccccccccccccccccccccccaaaggcucuuuucagagccaccagaauu

SEQ ID NO: 1176 - RNA, 2480 nt, Artificial Sequence
  mRNA product Design i-2 comprising derived and/or modified sequence from YFV__NC_002031.1__X-SS-prME-XX (polyprotein: aa92-788) (opt6)
gggagaggcgcugccuacggagguggcagccaucuccuucucggcaucaagcuuaccaugagaggauuaucaaguagaaaaagaagaucacaugauguacuaaccgugcaauuuuugaucuuagggaugcucuuaaugacaggagguguuacauuaguaagaaagaaucgauggcugcuuuuaaaugugacaucagaggauuuagggaaaacauuuucgguaggaacaggaaauuguacuacaaauauacuugaagcaaaauauuggugcccagacucuauggaauauaauuguccaaauuuaaguccuagagaagaaccugacgauauagauuguugguguuaugguguagaaaauguaagaguagcauacggcaaaugcgauagugcaggacguucuagacguucaaggagagccauagaucugcccacucacgaaaaucacggauugaaaacacgacaagaaaaauggaugacugggcgaaugggagaaagacaacuacagaaaauugaaagaugguucguuagaaauccauucuuugccguaacagcuuuaacaauagccuauuuaguagguaguaauaugacacaaagaguaguaauagcauugcuaguguuagcaguuggaccagcuuauagugcacauugcauaggaauaacagauagagacuuuauagaaggaguacacgggggaacuuggguaagugccacuuuagaacaagauaaauguguuacagugauggcgccagauaaaccaagucuggacauaaguuuggaaacaguagcgauugauagacccgcagaaguaagaaaaguuuguuauaaugcuguucuaacccauguuaaaauaaaugauaaaugcccuagcaccggagaagcccaucuagcagaagaaaaugaaggagauaacgcauguaaacgaacauacucagauagaggauggggcaacggauguggcuuguuuggaaaagguagcauaguagcaugcgcuaaauuuacaugcgcaaagucaaugucauuauuugaaguagaucaaacaaaaauacaauauguaauaagagcucaauuacacgugggugcaaaacaagaaaauuggaauacagacauaaagacacuaaaguucgacgcauuaaguggaucacaagagguagaauuuauaggguacggaaaagcgacuuuagagugucaaguccaaacagcaguagauuucgguaacucauacauagcagaaauggaaacugaaaguuggauaguagauagacaaugggcacaagacuugacacuaccuuggcaaucaggaagcggaggaguauggagagaaaugcaucauuuaguagaauuugaaccaccucaugcagcaacaauaagaguauuagcccuaggaaaccaagaaggaaguuuaaaaacagcacuaacaggagcuaugagaguaacaaaagauacaaaugacaacaaucuauacaaauuacacggaggacauguaagcugccggguaaaguugagcgcacuaacauuaaaaggaacgaguuauaaaauaugcacagauaaaauguucuuuguuaaaaauccuacagauaccggucauggaacaguaguaaugcaaguaaaaguaaguaaaggcgcucccuguagaauaccuguaauagucgcagacgauuuaaccgcagcaauaaauaaaggaauauuagucacgguaaacccaauagcgucaacaaaugaugaugaaguauuaauagaaguuaacccaccuuuuggagacaguuauauaauagucggaaggggugauaguagacuaacauaccaauggcauaaagaaggaagcucaauaggaaaauuauuuacucaaaccaugaaagguguagaaaggcuagcuguuaugggugacacagcaugggauuuuucaagcgcaggaggguucuuuacaucaguagguaaaggaauacauacaguauuuggaagugcauuucaaggauuauuuggugguuuaaauuggauaacaaaaguaauaaugggcgcaguuuuaauauggguagguauaaacacaagaaauaugacaaugucuaugaguaugauauuggucggaguaauaaugauguuuuuaucacuaggagugggugcagaucaagguugcgcuauuaauuuuggaaaaugaggacuagugcaucacauuuaaaagcaucucagccuaccaugagaauaagagaaagaaaaugaagaucaauagcuuauucaucucuuuuucuuuuucguugguguaaagccaacacccugucuaaaaaacauaaauuucuuuaaucauuuugccucuuuucucugugcuucaauuaauaaaaaauggaaagaaccuagaucuaaaaaaaaaaaaaaaaaaaaaaaaaaaaaaaaaaaaaaaaaaaaaaaaaaaaaaaaaaaaaaaaugcaucccccccccccccccccccccccccccccccaaaggcucuuuucagagccaccagaauu

SEQ ID NO: 1177 - RNA, 2417 nt, Artificial Sequence
  mRNA product Design i-2 comprising derived and/or modified sequence from YFV__NC_002031.1__SS-prME (polyprotein: M,aa104-778) (opt6)
gggagaggcgcugccuacggagguggcagccaucuccuucucggcaucaagcuuaccauggauguucuaacaguacaauuuuuaauauuagggauguuauuaaugacaggaggcguaacauuaguacgaaagaaucgauggcuauuacuaaacguuacgucugaagauuuaggaaaaacauuuagcguaggaacaggaaauugcaccacgaauaucuuagaagcaaaauauugguguccagauaguauggaauacaauuguccaaauuuaaguccuagagaggaacccgacgauauagauugcugguguuacggaguggaaaauguaagaguagcauauggaaaaugugacagcgcagguagaaguagaagaucacgacgagcaauugaucuacccacucaugagaaccauggacuaaaaacaagacaagaaaaauggaugacagguagaaugggcgaaagacaauuacagaaaauagaaagaugguuuguacgaaauccuuucuuugcugucacugcauuaacuauagcuuauuuaguaggaaguaacaugacucaaagaguaguaauagcacuauuaguacuagcaguaggaccagcuuacagugcacacuguauagggauaacggauagagauuuuauagaaggaguacauggggguacaugggugucugccacuuuagaacaagacaaauguguuacaguuauggccccagauaaacccucuuuagacauaucauuagaaacuguagcaauagauagaccggcggaagugagaaagguauguuauaaugcaguacuaacccauguaaaaauuaaugacaaaugcccaucaacaggagaggcucaucuagcugaagaaaaugaaggagacaaugcuugcaaacguacauauucagacaggggguggggaaauggauguggauuauuugguaaagggucaauaguagcaugugcaaaauuuacaugcgcaaaaaguaugagcuuauuugaaguagaucaaacaaaaauccaauauguaauuagagcucaacuucacguaggagcaaaacaagagaauuggaacacagauauaaaaacauuaaaauuugacgcuuugucuggaagucaagaagucgaauuuauuggcuauggaaaggcaacauuagaaugccaaguucaaaccgcaguagauuuuggaaauucauacauagcagaaauggagacugaaaguuggauaguagauagacagugggcucaagaccuaacuuuaccauggcaaucaggaaguggugguguauggagagaaaugcaucauuuaguagaauuugaaccaccacaugcagcaacaauuagaguacuagcauuaggaaaucaagaagguaguuuaaagacagcgcuuaccggagcaaugagaguuacaaaagauacuaaugacaauaauuuauauaaacuucauggaggacauguuagcuguagagucaaauuaagugcauuaacacucaaaggaacaucauacaaaauauguacagauaaaauguuuuucgucaagaauccaacagauacaggacauggaacaguuguaaugcaaguaaaaguaucaaaaggagcaccuugcagaauaccaguaauaguagcagaugauuuaacagccgcaauuaauaaagggauauuaguaacaguaaacccuauagcaaguacaaaugaugaugaagucuugauagaaguaaauccaccauuuggagauucguauauaauagucggaagaggagauagucgauuaacauaucaauggcauaaagaagguucaucaauaggaaaauuauuuacacaaaccaugaaaggaguugaaagauuagcuguaaugggggacacagcuugggauuuuucuagcgcaggaggauucuuuacauccguaggaaaagguauacacacaguauuuggcucagcauuccaaggguuauuuggugguuuaaauuggauaacaaaagugauuaugggagcagugcuaaucuggguaggaauaaauacaagaaauaugacaaugaguaugagcaugauucucguaggaguaauaaugauguuccuuaguuugggaguuggcgcuugaggacuagugcaucacauuuaaaagcaucucagccuaccaugagaauaagagaaagaaaaugaagaucaauagcuuauucaucucuuuuucuuuuucguugguguaaagccaacacccugucuaaaaaacauaaauuucuuuaaucauuuugccucuuuucucugugcuucaauuaauaaaaaauggaaagaaccuagaucuaaaaaaaaaaaaaaaaaaaaaaaaaaaaaaaaaaaaaaaaaaaaaaaaaaaaaaaaaaaaaaaaugcaucccccccccccccccccccccccccccccccaaaggcucuuuucagagccaccagaauu

SEQ ID NO: 1178 - RNA, 2444 nt, Artificial Sequence
  mRNA product Design i-2 comprising derived and/or modified sequence from YFV__NC_002031.1__SSIgE-prME-XX (polyprotein: aa122-788) (opt6)
gggagaggcgcugccuacggagguggcagccaucuccuucucggcaucaagcuuaccauggacuggacauggauauuauuuuuaguagcagcagcaacaagaguacauucaguuacauuaguaagaaagaaucgauggcugcuuuuaaaugugacaucagaggauuuagggaaaacauuuucgguaggaacaggaaauuguacuacaaauauacuugaagcaaaauauuggugcccagacucuauggaauauaauuguccaaauuuaaguccuagagaagaaccugacgauauagauuguugguguuaugguguagaaaauguaagaguagcauacggcaaaugcgauagugcaggacguucuagacguucaaggagagccauagaucugcccacucacgaaaaucacggauugaaaacacgacaagaaaaauggaugacugggcgaaugggagaaagacaacuacagaaaauugaaagaugguucguuagaaauccauucuuugccguaacagcuuuaacaauagccuauuuaguagguaguaauaugacacaaagaguaguaauagcauugcuaguguuagcaguuggaccagcuuauagugcacauugcauaggaauaacagauagagacuuuauagaaggaguacacgggggaacuuggguaagugccacuuuagaacaagauaaauguguuacagugauggcgccagauaaaccaagucuggacauaaguuuggaaacaguagcgauugauagacccgcagaaguaagaaaaguuuguuauaaugcuguucuaacccauguuaaaauaaaugauaaaugcccuagcaccggagaagcccaucuagcagaagaaaaugaaggagauaacgcauguaaacgaacauacucagauagaggauggggcaacggauguggcuuguuuggaaaagguagcauaguagcaugcgcuaaauuuacaugcgcaaagucaaugucauuauuugaaguagaucaaacaaaaauacaauauguaauaagagcucaauuacacgugggugcaaaacaagaaaauuggaauacagacauaaagacacuaaaguucgacgcauuaaguggaucacaagagguagaauuuauaggguacggaaaagcgacuuuagagugucaaguccaaacagcaguagauuucgguaacucauacauagcagaaauggaaacugaaaguuggauaguagauagacaaugggcacaagacuugacacuaccuuggcaaucaggaagcggaggaguauggagagaaaugcaucauuuaguagaauuugaaccaccucaugcagcaacaauaagaguauuagcccuaggaaaccaagaaggaaguuuaaaaacagcacuaacaggagcuaugagaguaacaaaagauacaaaugacaacaaucuauacaaauuacacggaggacauguaagcugccggguaaaguugagcgcacuaacauuaaaaggaacgaguuauaaaauaugcacagauaaaauguucuuuguuaaaaauccuacagauaccggucauggaacaguaguaaugcaaguaaaaguaaguaaaggcgcucccuguagaauaccuguaauagucgcagacgauuuaaccgcagcaauaaauaaaggaauauuagucacgguaaacccaauagcgucaacaaaugaugaugaaguauuaauagaaguuaacccaccuuuuggagacaguuauauaauagucggaaggggugauaguagacuaacauaccaauggcauaaagaaggaagcucaauaggaaaauuauuuacucaaaccaugaaagguguagaaaggcuagcuguuaugggugacacagcaugggauuuuucaagcgcaggaggguucuuuacaucaguagguaaaggaauacauacaguauuuggaagugcauuucaaggauuauuuggugguuuaaauuggauaacaaaaguaauaaugggcgcaguuuuaauauggguagguauaaacacaagaaauaugacaaugucuaugaguaugauauuggucggaguaauaaugauguuuuuaucacuaggagugggugcagaucaagguugcgcuauuaauuuuggaaaaugaggacuagugcaucacauuuaaaagcaucucagccuaccaugagaauaagagaaagaaaaugaagaucaauagcuuauucaucucuuuuucuuuuucguugguguaaagccaacacccugucuaaaaaacauaaauuucuuuaaucauuuugccucuuuucucugugcuucaauuaauaaaaaauggaaagaaccuagaucuaaaaaaaaaaaaaaaaaaaaaaaaaaaaaaaaaaaaaaaaaaaaaaaaaaaaaaaaaaaaaaaaugcaucccccccccccccccccccccccccccccccaaaggcucuuuucagagccaccagaauu

SEQ ID NO: 1179 - RNA, 2414 nt, Artificial Sequence
  mRNA product Design i-2 comprising derived and/or modified sequence from YFV__NC_002031.1__SSIgE-prME (polyprotein: aa122-778) (opt6)
gggagaggcgcugccuacggagguggcagccaucuccuucucggcaucaagcuuaccauggacuggacauggauauuauuuuuaguagcagcagcaacaagaguacauucaguaacauuagucagaaagaacagaugguuauuacugaacguaacaagugaagacuuaggaaaaacauuuaguguaggcacaggaaauugcacaacaaauauacuugaagcaaaauauugguguccagauagcauggaauauaauuguccaaauuuaucaccuagagaggaacccgaugauauagauuguugguguuauggaguugaaaacgugcgaguagcauaugguaaaugugauagcgcaggaagaaguagaagaaguagaagggcaauagacuuaccaacucaugaaaaccauggauuaaaaacaagacaggaaaaauggaugacaggaagaaugggagaacgacaauuacagaaaauagaaagaugguucguaagaaauccauucuuugcaguaacagcauuaacaauagcauaucuaguuggaaguaacaugacucaaagaguaguaauagcauuguuaguacuagcaguaggaccggcuuauagcgcacauuguauagggauaacagauagagacuuuauagaaggagugcacgguggaacauggguuucagcaacgcuagagcaagauaaauguguaacgguaauggcgccggauaaaccaagccuugacauaucacuagaaacgguugcaaucgaucgaccagccgaaguaagaaaaguaugcuauaaugcggucuuaacacacguaaaaauaaaugauaaauguccuucaacgggagaagcacauuuagcagaagaaaacgaaggagacaacgcguguaaaagaacauauucagauaggggcuggggaaacggcugcgguuuauuuggaaaaggaaguauaguagcaugcgcaaaauuuacuugcgcaaaaaguaugaguuuauucgaaguugaucaaacaaagauacaauauguaauacgagcacaauuacauguaggugcaaagcaagaaaauuggaauacagacauaaaaacauugaaauuugacgcuuugaguggaucacaagaaguagaauuuauaggauacggaaaagcuacauuagaaugucaaguacaaacugcaguagauuuuggaaauucguauauagcagaaauggaaacugaaucauggauuguagauaggcaaugggcacaagauuuaaccuugccauggcaaagcggaagcggggguguauggcgggaaaugcaucauuuaguagaguucgaacccccacacgcggcuaccauaagaguacuagcauuaggaaaucaagaagggagucucaagacagcacucacaggugcaaugcgaguaacgaaagauacaaaugacaauaaucuauacaaacuacacggaggacauguaucuugcagaguaaaauuaucugcauuaacacuaaaagggacaaguuacaaaauuuguacagauaagauguucuuugucaaaaacccaacagacacgggacacggaacgguagucaugcaaguuaaaguaagcaaaggagcgccaugcagaauaccaguaaucgucgcagaugauuuaacagccgcaauaaauaaagguauauuaguaacgguaaauccaauagcgaguaccaaugaugaugaaguacuaauagaagugaacccaccauuuggugauagcuauauaauaguagggcgaggagauucaagauuaacauaucaauggcauaaagaagguaguaguauaggaaaauuauuuacacaaacuaugaaaggcguagaaagacuagcagucaugggagauacagcaugggauuucucaagugcaggcggauuuuucacaagcgucggaaaaggaauacauacaguguuugguagugcguuucaaggauuauucggaggacuaaauuggauaacgaaaguaauuaugggagcaguucucauaugggucggaauaaauacaaggaacaugacuaugaguaugagcaugauccuaguaggaguaauaaugauguuucuaagccuaggcguuggugcaugaggacuagugcaucacauuuaaaagcaucucagccuaccaugagaauaagagaaagaaaaugaagaucaauagcuuauucaucucuuuuucuuuuucguugguguaaagccaacacccugucuaaaaaacauaaauuucuuuaaucauuuugccucuuuucucugugcuucaauuaauaaaaaauggaaagaaccuagaucuaaaaaaaaaaaaaaaaaaaaaaaaaaaaaaaaaaaaaaaaaaaaaaaaaaaaaaaaaaaaaaaaugcaucccccccccccccccccccccccccccccccaaaggcucuuuucagagccaccagaauu

SEQ ID NO: 1180 - RNA, 2462 nt, Artificial Sequence
  mRNA product Design i-2 comprising derived and/or modified sequence from YFV__NC_002031.1__SSjev-prME-XX (polyprotein: aa122-788) (opt6)
gggagaggcgcugccuacggagguggcagccaucuccuucucggcaucaagcuuaccaugggaaaaagaagugcaggaaguauaaugugguuggcaaguuuagcaguaguaauagcaugugcaggagcaguuacauuaguaagaaagaaucgauggcugcuuuuaaaugugacaucagaggauuuagggaaaacauuuucgguaggaacaggaaauuguacuacaaauauacuugaagcaaaauauuggugcccagacucuauggaauauaauuguccaaauuuaaguccuagagaagaaccugacgauauagauuguugguguuaugguguagaaaauguaagaguagcauacggcaaaugcgauagugcaggacguucuagacguucaaggagagccauagaucugcccacucacgaaaaucacggauugaaaacacgacaagaaaaauggaugacugggcgaaugggagaaagacaacuacagaaaauugaaagaugguucguuagaaauccauucuuugccguaacagcuuuaacaauagccuauuuaguagguaguaauaugacacaaagaguaguaauagcauugcuaguguuagcaguuggaccagcuuauagugcacauugcauaggaauaacagauagagacuuuauagaaggaguacacgggggaacuuggguaagugccacuuuagaacaagauaaauguguuacagugauggcgccagauaaaccaagucuggacauaaguuuggaaacaguagcgauugauagacccgcagaaguaagaaaaguuuguuauaaugcuguucuaacccauguuaaaauaaaugauaaaugcccuagcaccggagaagcccaucuagcagaagaaaaugaaggagauaacgcauguaaacgaacauacucagauagaggauggggcaacggauguggcuuguuuggaaaagguagcauaguagcaugcgcuaaauuuacaugcgcaaagucaaugucauuauuugaaguagaucaaacaaaaauacaauauguaauaagagcucaauuacacgugggugcaaaacaagaaaauuggaauacagacauaaagacacuaaaguucgacgcauuaaguggaucacaagagguagaauuuauaggguacggaaaagcgacuuuagagugucaaguccaaacagcaguagauuucgguaacucauacauagcagaaauggaaacugaaaguuggauaguagauagacaaugggcacaagacuugacacuaccuuggcaaucaggaagcggaggaguauggagagaaaugcaucauuuaguagaauuugaaccaccucaugcagcaacaauaagaguauuagcccuaggaaaccaagaaggaaguuuaaaaacagcacuaacaggagcuaugagaguaacaaaagauacaaaugacaacaaucuauacaaauuacacggaggacauguaagcugccggguaaaguugagcgcacuaacauuaaaaggaacgaguuauaaaauaugcacagauaaaauguucuuuguuaaaaauccuacagauaccggucauggaacaguaguaaugcaaguaaaaguaaguaaaggcgcucccuguagaauaccuguaauagucgcagacgauuuaaccgcagcaauaaauaaaggaauauuagucacgguaaacccaauagcgucaacaaaugaugaugaaguauuaauagaaguuaacccaccuuuuggagacaguuauauaauagucggaaggggugauaguagacuaacauaccaauggcauaaagaaggaagcucaauaggaaaauuauuuacucaaaccaugaaagguguagaaaggcuagcuguuaugggugacacagcaugggauuuuucaagcgcaggaggguucuuuacaucaguagguaaaggaauacauacaguauuuggaagugcauuucaaggauuauuuggugguuuaaauuggauaacaaaaguaauaaugggcgcaguuuuaauauggguagguauaaacacaagaaauaugacaaugucuaugaguaugauauuggucggaguaauaaugauguuuuuaucacuaggagugggugcagaucaagguugcgcuauuaauuuuggaaaaugaggacuagugcaucacauuuaaaagcaucucagccuaccaugagaauaagagaaagaaaaugaagaucaauagcuuauucaucucuuuuucuuuuucguugguguaaagccaacacccugucuaaaaaacauaaauuucuuuaaucauuuugccucuuuucucugugcuucaauuaauaaaaaauggaaagaaccuagaucuaaaaaaaaaaaaaaaaaaaaaaaaaaaaaaaaaaaaaaaaaaaaaaaaaaaaaaaaaaaaaaaaugcaucccccccccccccccccccccccccccccccaaaggcucuuuucagagccaccagaauu

SEQ ID NO: 1181 - RNA, 2432 nt, Artificial Sequence
  mRNA product Design i-2 comprising derived and/or modified sequence from YFV__NC_002031.1__SSjev-prME (polyprotein: aa122-778) (opt6)
gggagaggcgcugccuacggagguggcagccaucuccuucucggcaucaagcuuaccaugggaaaaagaagugcaggaaguauaaugugguuggcaaguuuagcaguaguaauagcaugugcaggagcaguaacauuagucagaaagaacagaugguuauuacugaacguaacaagugaagacuuaggaaaaacauuuaguguaggcacaggaaauugcacaacaaauauacuugaagcaaaauauugguguccagauagcauggaauauaauuguccaaauuuaucaccuagagaggaacccgaugauauagauuguugguguuauggaguugaaaacgugcgaguagcauaugguaaaugugauagcgcaggaagaaguagaagaaguagaagggcaauagacuuaccaacucaugaaaaccauggauuaaaaacaagacaggaaaaauggaugacaggaagaaugggagaacgacaauuacagaaaauagaaagaugguucguaagaaauccauucuuugcaguaacagcauuaacaauagcauaucuaguuggaaguaacaugacucaaagaguaguaauagcauuguuaguacuagcaguaggaccggcuuauagcgcacauuguauagggauaacagauagagacuuuauagaaggagugcacgguggaacauggguuucagcaacgcuagagcaagauaaauguguaacgguaauggcgccggauaaaccaagccuugacauaucacuagaaacgguugcaaucgaucgaccagccgaaguaagaaaaguaugcuauaaugcggucuuaacacacguaaaaauaaaugauaaauguccuucaacgggagaagcacauuuagcagaagaaaacgaaggagacaacgcguguaaaagaacauauucagauaggggcuggggaaacggcugcgguuuauuuggaaaaggaaguauaguagcaugcgcaaaauuuacuugcgcaaaaaguaugaguuuauucgaaguugaucaaacaaagauacaauauguaauacgagcacaauuacauguaggugcaaagcaagaaaauuggaauacagacauaaaaacauugaaauuugacgcuuugaguggaucacaagaaguagaauuuauaggauacggaaaagcuacauuagaaugucaaguacaaacugcaguagauuuuggaaauucguauauagcagaaauggaaacugaaucauggauuguagauaggcaaugggcacaagauuuaaccuugccauggcaaagcggaagcggggguguauggcgggaaaugcaucauuuaguagaguucgaacccccacacgcggcuaccauaagaguacuagcauuaggaaaucaagaagggagucucaagacagcacucacaggugcaaugcgaguaacgaaagauacaaaugacaauaaucuauacaaacuacacggaggacauguaucuugcagaguaaaauuaucugcauuaacacuaaaagggacaaguuacaaaauuuguacagauaagauguucuuugucaaaaacccaacagacacgggacacggaacgguagucaugcaaguuaaaguaagcaaaggagcgccaugcagaauaccaguaaucgucgcagaugauuuaacagccgcaauaaauaaagguauauuaguaacgguaaauccaauagcgaguaccaaugaugaugaaguacuaauagaagugaacccaccauuuggugauagcuauauaauaguagggcgaggagauucaagauuaacauaucaauggcauaaagaagguaguaguauaggaaaauuauuuacacaaacuaugaaaggcguagaaagacuagcagucaugggagauacagcaugggauuucucaagugcaggcggauuuuucacaagcgucggaaaaggaauacauacaguguuugguagugcguuucaaggauuauucggaggacuaaauuggauaacgaaaguaauuaugggagcaguucucauaugggucggaauaaauacaaggaacaugacuaugaguaugagcaugauccuaguaggaguaauaaugauguuucuaagccuaggcguuggugcaugaggacuagugcaucacauuuaaaagcaucucagccuaccaugagaauaagagaaagaaaaugaagaucaauagcuuauucaucucuuuuucuuuuucguugguguaaagccaacacccugucuaaaaaacauaaauuucuuuaaucauuuugccucuuuucucugugcuucaauuaauaaaaaauggaaagaaccuagaucuaaaaaaaaaaaaaaaaaaaaaaaaaaaaaaaaaaaaaaaaaaaaaaaaaaaaaaaaaaaaaaaaugcaucccccccccccccccccccccccccccccccaaaggcucuuuucagagccaccagaauu

SEQ ID NO: 1182 - RNA, 2480 nt, Artificial Sequence
  mRNA product Design i-2 comprising derived and/or modified sequence from YFV__NC_002031.1__X-SS-prME-XX (polyprotein: aa92-788) (opt11)
gggagaggcgcugccuacggagguggcagccaucuccuucucggcaucaagcuuaccaugcggggacuaagcagcagaaaaagacgcagccacgaugugcucaccgugcaauuccucauacuggggaugcuccuaaugaccggaggcgugacccuaguaaggaaaaacagauggcuacuacuaaacguaaccucagaagaucuaggaaagacauuuucagucggcacaggcaacugcacaaccaacauacuagaagcaaaauauuggugcccagacagcauggaauacaacugucccaaccucagcccaagagaggaaccagacgacauagacugcugguguuacggaguagaaaacguaagaguggcauacggcaaaugcgacagcgcaggcaggagccgaagaucccgcagagccaucgacuugcccacgcacgaaaaccacggccucaaaacacgacaagaaaaauggaugacagggcgaaugggagaacgacagcuccagaaaauagaacgaugguucguccggaacccguucuucgcaguaacggcacuaacaaucgcauaccucguaggcagcaacaugacacaaagaguggucaucgcgcuacucguacuagcaguggggcccgcauacagugcacacugcauaggaaucacagaccgugacuucaucgaaggcguacacggaggaacguggguaagcgcgacacuggaacaagacaaaugcgugacaguaauggcaccagacaaaccaagccuagacauaucccuagaaacggucgccaucgaccgucccgcagaaguacgaaagguaugcuauaaugcaguccucacacacgucaaaauaaacgacaaaugccccagcacgggcgaagcacaccucgccgaagaaaacgaaggggauaacgcgugcaaacgcaccuacuccgacaggggauggggcaacggaugcggacuguucggaaaaggauccauagucgcaugcgcaaaauuuaccugcgcaaaaagcaugagcuuguucgagguagaccaaacgaagauccaauacguaauccgagcucaacuacacguuggggccaagcaagagaacuggaauacggacaucaaaacacuaaaauucgacgcacucuccggcucacaagaagucgaguucaucggcuacggcaaagcaacacuagaaugccaaguacaaacagcgguggacuucggcaacagcuacauagcagaaauggaaacagaaagcuggauaguagaccgacaaugggcacaagaccuaacucugccauggcaaagcggcucaggaggaguguggagagagaugcaccaccugguagaguucgaacccccacacgcagcaacaauaaggguacuggcacuaggcaaccaagaaggcagccuaaaaaccgcacucacaggagccaugcgcgugacgaaggacaccaacgacaacaaccucuacaaacuccacggagggcacguauccugccgcguaaaacuaucagcacuaacgcuaaaaggaacaagcuacaaaauaugcacagacaaaauguucuucgucaaaaaccccacagacacaggccacggcacagucguaaugcaagugaaggucagcaagggggcccccugccgaaucccagucauaguggcagacgaccucacggccgccaucaacaaagggauccugguaacagugaacccaauagcaucgaccaacgacgacgaaguccucauagaagugaaucccccguucggcgacagcuacaucaucguaggacgcggcgacucccgacugacguaccaauggcauaaagaaggcagcagcauuggaaaacuauucacccaaaccaugaagggcgucgaaagacucgcggugaugggagacaccgcaugggacuucucgagcgcaggcggcuucuucacaagcguaggaaaagggauucacacaguauucggauccgcauuccaaggccucuucgggggacuaaacuggauaacgaaaguaauaaugggagcaguucucauauggguaggaaucaacacacgaaacaugacaauguccaugucaaugauacucguaggcguaaucaugauguuucugucacucggagugggagcagaccaagguugcgccauaaacuucggcaagugaggacuagugcaucacauuuaaaagcaucucagccuaccaugagaauaagagaaagaaaaugaagaucaauagcuuauucaucucuuuuucuuuuucguugguguaaagccaacacccugucuaaaaaacauaaauuucuuuaaucauuuugccucuuuucucugugcuucaauuaauaaaaaauggaaagaaccuagaucuaaaaaaaaaaaaaaaaaaaaaaaaaaaaaaaaaaaaaaaaaaaaaaaaaaaaaaaaaaaaaaaaugcaucccccccccccccccccccccccccccccccaaaggcucuuuucagagccaccagaauu

SEQ ID NO: 1183 - RNA, 2417 nt, Artificial Sequence
  mRNA product Design i-2 comprising derived and/or modified sequence from YFV__NC_002031.1__SS-prME (polyprotein: M,aa104-778) (opt11)
gggagaggcgcugccuacggagguggcagccaucuccuucucggcaucaagcuuaccauggacguccuuacgguacaauuccuaauacuaggaaugcuucucaugaccgggggcgucacccuaguccggaaaaacagauggcuacugcuaaauguuacaagcgaagaccuuggcaagacauucagcguaggcacgggcaacuguacaaccaacauacuagaagcgaaauacuggugcccagacuccauggaguacaacugccccaaccuaagcccacgggaagaacccgacgacauagacugcugguguuacggggucgaaaacguccgcgucgcauacgggaaaugcgauagcgcaggccgcaguagacgcucccgccgcgccauagaccuaccaacgcacgagaaccacggccucaaaacucgccaagaaaaauggaugacagggcgaaugggugaacgccaacuacagaagaucgaaaggugguucgucaggaacccauucuucgcagugaccgcacuaacgauagccuaccuagugggaucaaacaugacgcaacgagucgugaucgcacuccuaguacuggccguaggaccggccuacuccgcgcacugcaucggcauaacggauagggacuucauugaaggaguacauggcggcacgugggucagcgcgacacucgaacaagacaaaugcguaaccgugauggcacccgacaaaccgagucuugacauaagccuggaaacgguagcgauagaucguccagccgaaguaagaaaaguaugcuacaacgcaguccuaacacacguaaaaauaaacgacaaaugcccaagcacaggggaagcccaccucgcagaagagaacgaaggcgacaacgcaugcaaacgcacauacuccgacaggggaugggggaauggcugcggacuauucgggaaaggaagcaucgucgcgugcgccaaauucacaugcgccaagagcaugagccuguucgaagucgaccaaacaaaaauccaauacguaauacgcgcgcaacugcacguaggagcgaaacaggaaaacuggaacacggacauuaaaacccucaaauucgacgcgcucucaggaucacaagaagucgaguucaucggcuacggcaaggcaacgcucgaaugccaaguacaaacagcaguagacuucggaaacagcuacauugccgagauggaaaccgagagcuggauagucgacagacaaugggcccaagaccuaacccugccauggcaaucaggcuccgggggcgucuggcgagagaugcaccaccuaguagaguucgaaccaccccacgccgccacgaucagaguacuggcccugggcaaccaagaaggcucacucaagacggcgcucacaggagcaaugagggucacgaaagacaccaacgacaacaaccucuacaaacuacacggagggcacgugagcugccggguaaaacugagcgcacucacucugaagggaacaagcuacaagauaugcaccgacaaaauguucuucgugaaaaacccaaccgacacuggacacggcacggucguuaugcaagucaagguaucaaaaggagccccaugcagaaucccaguaauaguagcggacgaccuaacagccgccauaaacaaaggaauccuagucacgguaaauccgauagcaucgaccaacgacgacgaaguacuaauagaagugaacccaccauucggcgacagcuacauaauagucgggagaggcgacucgcgacuaaccuaccaauggcacaaggaagggagcucuaucgggaaacuauucacccaaacgaugaagggcguagaaaggcucgcagucaugggcgacaccgcaugggacuucuccagcgcgggaggcuucuuuacuucagugggaaaagggauacacaccgucuucggcagcgcauuccagggccuauucggcggguuaaacuggaucacgaaagugauaaugggggcaguucucaucugggucggaauaaacacacguaacaugaccaugagcaugagcaugauccuagucggggucauaaugauguucuugagcuugggaguaggugcaugaggacuagugcaucacauuuaaaagcaucucagccuaccaugagaauaagagaaagaaaaugaagaucaauagcuuauucaucucuuuuucuuuuucguugguguaaagccaacacccugucuaaaaaacauaaauuucuuuaaucauuuugccucuuuucucugugcuucaauuaauaaaaaauggaaagaaccuagaucuaaaaaaaaaaaaaaaaaaaaaaaaaaaaaaaaaaaaaaaaaaaaaaaaaaaaaaaaaaaaaaaaugcaucccccccccccccccccccccccccccccccaaaggcucuuuucagagccaccagaauu

SEQ ID NO: 1184 - RNA, 2444 nt, Artificial Sequence
  mRNA product Design i-2 comprising derived and/or modified sequence from YFV__NC_002031.1__SSIgE-prME-XX (polyprotein: aa122-788) (opt11)
gggagaggcgcugccuacggagguggcagccaucuccuucucggcaucaagcuuaccauggauuggacguggauacucuuucucguggccgcggccacgcgcgugcacucggugacccuaguaaggaaaaacagauggcuacuacuaaacguaaccucagaagaucuaggaaagacauuuucagucggcacaggcaacugcacaaccaacauacuagaagcaaaauauuggugcccagacagcauggaauacaacugucccaaccucagcccaagagaggaaccagacgacauagacugcugguguuacggaguagaaaacguaagaguggcauacggcaaaugcgacagcgcaggcaggagccgaagaucccgcagagccaucgacuugcccacgcacgaaaaccacggccucaaaacacgacaagaaaaauggaugacagggcgaaugggagaacgacagcuccagaaaauagaacgaugguucguccggaacccguucuucgcaguaacggcacuaacaaucgcauaccucguaggcagcaacaugacacaaagaguggucaucgcgcuacucguacuagcaguggggcccgcauacagugcacacugcauaggaaucacagaccgugacuucaucgaaggcguacacggaggaacguggguaagcgcgacacuggaacaagacaaaugcgugacaguaauggcaccagacaaaccaagccuagacauaucccuagaaacggucgccaucgaccgucccgcagaaguacgaaagguaugcuauaaugcaguccucacacacgucaaaauaaacgacaaaugccccagcacgggcgaagcacaccucgccgaagaaaacgaaggggauaacgcgugcaaacgcaccuacuccgacaggggauggggcaacggaugcggacuguucggaaaaggauccauagucgcaugcgcaaaauuuaccugcgcaaaaagcaugagcuuguucgagguagaccaaacgaagauccaauacguaauccgagcucaacuacacguuggggccaagcaagagaacuggaauacggacaucaaaacacuaaaauucgacgcacucuccggcucacaagaagucgaguucaucggcuacggcaaagcaacacuagaaugccaaguacaaacagcgguggacuucggcaacagcuacauagcagaaauggaaacagaaagcuggauaguagaccgacaaugggcacaagaccuaacucugccauggcaaagcggcucaggaggaguguggagagagaugcaccaccugguagaguucgaacccccacacgcagcaacaauaaggguacuggcacuaggcaaccaagaaggcagccuaaaaaccgcacucacaggagccaugcgcgugacgaaggacaccaacgacaacaaccucuacaaacuccacggagggcacguauccugccgcguaaaacuaucagcacuaacgcuaaaaggaacaagcuacaaaauaugcacagacaaaauguucuucgucaaaaaccccacagacacaggccacggcacagucguaaugcaagugaaggucagcaagggggcccccugccgaaucccagucauaguggcagacgaccucacggccgccaucaacaaagggauccugguaacagugaacccaauagcaucgaccaacgacgacgaaguccucauagaagugaaucccccguucggcgacagcuacaucaucguaggacgcggcgacucccgacugacguaccaauggcauaaagaaggcagcagcauuggaaaacuauucacccaaaccaugaagggcgucgaaagacucgcggugaugggagacaccgcaugggacuucucgagcgcaggcggcuucuucacaagcguaggaaaagggauucacacaguauucggauccgcauuccaaggccucuucgggggacuaaacuggauaacgaaaguaauaaugggagcaguucucauauggguaggaaucaacacacgaaacaugacaauguccaugucaaugauacucguaggcguaaucaugauguuucugucacucggagugggagcagaccaagguugcgccauaaacuucggcaagugaggacuagugcaucacauuuaaaagcaucucagccuaccaugagaauaagagaaagaaaaugaagaucaauagcuuauucaucucuuuuucuuuuucguugguguaaagccaacacccugucuaaaaaacauaaauuucuuuaaucauuuugccucuuuucucugugcuucaauuaauaaaaaauggaaagaaccuagaucuaaaaaaaaaaaaaaaaaaaaaaaaaaaaaaaaaaaaaaaaaaaaaaaaaaaaaaaaaaaaaaaaugcaucccccccccccccccccccccccccccccccaaaggcucuuuucagagccaccagaauu

SEQ ID NO: 1185 - RNA, 2414 nt, Artificial Sequence
  mRNA product Design i-2 comprising derived and/or modified sequence from YFV__NC_002031.1__SSIgE-prME (polyprotein: aa122-778) (opt11)
gggagaggcgcugccuacggagguggcagccaucuccuucucggcaucaagcuuaccauggauuggacguggauacucuuucucguggccgcggccacgcgcgugcacucggugacccuaguccgcaaaaacagauggcuacuacuaaacguaacaagcgaagaccugggcaaaacauucagcguuggcacaggcaauugcacgacaaacauacucgaagcaaaauacuggugccccgacagcauggaauacaacugcccaaaucuaagcccacgcgaagaaccagacgacaucgacuguuggugcuacggagucgaaaacgugagggucgcauacgguaaaugcgacagcgcuggcagaagcagacgcucccgacgagccauugaccucccuacccacgaaaaccacggccuaaaaacccggcaggaaaaauggaugacaggccggaugggagaacgccaacuacagaaaauagagaggugguuuguaagaaacccauucuucgccguaaccgcgcucaccaucgcuuaccucguaggaucaaacaugacgcaaagaguagugaucgcgcuacucguacuagcgguaggccccgccuacagcgcacacugcaucggcaucacugacagggacuucauagaaggcguccacgggggcacguggguuagcgccacacucgaacaagacaaaugcgucacagugauggcaccagacaaacccucacuagacaucucacuagaaaccgucgcaaucgaccgcccagcagaagucaggaaagugugcuacaacgccgucuuaacccacguaaaaauaaaugauaaaugcccaagcacgggagaggcacaccuagcggaagaaaacgaaggcgacaacgcgugcaaacguaccuacagcgacagaggguggggcaacggaugcggcuuauucggaaaaggaaguaucguagcaugcgcaaaauuuaccugcgccaaaagcaugucccuauucgaaguagaucaaacaaaaauacaauacgucauccgagcccaacuacacgugggggcaaaacaagaaaacuggaacaccgacaucaaaacacucaaauucgaugcccuaagcggcucccaagaaguagaguucaucgguuacggcaaggccacgcucgagugccaaguccaaacagcaguagacuucgggaacucauacaucgccgagauggaaacggaaucauggauugucgacagacaaugggcacaagaccuaacacuaccauggcaaucaggcagcggaggggucuggcgagaaaugcaccaccuaguagaguucgaacccccacacgccgcaacaauccgaguacuagcccucggaaaccaagaaggaucacuaaaaaccgcacucaccggcgcaaugcgcguaacaaaagauacaaacgacaacaaccuauacaaacuacacggcggacacgucagcugccgcgucaaacuauccgcccuaacacuaaaaggaacaagcuacaaaauaugcacagacaaaauguucuucgucaaaaauccgacugacacgggccacggcacagucguaaugcaaguaaaagucucaaaaggcgcaccaugcagaaucccaguaaucgucgccgaugaccuaacagccgcaaucaacaagggcauccucguaacaguaaaccccauagccagcaccaacgacgacgaaguccuaaucgaagucaacccacccuucggagacagcuacauaauaguaggacgaggggacucacgccuaaccuaccaauggcacaaagaaggauccucaaucggcaaacuguucacacaaacgaugaaaggcguagaaagacucgcaguaaugggcgauacggccugggacuucucaagcgcgggcggcuucuucacgagcgucggaaaaggcauccauacaguauucggaagcgcauuccaaggccuauuuggaggccucaacuggauaacaaaagugaucaugggagcaguacugaucugggucggcaucaacacccgcaacaugacgaugagcaugucaaugauccucgugggaguaauaaugauguuccucagccugggcguaggcgcaugaggacuagugcaucacauuuaaaagcaucucagccuaccaugagaauaagagaaagaaaaugaagaucaauagcuuauucaucucuuuuucuuuuucguugguguaaagccaacacccugucuaaaaaacauaaauuucuuuaaucauuuugccucuuuucucugugcuucaauuaauaaaaaauggaaagaaccuagaucuaaaaaaaaaaaaaaaaaaaaaaaaaaaaaaaaaaaaaaaaaaaaaaaaaaaaaaaaaaaaaaaaugcaucccccccccccccccccccccccccccccccaaaggcucuuuucagagccaccagaauu

SEQ ID NO: 1186 - RNA, 2462 nt, Artificial Sequence
  mRNA product Design i-2 comprising derived and/or modified sequence from YFV__NC_002031.1__SSjev-prME-XX (polyprotein: aa122-788) (opt11)
gggagaggcgcugccuacggagguggcagccaucuccuucucggcaucaagcuuaccauggggaaaaggagcgcgggcucgauaaugugguuggccucgcucgcggucgugaucgcgugcgcgggcgcggugacccuaguaaggaaaaacagauggcuacuacuaaacguaaccucagaagaucuaggaaagacauuuucagucggcacaggcaacugcacaaccaacauacuagaagcaaaauauuggugcccagacagcauggaauacaacugucccaaccucagcccaagagaggaaccagacgacauagacugcugguguuacggaguagaaaacguaagaguggcauacggcaaaugcgacagcgcaggcaggagccgaagaucccgcagagccaucgacuugcccacgcacgaaaaccacggccucaaaacacgacaagaaaaauggaugacagggcgaaugggagaacgacagcuccagaaaauagaacgaugguucguccggaacccguucuucgcaguaacggcacuaacaaucgcauaccucguaggcagcaacaugacacaaagaguggucaucgcgcuacucguacuagcaguggggcccgcauacagugcacacugcauaggaaucacagaccgugacuucaucgaaggcguacacggaggaacguggguaagcgcgacacuggaacaagacaaaugcgugacaguaauggcaccagacaaaccaagccuagacauaucccuagaaacggucgccaucgaccgucccgcagaaguacgaaagguaugcuauaaugcaguccucacacacgucaaaauaaacgacaaaugccccagcacgggcgaagcacaccucgccgaagaaaacgaaggggauaacgcgugcaaacgcaccuacuccgacaggggauggggcaacggaugcggacuguucggaaaaggauccauagucgcaugcgcaaaauuuaccugcgcaaaaagcaugagcuuguucgagguagaccaaacgaagauccaauacguaauccgagcucaacuacacguuggggccaagcaagagaacuggaauacggacaucaaaacacuaaaauucgacgcacucuccggcucacaagaagucgaguucaucggcuacggcaaagcaacacuagaaugccaaguacaaacagcgguggacuucggcaacagcuacauagcagaaauggaaacagaaagcuggauaguagaccgacaaugggcacaagaccuaacucugccauggcaaagcggcucaggaggaguguggagagagaugcaccaccugguagaguucgaacccccacacgcagcaacaauaaggguacuggcacuaggcaaccaagaaggcagccuaaaaaccgcacucacaggagccaugcgcgugacgaaggacaccaacgacaacaaccucuacaaacuccacggagggcacguauccugccgcguaaaacuaucagcacuaacgcuaaaaggaacaagcuacaaaauaugcacagacaaaauguucuucgucaaaaaccccacagacacaggccacggcacagucguaaugcaagugaaggucagcaagggggcccccugccgaaucccagucauaguggcagacgaccucacggccgccaucaacaaagggauccugguaacagugaacccaauagcaucgaccaacgacgacgaaguccucauagaagugaaucccccguucggcgacagcuacaucaucguaggacgcggcgacucccgacugacguaccaauggcauaaagaaggcagcagcauuggaaaacuauucacccaaaccaugaagggcgucgaaagacucgcggugaugggagacaccgcaugggacuucucgagcgcaggcggcuucuucacaagcguaggaaaagggauucacacaguauucggauccgcauuccaaggccucuucgggggacuaaacuggauaacgaaaguaauaaugggagcaguucucauauggguaggaaucaacacacgaaacaugacaauguccaugucaaugauacucguaggcguaaucaugauguuucugucacucggagugggagcagaccaagguugcgccauaaacuucggcaagugaggacuagugcaucacauuuaaaagcaucucagccuaccaugagaauaagagaaagaaaaugaagaucaauagcuuauucaucucuuuuucuuuuucguugguguaaagccaacacccugucuaaaaaacauaaauuucuuuaaucauuuugccucuuuucucugugcuucaauuaauaaaaaauggaaagaaccuagaucuaaaaaaaaaaaaaaaaaaaaaaaaaaaaaaaaaaaaaaaaaaaaaaaaaaaaaaaaaaaaaaaaugcaucccccccccccccccccccccccccccccccaaaggcucuuuucagagccaccagaauu

SEQ ID NO: 1187 - RNA, 2432 nt, Artificial Sequence
  mRNA product Design i-2 comprising derived and/or modified sequence from YFV__NC_002031.1__SSjev-prME (polyprotein: aa122-778) (opt11)
gggagaggcgcugccuacggagguggcagccaucuccuucucggcaucaagcuuaccauggggaaaaggagcgcgggcucgauaaugugguuggccucgcucgcggucgugaucgcgugcgcgggcgcggugacccuaguccgcaaaaacagauggcuacuacuaaacguaacaagcgaagaccugggcaaaacauucagcguuggcacaggcaauugcacgacaaacauacucgaagcaaaauacuggugccccgacagcauggaauacaacugcccaaaucuaagcccacgcgaagaaccagacgacaucgacuguuggugcuacggagucgaaaacgugagggucgcauacgguaaaugcgacagcgcuggcagaagcagacgcucccgacgagccauugaccucccuacccacgaaaaccacggccuaaaaacccggcaggaaaaauggaugacaggccggaugggagaacgccaacuacagaaaauagagaggugguuuguaagaaacccauucuucgccguaaccgcgcucaccaucgcuuaccucguaggaucaaacaugacgcaaagaguagugaucgcgcuacucguacuagcgguaggccccgccuacagcgcacacugcaucggcaucacugacagggacuucauagaaggcguccacgggggcacguggguuagcgccacacucgaacaagacaaaugcgucacagugauggcaccagacaaacccucacuagacaucucacuagaaaccgucgcaaucgaccgcccagcagaagucaggaaagugugcuacaacgccgucuuaacccacguaaaaauaaaugauaaaugcccaagcacgggagaggcacaccuagcggaagaaaacgaaggcgacaacgcgugcaaacguaccuacagcgacagaggguggggcaacggaugcggcuuauucggaaaaggaaguaucguagcaugcgcaaaauuuaccugcgccaaaagcaugucccuauucgaaguagaucaaacaaaaauacaauacgucauccgagcccaacuacacgugggggcaaaacaagaaaacuggaacaccgacaucaaaacacucaaauucgaugcccuaagcggcucccaagaaguagaguucaucgguuacggcaaggccacgcucgagugccaaguccaaacagcaguagacuucgggaacucauacaucgccgagauggaaacggaaucauggauugucgacagacaaugggcacaagaccuaacacuaccauggcaaucaggcagcggaggggucuggcgagaaaugcaccaccuaguagaguucgaacccccacacgccgcaacaauccgaguacuagcccucggaaaccaagaaggaucacuaaaaaccgcacucaccggcgcaaugcgcguaacaaaagauacaaacgacaacaaccuauacaaacuacacggcggacacgucagcugccgcgucaaacuauccgcccuaacacuaaaaggaacaagcuacaaaauaugcacagacaaaauguucuucgucaaaaauccgacugacacgggccacggcacagucguaaugcaaguaaaagucucaaaaggcgcaccaugcagaaucccaguaaucgucgccgaugaccuaacagccgcaaucaacaagggcauccucguaacaguaaaccccauagccagcaccaacgacgacgaaguccuaaucgaagucaacccacccuucggagacagcuacauaauaguaggacgaggggacucacgccuaaccuaccaauggcacaaagaaggauccucaaucggcaaacuguucacacaaacgaugaaaggcguagaaagacucgcaguaaugggcgauacggccugggacuucucaagcgcgggcggcuucuucacgagcgucggaaaaggcauccauacaguauucggaagcgcauuccaaggccuauuuggaggccucaacuggauaacaaaagugaucaugggagcaguacugaucugggucggcaucaacacccgcaacaugacgaugagcaugucaaugauccucgugggaguaauaaugauguuccucagccugggcguaggcgcaugaggacuagugcaucacauuuaaaagcaucucagccuaccaugagaauaagagaaagaaaaugaagaucaauagcuuauucaucucuuuuucuuuuucguugguguaaagccaacacccugucuaaaaaacauaaauuucuuuaaucauuuugccucuuuucucugugcuucaauuaauaaaaaauggaaagaaccuagaucuaaaaaaaaaaaaaaaaaaaaaaaaaaaaaaaaaaaaaaaaaaaaaaaaaaaaaaaaaaaaaaaaugcaucccccccccccccccccccccccccccccccaaaggcucuuuucagagccaccagaauu

SEQ ID NO: 1188 - RNA, 2311 nt, Artificial Sequence
  mRNA product Design i-3 comprising derived and/or modified sequence from YFV__NC_002031.1__X-SS-prME-XX (polyprotein: aa92-788) (wt) R2387
gggagaaagcuuaccaugagaggauuguccucaaggaaacgccguucccaugauguucugacugugcaauuccuaauuuugggaaugcuguugaugacggguggagugaccuuggugcggaaaaacagaugguugcuccuaaaugugacaucugaggaccucgggaaaacauucucugugggcacaggcaacugcacaacaaacauuuuggaagccaaguacuggugcccagacucaauggaauacaacugucccaaucucaguccaagagaggagccagaugacauugauugcuggugcuaugggguggaaaacguuagagucgcauaugguaagugugacucagcaggcaggucuaggaggucaagaagggccauugacuugccuacgcaugaaaaccaugguuugaagacccggcaagaaaaauggaugacuggaagaaugggugaaaggcaacuccaaaagauugagagaugguucgugaggaaccccuuuuuugcagugacggcucugaccauugccuaccuugugggaagcaacaugacgcaacgagucgugauugcccuacuggucuuggcuguugguccggccuacucagcucacugcauuggaauuacugacagggauuucauugagggggugcauggaggaacuuggguuucagcuacccuggagcaagacaagugugucacuguuauggccccugacaagccuucauuggacaucucacuagagacaguagccauugauagaccugcugaggugaggaaaguguguuacaaugcaguucucacucaugugaagauuaaugacaagugccccagcacuggagaggcccaccuagcugaagagaacgaaggggacaaugcgugcaagcgcacuuauucugauagaggcuggggcaauggcuguggccuauuugggaaagggagcauuguggcaugcgccaaauucacuugugccaaauccaugaguuuguuugagguugaucagaccaaaauucaguaugucaucagagcacaauugcauguaggggccaagcaggaaaauuggaauaccgacauuaagacucucaaguuugaugcccugucaggcucccaggaagucgaguucauuggguauggaaaagcuacacuggaaugccaggugcaaacugcgguggacuuugguaacaguuacaucgcugagauggaaacagagagcuggauaguggacagacagugggcccaggacuugacccugccauggcagaguggaaguggcgggguguggagagagaugcaucaucuugucgaauuugaaccuccgcaugccgccacuaucagaguacuggcccugggaaaccaggaaggcuccuugaaaacagcucuuacuggcgcaaugaggguuacaaaggacacaaaugacaacaaccuuuacaaacuacaugguggacauguuucuugcagagugaaauugucagcuuugacacucaaggggacauccuacaaaauaugcacugacaaaauguuuuuugucaagaacccaacugacacuggccauggcacuguugugaugcaggugaaagugucaaaaggagcccccugcaggauuccagugauaguagcugaugaucuuacagcggcaaucaauaaaggcauuuugguuacaguuaaccccaucgccucaaccaaugaugaugaagugcugauugaggugaacccaccuuuuggagacagcuacauuaucguugggagaggagauucacgucucacuuaccaguggcacaaagagggaagcucaauaggaaaguuguucacucagaccaugaaaggcguggaacgccuggccgucaugggagacaccgccugggauuucagcuccgcuggaggguucuucacuucgguugggaaaggaauccauacgguguuuggcucugccuuucaggggcuauuuggcggcuugaacuggauaacaaaggucaucaugggggcgguacuuauauggguuggcaucaacacaagaaacaugacaauguccaugagcaugaucuugguaggagugaucaugauguuuuugucucuaggaguuggggcggaucaaggaugcgccaucaacuuuggcaaguaaggacuaguuauaagacugacuagcccgaugggccucccaacgggcccuccuccccuccuugcaccgagauuaauaaaaaaaaaaaaaaaaaaaaaaaaaaaaaaaaaaaaaaaaaaaaaaaaaaaaaaaaaaaaaaaaugcaucccccccccccccccccccccccccccccccaaaggcucuuuucagagccaccagaauu

SEQ ID NO: 1189 - RNA, 2278 nt, Artificial Sequence
  mRNA product Design i-3 comprising derived and/or modified sequence from YFV__NC_002031.1__SS-prME (polyprotein: M,aa104-778) (wt)
gggagaaagcuuaccauggauguucugacugugcaauuccuaauuuugggaaugcuguugaugacggguggagugaccuuggugcggaaaaacagaugguugcuccuaaaugugacaucugaggaccucgggaaaacauucucugugggcacaggcaacugcacaacaaacauuuuggaagccaaguacuggugcccagacucaauggaauacaacugucccaaucucaguccaagagaggagccagaugacauugauugcuggugcuaugggguggaaaacguuagagucgcauaugguaagugugacucagcaggcaggucuaggaggucaagaagggccauugacuugccuacgcaugaaaaccaugguuugaagacccggcaagaaaaauggaugacuggaagaaugggugaaaggcaacuccaaaagauugagagaugguucgugaggaaccccuuuuuugcagugacggcucugaccauugccuaccuugugggaagcaacaugacgcaacgagucgugauugcccuacuggucuuggcuguugguccggccuacucagcucacugcauuggaauuacugacagggauuucauugagggggugcauggaggaacuuggguuucagcuacccuggagcaagacaagugugucacuguuauggccccugacaagccuucauuggacaucucacuagagacaguagccauugauagaccugcugaggugaggaaaguguguuacaaugcaguucucacucaugugaagauuaaugacaagugccccagcacuggagaggcccaccuagcugaagagaacgaaggggacaaugcgugcaagcgcacuuauucugauagaggcuggggcaauggcuguggccuauuugggaaagggagcauuguggcaugcgccaaauucacuugugccaaauccaugaguuuguuugagguugaucagaccaaaauucaguaugucaucagagcacaauugcauguaggggccaagcaggaaaauuggaauaccgacauuaagacucucaaguuugaugcccugucaggcucccaggaagucgaguucauuggguauggaaaagcuacacuggaaugccaggugcaaacugcgguggacuuugguaacaguuacaucgcugagauggaaacagagagcuggauaguggacagacagugggcccaggacuugacccugccauggcagaguggaaguggcgggguguggagagagaugcaucaucuugucgaauuugaaccuccgcaugccgccacuaucagaguacuggcccugggaaaccaggaaggcuccuugaaaacagcucuuacuggcgcaaugaggguuacaaaggacacaaaugacaacaaccuuuacaaacuacaugguggacauguuucuugcagagugaaauugucagcuuugacacucaaggggacauccuacaaaauaugcacugacaaaauguuuuuugucaagaacccaacugacacuggccauggcacuguugugaugcaggugaaagugucaaaaggagcccccugcaggauuccagugauaguagcugaugaucuuacagcggcaaucaauaaaggcauuuugguuacaguuaaccccaucgccucaaccaaugaugaugaagugcugauugaggugaacccaccuuuuggagacagcuacauuaucguugggagaggagauucacgucucacuuaccaguggcacaaagagggaagcucaauaggaaaguuguucacucagaccaugaaaggcguggaacgccuggccgucaugggagacaccgccugggauuucagcuccgcuggaggguucuucacuucgguugggaaaggaauccauacgguguuuggcucugccuuucaggggcuauuuggcggcuugaacuggauaacaaaggucaucaugggggcgguacuuauauggguuggcaucaacacaagaaacaugacaauguccaugagcaugaucuugguaggagugaucaugauguuuuugucucuaggaguuggggcggaucaaggaugcgccaucaacuuuggcaaguaaggacuaguuauaagacugacuagcccgaugggccucccaacgggcccuccuccccuccuugcaccgagauuaauaaaaaaaaaaaaaaaaaaaaaaaaaaaaaaaaaaaaaaaaaaaaaaaaaaaaaaaaaaaaaaaaugcaucccccccccccccccccccccccccccccccaaaggcucuuuucagagccaccagaauu

SEQ ID NO: 1190 - RNA, 2275 nt, Artificial Sequence
  mRNA product Design i-3 comprising derived and/or modified sequence from YFV__NC_002031.1__SSIgE-prME-XX (polyprotein: aa122-788) (wt)
gggagaaagcuuaccauggacuggaccuggauccuguuccucguggccgccgcgacccgcguccacagcgugaccuuggugcggaaaaacagaugguugcuccuaaaugugacaucugaggaccucgggaaaacauucucugugggcacaggcaacugcacaacaaacauuuuggaagccaaguacuggugcccagacucaauggaauacaacugucccaaucucaguccaagagaggagccagaugacauugauugcuggugcuaugggguggaaaacguuagagucgcauaugguaagugugacucagcaggcaggucuaggaggucaagaagggccauugacuugccuacgcaugaaaaccaugguuugaagacccggcaagaaaaauggaugacuggaagaaugggugaaaggcaacuccaaaagauugagagaugguucgugaggaaccccuuuuuugcagugacggcucugaccauugccuaccuugugggaagcaacaugacgcaacgagucgugauugcccuacuggucuuggcuguugguccggccuacucagcucacugcauuggaauuacugacagggauuucauugagggggugcauggaggaacuuggguuucagcuacccuggagcaagacaagugugucacuguuauggccccugacaagccuucauuggacaucucacuagagacaguagccauugauagaccugcugaggugaggaaaguguguuacaaugcaguucucacucaugugaagauuaaugacaagugccccagcacuggagaggcccaccuagcugaagagaacgaaggggacaaugcgugcaagcgcacuuauucugauagaggcuggggcaauggcuguggccuauuugggaaagggagcauuguggcaugcgccaaauucacuugugccaaauccaugaguuuguuugagguugaucagaccaaaauucaguaugucaucagagcacaauugcauguaggggccaagcaggaaaauuggaauaccgacauuaagacucucaaguuugaugcccugucaggcucccaggaagucgaguucauuggguauggaaaagcuacacuggaaugccaggugcaaacugcgguggacuuugguaacaguuacaucgcugagauggaaacagagagcuggauaguggacagacagugggcccaggacuugacccugccauggcagaguggaaguggcgggguguggagagagaugcaucaucuugucgaauuugaaccuccgcaugccgccacuaucagaguacuggcccugggaaaccaggaaggcuccuugaaaacagcucuuacuggcgcaaugaggguuacaaaggacacaaaugacaacaaccuuuacaaacuacaugguggacauguuucuugcagagugaaauugucagcuuugacacucaaggggacauccuacaaaauaugcacugacaaaauguuuuuugucaagaacccaacugacacuggccauggcacuguugugaugcaggugaaagugucaaaaggagcccccugcaggauuccagugauaguagcugaugaucuuacagcggcaaucaauaaaggcauuuugguuacaguuaaccccaucgccucaaccaaugaugaugaagugcugauugaggugaacccaccuuuuggagacagcuacauuaucguugggagaggagauucacgucucacuuaccaguggcacaaagagggaagcucaauaggaaaguuguucacucagaccaugaaaggcguggaacgccuggccgucaugggagacaccgccugggauuucagcuccgcuggaggguucuucacuucgguugggaaaggaauccauacgguguuuggcucugccuuucaggggcuauuuggcggcuugaacuggauaacaaaggucaucaugggggcgguacuuauauggguuggcaucaacacaagaaacaugacaauguccaugagcaugaucuugguaggagugaucaugauguuuuugucucuaggaguuggggcggaucaaggaugcgccaucaacuuuggcaaguaaggacuaguuauaagacugacuagcccgaugggccucccaacgggcccuccuccccuccuugcaccgagauuaauaaaaaaaaaaaaaaaaaaaaaaaaaaaaaaaaaaaaaaaaaaaaaaaaaaaaaaaaaaaaaaaaugcaucccccccccccccccccccccccccccccccaaaggcucuuuucagagccaccagaauu

SEQ ID NO: 1191 - RNA, 2245 nt, Artificial Sequence
  mRNA product Design i-3 comprising derived and/or modified sequence from YFV__NC_002031.1__SSIgE-prME (polyprotein: aa122-778) (wt)
gggagaaagcuuaccauggacuggaccuggauccuguuccucguggccgccgcgacccgcguccacagcgugaccuuggugcggaaaaacagaugguugcuccuaaaugugacaucugaggaccucgggaaaacauucucugugggcacaggcaacugcacaacaaacauuuuggaagccaaguacuggugcccagacucaauggaauacaacugucccaaucucaguccaagagaggagccagaugacauugauugcuggugcuaugggguggaaaacguuagagucgcauaugguaagugugacucagcaggcaggucuaggaggucaagaagggccauugacuugccuacgcaugaaaaccaugguuugaagacccggcaagaaaaauggaugacuggaagaaugggugaaaggcaacuccaaaagauugagagaugguucgugaggaaccccuuuuuugcagugacggcucugaccauugccuaccuugugggaagcaacaugacgcaacgagucgugauugcccuacuggucuuggcuguugguccggccuacucagcucacugcauuggaauuacugacagggauuucauugagggggugcauggaggaacuuggguuucagcuacccuggagcaagacaagugugucacuguuauggccccugacaagccuucauuggacaucucacuagagacaguagccauugauagaccugcugaggugaggaaaguguguuacaaugcaguucucacucaugugaagauuaaugacaagugccccagcacuggagaggcccaccuagcugaagagaacgaaggggacaaugcgugcaagcgcacuuauucugauagaggcuggggcaauggcuguggccuauuugggaaagggagcauuguggcaugcgccaaauucacuugugccaaauccaugaguuuguuugagguugaucagaccaaaauucaguaugucaucagagcacaauugcauguaggggccaagcaggaaaauuggaauaccgacauuaagacucucaaguuugaugcccugucaggcucccaggaagucgaguucauuggguauggaaaagcuacacuggaaugccaggugcaaacugcgguggacuuugguaacaguuacaucgcugagauggaaacagagagcuggauaguggacagacagugggcccaggacuugacccugccauggcagaguggaaguggcgggguguggagagagaugcaucaucuugucgaauuugaaccuccgcaugccgccacuaucagaguacuggcccugggaaaccaggaaggcuccuugaaaacagcucuuacuggcgcaaugaggguuacaaaggacacaaaugacaacaaccuuuacaaacuacaugguggacauguuucuugcagagugaaauugucagcuuugacacucaaggggacauccuacaaaauaugcacugacaaaauguuuuuugucaagaacccaacugacacuggccauggcacuguugugaugcaggugaaagugucaaaaggagcccccugcaggauuccagugauaguagcugaugaucuuacagcggcaaucaauaaaggcauuuugguuacaguuaaccccaucgccucaaccaaugaugaugaagugcugauugaggugaacccaccuuuuggagacagcuacauuaucguugggagaggagauucacgucucacuuaccaguggcacaaagagggaagcucaauaggaaaguuguucacucagaccaugaaaggcguggaacgccuggccgucaugggagacaccgccugggauuucagcuccgcuggaggguucuucacuucgguugggaaaggaauucauacgguguuuggcucugccuuucaggggcuauuuggcggcuugaacuggauaacaaaggucaucaugggggcgguacuuauauggguuggcaucaacacaagaaacaugacaauguccaugagcaugaucuugguaggagugaucaugauguuuuugucucuaggaguuggggcguaaggacuaguuauaagacugacuagcccgaugggccucccaacgggcccuccuccccuccuugcaccgagauuaauaaaaaaaaaaaaaaaaaaaaaaaaaaaaaaaaaaaaaaaaaaaaaaaaaaaaaaaaaaaaaaaaugcaucccccccccccccccccccccccccccccccaaaggcucuuuucagagccaccagaauu

SEQ ID NO: 1192 - RNA, 2293 nt, Artificial Sequence
  mRNA product Design i-3 comprising derived and/or modified sequence from YFV__NC_002031.1__SSjev-prME-XX (polyprotein: aa122-788) (wt)
gggagaaagcuuaccauggguaaacggagcgcuggcucaaucauguggcucgcgagcuuggcaguugucauagcuugugcaggagccgugaccuuggugcggaaaaacagaugguugcuccuaaaugugacaucugaggaccucgggaaaacauucucugugggcacaggcaacugcacaacaaacauuuuggaagccaaguacuggugcccagacucaauggaauacaacugucccaaucucaguccaagagaggagccagaugacauugauugcuggugcuaugggguggaaaacguuagagucgcauaugguaagugugacucagcaggcaggucuaggaggucaagaagggccauugacuugccuacgcaugaaaaccaugguuugaagacccggcaagaaaaauggaugacuggaagaaugggugaaaggcaacuccaaaagauugagagaugguucgugaggaaccccuuuuuugcagugacggcucugaccauugccuaccuugugggaagcaacaugacgcaacgagucgugauugcccuacuggucuuggcuguugguccggccuacucagcucacugcauuggaauuacugacagggauuucauugagggggugcauggaggaacuuggguuucagcuacccuggagcaagacaagugugucacuguuauggccccugacaagccuucauuggacaucucacuagagacaguagccauugauagaccugcugaggugaggaaaguguguuacaaugcaguucucacucaugugaagauuaaugacaagugccccagcacuggagaggcccaccuagcugaagagaacgaaggggacaaugcgugcaagcgcacuuauucugauagaggcuggggcaauggcuguggccuauuugggaaagggagcauuguggcaugcgccaaauucacuugugccaaauccaugaguuuguuugagguugaucagaccaaaauucaguaugucaucagagcacaauugcauguaggggccaagcaggaaaauuggaauaccgacauuaagacucucaaguuugaugcccugucaggcucccaggaagucgaguucauuggguauggaaaagcuacacuggaaugccaggugcaaacugcgguggacuuugguaacaguuacaucgcugagauggaaacagagagcuggauaguggacagacagugggcccaggacuugacccugccauggcagaguggaaguggcgggguguggagagagaugcaucaucuugucgaauuugaaccuccgcaugccgccacuaucagaguacuggcccugggaaaccaggaaggcuccuugaaaacagcucuuacuggcgcaaugaggguuacaaaggacacaaaugacaacaaccuuuacaaacuacaugguggacauguuucuugcagagugaaauugucagcuuugacacucaaggggacauccuacaaaauaugcacugacaaaauguuuuuugucaagaacccaacugacacuggccauggcacuguugugaugcaggugaaagugucaaaaggagcccccugcaggauuccagugauaguagcugaugaucuuacagcggcaaucaauaaaggcauuuugguuacaguuaaccccaucgccucaaccaaugaugaugaagugcugauugaggugaacccaccuuuuggagacagcuacauuaucguugggagaggagauucacgucucacuuaccaguggcacaaagagggaagcucaauaggaaaguuguucacucagaccaugaaaggcguggaacgccuggccgucaugggagacaccgccugggauuucagcuccgcuggaggguucuucacuucgguugggaaaggaauccauacgguguuuggcucugccuuucaggggcuauuuggcggcuugaacuggauaacaaaggucaucaugggggcgguacuuauauggguuggcaucaacacaagaaacaugacaauguccaugagcaugaucuugguaggagugaucaugauguuuuugucucuaggaguuggggcggaucaaggaugcgccaucaacuuuggcaaguaaggacuaguuauaagacugacuagcccgaugggccucccaacgggcccuccuccccuccuugcaccgagauuaauaaaaaaaaaaaaaaaaaaaaaaaaaaaaaaaaaaaaaaaaaaaaaaaaaaaaaaaaaaaaaaaaugcaucccccccccccccccccccccccccccccccaaaggcucuuuucagagccaccagaauu

SEQ ID NO: 1193 - RNA, 2263 nt, Artificial Sequence
  mRNA product Design i-3 comprising derived and/or modified sequence from YFV__NC_002031.1__SSjev-prME (polyprotein: aa122-778) (wt)
gggagaaagcuuaccauggguaaacggagcgcuggcucaaucauguggcucgcgagcuuggcaguugucauagcuugugcaggagccgugaccuuggugcggaaaaacagaugguugcuccuaaaugugacaucugaggaccucgggaaaacauucucugugggcacaggcaacugcacaacaaacauuuuggaagccaaguacuggugcccagacucaauggaauacaacugucccaaucucaguccaagagaggagccagaugacauugauugcuggugcuaugggguggaaaacguuagagucgcauaugguaagugugacucagcaggcaggucuaggaggucaagaagggccauugacuugccuacgcaugaaaaccaugguuugaagacccggcaagaaaaauggaugacuggaagaaugggugaaaggcaacuccaaaagauugagagaugguucgugaggaaccccuuuuuugcagugacggcucugaccauugccuaccuugugggaagcaacaugacgcaacgagucgugauugcccuacuggucuuggcuguugguccggccuacucagcucacugcauuggaauuacugacagggauuucauugagggggugcauggaggaacuuggguuucagcuacccuggagcaagacaagugugucacuguuauggccccugacaagccuucauuggacaucucacuagagacaguagccauugauagaccugcugaggugaggaaaguguguuacaaugcaguucucacucaugugaagauuaaugacaagugccccagcacuggagaggcccaccuagcugaagagaacgaaggggacaaugcgugcaagcgcacuuauucugauagaggcuggggcaauggcuguggccuauuugggaaagggagcauuguggcaugcgccaaauucacuugugccaaauccaugaguuuguuugagguugaucagaccaaaauucaguaugucaucagagcacaauugcauguaggggccaagcaggaaaauuggaauaccgacauuaagacucucaaguuugaugcccugucaggcucccaggaagucgaguucauuggguauggaaaagcuacacuggaaugccaggugcaaacugcgguggacuuugguaacaguuacaucgcugagauggaaacagagagcuggauaguggacagacagugggcccaggacuugacccugccauggcagaguggaaguggcgggguguggagagagaugcaucaucuugucgaauuugaaccuccgcaugccgccacuaucagaguacuggcccugggaaaccaggaaggcuccuugaaaacagcucuuacuggcgcaaugaggguuacaaaggacacaaaugacaacaaccuuuacaaacuacaugguggacauguuucuugcagagugaaauugucagcuuugacacucaaggggacauccuacaaaauaugcacugacaaaauguuuuuugucaagaacccaacugacacuggccauggcacuguugugaugcaggugaaagugucaaaaggagcccccugcaggauuccagugauaguagcugaugaucuuacagcggcaaucaauaaaggcauuuugguuacaguuaaccccaucgccucaaccaaugaugaugaagugcugauugaggugaacccaccuuuuggagacagcuacauuaucguugggagaggagauucacgucucacuuaccaguggcacaaagagggaagcucaauaggaaaguuguucacucagaccaugaaaggcguggaacgccuggccgucaugggagacaccgccugggauuucagcuccgcuggaggguucuucacuucgguugggaaaggaauucauacgguguuuggcucugccuuucaggggcuauuuggcggcuugaacuggauaacaaaggucaucaugggggcgguacuuauauggguuggcaucaacacaagaaacaugacaauguccaugagcaugaucuugguaggagugaucaugauguuuuugucucuaggaguuggggcguaaggacuaguuauaagacugacuagcccgaugggccucccaacgggcccuccuccccuccuugcaccgagauuaauaaaaaaaaaaaaaaaaaaaaaaaaaaaaaaaaaaaaaaaaaaaaaaaaaaaaaaaaaaaaaaaaugcaucccccccccccccccccccccccccccccccaaaggcucuuuucagagccaccagaauu

SEQ ID NO: 1194 - RNA, 2311 nt, Artificial Sequence
  mRNA product Design i-3 comprising derived and/or modified sequence from YFV__NC_002031.1__X-SS-prME-XX (polyprotein: aa92-788) (opt1) R2388/R2571/R6711
gggagaaagcuuaccaugcggggccugagcucccgcaagcggcgcagccacgacgugcucaccguccaguuccugauccuggggaugcuccugaugaccggcggggugacgcuggugcggaagaaccgcuggcuccugcugaacgucaccuccgaggaccucggcaagaccuucagcguggggaccggcaacugcacgaccaacauccuggaggccaaguacuggugccccgacuccauggaguacaacugcccgaaccugagcccccgggaggagcccgacgacaucgacugcuggugcuacggcguggagaacguccgcguggccuacgggaagugcgacuccgcgggccggagccgccggucccgccgggccaucgaccuccccacccacgagaaccacgggcugaagacccgccaggagaaguggaugacgggccggaugggggagcgccagcugcagaagaucgagcggugguucgugcgcaacccguucuucgccgucaccgcccucaccaucgccuaccuggugggcagcaacaugacccagcggguggucaucgcgcugcucgugcuggccgugggccccgccuacuccgcccacugcaucgggaucacggaccgcgacuucaucgagggcguccacgggggcaccugggugagcgcgacccuggagcaggacaagugcgugaccgucauggcccccgacaagcccucccucgacaucagccuggagacgguggccaucgaccggccggccgaggugcgcaaggucugcuacaacgccgugcugacccacgugaagaucaacgacaagugccccuccaccggcgaggcgcaccucgccgaggagaacgagggggacaacgccugcaagcggaccuacagcgaccggggcugggggaacggcugcgggcuguucggcaagggcuccaucgucgccugcgccaaguucacgugcgcgaagagcaugucccuguucgagguggaccagaccaagauccaguacgucauccgcgcccagcuccacgugggggccaagcaggagaacuggaacaccgacaucaagacccugaaguucgacgcccugagcggcagccaggagguggaguucaucggguacggcaaggccacgcucgagugccagguccagaccgcgguggacuucgggaacuccuacaucgccgagauggagaccgagagcuggaucguggaccggcagugggcccaggaccugacccugcccuggcaguccggcagcggcggggucuggcgcgagaugcaccaccucguggaguucgagcccccgcacgccgccacgauccgggugcuggcgcugggcaaccaggaggggucccucaagaccgcccugaccggcgccaugcgcgucaccaaggacacgaacgacaacaaccuguacaagcuccacgggggccacgugagcugccgggugaagcuguccgcccugacccucaagggcaccagcuacaagaucugcaccgacaagauguucuucgucaagaaccccacggacaccgggcacggcaccguggugaugcaggucaagguguccaagggggcgcccugccgcaucccggugaucgucgccgacgaccugaccgccgccaucaacaagggcauccuggugaccgugaacccgaucgccagcacgaacgacgacgagguccucaucgaggugaacccccccuucggcgacuccuacaucaucguggggcggggcgacagccgccugaccuaccaguggcacaaggagggguccagcaucggcaagcuguucacccagaccaugaagggggucgagcggcuggcggugaugggcgacacggccugggacuucuccagcgccggcggguucuucaccuccgugggcaaggggauccacaccgucuucggcagcgccuuccaggggcucuucggcggccugaacuggaucaccaaggugaucaugggggccgugcugaucugggucggcaucaacacgcgcaacaugaccauguccaugagcaugauccucgugggggugaucaugauguuccugagccugggcgucggggcggaccagggcugcgccaucaacuucggcaagugaggacuaguuauaagacugacuagcccgaugggccucccaacgggcccuccuccccuccuugcaccgagauuaauaaaaaaaaaaaaaaaaaaaaaaaaaaaaaaaaaaaaaaaaaaaaaaaaaaaaaaaaaaaaaaaaugcaucccccccccccccccccccccccccccccccaaaggcucuuuucagagccaccagaauu

SEQ ID NO: 1195 - RNA, 2248 nt, Artificial Sequence
  mRNA product Design i-3 comprising derived and/or modified sequence from YFV__NC_002031.1__SS-prME (polyprotein: M,aa104-778) (opt1) R2605/R2606
gggagaaagcuuaccauggacgugcugaccguccaguuccucauccugggcaugcugcucaugaccgggggcgugacccugguccggaagaaccgcuggcuccugcugaacgugaccagcgaggaccucggcaagacguucuccguggggaccggcaacugcaccaccaacauccuggaggccaaguacuggugccccgacagcauggaguacaacugccccaaccuguccccgcgggaggagcccgacgacaucgacugcuggugcuacggggucgagaacgugcgcguggccuacggcaagugcgacagcgcggggcggucccgccggagccgccgggccaucgaccugcccacccacgagaaccacggccucaagacccggcaggagaaguggaugacggggcgcaugggcgagcggcagcugcagaagaucgagcgcugguucgugcggaacccguucuucgccgucaccgcgcugaccaucgccuaccucguggggagcaacaugacccagcgcguggucaucgcccugcuggugcucgccgugggccccgccuacuccgcgcacugcaucgggaucacggaccgggacuucaucgagggcguccacggcgggaccugggugagcgccacccuggagcaggacaagugcgugaccgucauggcccccgacaagcccucccuggacaucagccucgagacgguggccaucgaccgcccggcggaggugcggaaggucugcuacaacgccgugcugacccacgugaagaucaacgacaagugccccuccaccggcgaggcccaccuggccgaggagaacgagggggacaacgccugcaagcgcaccuacagcgaccggggcugggggaacggcugcggccucuucgggaagggcuccaucgucgcgugcgccaaguucacgugcgccaagagcaugucccuguucgagguggaccagaccaagauccaguacgugauccgcgcccagcugcacgucggggccaagcaggagaacuggaacaccgacaucaagacccucaaguucgacgcgcugagcggcucccaggagguggaguucaucggcuacgggaaggccacgcuggagugccaggugcagaccgccgucgacuucggcaacagcuacaucgccgagauggagaccgaguccuggaucguggaccggcagugggcccaggaccucacccugcccuggcagagcggguccggcgggguguggcgcgagaugcaccaccuggucgaguucgagcccccgcacgcggccacgauccgggugcucgcccugggcaaccaggagggcagccugaagaccgcccucaccggggccaugcgcgucaccaaggacacgaacgacaacaaccuguacaagcugcacggcgggcacguguccugccgggugaagcucagcgcgcugacccugaagggcaccuccuacaagaucugcaccgacaagauguucuucgucaagaaccccacggacaccgggcacggcaccguggugaugcaggucaaggugagcaagggcgcccccugccgcaucccggugaucgucgccgacgaccucaccgccgcgaucaacaaggggauccuggugacggugaaccccaucgccagcaccaacgacgacgagguccugaucgaggugaacccgcccuucggcgacuccuacaucaucguggggcggggcgacagccgccucaccuaccaguggcacaaggagggguccagcaucggcaagcuguucacccagacgaugaagggcgucgagcggcuggccgugaugggggacaccgccugggacuucuccagcgccggcggguucuucaccuccgugggcaagggcauccacaccgucuucgggagcgcguuccagggccucuucgggggccugaacuggaucaccaaggugaucaugggggccgugcugaucugggucggcaucaacacgcgcaacaugaccauguccaugagcaugauccucgugggcgugaucaugauguuccugucccugggggucggcgccugaggacuaguuauaagacugacuagcccgaugggccucccaacgggcccuccuccccuccuugcaccgagauuaauaaaaaaaaaaaaaaaaaaaaaaaaaaaaaaaaaaaaaaaaaaaaaaaaaaaaaaaaaaaaaaaaugcaucccccccccccccccccccccccccccccccaaaggcucuuuucagagccaccagaauu

SEQ ID NO: 1196 - RNA, 2275 nt, Artificial Sequence
  mRNA product Design i-3 comprising derived and/or modified sequence from YFV__NC_002031.1__SSIgE-prME-XX (polyprotein: aa122-788) (opt1)
gggagaaagcuuaccauggacuggaccuggauccuguuccucguggccgccgcgacccgcguccacagcgugacgcuggugcggaagaaccgcuggcuccugcugaacgucaccuccgaggaccucggcaagaccuucagcguggggaccggcaacugcacgaccaacauccuggaggccaaguacuggugccccgacuccauggaguacaacugcccgaaccugagcccccgggaggagcccgacgacaucgacugcuggugcuacggcguggagaacguccgcguggccuacgggaagugcgacuccgcgggccggagccgccggucccgccgggccaucgaccuccccacccacgagaaccacgggcugaagacccgccaggagaaguggaugacgggccggaugggggagcgccagcugcagaagaucgagcggugguucgugcgcaacccguucuucgccgucaccgcccucaccaucgccuaccuggugggcagcaacaugacccagcggguggucaucgcgcugcucgugcuggccgugggccccgccuacuccgcccacugcaucgggaucacggaccgcgacuucaucgagggcguccacgggggcaccugggugagcgcgacccuggagcaggacaagugcgugaccgucauggcccccgacaagcccucccucgacaucagccuggagacgguggccaucgaccggccggccgaggugcgcaaggucugcuacaacgccgugcugacccacgugaagaucaacgacaagugccccuccaccggcgaggcgcaccucgccgaggagaacgagggggacaacgccugcaagcggaccuacagcgaccggggcugggggaacggcugcgggcuguucggcaagggcuccaucgucgccugcgccaaguucacgugcgcgaagagcaugucccuguucgagguggaccagaccaagauccaguacgucauccgcgcccagcuccacgugggggccaagcaggagaacuggaacaccgacaucaagacccugaaguucgacgcccugagcggcagccaggagguggaguucaucggguacggcaaggccacgcucgagugccagguccagaccgcgguggacuucgggaacuccuacaucgccgagauggagaccgagagcuggaucguggaccggcagugggcccaggaccugacccugcccuggcaguccggcagcggcggggucuggcgcgagaugcaccaccucguggaguucgagcccccgcacgccgccacgauccgggugcuggcgcugggcaaccaggaggggucccucaagaccgcccugaccggcgccaugcgcgucaccaaggacacgaacgacaacaaccuguacaagcuccacgggggccacgugagcugccgggugaagcuguccgcccugacccucaagggcaccagcuacaagaucugcaccgacaagauguucuucgucaagaaccccacggacaccgggcacggcaccguggugaugcaggucaagguguccaagggggcgcccugccgcaucccggugaucgucgccgacgaccugaccgccgccaucaacaagggcauccuggugaccgugaacccgaucgccagcacgaacgacgacgagguccucaucgaggugaacccccccuucggcgacuccuacaucaucguggggcggggcgacagccgccugaccuaccaguggcacaaggagggguccagcaucggcaagcuguucacccagaccaugaagggggucgagcggcuggcggugaugggcgacacggccugggacuucuccagcgccggcggguucuucaccuccgugggcaaggggauccacaccgucuucggcagcgccuuccaggggcucuucggcggccugaacuggaucaccaaggugaucaugggggccgugcugaucugggucggcaucaacacgcgcaacaugaccauguccaugagcaugauccucgugggggugaucaugauguuccugagccugggcgucggggcggaccagggcugcgccaucaacuucggcaagugaggacuaguuauaagacugacuagcccgaugggccucccaacgggcccuccuccccuccuugcaccgagauuaauaaaaaaaaaaaaaaaaaaaaaaaaaaaaaaaaaaaaaaaaaaaaaaaaaaaaaaaaaaaaaaaaugcaucccccccccccccccccccccccccccccccaaaggcucuuuucagagccaccagaauu

SEQ ID NO: 1197 - RNA, 2245 nt, Artificial Sequence
  mRNA product Design i-3 comprising derived and/or modified sequence from YFV__NC_002031.1__SSIgE-prME (polyprotein: aa122-778) (opt1)
gggagaaagcuuaccauggacuggaccuggauccuguuccucguggccgccgcgacccgcguccacagcgugacccugguccgcaagaaccgguggcuccugcugaacgugaccagcgaggaccucggcaagacguucuccguggggaccggcaacugcaccaccaacauccuggaggccaaguacuggugccccgacagcauggaguacaacugcccgaaccuguccccgcgcgaggagcccgacgacaucgacugcuggugcuacggggucgagaacgugcggguggccuacggcaagugcgacagcgcggggcgcucccggcgcagccggcgcgccaucgaccuccccacgcacgagaaccacggccugaagacccggcaggagaaguggaugaccggccgcaugggggagcggcagcugcagaagaucgagcgcugguucguccggaaccccuucuucgccgugaccgcccucacgaucgccuaccuggugggcuccaacaugacccagcgcgucgugaucgcgcugcucgugcuggccgucgggcccgccuacagcgcccacugcaucggcaucaccgaccgggacuucaucgagggggugcacggcggcaccuggguguccgcgacgcuggagcaggacaagugcgucaccgugauggcccccgacaagcccagccucgacaucucccuggagaccguggccaucgaccgcccggccgagguccggaaggugugcuacaacgccgugcugacccacgucaagaucaacgacaagugccccagcacgggggaggcgcaccucgccgaggagaacgagggcgacaacgccugcaagcgcaccuacuccgaccggggguggggcaacggcugcgggcuguucggcaaggggagcaucguggccugcgccaaguucaccugcgcgaaguccaugagccuguucgagguggaccagaccaagauccaguacgucauccgcgcccagcuccacgugggcgccaagcaggagaacuggaacacggacaucaagacccugaaguucgacgcccuguccgggagccaggaggucgaguucaucggcuacggcaaggccacccucgagugccaggugcagaccgcgguggacuucgggaacuccuacaucgccgagauggagacggagagcuggaucgucgaccggcagugggcccaggaccugacccugcccuggcagagcggcuccgggggcguguggcgcgagaugcaccaccucguggaguucgagcccccgcacgccgccaccauccgcguccuggcgcuggggaaccaggagggcagccucaagaccgcccugacgggcgccaugcgggugaccaaggacaccaacgacaacaaccuguacaagcuccacgggggccacguguccugccgcgucaagcugagcgcccugacccucaaggggacguccuacaagaucugcaccgacaagauguucuucgugaagaaccccaccgacaccggccacgggacgguggucaugcaggugaaggugagcaagggcgcgcccugccggauccccgucaucguggccgacgaccugaccgccgccaucaacaagggcauccuggugaccgucaacccgaucgccuccaccaacgacgacgaggugcucaucgaggugaacccgcccuucggggacagcuacaucaucgucggccgcggggacucccggcugaccuaccaguggcacaaggagggcagcuccaucggcaagcuguucacgcagaccaugaaggggguggagcgccucgcggugaugggcgacaccgccugggacuucagcuccgccgggggcuucuucaccagcgucgggaagggcauccacacgguguucggcuccgccuuccaggggcuguucggcgggcugaacuggaucaccaaggugaucaugggcgccguccucaucuggguggggaucaacacccggaacaugaccaugagcauguccaugauccuggugggcgucaucaugauguuccugagccugggcgugggggcgugaggacuaguuauaagacugacuagcccgaugggccucccaacgggcccuccuccccuccuugcaccgagauuaauaaaaaaaaaaaaaaaaaaaaaaaaaaaaaaaaaaaaaaaaaaaaaaaaaaaaaaaaaaaaaaaaugcaucccccccccccccccccccccccccccccccaaaggcucuuuucagagccaccagaauu

SEQ ID NO: 1198 - RNA, 2293 nt, Artificial Sequence
  mRNA product Design i-3 comprising derived and/or modified sequence from YFV__NC_002031.1__SSjev-prME-XX (polyprotein: aa122-788) (opt1)
gggagaaagcuuaccaugggcaagcgcagcgccggguccaucauguggcuggccagccucgcgguggucaucgccugcgccggcgccgugacgcuggugcggaagaaccgcuggcuccugcugaacgucaccuccgaggaccucggcaagaccuucagcguggggaccggcaacugcacgaccaacauccuggaggccaaguacuggugccccgacuccauggaguacaacugcccgaaccugagcccccgggaggagcccgacgacaucgacugcuggugcuacggcguggagaacguccgcguggccuacgggaagugcgacuccgcgggccggagccgccggucccgccgggccaucgaccuccccacccacgagaaccacgggcugaagacccgccaggagaaguggaugacgggccggaugggggagcgccagcugcagaagaucgagcggugguucgugcgcaacccguucuucgccgucaccgcccucaccaucgccuaccuggugggcagcaacaugacccagcggguggucaucgcgcugcucgugcuggccgugggccccgccuacuccgcccacugcaucgggaucacggaccgcgacuucaucgagggcguccacgggggcaccugggugagcgcgacccuggagcaggacaagugcgugaccgucauggcccccgacaagcccucccucgacaucagccuggagacgguggccaucgaccggccggccgaggugcgcaaggucugcuacaacgccgugcugacccacgugaagaucaacgacaagugccccuccaccggcgaggcgcaccucgccgaggagaacgagggggacaacgccugcaagcggaccuacagcgaccggggcugggggaacggcugcgggcuguucggcaagggcuccaucgucgccugcgccaaguucacgugcgcgaagagcaugucccuguucgagguggaccagaccaagauccaguacgucauccgcgcccagcuccacgugggggccaagcaggagaacuggaacaccgacaucaagacccugaaguucgacgcccugagcggcagccaggagguggaguucaucggguacggcaaggccacgcucgagugccagguccagaccgcgguggacuucgggaacuccuacaucgccgagauggagaccgagagcuggaucguggaccggcagugggcccaggaccugacccugcccuggcaguccggcagcggcggggucuggcgcgagaugcaccaccucguggaguucgagcccccgcacgccgccacgauccgggugcuggcgcugggcaaccaggaggggucccucaagaccgcccugaccggcgccaugcgcgucaccaaggacacgaacgacaacaaccuguacaagcuccacgggggccacgugagcugccgggugaagcuguccgcccugacccucaagggcaccagcuacaagaucugcaccgacaagauguucuucgucaagaaccccacggacaccgggcacggcaccguggugaugcaggucaagguguccaagggggcgcccugccgcaucccggugaucgucgccgacgaccugaccgccgccaucaacaagggcauccuggugaccgugaacccgaucgccagcacgaacgacgacgagguccucaucgaggugaacccccccuucggcgacuccuacaucaucguggggcggggcgacagccgccugaccuaccaguggcacaaggagggguccagcaucggcaagcuguucacccagaccaugaagggggucgagcggcuggcggugaugggcgacacggccugggacuucuccagcgccggcggguucuucaccuccgugggcaaggggauccacaccgucuucggcagcgccuuccaggggcucuucggcggccugaacuggaucaccaaggugaucaugggggccgugcugaucugggucggcaucaacacgcgcaacaugaccauguccaugagcaugauccucgugggggugaucaugauguuccugagccugggcgucggggcggaccagggcugcgccaucaacuucggcaagugaggacuaguuauaagacugacuagcccgaugggccucccaacgggcccuccuccccuccuugcaccgagauuaauaaaaaaaaaaaaaaaaaaaaaaaaaaaaaaaaaaaaaaaaaaaaaaaaaaaaaaaaaaaaaaaaugcaucccccccccccccccccccccccccccccccaaaggcucuuuucagagccaccagaauu

SEQ ID NO: 1199 - RNA, 2263 nt, Artificial Sequence
  mRNA product Design i-3 comprising derived and/or modified sequence from YFV__NC_002031.1__SSjev-prME (polyprotein: aa122-778) (opt1)
gggagaaagcuuaccaugggcaagcgcagcgccggguccaucauguggcuggccagccucgcgguggucaucgccugcgccggcgccgugacccugguccgcaagaaccgguggcuccugcugaacgugaccagcgaggaccucggcaagacguucuccguggggaccggcaacugcaccaccaacauccuggaggccaaguacuggugccccgacagcauggaguacaacugcccgaaccuguccccgcgcgaggagcccgacgacaucgacugcuggugcuacggggucgagaacgugcggguggccuacggcaagugcgacagcgcggggcgcucccggcgcagccggcgcgccaucgaccuccccacgcacgagaaccacggccugaagacccggcaggagaaguggaugaccggccgcaugggggagcggcagcugcagaagaucgagcgcugguucguccggaaccccuucuucgccgugaccgcccucacgaucgccuaccuggugggcuccaacaugacccagcgcgucgugaucgcgcugcucgugcuggccgucgggcccgccuacagcgcccacugcaucggcaucaccgaccgggacuucaucgagggggugcacggcggcaccuggguguccgcgacgcuggagcaggacaagugcgucaccgugauggcccccgacaagcccagccucgacaucucccuggagaccguggccaucgaccgcccggccgagguccggaaggugugcuacaacgccgugcugacccacgucaagaucaacgacaagugccccagcacgggggaggcgcaccucgccgaggagaacgagggcgacaacgccugcaagcgcaccuacuccgaccggggguggggcaacggcugcgggcuguucggcaaggggagcaucguggccugcgccaaguucaccugcgcgaaguccaugagccuguucgagguggaccagaccaagauccaguacgucauccgcgcccagcuccacgugggcgccaagcaggagaacuggaacacggacaucaagacccugaaguucgacgcccuguccgggagccaggaggucgaguucaucggcuacggcaaggccacccucgagugccaggugcagaccgcgguggacuucgggaacuccuacaucgccgagauggagacggagagcuggaucgucgaccggcagugggcccaggaccugacccugcccuggcagagcggcuccgggggcguguggcgcgagaugcaccaccucguggaguucgagcccccgcacgccgccaccauccgcguccuggcgcuggggaaccaggagggcagccucaagaccgcccugacgggcgccaugcgggugaccaaggacaccaacgacaacaaccuguacaagcuccacgggggccacguguccugccgcgucaagcugagcgcccugacccucaaggggacguccuacaagaucugcaccgacaagauguucuucgugaagaaccccaccgacaccggccacgggacgguggucaugcaggugaaggugagcaagggcgcgcccugccggauccccgucaucguggccgacgaccugaccgccgccaucaacaagggcauccuggugaccgucaacccgaucgccuccaccaacgacgacgaggugcucaucgaggugaacccgcccuucggggacagcuacaucaucgucggccgcggggacucccggcugaccuaccaguggcacaaggagggcagcuccaucggcaagcuguucacgcagaccaugaaggggguggagcgccucgcggugaugggcgacaccgccugggacuucagcuccgccgggggcuucuucaccagcgucgggaagggcauccacacgguguucggcuccgccuuccaggggcuguucggcgggcugaacuggaucaccaaggugaucaugggcgccguccucaucuggguggggaucaacacccggaacaugaccaugagcauguccaugauccuggugggcgucaucaugauguuccugagccugggcgugggggcgugaggacuaguuauaagacugacuagcccgaugggccucccaacgggcccuccuccccuccuugcaccgagauuaauaaaaaaaaaaaaaaaaaaaaaaaaaaaaaaaaaaaaaaaaaaaaaaaaaaaaaaaaaaaaaaaaugcaucccccccccccccccccccccccccccccccaaaggcucuuuucagagccaccagaauu

SEQ ID NO: 1200 - RNA, 2311 nt, Artificial Sequence
  mRNA product Design i-3 comprising derived and/or modified sequence from YFV__NC_002031.1__X-SS-prME-XX (polyprotein: aa92-788) (opt1)
gggagaaagcuuaccaugcggggccugagcucccgcaagcggcgcagccacgacgugcucaccguccaguuccugauccuggggaugcuccugaugaccggcggggugacgcuggugcggaagaaccgcuggcuccugcugaacgucaccuccgaggaccucggcaagaccuucagcguggggaccggcaacugcacgaccaacauccuggaggccaaguacuggugccccgacuccauggaguacaacugcccgaaccugagcccccgggaggagcccgacgacaucgacugcuggugcuacggcguggagaacguccgcguggccuacgggaagugcgacuccgcgggccggagccgccggucccgccgggccaucgaccuccccacccacgagaaccacgggcugaagacccgccaggagaaguggaugacgggccggaugggggagcgccagcugcagaagaucgagcggugguucgugcgcaacccguucuucgccgucaccgcccucaccaucgccuaccuggugggcagcaacaugacccagcggguggucaucgcgcugcucgugcuggccgugggccccgccuacuccgcccacugcaucgggaucacggaccgcgacuucaucgagggcguccacgggggcaccugggugagcgcgacccuggagcaggacaagugcgugaccgucauggcccccgacaagcccucccucgacaucagccuggagacgguggccaucgaccggccggccgaggugcgcaaggucugcuacaacgccgugcugacccacgugaagaucaacgacaagugccccuccaccggcgaggcgcaccucgccgaggagaacgagggggacaacgccugcaagcggaccuacagcgaccggggcugggggaacggcugcgggcuguucggcaagggcuccaucgucgccugcgccaaguucacgugcgcgaaguccaugagccuguucgagguggaccagaccaagauccaguacgucauccgcgcccagcuccacgugggggccaagcaggagaacuggaacaccgacaucaagacccugaaguucgacgcccugagcggcagccaggagguggaguucaucggguacggcaaggccacgcucgagugccagguccagaccgcgguggacuucgggaacuccuacaucgccgagauggagaccgagagcuggaucguggaccggcagugggcccaggaccugacccugcccuggcaguccggcagcggcggggucuggcgcgagaugcaccaccucguggaguucgagcccccgcacgccgccacgauccgggugcuggcgcugggcaaccaggaggggucccucaagaccgcccugaccggcgccaugcgcgucaccaaggacacgaacgacaacaaccuguacaagcuccacgggggccacgugagcugccgggugaagcuguccgcccugacccucaagggcaccagcuacaagaucugcaccgacaagauguucuucgucaagaaccccacggacaccgggcacggcaccguggugaugcaggucaagguguccaagggggcgcccugccgcaucccggugaucgucgccgacgaccugaccgccgccaucaacaagggcauccuggugaccgugaacccgaucgccagcacgaacgacgacgagguccucaucgaggugaacccccccuucggcgacuccuacaucaucguggggcggggcgacagccgccugaccuaccaguggcacaaggagggguccagcaucggcaagcuguucacccagaccaugaagggggucgagcggcuggcggugaugggcgacacggccugggacuucuccagcgccggcggguucuucaccuccgugggcaaggggauccacaccgucuucggcagcgccuuccaggggcuguucggcggccucaacuggaucaccaaggugaucaugggggccgugcugaucugggucggcaucaacacgcgcaacaugaccauguccaugagcaugauccucgugggggugaucaugauguuccugagccugggcgucggggcggaccagggcugcgccaucaacuucggcaagugaggacuaguuauaagacugacuagcccgaugggccucccaacgggcccuccuccccuccuugcaccgagauuaauaaaaaaaaaaaaaaaaaaaaaaaaaaaaaaaaaaaaaaaaaaaaaaaaaaaaaaaaaaaaaaaaugcaucccccccccccccccccccccccccccccccaaaggcucuuuucagagccaccagaauu

SEQ ID NO: 1201 - RNA, 2248 nt, Artificial Sequence
  mRNA product Design i-3 comprising derived and/or modified sequence from YFV__NC_002031.1__SS-prME (polyprotein: M,aa104-778) (opt1)
gggagaaagcuuaccauggacgugcucaccguccaguuccugauccuggggaugcuccugaugaccggcggggugacgcuggugcggaagaaccgcuggcuccugcugaacgucaccuccgaggaccucggcaagaccuucagcguggggaccggcaacugcacgaccaacauccuggaggccaaguacuggugccccgacuccauggaguacaacugcccgaaccugagcccccgggaggagcccgacgacaucgacugcuggugcuacggcguggagaacguccgcguggccuacgggaagugcgacuccgcgggccggagccgccggucccgccgggccaucgaccuccccacccacgagaaccacgggcugaagacccgccaggagaaguggaugacgggccggaugggggagcgccagcugcagaagaucgagcggugguucgugcgcaacccguucuucgccgucaccgcccucaccaucgccuaccuggugggcagcaacaugacccagcggguggucaucgcgcugcucgugcuggccgugggccccgccuacuccgcccacugcaucgggaucacggaccgcgacuucaucgagggcguccacgggggcaccugggugagcgcgacccuggagcaggacaagugcgugaccgucauggcccccgacaagcccucccucgacaucagccuggagacgguggccaucgaccggccggccgaggugcgcaaggucugcuacaacgccgugcugacccacgugaagaucaacgacaagugccccuccaccggcgaggcgcaccucgccgaggagaacgagggggacaacgccugcaagcggaccuacagcgaccggggcugggggaacggcugcgggcuguucggcaagggcuccaucgucgccugcgccaaguucacgugcgcgaaguccaugagccuguucgagguggaccagaccaagauccaguacgucauccgcgcccagcuccacgugggggccaagcaggagaacuggaacaccgacaucaagacccugaaguucgacgcccugagcggcagccaggagguggaguucaucggguacggcaaggccacgcucgagugccagguccagaccgcgguggacuucgggaacuccuacaucgccgagauggagaccgagagcuggaucguggaccggcagugggcccaggaccugacccugcccuggcaguccggcagcggcggggucuggcgcgagaugcaccaccucguggaguucgagcccccgcacgccgccacgauccgggugcuggcgcugggcaaccaggaggggucccucaagaccgcccugaccggcgccaugcgcgucaccaaggacacgaacgacaacaaccuguacaagcuccacgggggccacgugagcugccgggugaagcuguccgcccugacccucaagggcaccagcuacaagaucugcaccgacaagauguucuucgucaagaaccccacggacaccgggcacggcaccguggugaugcaggucaagguguccaagggggcgcccugccgcaucccggugaucgucgccgacgaccugaccgccgccaucaacaagggcauccuggugaccgugaacccgaucgccagcacgaacgacgacgagguccucaucgaggugaacccccccuucggcgacuccuacaucaucguggggcggggcgacagccgccugaccuaccaguggcacaaggagggguccagcaucggcaagcuguucacccagaccaugaagggggucgagcggcuggcggugaugggcgacacggccugggacuucuccagcgccggcggguucuucaccuccgugggcaaggggauccacaccgucuucggcagcgccuuccaggggcuguucggcggccucaacuggaucaccaaggugaucaugggggccgugcugaucugggucggcaucaacacgcgcaacaugaccauguccaugagcaugauccucgugggggugaucaugauguuccugagccugggcgucggggcgugaggacuaguuauaagacugacuagcccgaugggccucccaacgggcccuccuccccuccuugcaccgagauuaauaaaaaaaaaaaaaaaaaaaaaaaaaaaaaaaaaaaaaaaaaaaaaaaaaaaaaaaaaaaaaaaaugcaucccccccccccccccccccccccccccccccaaaggcucuuuucagagccaccagaauu

SEQ ID NO: 1202 - RNA, 2275 nt, Artificial Sequence
  mRNA product Design i-3 comprising derived and/or modified sequence from YFV__NC_002031.1__SSIgE-prME-XX (polyprotein: aa122-788) (opt1)
gggagaaagcuuaccauggacuggaccuggauccuguuccucguggccgccgcgacccgcguccacagcgugacgcuggugcggaagaaccgcuggcuccugcugaacgucaccuccgaggaccucggcaagaccuucagcguggggaccggcaacugcacgaccaacauccuggaggccaaguacuggugccccgacuccauggaguacaacugcccgaaccugagcccccgggaggagcccgacgacaucgacugcuggugcuacggcguggagaacguccgcguggccuacgggaagugcgacuccgcgggccggagccgccggucccgccgggccaucgaccuccccacccacgagaaccacgggcugaagacccgccaggagaaguggaugacgggccggaugggggagcgccagcugcagaagaucgagcggugguucgugcgcaacccguucuucgccgucaccgcccucaccaucgccuaccuggugggcagcaacaugacccagcggguggucaucgcgcugcucgugcuggccgugggccccgccuacuccgcccacugcaucgggaucacggaccgcgacuucaucgagggcguccacgggggcaccugggugagcgcgacccuggagcaggacaagugcgugaccgucauggcccccgacaagcccucccucgacaucagccuggagacgguggccaucgaccggccggccgaggugcgcaaggucugcuacaacgccgugcugacccacgugaagaucaacgacaagugccccuccaccggcgaggcgcaccucgccgaggagaacgagggggacaacgccugcaagcggaccuacagcgaccggggcugggggaacggcugcgggcuguucggcaagggcuccaucgucgccugcgccaaguucacgugcgcgaaguccaugagccuguucgagguggaccagaccaagauccaguacgucauccgcgcccagcuccacgugggggccaagcaggagaacuggaacaccgacaucaagacccugaaguucgacgcccugagcggcagccaggagguggaguucaucggguacggcaaggccacgcucgagugccagguccagaccgcgguggacuucgggaacuccuacaucgccgagauggagaccgagagcuggaucguggaccggcagugggcccaggaccugacccugcccuggcaguccggcagcggcggggucuggcgcgagaugcaccaccucguggaguucgagcccccgcacgccgccacgauccgggugcuggcgcugggcaaccaggaggggucccucaagaccgcccugaccggcgccaugcgcgucaccaaggacacgaacgacaacaaccuguacaagcuccacgggggccacgugagcugccgggugaagcuguccgcccugacccucaagggcaccagcuacaagaucugcaccgacaagauguucuucgucaagaaccccacggacaccgggcacggcaccguggugaugcaggucaagguguccaagggggcgcccugccgcaucccggugaucgucgccgacgaccugaccgccgccaucaacaagggcauccuggugaccgugaacccgaucgccagcacgaacgacgacgagguccucaucgaggugaacccccccuucggcgacuccuacaucaucguggggcggggcgacagccgccugaccuaccaguggcacaaggagggguccagcaucggcaagcuguucacccagaccaugaagggggucgagcggcuggcggugaugggcgacacggccugggacuucuccagcgccggcggguucuucaccuccgugggcaaggggauccacaccgucuucggcagcgccuuccaggggcuguucggcggccucaacuggaucaccaaggugaucaugggggccgugcugaucugggucggcaucaacacgcgcaacaugaccauguccaugagcaugauccucgugggggugaucaugauguuccugagccugggcgucggggcggaccagggcugcgccaucaacuucggcaagugaggacuaguuauaagacugacuagcccgaugggccucccaacgggcccuccuccccuccuugcaccgagauuaauaaaaaaaaaaaaaaaaaaaaaaaaaaaaaaaaaaaaaaaaaaaaaaaaaaaaaaaaaaaaaaaaugcaucccccccccccccccccccccccccccccccaaaggcucuuuucagagccaccagaauu

SEQ ID NO: 1203 - RNA, 2245 nt, Artificial Sequence
  mRNA product Design i-3 comprising derived and/or modified sequence from YFV__NC_002031.1__SSIgE-prME (polyprotein: aa122-778) (opt1)
gggagaaagcuuaccauggacuggaccuggauccuguuccucguggccgccgcgacccgcguccacagcgugacgcuggugcggaagaaccgcuggcuccugcugaacgucaccuccgaggaccucggcaagaccuucagcguggggaccggcaacugcacgaccaacauccuggaggccaaguacuggugccccgacuccauggaguacaacugcccgaaccugagcccccgggaggagcccgacgacaucgacugcuggugcuacggcguggagaacguccgcguggccuacgggaagugcgacuccgcgggccggagccgccggucccgccgggccaucgaccuccccacccacgagaaccacgggcugaagacccgccaggagaaguggaugacgggccggaugggggagcgccagcugcagaagaucgagcggugguucgugcgcaacccguucuucgccgucaccgcccucaccaucgccuaccuggugggcagcaacaugacccagcggguggucaucgcgcugcucgugcuggccgugggccccgccuacuccgcccacugcaucgggaucacggaccgcgacuucaucgagggcguccacgggggcaccugggugagcgcgacccuggagcaggacaagugcgugaccgucauggcccccgacaagcccucccucgacaucagccuggagacgguggccaucgaccggccggccgaggugcgcaaggucugcuacaacgccgugcugacccacgugaagaucaacgacaagugccccuccaccggcgaggcgcaccucgccgaggagaacgagggggacaacgccugcaagcggaccuacagcgaccggggcugggggaacggcugcgggcuguucggcaagggcuccaucgucgccugcgccaaguucacgugcgcgaaguccaugagccuguucgagguggaccagaccaagauccaguacgucauccgcgcccagcuccacgugggggccaagcaggagaacuggaacaccgacaucaagacccugaaguucgacgcccugagcggcagccaggagguggaguucaucggguacggcaaggccacgcucgagugccagguccagaccgcgguggacuucgggaacuccuacaucgccgagauggagaccgagagcuggaucguggaccggcagugggcccaggaccugacccugcccuggcaguccggcagcggcggggucuggcgcgagaugcaccaccucguggaguucgagcccccgcacgccgccacgauccgggugcuggcgcugggcaaccaggaggggucccucaagaccgcccugaccggcgccaugcgcgucaccaaggacacgaacgacaacaaccuguacaagcuccacgggggccacgugagcugccgggugaagcuguccgcccugacccucaagggcaccagcuacaagaucugcaccgacaagauguucuucgucaagaaccccacggacaccgggcacggcaccguggugaugcaggucaagguguccaagggggcgcccugccgcaucccggugaucgucgccgacgaccugaccgccgccaucaacaagggcauccuggugaccgugaacccgaucgccagcacgaacgacgacgagguccucaucgaggugaacccccccuucggcgacuccuacaucaucguggggcggggcgacagccgccugaccuaccaguggcacaaggagggguccagcaucggcaagcuguucacccagaccaugaagggggucgagcggcuggcggugaugggcgacacggccugggacuucuccagcgccggcggguucuucaccuccgugggcaaggggauccacaccgucuucggcagcgccuuccaggggcuguucggcggccucaacuggaucaccaaggugaucaugggggccgugcugaucugggucggcaucaacacgcgcaacaugaccauguccaugagcaugauccucgugggggugaucaugauguuccugagccugggcgucggggcgugaggacuaguuauaagacugacuagcccgaugggccucccaacgggcccuccuccccuccuugcaccgagauuaauaaaaaaaaaaaaaaaaaaaaaaaaaaaaaaaaaaaaaaaaaaaaaaaaaaaaaaaaaaaaaaaaugcaucccccccccccccccccccccccccccccccaaaggcucuuuucagagccaccagaauu

SEQ ID NO: 1204 - RNA, 2293 nt, Artificial Sequence
  mRNA product Design i-3 comprising derived and/or modified sequence from YFV__NC_002031.1__SSjev-prME-XX (polyprotein: aa122-788) (opt1)
gggagaaagcuuaccaugggcaagcgcagcgccggguccaucauguggcuggccagccucgcgguggucaucgccugcgccggcgccgugacgcuggugcggaagaaccgcuggcuccugcugaacgucaccuccgaggaccucggcaagaccuucagcguggggaccggcaacugcacgaccaacauccuggaggccaaguacuggugccccgacuccauggaguacaacugcccgaaccugagcccccgggaggagcccgacgacaucgacugcuggugcuacggcguggagaacguccgcguggccuacgggaagugcgacuccgcgggccggagccgccggucccgccgggccaucgaccuccccacccacgagaaccacgggcugaagacccgccaggagaaguggaugacgggccggaugggggagcgccagcugcagaagaucgagcggugguucgugcgcaacccguucuucgccgucaccgcccucaccaucgccuaccuggugggcagcaacaugacccagcggguggucaucgcgcugcucgugcuggccgugggccccgccuacuccgcccacugcaucgggaucacggaccgcgacuucaucgagggcguccacgggggcaccugggugagcgcgacccuggagcaggacaagugcgugaccgucauggcccccgacaagcccucccucgacaucagccuggagacgguggccaucgaccggccggccgaggugcgcaaggucugcuacaacgccgugcugacccacgugaagaucaacgacaagugccccuccaccggcgaggcgcaccucgccgaggagaacgagggggacaacgccugcaagcggaccuacagcgaccggggcugggggaacggcugcgggcuguucggcaagggcuccaucgucgccugcgccaaguucacgugcgcgaaguccaugagccuguucgagguggaccagaccaagauccaguacgucauccgcgcccagcuccacgugggggccaagcaggagaacuggaacaccgacaucaagacccugaaguucgacgcccugagcggcagccaggagguggaguucaucggguacggcaaggccacgcucgagugccagguccagaccgcgguggacuucgggaacuccuacaucgccgagauggagaccgagagcuggaucguggaccggcagugggcccaggaccugacccugcccuggcaguccggcagcggcggggucuggcgcgagaugcaccaccucguggaguucgagcccccgcacgccgccacgauccgggugcuggcgcugggcaaccaggaggggucccucaagaccgcccugaccggcgccaugcgcgucaccaaggacacgaacgacaacaaccuguacaagcuccacgggggccacgugagcugccgggugaagcuguccgcccugacccucaagggcaccagcuacaagaucugcaccgacaagauguucuucgucaagaaccccacggacaccgggcacggcaccguggugaugcaggucaagguguccaagggggcgcccugccgcaucccggugaucgucgccgacgaccugaccgccgccaucaacaagggcauccuggugaccgugaacccgaucgccagcacgaacgacgacgagguccucaucgaggugaacccccccuucggcgacuccuacaucaucguggggcggggcgacagccgccugaccuaccaguggcacaaggagggguccagcaucggcaagcuguucacccagaccaugaagggggucgagcggcuggcggugaugggcgacacggccugggacuucuccagcgccggcggguucuucaccuccgugggcaaggggauccacaccgucuucggcagcgccuuccaggggcuguucggcggccucaacuggaucaccaaggugaucaugggggccgugcugaucugggucggcaucaacacgcgcaacaugaccauguccaugagcaugauccucgugggggugaucaugauguuccugagccugggcgucggggcggaccagggcugcgccaucaacuucggcaagugaggacuaguuauaagacugacuagcccgaugggccucccaacgggcccuccuccccuccuugcaccgagauuaauaaaaaaaaaaaaaaaaaaaaaaaaaaaaaaaaaaaaaaaaaaaaaaaaaaaaaaaaaaaaaaaaugcaucccccccccccccccccccccccccccccccaaaggcucuuuucagagccaccagaauu

SEQ ID NO: 1205 - RNA, 2263 nt, Artificial Sequence
  mRNA product Design i-3 comprising derived and/or modified sequence from YFV__NC_002031.1__SSjev-prME (polyprotein: aa122-778) (opt1)
gggagaaagcuuaccaugggcaagcgcagcgccggguccaucauguggcuggccagccucgcgguggucaucgccugcgccggcgccgugacgcuggugcggaagaaccgcuggcuccugcugaacgucaccuccgaggaccucggcaagaccuucagcguggggaccggcaacugcacgaccaacauccuggaggccaaguacuggugccccgacuccauggaguacaacugcccgaaccugagcccccgggaggagcccgacgacaucgacugcuggugcuacggcguggagaacguccgcguggccuacgggaagugcgacuccgcgggccggagccgccggucccgccgggccaucgaccuccccacccacgagaaccacgggcugaagacccgccaggagaaguggaugacgggccggaugggggagcgccagcugcagaagaucgagcggugguucgugcgcaacccguucuucgccgucaccgcccucaccaucgccuaccuggugggcagcaacaugacccagcggguggucaucgcgcugcucgugcuggccgugggccccgccuacuccgcccacugcaucgggaucacggaccgcgacuucaucgagggcguccacgggggcaccugggugagcgcgacccuggagcaggacaagugcgugaccgucauggcccccgacaagcccucccucgacaucagccuggagacgguggccaucgaccggccggccgaggugcgcaaggucugcuacaacgccgugcugacccacgugaagaucaacgacaagugccccuccaccggcgaggcgcaccucgccgaggagaacgagggggacaacgccugcaagcggaccuacagcgaccggggcugggggaacggcugcgggcuguucggcaagggcuccaucgucgccugcgccaaguucacgugcgcgaaguccaugagccuguucgagguggaccagaccaagauccaguacgucauccgcgcccagcuccacgugggggccaagcaggagaacuggaacaccgacaucaagacccugaaguucgacgcccugagcggcagccaggagguggaguucaucggguacggcaaggccacgcucgagugccagguccagaccgcgguggacuucgggaacuccuacaucgccgagauggagaccgagagcuggaucguggaccggcagugggcccaggaccugacccugcccuggcaguccggcagcggcggggucuggcgcgagaugcaccaccucguggaguucgagcccccgcacgccgccacgauccgggugcuggcgcugggcaaccaggaggggucccucaagaccgcccugaccggcgccaugcgcgucaccaaggacacgaacgacaacaaccuguacaagcuccacgggggccacgugagcugccgggugaagcuguccgcccugacccucaagggcaccagcuacaagaucugcaccgacaagauguucuucgucaagaaccccacggacaccgggcacggcaccguggugaugcaggucaagguguccaagggggcgcccugccgcaucccggugaucgucgccgacgaccugaccgccgccaucaacaagggcauccuggugaccgugaacccgaucgccagcacgaacgacgacgagguccucaucgaggugaacccccccuucggcgacuccuacaucaucguggggcggggcgacagccgccugaccuaccaguggcacaaggagggguccagcaucggcaagcuguucacccagaccaugaagggggucgagcggcuggcggugaugggcgacacggccugggacuucuccagcgccggcggguucuucaccuccgugggcaaggggauccacaccgucuucggcagcgccuuccaggggcuguucggcggccucaacuggaucaccaaggugaucaugggggccgugcugaucugggucggcaucaacacgcgcaacaugaccauguccaugagcaugauccucgugggggugaucaugauguuccugagccugggcgucggggcgugaggacuaguuauaagacugacuagcccgaugggccucccaacgggcccuccuccccuccuugcaccgagauuaauaaaaaaaaaaaaaaaaaaaaaaaaaaaaaaaaaaaaaaaaaaaaaaaaaaaaaaaaaaaaaaaaugcaucccccccccccccccccccccccccccccccaaaggcucuuuucagagccaccagaauu

SEQ ID NO: 1206 - RNA, 2311 nt, Artificial Sequence
  mRNA product Design i-3 comprising derived and/or modified sequence from YFV__NC_002031.1__X-SS-prME-XX (polyprotein: aa92-788) (opt1)
gggagaaagcuuaccaugcgcggccugagcucccggaagcgccggagccacgacgugcucaccguccaguuccugauccuggggaugcuccugaugaccggcggggugacgcuggugcgcaagaaccgguggcuccugcugaacgucaccuccgaggaccucggcaagaccuucagcguggggaccggcaacugcacgaccaacauccuggaggccaaguacuggugccccgacuccauggaguacaacugccccaaccugagcccccgcgaggagcccgacgacaucgacugcuggugcuacggcguggagaacguccggguggccuacgggaagugcgacuccgcgggccgcagccggcgcucccggcgcgccaucgaccuccccacccacgagaaccacgggcugaagacccggcaggagaaguggaugacgggccgcaugggggagcggcagcugcagaagaucgagcgcugguucgugcggaacccguucuucgccgucaccgcccucaccaucgccuaccuggugggcagcaacaugacccagcgcguggucaucgcgcugcucgugcuggccgugggccccgccuacuccgcccacugcaucgggaucacggaccgggacuucaucgagggcguccacgggggcaccugggugagcgcgacccuggagcaggacaagugcgugaccgucauggcccccgacaagcccucccucgacaucagccuggagacgguggccaucgaccgcccggccgaggugcggaaggucugcuacaacgccgugcugacccacgugaagaucaacgacaagugccccuccaccggcgaggcgcaccucgccgaggagaacgagggggacaacgccugcaagcgcaccuacagcgaccgcggcugggggaacggcugcgggcuguucggcaagggcuccaucgucgccugcgccaaguucacgugcgccaagagcaugucccuguucgagguggaccagaccaagauccaguacgucauccgggcgcagcuccacgugggggccaagcaggagaacuggaacaccgacaucaagacccugaaguucgacgcccugagcggcagccaggagguggaguucaucggguacggcaaggccacgcucgagugccagguccagaccgcgguggacuucgggaacuccuacaucgccgagauggagaccgagagcuggaucguggaccgccagugggcccaggaccugacccugcccuggcaguccggcagcggcggggucuggcgggagaugcaccaccucguggaguucgagcccccgcacgccgccacgauccgcgugcuggcgcugggcaaccaggaggggucccucaagaccgcccugaccggcgccaugcgggucaccaaggacacgaacgacaacaaccuguacaagcuccacgggggccacgugagcugccgcgugaagcuguccgcccugacccucaagggcaccagcuacaagaucugcaccgacaagauguucuucgucaagaaccccacggacaccgggcacggcaccguggugaugcaggucaagguguccaagggggcgcccugccggauccccgugaucgucgccgacgaccugaccgccgccaucaacaagggcauccuggugaccgugaacccgaucgccagcacgaacgacgacgagguccucaucgaggugaacccgcccuucggcgacuccuacaucaucguggggcgcggcgacagccggcugaccuaccaguggcacaaggagggguccagcaucggcaagcuguucacccagaccaugaagggggucgagcgccucgcggugaugggcgacacggccugggacuucuccagcgccggcggguucuucaccuccgugggcaaggggauccacaccgucuucggcagcgccuuccaggggcuguucggcggccugaacuggaucaccaaggugaucaugggggccgugcugaucugggucggcaucaacacgcggaacaugaccauguccaugagcaugauccucgugggggugaucaugauguuccugagccugggcgucggggcggaccagggcugcgccaucaacuucggcaagugaggacuaguuauaagacugacuagcccgaugggccucccaacgggcccuccuccccuccuugcaccgagauuaauaaaaaaaaaaaaaaaaaaaaaaaaaaaaaaaaaaaaaaaaaaaaaaaaaaaaaaaaaaaaaaaaugcaucccccccccccccccccccccccccccccccaaaggcucuuuucagagccaccagaauu

SEQ ID NO: 1207 - RNA, 2248 nt, Artificial Sequence
  mRNA product Design i-3 comprising derived and/or modified sequence from YFV__NC_002031.1__SS-prME (polyprotein: M,aa104-778) (opt1)
gggagaaagcuuaccauggacgugcugaccguccaguuccucauccugggcaugcugcucaugaccgggggcgugacgcuggugcgcaagaaccgguggcugcuccugaacgucaccagcgaggaccuggggaagaccuucuccgugggcaccgggaacugcacgaccaacauccucgaggccaaguacuggugccccgacagcauggaguacaacugccccaaccugagcccccgcgaggagcccgacgacaucgacugcuggugcuacggcguggagaacguccggguggccuacggcaagugcgacuccgcggggcgcucccggcgcagccggcgcgccaucgaccugcccacccacgagaaccacggccucaagacccggcaggagaaguggaugacggggcgcaugggcgagcggcagcugcagaagaucgagcgcugguucgugcggaacccguucuucgccgucaccgcccugaccaucgccuaccucgugggguccaacaugacccagcgcguggucaucgcgcugcuggugcucgccgugggccccgccuacagcgcccacugcaucggcaucacggaccgggacuucaucgaggggguccacggcgggaccuggguguccgcgacccuggagcaggacaagugcgugaccgucauggcccccgacaagcccagccuggacaucucccucgagacgguggccaucgaccgcccggccgaggugcggaaggucugcuacaacgccgugcugacccacgugaagaucaacgacaagugccccagcaccggcgaggcgcaccuggccgaggagaacgagggcgacaacgccugcaagcgcaccuacuccgaccggggguggggcaacgggugcggccucuucgggaagggcagcaucgucgccugcgccaaguucacgugcgcgaaguccaugagccuguucgagguggaccagaccaagauccaguacgucauccgcgcccagcugcacgugggcgccaagcaggagaacuggaacaccgacaucaagacccucaaguucgacgcccuguccgggagccaggagguggaguucaucggcuacgggaaggccacgcuggagugccagguccagaccgcgguggacuucggcaacuccuacaucgccgagauggagaccgagagcuggaucguggaccggcagugggcccaggaccucacccugcccuggcagagcggguccggcggcgucuggcgcgagaugcaccaccugguggaguucgagcccccgcacgccgccacgauccgcgugcucgcgcuggggaaccaggagggcagccugaagaccgcccucaccggggccaugcgggucaccaaggacacgaacgacaacaaccuguacaagcugcacggcgggcacguguccugccgcgugaagcucagcgcccugacccugaagggcaccuccuacaagaucugcaccgacaagauguucuucgucaagaaccccacggacaccggccacgggaccguggugaugcaggucaaggugagcaagggcgcgcccugccggauccccgugaucgucgccgacgaccucaccgccgccaucaacaaggggauccuggugaccgugaacccgaucgccuccacgaacgacgacgagguccugaucgaggugaacccgcccuucggcgacagcuacaucaucgugggccgcggggacucccggcucaccuaccaguggcacaaggagggcagcuccaucgggaagcuguucacccagaccaugaagggcgucgagcgccuggcggugaugggggacacggccugggacuucagcuccgccggcggcuucuucaccagcguggggaagggcauccacaccgucuucggguccgccuuccagggccucuucgggggccugaacuggaucaccaaggugaucaugggcgccgugcugaucugggucgggaucaacacgcggaacaugaccaugagcauguccaugauccuggugggcgugaucaugauguuccucagccugggggucggcgcgugaggacuaguuauaagacugacuagcccgaugggccucccaacgggcccuccuccccuccuugcaccgagauuaauaaaaaaaaaaaaaaaaaaaaaaaaaaaaaaaaaaaaaaaaaaaaaaaaaaaaaaaaaaaaaaaaugcaucccccccccccccccccccccccccccccccaaaggcucuuuucagagccaccagaauu

SEQ ID NO: 1208 - RNA, 2275 nt, Artificial Sequence
  mRNA product Design i-3 comprising derived and/or modified sequence from YFV__NC_002031.1__SSIgE-prME-XX (polyprotein: aa122-788) (opt1)
gggagaaagcuuaccauggacuggaccuggauccuguuccucguggccgccgcgacccgcguccacagcgugacgcuggugcggaagaaccgcuggcugcuccugaacgucaccuccgaggaccugggcaagaccuucagcguggggaccggcaacugcacgaccaacauccucgaggccaaguacuggugccccgacuccauggaguacaacugccccaaccugagcccccgggaggagcccgacgacaucgacugcuggugcuacgggguggagaacguccgcguggccuacggcaagugcgacuccgccgggcggagccgccggucccgccgggccaucgaccugcccacccacgagaaccacggccucaagacccgccaggagaaguggaugacgggccggaugggggagcgccagcugcagaagaucgagcggugguucgugcgcaacccguucuucgcggucaccgcccugaccaucgccuaccucgugggcagcaacaugacccagcggguggucaucgcccugcuggugcucgcgguggggcccgccuacuccgcccacugcaucggcaucacggaccgcgacuucaucgaggggguccacggcggcaccugggugagcgccacccuggagcaggacaagugcgugaccgucauggcccccgacaagcccucccuggacaucagccucgagacgguggcgaucgaccggccggccgaggugcgcaaggucugcuacaacgccgugcugacccacgugaagaucaacgacaagugccccuccaccggggaggcccaccuggccgaggagaacgagggcgacaacgcgugcaagcggaccuacagcgaccgcggguggggcaacggcugcggccucuucgggaagggguccaucgucgccugcgccaaguucacgugcgccaagagcaugucccuguucgagguggaccagaccaagauccaguacgucauccgggcccagcugcacgugggcgcgaagcaggagaacuggaacaccgacaucaagacccucaaguucgacgcccugagcgggucccaggagguggaguucaucggcuacggcaaggccacgcuggagugccagguccagaccgccguggacuucgggaacagcuacaucgccgagauggagaccgagagcuggaucguggaccgccagugggcgcaggaccucacccugcccuggcaguccggcagcgggggcgucuggcgcgagaugcaccaccugguggaguucgagcccccgcacgccgccacgauccgggugcucgcccuggggaaccaggagggcucccugaagaccgcgcucaccggcgccaugcgcgucaccaaggacacgaacgacaacaaccuguacaagcugcacgggggccacgugagcugccgggugaagcucuccgcccugacccugaaggggaccagcuacaagaucugcaccgacaagauguucuucgucaagaaccccacggacaccggccacgggaccguggugaugcaggucaagguguccaagggcgcccccugccgcauccccgugaucgucgccgacgaccucaccgcggccaucaacaagggcauccuggugaccgugaacccgaucgccagcacgaacgacgacgagguccugaucgaggugaacccgcccuucggggacuccuacaucaucgugggccgcggggacagccggcucaccuaccaguggcacaaggagggcuccagcaucggcaagcuguucacccagaccaugaagggggucgagcggcuggccgugaugggcgacacggccugggacuucuccagcgccgggggcuucuucaccuccguggggaagggcauccacaccgucuucggcagcgcguuccaggggcuguucggcgggcucaacuggaucaccaaggugaucaugggcgccgugcugaucugggucgggaucaacacgcgcaacaugaccauguccaugagcaugauccucgugggcgugaucaugauguuccugucccugggcgucggggccgaccagggcugcgccaucaacuucgggaagugaggacuaguuauaagacugacuagcccgaugggccucccaacgggcccuccuccccuccuugcaccgagauuaauaaaaaaaaaaaaaaaaaaaaaaaaaaaaaaaaaaaaaaaaaaaaaaaaaaaaaaaaaaaaaaaaugcaucccccccccccccccccccccccccccccccaaaggcucuuuucagagccaccagaauu

SEQ ID NO: 1209 - RNA, 2245 nt, Artificial Sequence
  mRNA product Design i-3 comprising derived and/or modified sequence from YFV__NC_002031.1__SSIgE-prME (polyprotein: aa122-778) (opt1)
gggagaaagcuuaccauggacuggaccuggauccuguuccucguggccgccgcgacccgcguccacagcgugacgcuggugcggaagaaccgcuggcugcuccugaacgucaccuccgaggaccugggcaagaccuucagcguggggaccggcaacugcacgaccaacauccucgaggccaaguacuggugccccgacuccauggaguacaacugccccaaccugagcccccgggaggagcccgacgacaucgacugcuggugcuacgggguggagaacguccgcguggccuacggcaagugcgacuccgccgggcggagccgccggucccgccgggccaucgaccugcccacccacgagaaccacggccucaagacccgccaggagaaguggaugacgggccggaugggggagcgccagcugcagaagaucgagcggugguucgugcgcaacccguucuucgcggucaccgcccugaccaucgccuaccucgugggcagcaacaugacccagcggguggucaucgcccugcuggugcucgcgguggggcccgccuacuccgcccacugcaucggcaucacggaccgcgacuucaucgaggggguccacggcggcaccugggugagcgccacccuggagcaggacaagugcgugaccgucauggcccccgacaagcccucccuggacaucagccucgagacgguggcgaucgaccggccggccgaggugcgcaaggucugcuacaacgccgugcugacccacgugaagaucaacgacaagugccccuccaccggggaggcccaccuggccgaggagaacgagggcgacaacgcgugcaagcggaccuacagcgaccgcggguggggcaacggcugcggccucuucgggaagggguccaucgucgccugcgccaaguucacgugcgccaagagcaugucccuguucgagguggaccagaccaagauccaguacgucauccgggcccagcugcacgugggcgcgaagcaggagaacuggaacaccgacaucaagacccucaaguucgacgcccugagcgggucccaggagguggaguucaucggcuacggcaaggccacgcuggagugccagguccagaccgccguggacuucgggaacagcuacaucgccgagauggagaccgagagcuggaucguggaccgccagugggcgcaggaccucacccugcccuggcaguccggcagcgggggcgucuggcgcgagaugcaccaccugguggaguucgagcccccgcacgccgccacgauccgggugcucgcccuggggaaccaggagggcucccugaagaccgcgcucaccggcgccaugcgcgucaccaaggacacgaacgacaacaaccuguacaagcugcacgggggccacgugagcugccgggugaagcucuccgcccugacccugaaggggaccagcuacaagaucugcaccgacaagauguucuucgucaagaaccccacggacaccggccacgggaccguggugaugcaggucaagguguccaagggcgcccccugccgcauccccgugaucgucgccgacgaccucaccgcggccaucaacaagggcauccuggugaccgugaacccgaucgccagcacgaacgacgacgagguccugaucgaggugaacccgcccuucggggacuccuacaucaucgugggccgcggggacagccggcucaccuaccaguggcacaaggagggcuccagcaucggcaagcuguucacccagaccaugaagggggucgagcggcuggccgugaugggcgacacggccugggacuucuccagcgccgggggcuucuucaccuccguggggaagggcauccacaccgucuucggcagcgcguuccaggggcuguucggcgggcucaacuggaucaccaaggugaucaugggcgccgugcugaucugggucgggaucaacacgcgcaacaugaccauguccaugagcaugauccucgugggcgugaucaugauguuccugucccugggcgucggggccugaggacuaguuauaagacugacuagcccgaugggccucccaacgggcccuccuccccuccuugcaccgagauuaauaaaaaaaaaaaaaaaaaaaaaaaaaaaaaaaaaaaaaaaaaaaaaaaaaaaaaaaaaaaaaaaaugcaucccccccccccccccccccccccccccccccaaaggcucuuuucagagccaccagaauu

SEQ ID NO: 1210 - RNA, 2293 nt, Artificial Sequence
  mRNA product Design i-3 comprising derived and/or modified sequence from YFV__NC_002031.1__SSjev-prME-XX (polyprotein: aa122-788) (opt1)
gggagaaagcuuaccaugggcaagcgcagcgccggguccaucauguggcuggccagccucgcgguggucaucgccugcgccggcgccgugacccuggugcggaagaaccgcuggcugcuccugaacgucaccuccgaggaccuggggaagacguucagcgugggcaccgggaacugcaccaccaacauccucgaggccaaguacuggugccccgacuccauggaguacaacugccccaaccugagcccccgggaggagcccgacgacaucgacugcuggugcuacggcguggagaacguccgcguggcguacggcaagugcgacuccgccgggcggagccgccggucccgccgggccaucgaccugcccacgcacgagaaccacggccucaagacccgccaggagaaguggaugaccgggcggaugggcgagcgccagcugcagaagaucgagcggugguucgugcgcaacccguucuucgccgucaccgcgcugacgaucgccuaccucguggggagcaacaugacccagcggguggucaucgcccugcuggugcucgccgugggccccgccuacuccgcgcacugcaucggcaucaccgaccgcgacuucaucgaggggguccacggcgggaccugggugagcgccacgcuggagcaggacaagugcgugaccgucauggcccccgacaagcccucccuggacaucagccucgagaccguggccaucgaccggccggccgaggugcgcaaggucugcuacaacgcggugcugacccacgugaagaucaacgacaagugccccuccacgggcgaggcccaccuggccgaggagaacgagggcgacaacgccugcaagcggaccuacagcgaccgcggguggggcaacgggugcggccucuucgggaagggcuccaucgucgccugcgcgaaguucacgugcgccaagagcaugucccuguucgagguggaccagaccaagauccaguacgucauccgggcccagcugcacgugggcgccaagcaggagaacuggaacaccgacaucaagacccucaaguucgacgcccugagcgggagccaggagguggaguucaucggcuacgggaaggcgacccuggagugccagguccagaccgccguggacuucggcaacuccuacaucgccgagauggagacggagagcuggaucguggaccgccagugggcccaggaccucacccugcccuggcaguccgggagcggcggcgucuggcgcgagaugcaccaccugguggaguucgagcccccgcacgcggccaccauccgggugcucgcccuggggaaccaggagggcucccugaagaccgcccucacgggggccaugcgcgucaccaaggacaccaacgacaacaaccuguacaagcugcacggcgggcacgugagcugccgggugaagcucuccgcgcugacccugaagggcacgagcuacaagaucugcaccgacaagauguucuucgucaagaaccccaccgacaccggccacgggacgguggugaugcaggucaagguguccaagggcgcccccugccgcauccccgugaucgucgccgacgaccucaccgccgccaucaacaaggggauccuggugaccgugaacccgaucgcgagcaccaacgacgacgagguccugaucgaggugaacccgcccuucggcgacuccuacaucaucgugggccgcggggacagccggcucaccuaccaguggcacaaggagggcuccagcaucgggaagcuguucacgcagaccaugaagggcgucgagcggcuggccgugaugggggacaccgccugggacuucuccagcgccggcggcuucuucaccuccguggggaagggcauccacacggucuucgggagcgccuuccagggccucuucgggggccugaacuggaucaccaaggugaucaugggcgcggugcugaucugggucgggaucaacacccgcaacaugaccauguccaugagcaugauccucgugggcgugaucaugauguuccugagccugggggucggcgccgaccaggggugcgccaucaacuucggcaagugaggacuaguuauaagacugacuagcccgaugggccucccaacgggcccuccuccccuccuugcaccgagauuaauaaaaaaaaaaaaaaaaaaaaaaaaaaaaaaaaaaaaaaaaaaaaaaaaaaaaaaaaaaaaaaaaugcaucccccccccccccccccccccccccccccccaaaggcucuuuucagagccaccagaauu

SEQ ID NO: 1211 - RNA, 2263 nt, Artificial Sequence
  mRNA product Design i-3 comprising derived and/or modified sequence from YFV__NC_002031.1__SSjev-prME (polyprotein: aa122-778) (opt1)
gggagaaagcuuaccaugggcaagcgcagcgccggguccaucauguggcuggccagccucgcgguggucaucgccugcgccggcgccgugacccuggugcggaagaaccgcuggcugcuccugaacgucaccuccgaggaccuggggaagacguucagcgugggcaccgggaacugcaccaccaacauccucgaggccaaguacuggugccccgacuccauggaguacaacugccccaaccugagcccccgggaggagcccgacgacaucgacugcuggugcuacggcguggagaacguccgcguggcguacggcaagugcgacuccgccgggcggagccgccggucccgccgggccaucgaccugcccacgcacgagaaccacggccucaagacccgccaggagaaguggaugaccgggcggaugggcgagcgccagcugcagaagaucgagcggugguucgugcgcaacccguucuucgccgucaccgcgcugacgaucgccuaccucguggggagcaacaugacccagcggguggucaucgcccugcuggugcucgccgugggccccgccuacuccgcgcacugcaucggcaucaccgaccgcgacuucaucgaggggguccacggcgggaccugggugagcgccacgcuggagcaggacaagugcgugaccgucauggcccccgacaagcccucccuggacaucagccucgagaccguggccaucgaccggccggccgaggugcgcaaggucugcuacaacgcggugcugacccacgugaagaucaacgacaagugccccuccacgggcgaggcccaccuggccgaggagaacgagggcgacaacgccugcaagcggaccuacagcgaccgcggguggggcaacgggugcggccucuucgggaagggcuccaucgucgccugcgcgaaguucacgugcgccaagagcaugucccuguucgagguggaccagaccaagauccaguacgucauccgggcccagcugcacgugggcgccaagcaggagaacuggaacaccgacaucaagacccucaaguucgacgcccugagcgggagccaggagguggaguucaucggcuacgggaaggcgacccuggagugccagguccagaccgccguggacuucggcaacuccuacaucgccgagauggagacggagagcuggaucguggaccgccagugggcccaggaccucacccugcccuggcaguccgggagcggcggcgucuggcgcgagaugcaccaccugguggaguucgagcccccgcacgcggccaccauccgggugcucgcccuggggaaccaggagggcucccugaagaccgcccucacgggggccaugcgcgucaccaaggacaccaacgacaacaaccuguacaagcugcacggcgggcacgugagcugccgggugaagcucuccgcgcugacccugaagggcacgagcuacaagaucugcaccgacaagauguucuucgucaagaaccccaccgacaccggccacgggacgguggugaugcaggucaagguguccaagggcgcccccugccgcauccccgugaucgucgccgacgaccucaccgccgccaucaacaaggggauccuggugaccgugaacccgaucgcgagcaccaacgacgacgagguccugaucgaggugaacccgcccuucggcgacuccuacaucaucgugggccgcggggacagccggcucaccuaccaguggcacaaggagggcuccagcaucgggaagcuguucacgcagaccaugaagggcgucgagcggcuggccgugaugggggacaccgccugggacuucuccagcgccggcggcuucuucaccuccguggggaagggcauccacacggucuucgggagcgccuuccagggccucuucgggggccugaacuggaucaccaaggugaucaugggcgcggugcugaucugggucgggaucaacacccgcaacaugaccauguccaugagcaugauccucgugggcgugaucaugauguuccugagccugggggucggcgccugaggacuaguuauaagacugacuagcccgaugggccucccaacgggcccuccuccccuccuugcaccgagauuaauaaaaaaaaaaaaaaaaaaaaaaaaaaaaaaaaaaaaaaaaaaaaaaaaaaaaaaaaaaaaaaaaugcaucccccccccccccccccccccccccccccccaaaggcucuuuucagagccaccagaauu

SEQ ID NO: 1212 - RNA, 2311 nt, Artificial Sequence
  mRNA product Design i-3 comprising derived and/or modified sequence from YFV__NC_002031.1__X-SS-prME-XX (polyprotein: aa92-788) (opt2) R7250
gggagaaagcuuaccaugcgcggccucuccucccgcaagcgccgcucccacgacguccucaccguccaguuccucauccucggcaugcuccucaugaccggcggcgucacccucguccgcaagaaccgcuggcuccuccucaacgucaccuccgaggaccucggcaagaccuucuccgucggcaccggcaacugcaccaccaacauccucgaggccaaguacuggugccccgacuccauggaguacaacugccccaaccucuccccccgcgaggagcccgacgacaucgacugcuggugcuacggcgucgagaacguccgcgucgccuacggcaagugcgacuccgccggccgcucccgccgcucccgccgcgccaucgaccuccccacccacgagaaccacggccucaagacccgccaggagaaguggaugaccggccgcaugggcgagcgccagcuccagaagaucgagcgcugguucguccgcaaccccuucuucgccgucaccgcccucaccaucgccuaccucgucggcuccaacaugacccagcgcgucgucaucgcccuccucguccucgccgucggccccgccuacuccgcccacugcaucggcaucaccgaccgcgacuucaucgagggcguccacggcggcaccugggucuccgccacccucgagcaggacaagugcgucaccgucauggcccccgacaagcccucccucgacaucucccucgagaccgucgccaucgaccgccccgccgagguccgcaaggucugcuacaacgccguccucacccacgucaagaucaacgacaagugccccuccaccggcgaggcccaccucgccgaggagaacgagggcgacaacgccugcaagcgcaccuacuccgaccgcggcuggggcaacggcugcggccucuucggcaagggcuccaucgucgccugcgccaaguucaccugcgccaaguccaugucccucuucgaggucgaccagaccaagauccaguacgucauccgcgcccagcuccacgucggcgccaagcaggagaacuggaacaccgacaucaagacccucaaguucgacgcccucuccggcucccaggaggucgaguucaucggcuacggcaaggccacccucgagugccagguccagaccgccgucgacuucggcaacuccuacaucgccgagauggagaccgaguccuggaucgucgaccgccagugggcccaggaccucacccuccccuggcaguccggcuccggcggcgucuggcgcgagaugcaccaccucgucgaguucgagcccccccacgccgccaccauccgcguccucgcccucggcaaccaggagggcucccucaagaccgcccucaccggcgccaugcgcgucaccaaggacaccaacgacaacaaccucuacaagcuccacggcggccacgucuccugccgcgucaagcucuccgcccucacccucaagggcaccuccuacaagaucugcaccgacaagauguucuucgucaagaaccccaccgacaccggccacggcaccgucgucaugcaggucaaggucuccaagggcgcccccugccgcauccccgucaucgucgccgacgaccucaccgccgccaucaacaagggcauccucgucaccgucaaccccaucgccuccaccaacgacgacgagguccucaucgaggucaacccccccuucggcgacuccuacaucaucgucggccgcggcgacucccgccucaccuaccaguggcacaaggagggcuccuccaucggcaagcucuucacccagaccaugaagggcgucgagcgccucgccgucaugggcgacaccgccugggacuucuccuccgccggcggcuucuucaccuccgucggcaagggcauccacaccgucuucggcuccgccuuccagggccucuucggcggccucaacuggaucaccaaggucaucaugggcgccguccucaucugggucggcaucaacacccgcaacaugaccauguccauguccaugauccucgucggcgucaucaugauguuccucucccucggcgucggcgccgaccagggcugcgccaucaacuucggcaagugaggacuaguuauaagacugacuagcccgaugggccucccaacgggcccuccuccccuccuugcaccgagauuaauaaaaaaaaaaaaaaaaaaaaaaaaaaaaaaaaaaaaaaaaaaaaaaaaaaaaaaaaaaaaaaaaugcaucccccccccccccccccccccccccccccccaaaggcucuuuucagagccaccagaauu

SEQ ID NO: 1213 - RNA, 2248 nt, Artificial Sequence
  mRNA product Design i-3 comprising derived and/or modified sequence from YFV__NC_002031.1__SS-prME (polyprotein: M,aa104-778) (opt2)
gggagaaagcuuaccauggacguccucaccguccaguuccucauccucggcaugcuccucaugaccggcggcgucacccucguccgcaagaaccgcuggcuccuccucaacgucaccuccgaggaccucggcaagaccuucuccgucggcaccggcaacugcaccaccaacauccucgaggccaaguacuggugccccgacuccauggaguacaacugccccaaccucuccccccgcgaggagcccgacgacaucgacugcuggugcuacggcgucgagaacguccgcgucgccuacggcaagugcgacuccgccggccgcucccgccgcucccgccgcgccaucgaccuccccacccacgagaaccacggccucaagacccgccaggagaaguggaugaccggccgcaugggcgagcgccagcuccagaagaucgagcgcugguucguccgcaaccccuucuucgccgucaccgcccucaccaucgccuaccucgucggcuccaacaugacccagcgcgucgucaucgcccuccucguccucgccgucggccccgccuacuccgcccacugcaucggcaucaccgaccgcgacuucaucgagggcguccacggcggcaccugggucuccgccacccucgagcaggacaagugcgucaccgucauggcccccgacaagcccucccucgacaucucccucgagaccgucgccaucgaccgccccgccgagguccgcaaggucugcuacaacgccguccucacccacgucaagaucaacgacaagugccccuccaccggcgaggcccaccucgccgaggagaacgagggcgacaacgccugcaagcgcaccuacuccgaccgcggcuggggcaacggcugcggccucuucggcaagggcuccaucgucgccugcgccaaguucaccugcgccaaguccaugucccucuucgaggucgaccagaccaagauccaguacgucauccgcgcccagcuccacgucggcgccaagcaggagaacuggaacaccgacaucaagacccucaaguucgacgcccucuccggcucccaggaggucgaguucaucggcuacggcaaggccacccucgagugccagguccagaccgccgucgacuucggcaacuccuacaucgccgagauggagaccgaguccuggaucgucgaccgccagugggcccaggaccucacccuccccuggcaguccggcuccggcggcgucuggcgcgagaugcaccaccucgucgaguucgagcccccccacgccgccaccauccgcguccucgcccucggcaaccaggagggcucccucaagaccgcccucaccggcgccaugcgcgucaccaaggacaccaacgacaacaaccucuacaagcuccacggcggccacgucuccugccgcgucaagcucuccgcccucacccucaagggcaccuccuacaagaucugcaccgacaagauguucuucgucaagaaccccaccgacaccggccacggcaccgucgucaugcaggucaaggucuccaagggcgcccccugccgcauccccgucaucgucgccgacgaccucaccgccgccaucaacaagggcauccucgucaccgucaaccccaucgccuccaccaacgacgacgagguccucaucgaggucaacccccccuucggcgacuccuacaucaucgucggccgcggcgacucccgccucaccuaccaguggcacaaggagggcuccuccaucggcaagcucuucacccagaccaugaagggcgucgagcgccucgccgucaugggcgacaccgccugggacuucuccuccgccggcggcuucuucaccuccgucggcaagggcauccacaccgucuucggcuccgccuuccagggccucuucggcggccucaacuggaucaccaaggucaucaugggcgccguccucaucugggucggcaucaacacccgcaacaugaccauguccauguccaugauccucgucggcgucaucaugauguuccucucccucggcgucggcgccugaggacuaguuauaagacugacuagcccgaugggccucccaacgggcccuccuccccuccuugcaccgagauuaauaaaaaaaaaaaaaaaaaaaaaaaaaaaaaaaaaaaaaaaaaaaaaaaaaaaaaaaaaaaaaaaaugcaucccccccccccccccccccccccccccccccaaaggcucuuuucagagccaccagaauu

SEQ ID NO: 1214 - RNA, 2275 nt, Artificial Sequence
  mRNA product Design i-3 comprising derived and/or modified sequence from YFV__NC_002031.1__SSIgE-prME-XX (polyprotein: aa122-788) (opt2)
gggagaaagcuuaccauggacuggaccuggauccucuuccucgucgccgccgccacccgcguccacuccgucacccucguccgcaagaaccgcuggcuccuccucaacgucaccuccgaggaccucggcaagaccuucuccgucggcaccggcaacugcaccaccaacauccucgaggccaaguacuggugccccgacuccauggaguacaacugccccaaccucuccccccgcgaggagcccgacgacaucgacugcuggugcuacggcgucgagaacguccgcgucgccuacggcaagugcgacuccgccggccgcucccgccgcucccgccgcgccaucgaccuccccacccacgagaaccacggccucaagacccgccaggagaaguggaugaccggccgcaugggcgagcgccagcuccagaagaucgagcgcugguucguccgcaaccccuucuucgccgucaccgcccucaccaucgccuaccucgucggcuccaacaugacccagcgcgucgucaucgcccuccucguccucgccgucggccccgccuacuccgcccacugcaucggcaucaccgaccgcgacuucaucgagggcguccacggcggcaccugggucuccgccacccucgagcaggacaagugcgucaccgucauggcccccgacaagcccucccucgacaucucccucgagaccgucgccaucgaccgccccgccgagguccgcaaggucugcuacaacgccguccucacccacgucaagaucaacgacaagugccccuccaccggcgaggcccaccucgccgaggagaacgagggcgacaacgccugcaagcgcaccuacuccgaccgcggcuggggcaacggcugcggccucuucggcaagggcuccaucgucgccugcgccaaguucaccugcgccaaguccaugucccucuucgaggucgaccagaccaagauccaguacgucauccgcgcccagcuccacgucggcgccaagcaggagaacuggaacaccgacaucaagacccucaaguucgacgcccucuccggcucccaggaggucgaguucaucggcuacggcaaggccacccucgagugccagguccagaccgccgucgacuucggcaacuccuacaucgccgagauggagaccgaguccuggaucgucgaccgccagugggcccaggaccucacccuccccuggcaguccggcuccggcggcgucuggcgcgagaugcaccaccucgucgaguucgagcccccccacgccgccaccauccgcguccucgcccucggcaaccaggagggcucccucaagaccgcccucaccggcgccaugcgcgucaccaaggacaccaacgacaacaaccucuacaagcuccacggcggccacgucuccugccgcgucaagcucuccgcccucacccucaagggcaccuccuacaagaucugcaccgacaagauguucuucgucaagaaccccaccgacaccggccacggcaccgucgucaugcaggucaaggucuccaagggcgcccccugccgcauccccgucaucgucgccgacgaccucaccgccgccaucaacaagggcauccucgucaccgucaaccccaucgccuccaccaacgacgacgagguccucaucgaggucaacccccccuucggcgacuccuacaucaucgucggccgcggcgacucccgccucaccuaccaguggcacaaggagggcuccuccaucggcaagcucuucacccagaccaugaagggcgucgagcgccucgccgucaugggcgacaccgccugggacuucuccuccgccggcggcuucuucaccuccgucggcaagggcauccacaccgucuucggcuccgccuuccagggccucuucggcggccucaacuggaucaccaaggucaucaugggcgccguccucaucugggucggcaucaacacccgcaacaugaccauguccauguccaugauccucgucggcgucaucaugauguuccucucccucggcgucggcgccgaccagggcugcgccaucaacuucggcaagugaggacuaguuauaagacugacuagcccgaugggccucccaacgggcccuccuccccuccuugcaccgagauuaauaaaaaaaaaaaaaaaaaaaaaaaaaaaaaaaaaaaaaaaaaaaaaaaaaaaaaaaaaaaaaaaaugcaucccccccccccccccccccccccccccccccaaaggcucuuuucagagccaccagaauu

SEQ ID NO: 1215 - RNA, 2245 nt, Artificial Sequence
  mRNA product Design i-3 comprising derived and/or modified sequence from YFV__NC_002031.1__SSIgE-prME (polyprotein: aa122-778) (opt2)
gggagaaagcuuaccauggacuggaccuggauccucuuccucgucgccgccgccacccgcguccacuccgucacccucguccgcaagaaccgcuggcuccuccucaacgucaccuccgaggaccucggcaagaccuucuccgucggcaccggcaacugcaccaccaacauccucgaggccaaguacuggugccccgacuccauggaguacaacugccccaaccucuccccccgcgaggagcccgacgacaucgacugcuggugcuacggcgucgagaacguccgcgucgccuacggcaagugcgacuccgccggccgcucccgccgcucccgccgcgccaucgaccuccccacccacgagaaccacggccucaagacccgccaggagaaguggaugaccggccgcaugggcgagcgccagcuccagaagaucgagcgcugguucguccgcaaccccuucuucgccgucaccgcccucaccaucgccuaccucgucggcuccaacaugacccagcgcgucgucaucgcccuccucguccucgccgucggccccgccuacuccgcccacugcaucggcaucaccgaccgcgacuucaucgagggcguccacggcggcaccugggucuccgccacccucgagcaggacaagugcgucaccgucauggcccccgacaagcccucccucgacaucucccucgagaccgucgccaucgaccgccccgccgagguccgcaaggucugcuacaacgccguccucacccacgucaagaucaacgacaagugccccuccaccggcgaggcccaccucgccgaggagaacgagggcgacaacgccugcaagcgcaccuacuccgaccgcggcuggggcaacggcugcggccucuucggcaagggcuccaucgucgccugcgccaaguucaccugcgccaaguccaugucccucuucgaggucgaccagaccaagauccaguacgucauccgcgcccagcuccacgucggcgccaagcaggagaacuggaacaccgacaucaagacccucaaguucgacgcccucuccggcucccaggaggucgaguucaucggcuacggcaaggccacccucgagugccagguccagaccgccgucgacuucggcaacuccuacaucgccgagauggagaccgaguccuggaucgucgaccgccagugggcccaggaccucacccuccccuggcaguccggcuccggcggcgucuggcgcgagaugcaccaccucgucgaguucgagcccccccacgccgccaccauccgcguccucgcccucggcaaccaggagggcucccucaagaccgcccucaccggcgccaugcgcgucaccaaggacaccaacgacaacaaccucuacaagcuccacggcggccacgucuccugccgcgucaagcucuccgcccucacccucaagggcaccuccuacaagaucugcaccgacaagauguucuucgucaagaaccccaccgacaccggccacggcaccgucgucaugcaggucaaggucuccaagggcgcccccugccgcauccccgucaucgucgccgacgaccucaccgccgccaucaacaagggcauccucgucaccgucaaccccaucgccuccaccaacgacgacgagguccucaucgaggucaacccccccuucggcgacuccuacaucaucgucggccgcggcgacucccgccucaccuaccaguggcacaaggagggcuccuccaucggcaagcucuucacccagaccaugaagggcgucgagcgccucgccgucaugggcgacaccgccugggacuucuccuccgccggcggcuucuucaccuccgucggcaagggcauccacaccgucuucggcuccgccuuccagggccucuucggcggccucaacuggaucaccaaggucaucaugggcgccguccucaucugggucggcaucaacacccgcaacaugaccauguccauguccaugauccucgucggcgucaucaugauguuccucucccucggcgucggcgccugaggacuaguuauaagacugacuagcccgaugggccucccaacgggcccuccuccccuccuugcaccgagauuaauaaaaaaaaaaaaaaaaaaaaaaaaaaaaaaaaaaaaaaaaaaaaaaaaaaaaaaaaaaaaaaaaugcaucccccccccccccccccccccccccccccccaaaggcucuuuucagagccaccagaauu

SEQ ID NO: 1216 - RNA, 2293 nt, Artificial Sequence
  mRNA product Design i-3 comprising derived and/or modified sequence from YFV__NC_002031.1__SSjev-prME-XX (polyprotein: aa122-788) (opt2)
gggagaaagcuuaccaugggcaagcgcuccgccggcuccaucauguggcucgccucccucgccgucgucaucgccugcgccggcgccgucacccucguccgcaagaaccgcuggcuccuccucaacgucaccuccgaggaccucggcaagaccuucuccgucggcaccggcaacugcaccaccaacauccucgaggccaaguacuggugccccgacuccauggaguacaacugccccaaccucuccccccgcgaggagcccgacgacaucgacugcuggugcuacggcgucgagaacguccgcgucgccuacggcaagugcgacuccgccggccgcucccgccgcucccgccgcgccaucgaccuccccacccacgagaaccacggccucaagacccgccaggagaaguggaugaccggccgcaugggcgagcgccagcuccagaagaucgagcgcugguucguccgcaaccccuucuucgccgucaccgcccucaccaucgccuaccucgucggcuccaacaugacccagcgcgucgucaucgcccuccucguccucgccgucggccccgccuacuccgcccacugcaucggcaucaccgaccgcgacuucaucgagggcguccacggcggcaccugggucuccgccacccucgagcaggacaagugcgucaccgucauggcccccgacaagcccucccucgacaucucccucgagaccgucgccaucgaccgccccgccgagguccgcaaggucugcuacaacgccguccucacccacgucaagaucaacgacaagugccccuccaccggcgaggcccaccucgccgaggagaacgagggcgacaacgccugcaagcgcaccuacuccgaccgcggcuggggcaacggcugcggccucuucggcaagggcuccaucgucgccugcgccaaguucaccugcgccaaguccaugucccucuucgaggucgaccagaccaagauccaguacgucauccgcgcccagcuccacgucggcgccaagcaggagaacuggaacaccgacaucaagacccucaaguucgacgcccucuccggcucccaggaggucgaguucaucggcuacggcaaggccacccucgagugccagguccagaccgccgucgacuucggcaacuccuacaucgccgagauggagaccgaguccuggaucgucgaccgccagugggcccaggaccucacccuccccuggcaguccggcuccggcggcgucuggcgcgagaugcaccaccucgucgaguucgagcccccccacgccgccaccauccgcguccucgcccucggcaaccaggagggcucccucaagaccgcccucaccggcgccaugcgcgucaccaaggacaccaacgacaacaaccucuacaagcuccacggcggccacgucuccugccgcgucaagcucuccgcccucacccucaagggcaccuccuacaagaucugcaccgacaagauguucuucgucaagaaccccaccgacaccggccacggcaccgucgucaugcaggucaaggucuccaagggcgcccccugccgcauccccgucaucgucgccgacgaccucaccgccgccaucaacaagggcauccucgucaccgucaaccccaucgccuccaccaacgacgacgagguccucaucgaggucaacccccccuucggcgacuccuacaucaucgucggccgcggcgacucccgccucaccuaccaguggcacaaggagggcuccuccaucggcaagcucuucacccagaccaugaagggcgucgagcgccucgccgucaugggcgacaccgccugggacuucuccuccgccggcggcuucuucaccuccgucggcaagggcauccacaccgucuucggcuccgccuuccagggccucuucggcggccucaacuggaucaccaaggucaucaugggcgccguccucaucugggucggcaucaacacccgcaacaugaccauguccauguccaugauccucgucggcgucaucaugauguuccucucccucggcgucggcgccgaccagggcugcgccaucaacuucggcaagugaggacuaguuauaagacugacuagcccgaugggccucccaacgggcccuccuccccuccuugcaccgagauuaauaaaaaaaaaaaaaaaaaaaaaaaaaaaaaaaaaaaaaaaaaaaaaaaaaaaaaaaaaaaaaaaaugcaucccccccccccccccccccccccccccccccaaaggcucuuuucagagccaccagaauu

SEQ ID NO: 1217 - RNA, 2263 nt, Artificial Sequence
  mRNA product Design i-3 comprising derived and/or modified sequence from YFV__NC_002031.1__SSjev-prME (polyprotein: aa122-778) (opt2)
gggagaaagcuuaccaugggcaagcgcuccgccggcuccaucauguggcucgccucccucgccgucgucaucgccugcgccggcgccgucacccucguccgcaagaaccgcuggcuccuccucaacgucaccuccgaggaccucggcaagaccuucuccgucggcaccggcaacugcaccaccaacauccucgaggccaaguacuggugccccgacuccauggaguacaacugccccaaccucuccccccgcgaggagcccgacgacaucgacugcuggugcuacggcgucgagaacguccgcgucgccuacggcaagugcgacuccgccggccgcucccgccgcucccgccgcgccaucgaccuccccacccacgagaaccacggccucaagacccgccaggagaaguggaugaccggccgcaugggcgagcgccagcuccagaagaucgagcgcugguucguccgcaaccccuucuucgccgucaccgcccucaccaucgccuaccucgucggcuccaacaugacccagcgcgucgucaucgcccuccucguccucgccgucggccccgccuacuccgcccacugcaucggcaucaccgaccgcgacuucaucgagggcguccacggcggcaccugggucuccgccacccucgagcaggacaagugcgucaccgucauggcccccgacaagcccucccucgacaucucccucgagaccgucgccaucgaccgccccgccgagguccgcaaggucugcuacaacgccguccucacccacgucaagaucaacgacaagugccccuccaccggcgaggcccaccucgccgaggagaacgagggcgacaacgccugcaagcgcaccuacuccgaccgcggcuggggcaacggcugcggccucuucggcaagggcuccaucgucgccugcgccaaguucaccugcgccaaguccaugucccucuucgaggucgaccagaccaagauccaguacgucauccgcgcccagcuccacgucggcgccaagcaggagaacuggaacaccgacaucaagacccucaaguucgacgcccucuccggcucccaggaggucgaguucaucggcuacggcaaggccacccucgagugccagguccagaccgccgucgacuucggcaacuccuacaucgccgagauggagaccgaguccuggaucgucgaccgccagugggcccaggaccucacccuccccuggcaguccggcuccggcggcgucuggcgcgagaugcaccaccucgucgaguucgagcccccccacgccgccaccauccgcguccucgcccucggcaaccaggagggcucccucaagaccgcccucaccggcgccaugcgcgucaccaaggacaccaacgacaacaaccucuacaagcuccacggcggccacgucuccugccgcgucaagcucuccgcccucacccucaagggcaccuccuacaagaucugcaccgacaagauguucuucgucaagaaccccaccgacaccggccacggcaccgucgucaugcaggucaaggucuccaagggcgcccccugccgcauccccgucaucgucgccgacgaccucaccgccgccaucaacaagggcauccucgucaccgucaaccccaucgccuccaccaacgacgacgagguccucaucgaggucaacccccccuucggcgacuccuacaucaucgucggccgcggcgacucccgccucaccuaccaguggcacaaggagggcuccuccaucggcaagcucuucacccagaccaugaagggcgucgagcgccucgccgucaugggcgacaccgccugggacuucuccuccgccggcggcuucuucaccuccgucggcaagggcauccacaccgucuucggcuccgccuuccagggccucuucggcggccucaacuggaucaccaaggucaucaugggcgccguccucaucugggucggcaucaacacccgcaacaugaccauguccauguccaugauccucgucggcgucaucaugauguuccucucccucggcgucggcgccugaggacuaguuauaagacugacuagcccgaugggccucccaacgggcccuccuccccuccuugcaccgagauuaauaaaaaaaaaaaaaaaaaaaaaaaaaaaaaaaaaaaaaaaaaaaaaaaaaaaaaaaaaaaaaaaaugcaucccccccccccccccccccccccccccccccaaaggcucuuuucagagccaccagaauu

SEQ ID NO: 1218 - RNA, 2311 nt, Artificial Sequence
  mRNA product Design i-3 comprising derived and/or modified sequence from YFV__NC_002031.1__X-SS-prME-XX (polyprotein: aa92-788) (opt3)
gggagaaagcuuaccaugagaggccugagcuccaggaagcggcgcucucacgacgugcucaccguccaguuccuuauccuggggauguuguuaaugacaggagguguuacucuggugcguaaaaaccgauggcuacuccugaauguaacgucagaggaucuuggcaagaccuuuaguguggggacaggaaacugcacuaccaauauucuggaagccaaauacuggugucccgacagcauggaguauaacugcccuaauuuguccccaagagaggaaccggaugacauagauuguuggugcuacggcgucgaaaacgugaggguugcuuaugguaagugugacucugcagggcggucgcgcagaucaaggcgggccaucgaucuccccacacaugagaaucacggacugaaaacccgccaagagaaguggaugacuggccgaaugggcgaaagacagcugcagaagauugagaggugguucgugcggaacccuuucuucgcggucacagcucucaccaucgccuacuuaguggggagcaauaugacgcagcguguaguuauugcacugcuuguguuggccgucggaccagcuuauagugcacauugcaucgguauaacugaccgcgauuuuaucgaaggcgugcacgggggaaccuggguguccgccacacuggagcaagacaaaugugucacuguuauggcucccgauaagccuucucuagacauuagccucgagaccguggccaucgauagaccagcggaaguaaggaaagugugcuacaacgcaguccugacacaugugaagauuaaugacaaaugucccuccaccggcgaggcccaccuugcugaagagaacgaaggugacaaugccugcaagcggacguauucagaucgaggguggggaaacggcuguggccuguucgggaagggaaguaucguugcaugcgcuaaauuuacuugcgccaagagcaugucuuuguucgagguggaccagacaaaaauacaguacgucauucgcgcgcagcuccacgugggugccaagcaagagaauuggaacaccgauaucaaaacucugaaguuugacgcauuauccggcucacaggaaguagaguucauuggguacggaaaagcuacacuggaaugucagguucagaccgccguggauuuuggcaacagcuauaucgcugagauggaaacggagaguuggaucgucgacagacaaugggcccaggaucucacccuuccuuggcagucugguuccgggggcguguggagggagaugcaucaccuggucgaauuugagccaccgcaugcagccacaauucggguguuggcucuaggaaaucaagaaggcagccugaagacugcgcucaccggggcaaugcgcguuacaaaggacacuaacgauaauaaccuguacaaacuucacggaggucacgugucgugcagaguaaagcugucugccuugacccucaaaggcacauccuauaagauauguaccgacaaaauguuuuucgucaagaaucccacugauacggggcauggaacagugguuaugcaagugaaggucucaaaaggcgcuccuugcaggaucccagugauuguagccgacgaccugaccgcagccaucaacaaggguauauuagugacuguuaaucccauugcuaguaccaacgaugacgagguccugaucgaagugaauccuccauucggggauagcuacaucauugugggccguggagacucccggcuaacauaucaguggcacaaagagggcucuagcaucgggaagcucuuuacccagacuaugaaaggagucgagcgacuggccguuaugggugauacagcaugggacuucucaagugcgggcggguuuuucacguccgugggaaagggcauucauaccguguuugguagcgcuuuccaggggcuuuuuggcggauugaacuggauaacuaagguaaucaugggcgccguccugauuuggguggggaucaauacaagaaacaugaccaugucuaugucaaugauccucguuggagugauuaugauguuccugagucuuggcgucggugcagaucaggggugugccauaaauuuuggaaaaugaggacuaguuauaagacugacuagcccgaugggccucccaacgggcccuccuccccuccuugcaccgagauuaauaaaaaaaaaaaaaaaaaaaaaaaaaaaaaaaaaaaaaaaaaaaaaaaaaaaaaaaaaaaaaaaaugcaucccccccccccccccccccccccccccccccaaaggcucuuuucagagccaccagaauu

SEQ ID NO: 1219 - RNA, 2248 nt, Artificial Sequence
  mRNA product Design i-3 comprising derived and/or modified sequence from YFV__NC_002031.1__SS-prME (polyprotein: M,aa104-778) (opt3)
gggagaaagcuuaccauggacgugcugaccguccaguuccucauccuuggcaugcuguugaugacagggggaguuacuuuagugagaaagaacagguggcugcuacucaauguaacgagcgaggaucuggguaaaaccuuuuccgugggcacagggaacugcacuaccaauauucuugaagccaaguacuggugucccgacucuauggaguauaacugcccuaaucugucaccacgggaggaaccggaugacauagauuguuggugcuacggagucgaaaacgugcgcguugcuuauggcaaaugugacagugcaggucgaagccguagauccaggcgggccaucgauuugcccacacacgagaaucaugggcucaagacccgccaagagaaauggaugacuggaagaaugggcgaaaggcagcugcagaagauugagcggugguucgugcgcaacccuuucuucgcggucacagcucugaccaucgccuaccucgugggcucuaauaugacgcagcgaguaguuauugcauuacuggugcuugccgucgggccagcuuauucggcacacugcaucggaauaacugacagagauuuuaucgaaggugugcauggcgggaccugggugucagccacauuggagcaagacaagugugucacuguuauggcucccgauaaaccuagccuggacauuagucuagagaccguggccaucgauaggccagcggaaguacggaaggugugcuacaacgcaguccucacacacgugaaaauuaaugacaagugucccuccaccggagaggcccaucuggcugaagagaacgaaggcgacaaugccugcaaacguacguauucugaucgcgguugggggaacggauguggccuuuucggcaaggggagcaucguugcaugcgcuaaguuuacuugcgccaaauccaugucacuguucgagguggaccagacaaagauacaguacgucauuagagcgcaguugcacgugggagccaaacaagagaauuggaacaccgauaucaagacucucaaauuugacgcacugagugguagccaggaaguagaguucauuggcuacgggaaggcuacauuagaaugucagguucagaccgccguggauuuuggaaacucuuauaucgcugagauggaaacggaguccuggaucgucgacaggcaaugggcccaggaucugacccucccuuggcagucaggcagcggugggguguggcgggagaugcaccaucuugucgaauuugagccaccgcacgcagccacaauucgagugcuggcuuugggcaaucaagaaggaagucuaaaaacugcgcugaccggcgcaaugcgcguuacaaaggacacuaacgauaauaaccucuacaagcugcaugggggacacgugucuugcagaguaaaacuuuccgcccugaccuugaaggguacaagcuauaaaauauguaccgacaagauguuuuucgucaaaaaucccacugauacgggccacgggacagugguuaugcaagugaaggucucgaagggagcuccuugcaggaucccagugauuguagccgacgaccucaccgcagccaucaacaaaggcauacuggugacuguuaaucccauugcuucuaccaacgaugacgaggucuuaaucgaagugaauccuccauucggugauuccuacaucauuguggggcggggcgacucacgccugacauaucaguggcauaaggagggaaguagcaucggcaaacuauuuacccagacuaugaagggggucgagagacucgccguuaugggagauacagcaugggacuucuccucugcggguggcuuuuucacgagcguggggaaaggcauucacaccguguuuggaucagcuuuccagggucuguuugggggccuuaacuggauaacuaagguaaucaugggagccgucuugauuugggugggcaucaauacaaggaacaugaccaugaguauguccaugauccugguuggggugauuaugauguuccucagccugggagucggcgcaugaggacuaguuauaagacugacuagcccgaugggccucccaacgggcccuccuccccuccuugcaccgagauuaauaaaaaaaaaaaaaaaaaaaaaaaaaaaaaaaaaaaaaaaaaaaaaaaaaaaaaaaaaaaaaaaaugcaucccccccccccccccccccccccccccccccaaaggcucuuuucagagccaccagaauu

SEQ ID NO: 1220 - RNA, 2275 nt, Artificial Sequence
  mRNA product Design i-3 comprising derived and/or modified sequence from YFV__NC_002031.1__SSIgE-prME-XX (polyprotein: aa122-788) (opt3)
gggagaaagcuuaccauggacuggaccuggauccuguuccucguggccgcugcaacaagaguccacagcguuacucuggugcguaaaaaccgauggcuacuccugaauguaacgucagaggaucuuggcaagaccuuuaguguggggacaggaaacugcacuaccaauauucuggaagccaaauacuggugucccgacagcauggaguauaacugcccuaauuuguccccaagagaggaaccggaugacauagauuguuggugcuacggcgucgaaaacgugaggguugcuuaugguaagugugacucugcagggcggucgcgcagaucaaggcgggccaucgaucuccccacacaugagaaucacggacugaaaacccgccaagagaaguggaugacuggccgaaugggcgaaagacagcugcagaagauugagaggugguucgugcggaacccuuucuucgcggucacagcucucaccaucgccuacuuaguggggagcaauaugacgcagcguguaguuauugcacugcuuguguuggccgucggaccagcuuauagugcacauugcaucgguauaacugaccgcgauuuuaucgaaggcgugcacgggggaaccuggguguccgccacacuggagcaagacaaaugugucacuguuauggcucccgauaagccuucucuagacauuagccucgagaccguggccaucgauagaccagcggaaguaaggaaagugugcuacaacgcaguccugacacaugugaagauuaaugacaaaugucccuccaccggcgaggcccaccuugcugaagagaacgaaggugacaaugccugcaagcggacguauucagaucgaggguggggaaacggcuguggccuguucgggaagggaaguaucguugcaugcgcuaaauuuacuugcgccaagagcaugucuuuguucgagguggaccagacaaaaauacaguacgucauucgcgcgcagcuccacgugggugccaagcaagagaauuggaacaccgauaucaaaacucugaaguuugacgcauuauccggcucacaggaaguagaguucauuggguacggaaaagcuacacuggaaugucagguucagaccgccguggauuuuggcaacagcuauaucgcugagauggaaacggagaguuggaucgucgacagacaaugggcccaggaucucacccuuccuuggcagucugguuccgggggcguguggagggagaugcaucaccuggucgaauuugagccaccgcaugcagccacaauucggguguuggcucuaggaaaucaagaaggcagccugaagacugcgcucaccggggcaaugcgcguuacaaaggacacuaacgauaauaaccuguacaaacuucacggaggucacgugucgugcagaguaaagcugucugccuugacccucaaaggcacauccuauaagauauguaccgacaaaauguuuuucgucaagaaucccacugauacggggcauggaacagugguuaugcaagugaaggucucaaaaggcgcuccuugcaggaucccagugauuguagccgacgaccugaccgcagccaucaacaaggguauauuagugacuguuaaucccauugcuaguaccaacgaugacgagguccugaucgaagugaauccuccauucggggauagcuacaucauugugggccguggagacucccggcuaacauaucaguggcacaaagagggcucuagcaucgggaagcucuuuacccagacuaugaaaggagucgagcgacuggccguuaugggugauacagcaugggacuucucaagugcgggcggguuuuucacguccgugggaaagggcauucauaccguguuugguagcgcuuuccaggggcuuuuuggcggauugaacuggauaacuaagguaaucaugggcgccguccugauuuggguggggaucaauacaagaaacaugaccaugucuaugucaaugauccucguuggagugauuaugauguuccugagucuuggcgucggugcagaucaggggugugccauaaauuuuggaaaaugaggacuaguuauaagacugacuagcccgaugggccucccaacgggcccuccuccccuccuugcaccgagauuaauaaaaaaaaaaaaaaaaaaaaaaaaaaaaaaaaaaaaaaaaaaaaaaaaaaaaaaaaaaaaaaaaugcaucccccccccccccccccccccccccccccccaaaggcucuuuucagagccaccagaauu

SEQ ID NO: 1221 - RNA, 2245 nt, Artificial Sequence
  mRNA product Design i-3 comprising derived and/or modified sequence from YFV__NC_002031.1__SSIgE-prME (polyprotein: aa122-778) (opt3)
gggagaaagcuuaccauggacuggaccuggauccuguuccucguggccgcugcaacaagaguccacagcgugacccuggucagaaagaacagguggcuccuucugaauguuacaagcgaggacuugggcaaaacuuucuccguggggacgggaaacugcaccacaaauaucuuagaagccaaguacuggugucccgauucuauggaguauaacugcccuaaucugucaccacgggaggaaccggacgauauugacuguuggugcuacgguguagaaaacgugcgcgucgcuuauggcaaaugugauagugcagggcgaagccguagauccaggcgggccauagaccuacccacucacgagaaucauggacucaagacccgccaggagaaauggaugacaggcagaaugggugaaaggcaacugcagaagaucgagcggugguuugugcgcaacccuuucuuugcgguuaccgcucuuacuauugccuaccugguggggucuaauaugacacagcgagucgugaucgcauugcucguacuggccguuggaccagcuuauucggcacacugcauuggcaucaccgauagagacuucauagaaggcgugcaugggggaacgugggucucagccacucuggagcaggauaagugugugaccgugauggcucccgacaaaccuagccucgauaucaguuuagagacagucgccauugacaggccagcggaaguucggaaggugugcuacaacgcaguacugacucacgugaaaaucaaugauaagugucccuccaccggugaggcccaucuugcugaagagaacgaaggcgacaaugccugcaaacguacauauucugaccgcggguggggaaacggcugugguuuguuugggaagggaagcauugucgcaugcgcuaaguuuaccugcgccaaauccaugucacuguucgagguggaucaaacgaagauccaguacguuauaagagcgcagcuacacgugggcgccaaacaggagaauuggaacacugacauuaagacacucaaauucgaugcacugaguggcagccaagaagucgaguuuaucggguacggaaaggcuacccuugaaugucaggugcagacugccguagacuucgguaacucuuauauugcugagauggaaacagaguccuggaucguugauaggcagugggcccaagaccugaccuugccuuggcagucaggcagcgggggaguguggcgggagaugcaccaucucgucgaauuugagccaccgcacgcagccacgauccgagugcuggcuuuaggcaaucaggaagguagucugaaaaccgcgcucacaggggcaaugcgcgucacuaaggauaccaacgacaauaaccuuuacaagcugcauggcggacacgugucuugcagaguuaaauuguccgcccuaacacugaagggcacuagcuauaaaauuuguaccgauaagauguucuuugugaaaaaucccacagacaccgggcacggaacuguagucaugcaagugaagguuucgaagggugcuccuugcaggauaccagugaucgucgccgaugaccucacggcagccauuaacaaaggcauccuggugacaguaaaucccauagcuucuaccaacgacgaugaggugcuuauugaaguuaauccuccauucggggacuccuacaucaucgucggacggggcgauucacgccugacuuaucaguggcauaaggaggguaguagcauugggaaauuguucacccagacaaugaagggcguggagagacucgccgugaugggagacaccgcaugggauuuuuccucugcgggcggguucuuuacuagcgucggaaaagguauccacacaguuuucggcucagcuuuucaggggcuguucggaggcuuaaacuggauuacgaaggugauaaugggugccgugcugaucuggguagggauuaauaccaggaacaugacuaugaguauguccaugauccuagucggcgugaucaugauguuucucagccugggaguuggcgcaugaggacuaguuauaagacugacuagcccgaugggccucccaacgggcccuccuccccuccuugcaccgagauuaauaaaaaaaaaaaaaaaaaaaaaaaaaaaaaaaaaaaaaaaaaaaaaaaaaaaaaaaaaaaaaaaaugcaucccccccccccccccccccccccccccccccaaaggcucuuuucagagccaccagaauu

SEQ ID NO: 1222 - RNA, 2293 nt, Artificial Sequence
  mRNA product Design i-3 comprising derived and/or modified sequence from YFV__NC_002031.1__SSjev-prME-XX (polyprotein: aa122-788) (opt3)
gggagaaagcuuaccaugggcaagagaagcgccggguccaucauguggcuggcuucucucgcaguggucauugccugcgcgggagcuguuacucuggugcguaaaaaccgauggcuacuccugaauguaacgucagaggaucuuggcaagaccuuuaguguggggacaggaaacugcacuaccaauauucuggaagccaaauacuggugucccgacagcauggaguauaacugcccuaauuuguccccaagagaggaaccggaugacauagauuguuggugcuacggcgucgaaaacgugaggguugcuuaugguaagugugacucugcagggcggucgcgcagaucaaggcgggccaucgaucuccccacacaugagaaucacggacugaaaacccgccaagagaaguggaugacuggccgaaugggcgaaagacagcugcagaagauugagaggugguucgugcggaacccuuucuucgcggucacagcucucaccaucgccuacuuaguggggagcaauaugacgcagcguguaguuauugcacugcuuguguuggccgucggaccagcuuauagugcacauugcaucgguauaacugaccgcgauuuuaucgaaggcgugcacgggggaaccuggguguccgccacacuggagcaagacaaaugugucacuguuauggcucccgauaagccuucucuagacauuagccucgagaccguggccaucgauagaccagcggaaguaaggaaagugugcuacaacgcaguccugacacaugugaagauuaaugacaaaugucccuccaccggcgaggcccaccuugcugaagagaacgaaggugacaaugccugcaagcggacguauucagaucgaggguggggaaacggcuguggccuguucgggaagggaaguaucguugcaugcgcuaaauuuacuugcgccaagagcaugucuuuguucgagguggaccagacaaaaauacaguacgucauucgcgcgcagcuccacgugggugccaagcaagagaauuggaacaccgauaucaaaacucugaaguuugacgcauuauccggcucacaggaaguagaguucauuggguacggaaaagcuacacuggaaugucagguucagaccgccguggauuuuggcaacagcuauaucgcugagauggaaacggagaguuggaucgucgacagacaaugggcccaggaucucacccuuccuuggcagucugguuccgggggcguguggagggagaugcaucaccuggucgaauuugagccaccgcaugcagccacaauucggguguuggcucuaggaaaucaagaaggcagccugaagacugcgcucaccggggcaaugcgcguuacaaaggacacuaacgauaauaaccuguacaaacuucacggaggucacgugucgugcagaguaaagcugucugccuugacccucaaaggcacauccuauaagauauguaccgacaaaauguuuuucgucaagaaucccacugauacggggcauggaacagugguuaugcaagugaaggucucaaaaggcgcuccuugcaggaucccagugauuguagccgacgaccugaccgcagccaucaacaaggguauauuagugacuguuaaucccauugcuaguaccaacgaugacgagguccugaucgaagugaauccuccauucggggauagcuacaucauugugggccguggagacucccggcuaacauaucaguggcacaaagagggcucuagcaucgggaagcucuuuacccagacuaugaaaggagucgagcgacuggccguuaugggugauacagcaugggacuucucaagugcgggcggguuuuucacguccgugggaaagggcauucauaccguguuugguagcgcuuuccaggggcuuuuuggcggauugaacuggauaacuaagguaaucaugggcgccguccugauuuggguggggaucaauacaagaaacaugaccaugucuaugucaaugauccucguuggagugauuaugauguuccugagucuuggcgucggugcagaucaggggugugccauaaauuuuggaaaaugaggacuaguuauaagacugacuagcccgaugggccucccaacgggcccuccuccccuccuugcaccgagauuaauaaaaaaaaaaaaaaaaaaaaaaaaaaaaaaaaaaaaaaaaaaaaaaaaaaaaaaaaaaaaaaaaugcaucccccccccccccccccccccccccccccccaaaggcucuuuucagagccaccagaauu

SEQ ID NO: 1223 - RNA, 2263 nt, Artificial Sequence
  mRNA product Design i-3 comprising derived and/or modified sequence from YFV__NC_002031.1__SSjev-prME (polyprotein: aa122-778) (opt3)
gggagaaagcuuaccaugggcaagagaagcgccggguccaucauguggcuggcuucucucgcaguggucauugccugcgcgggagcugugacccuggucagaaagaacagguggcuccuucugaauguuacaagcgaggacuugggcaaaacuuucuccguggggacgggaaacugcaccacaaauaucuuagaagccaaguacuggugucccgauucuauggaguauaacugcccuaaucugucaccacgggaggaaccggacgauauugacuguuggugcuacgguguagaaaacgugcgcgucgcuuauggcaaaugugauagugcagggcgaagccguagauccaggcgggccauagaccuacccacucacgagaaucauggacucaagacccgccaggagaaauggaugacaggcagaaugggugaaaggcaacugcagaagaucgagcggugguuugugcgcaacccuuucuuugcgguuaccgcucuuacuauugccuaccugguggggucuaauaugacacagcgagucgugaucgcauugcucguacuggccguuggaccagcuuauucggcacacugcauuggcaucaccgauagagacuucauagaaggcgugcaugggggaacgugggucucagccacucuggagcaggauaagugugugaccgugauggcucccgacaaaccuagccucgauaucaguuuagagacagucgccauugacaggccagcggaaguucggaaggugugcuacaacgcaguacugacucacgugaaaaucaaugauaagugucccuccaccggugaggcccaucuugcugaagagaacgaaggcgacaaugccugcaaacguacauauucugaccgcggguggggaaacggcugugguuuguuugggaagggaagcauugucgcaugcgcuaaguuuaccugcgccaaauccaugucacuguucgagguggaucaaacgaagauccaguacguuauaagagcgcagcuacacgugggcgccaaacaggagaauuggaacacugacauuaagacacucaaauucgaugcacugaguggcagccaagaagucgaguuuaucggguacggaaaggcuacccuugaaugucaggugcagacugccguagacuucgguaacucuuauauugcugagauggaaacagaguccuggaucguugauaggcagugggcccaagaccugaccuugccuuggcagucaggcagcgggggaguguggcgggagaugcaccaucucgucgaauuugagccaccgcacgcagccacgauccgagugcuggcuuuaggcaaucaggaagguagucugaaaaccgcgcucacaggggcaaugcgcgucacuaaggauaccaacgacaauaaccuuuacaagcugcauggcggacacgugucuugcagaguuaaauuguccgcccuaacacugaagggcacuagcuauaaaauuuguaccgauaagauguucuuugugaaaaaucccacagacaccgggcacggaacuguagucaugcaagugaagguuucgaagggugcuccuugcaggauaccagugaucgucgccgaugaccucacggcagccauuaacaaaggcauccuggugacaguaaaucccauagcuucuaccaacgacgaugaggugcuuauugaaguuaauccuccauucggggacuccuacaucaucgucggacggggcgauucacgccugacuuaucaguggcauaaggaggguaguagcauugggaaauuguucacccagacaaugaagggcguggagagacucgccgugaugggagacaccgcaugggauuuuuccucugcgggcggguucuuuacuagcgucggaaaagguauccacacaguuuucggcucagcuuuucaggggcuguucggaggcuuaaacuggauuacgaaggugauaaugggugccgugcugaucuggguagggauuaauaccaggaacaugacuaugaguauguccaugauccuagucggcgugaucaugauguuucucagccugggaguuggcgcaugaggacuaguuauaagacugacuagcccgaugggccucccaacgggcccuccuccccuccuugcaccgagauuaauaaaaaaaaaaaaaaaaaaaaaaaaaaaaaaaaaaaaaaaaaaaaaaaaaaaaaaaaaaaaaaaaugcaucccccccccccccccccccccccccccccccaaaggcucuuuucagagccaccagaauu

SEQ ID NO: 1224 - RNA, 2311 nt, Artificial Sequence
  mRNA product Design i-3 comprising derived and/or modified sequence from YFV__NC_002031.1__X-SS-prME-XX (polyprotein: aa92-788) (opt4) R7251
gggagaaagcuuaccaugagaggccugagcagcagaaagagaagaagccacgacgugcugaccgugcaguuccugauccugggcaugcugcugaugaccggcggcgugacccuggugagaaagaacagauggcugcugcugaacgugaccagcgaggaccugggcaagaccuucagcgugggcaccggcaacugcaccaccaacauccuggaggccaaguacuggugccccgacagcauggaguacaacugccccaaccugagccccagagaggagcccgacgacaucgacugcuggugcuacggcguggagaacgugagaguggccuacggcaagugcgacagcgccggcagaagcagaagaagcagaagagccaucgaccugcccacccacgagaaccacggccugaagaccagacaggagaaguggaugaccggcagaaugggcgagagacagcugcagaagaucgagagaugguucgugagaaaccccuucuucgccgugaccgcccugaccaucgccuaccuggugggcagcaacaugacccagagaguggugaucgcccugcuggugcuggccgugggccccgccuacagcgcccacugcaucggcaucaccgacagagacuucaucgagggcgugcacggcggcaccugggugagcgccacccuggagcaggacaagugcgugaccgugauggcccccgacaagcccagccuggacaucagccuggagaccguggccaucgacagacccgccgaggugagaaaggugugcuacaacgccgugcugacccacgugaagaucaacgacaagugccccagcaccggcgaggcccaccuggccgaggagaacgagggcgacaacgccugcaagagaaccuacagcgacagaggcuggggcaacggcugcggccuguucggcaagggcagcaucguggccugcgccaaguucaccugcgccaagagcaugagccuguucgagguggaccagaccaagauccaguacgugaucagagcccagcugcacgugggcgccaagcaggagaacuggaacaccgacaucaagacccugaaguucgacgcccugagcggcagccaggagguggaguucaucggcuacggcaaggccacccuggagugccaggugcagaccgccguggacuucggcaacagcuacaucgccgagauggagaccgagagcuggaucguggacagacagugggcccaggaccugacccugcccuggcagagcggcagcggcggcguguggagagagaugcaccaccugguggaguucgagcccccccacgccgccaccaucagagugcuggcccugggcaaccaggagggcagccugaagaccgcccugaccggcgccaugagagugaccaaggacaccaacgacaacaaccuguacaagcugcacggcggccacgugagcugcagagugaagcugagcgcccugacccugaagggcaccagcuacaagaucugcaccgacaagauguucuucgugaagaaccccaccgacaccggccacggcaccguggugaugcaggugaaggugagcaagggcgcccccugcagaauccccgugaucguggccgacgaccugaccgccgccaucaacaagggcauccuggugaccgugaaccccaucgccagcaccaacgacgacgaggugcugaucgaggugaacccccccuucggcgacagcuacaucaucgugggcagaggcgacagcagacugaccuaccaguggcacaaggagggcagcagcaucggcaagcuguucacccagaccaugaagggcguggagagacuggccgugaugggcgacaccgccugggacuucagcagcgccggcggcuucuucaccagcgugggcaagggcauccacaccguguucggcagcgccuuccagggccuguucggcggccugaacuggaucaccaaggugaucaugggcgccgugcugaucugggugggcaucaacaccagaaacaugaccaugagcaugagcaugauccuggugggcgugaucaugauguuccugagccugggcgugggcgccgaccagggcugcgccaucaacuucggcaagugaggacuaguuauaagacugacuagcccgaugggccucccaacgggcccuccuccccuccuugcaccgagauuaauaaaaaaaaaaaaaaaaaaaaaaaaaaaaaaaaaaaaaaaaaaaaaaaaaaaaaaaaaaaaaaaaugcaucccccccccccccccccccccccccccccccaaaggcucuuuucagagccaccagaauu

SEQ ID NO: 1225 - RNA, 2248 nt, Artificial Sequence
  mRNA product Design i-3 comprising derived and/or modified sequence from YFV__NC_002031.1__SS-prME (polyprotein: M,aa104-778) (opt4)
gggagaaagcuuaccauggacgugcugaccgugcaguuccugauccugggcaugcugcugaugaccggcggcgugacccuggugagaaagaacagauggcugcugcugaacgugaccagcgaggaccugggcaagaccuucagcgugggcaccggcaacugcaccaccaacauccuggaggccaaguacuggugccccgacagcauggaguacaacugccccaaccugagccccagagaggagcccgacgacaucgacugcuggugcuacggcguggagaacgugagaguggccuacggcaagugcgacagcgccggcagaagcagaagaagcagaagagccaucgaccugcccacccacgagaaccacggccugaagaccagacaggagaaguggaugaccggcagaaugggcgagagacagcugcagaagaucgagagaugguucgugagaaaccccuucuucgccgugaccgcccugaccaucgccuaccuggugggcagcaacaugacccagagaguggugaucgcccugcuggugcuggccgugggccccgccuacagcgcccacugcaucggcaucaccgacagagacuucaucgagggcgugcacggcggcaccugggugagcgccacccuggagcaggacaagugcgugaccgugauggcccccgacaagcccagccuggacaucagccuggagaccguggccaucgacagacccgccgaggugagaaaggugugcuacaacgccgugcugacccacgugaagaucaacgacaagugccccagcaccggcgaggcccaccuggccgaggagaacgagggcgacaacgccugcaagagaaccuacagcgacagaggcuggggcaacggcugcggccuguucggcaagggcagcaucguggccugcgccaaguucaccugcgccaagagcaugagccuguucgagguggaccagaccaagauccaguacgugaucagagcccagcugcacgugggcgccaagcaggagaacuggaacaccgacaucaagacccugaaguucgacgcccugagcggcagccaggagguggaguucaucggcuacggcaaggccacccuggagugccaggugcagaccgccguggacuucggcaacagcuacaucgccgagauggagaccgagagcuggaucguggacagacagugggcccaggaccugacccugcccuggcagagcggcagcggcggcguguggagagagaugcaccaccugguggaguucgagcccccccacgccgccaccaucagagugcuggcccugggcaaccaggagggcagccugaagaccgcccugaccggcgccaugagagugaccaaggacaccaacgacaacaaccuguacaagcugcacggcggccacgugagcugcagagugaagcugagcgcccugacccugaagggcaccagcuacaagaucugcaccgacaagauguucuucgugaagaaccccaccgacaccggccacggcaccguggugaugcaggugaaggugagcaagggcgcccccugcagaauccccgugaucguggccgacgaccugaccgccgccaucaacaagggcauccuggugaccgugaaccccaucgccagcaccaacgacgacgaggugcugaucgaggugaacccccccuucggcgacagcuacaucaucgugggcagaggcgacagcagacugaccuaccaguggcacaaggagggcagcagcaucggcaagcuguucacccagaccaugaagggcguggagagacuggccgugaugggcgacaccgccugggacuucagcagcgccggcggcuucuucaccagcgugggcaagggcauccacaccguguucggcagcgccuuccagggccuguucggcggccugaacuggaucaccaaggugaucaugggcgccgugcugaucugggugggcaucaacaccagaaacaugaccaugagcaugagcaugauccuggugggcgugaucaugauguuccugagccugggcgugggcgccugaggacuaguuauaagacugacuagcccgaugggccucccaacgggcccuccuccccuccuugcaccgagauuaauaaaaaaaaaaaaaaaaaaaaaaaaaaaaaaaaaaaaaaaaaaaaaaaaaaaaaaaaaaaaaaaaugcaucccccccccccccccccccccccccccccccaaaggcucuuuucagagccaccagaauu

SEQ ID NO: 1226 - RNA, 2275 nt, Artificial Sequence
  mRNA product Design i-3 comprising derived and/or modified sequence from YFV__NC_002031.1__SSIgE-prME-XX (polyprotein: aa122-788) (opt4)
gggagaaagcuuaccauggacuggaccuggauccuguuccugguggccgccgccaccagagugcacagcgugacccuggugagaaagaacagauggcugcugcugaacgugaccagcgaggaccugggcaagaccuucagcgugggcaccggcaacugcaccaccaacauccuggaggccaaguacuggugccccgacagcauggaguacaacugccccaaccugagccccagagaggagcccgacgacaucgacugcuggugcuacggcguggagaacgugagaguggccuacggcaagugcgacagcgccggcagaagcagaagaagcagaagagccaucgaccugcccacccacgagaaccacggccugaagaccagacaggagaaguggaugaccggcagaaugggcgagagacagcugcagaagaucgagagaugguucgugagaaaccccuucuucgccgugaccgcccugaccaucgccuaccuggugggcagcaacaugacccagagaguggugaucgcccugcuggugcuggccgugggccccgccuacagcgcccacugcaucggcaucaccgacagagacuucaucgagggcgugcacggcggcaccugggugagcgccacccuggagcaggacaagugcgugaccgugauggcccccgacaagcccagccuggacaucagccuggagaccguggccaucgacagacccgccgaggugagaaaggugugcuacaacgccgugcugacccacgugaagaucaacgacaagugccccagcaccggcgaggcccaccuggccgaggagaacgagggcgacaacgccugcaagagaaccuacagcgacagaggcuggggcaacggcugcggccuguucggcaagggcagcaucguggccugcgccaaguucaccugcgccaagagcaugagccuguucgagguggaccagaccaagauccaguacgugaucagagcccagcugcacgugggcgccaagcaggagaacuggaacaccgacaucaagacccugaaguucgacgcccugagcggcagccaggagguggaguucaucggcuacggcaaggccacccuggagugccaggugcagaccgccguggacuucggcaacagcuacaucgccgagauggagaccgagagcuggaucguggacagacagugggcccaggaccugacccugcccuggcagagcggcagcggcggcguguggagagagaugcaccaccugguggaguucgagcccccccacgccgccaccaucagagugcuggcccugggcaaccaggagggcagccugaagaccgcccugaccggcgccaugagagugaccaaggacaccaacgacaacaaccuguacaagcugcacggcggccacgugagcugcagagugaagcugagcgcccugacccugaagggcaccagcuacaagaucugcaccgacaagauguucuucgugaagaaccccaccgacaccggccacggcaccguggugaugcaggugaaggugagcaagggcgcccccugcagaauccccgugaucguggccgacgaccugaccgccgccaucaacaagggcauccuggugaccgugaaccccaucgccagcaccaacgacgacgaggugcugaucgaggugaacccccccuucggcgacagcuacaucaucgugggcagaggcgacagcagacugaccuaccaguggcacaaggagggcagcagcaucggcaagcuguucacccagaccaugaagggcguggagagacuggccgugaugggcgacaccgccugggacuucagcagcgccggcggcuucuucaccagcgugggcaagggcauccacaccguguucggcagcgccuuccagggccuguucggcggccugaacuggaucaccaaggugaucaugggcgccgugcugaucugggugggcaucaacaccagaaacaugaccaugagcaugagcaugauccuggugggcgugaucaugauguuccugagccugggcgugggcgccgaccagggcugcgccaucaacuucggcaagugaggacuaguuauaagacugacuagcccgaugggccucccaacgggcccuccuccccuccuugcaccgagauuaauaaaaaaaaaaaaaaaaaaaaaaaaaaaaaaaaaaaaaaaaaaaaaaaaaaaaaaaaaaaaaaaaugcaucccccccccccccccccccccccccccccccaaaggcucuuuucagagccaccagaauu

SEQ ID NO: 1227 - RNA, 2245 nt, Artificial Sequence
  mRNA product Design i-3 comprising derived and/or modified sequence from YFV__NC_002031.1__SSIgE-prME (polyprotein: aa122-778) (opt4)
gggagaaagcuuaccauggacuggaccuggauccuguuccugguggccgccgccaccagagugcacagcgugacccuggugagaaagaacagauggcugcugcugaacgugaccagcgaggaccugggcaagaccuucagcgugggcaccggcaacugcaccaccaacauccuggaggccaaguacuggugccccgacagcauggaguacaacugccccaaccugagccccagagaggagcccgacgacaucgacugcuggugcuacggcguggagaacgugagaguggccuacggcaagugcgacagcgccggcagaagcagaagaagcagaagagccaucgaccugcccacccacgagaaccacggccugaagaccagacaggagaaguggaugaccggcagaaugggcgagagacagcugcagaagaucgagagaugguucgugagaaaccccuucuucgccgugaccgcccugaccaucgccuaccuggugggcagcaacaugacccagagaguggugaucgcccugcuggugcuggccgugggccccgccuacagcgcccacugcaucggcaucaccgacagagacuucaucgagggcgugcacggcggcaccugggugagcgccacccuggagcaggacaagugcgugaccgugauggcccccgacaagcccagccuggacaucagccuggagaccguggccaucgacagacccgccgaggugagaaaggugugcuacaacgccgugcugacccacgugaagaucaacgacaagugccccagcaccggcgaggcccaccuggccgaggagaacgagggcgacaacgccugcaagagaaccuacagcgacagaggcuggggcaacggcugcggccuguucggcaagggcagcaucguggccugcgccaaguucaccugcgccaagagcaugagccuguucgagguggaccagaccaagauccaguacgugaucagagcccagcugcacgugggcgccaagcaggagaacuggaacaccgacaucaagacccugaaguucgacgcccugagcggcagccaggagguggaguucaucggcuacggcaaggccacccuggagugccaggugcagaccgccguggacuucggcaacagcuacaucgccgagauggagaccgagagcuggaucguggacagacagugggcccaggaccugacccugcccuggcagagcggcagcggcggcguguggagagagaugcaccaccugguggaguucgagcccccccacgccgccaccaucagagugcuggcccugggcaaccaggagggcagccugaagaccgcccugaccggcgccaugagagugaccaaggacaccaacgacaacaaccuguacaagcugcacggcggccacgugagcugcagagugaagcugagcgcccugacccugaagggcaccagcuacaagaucugcaccgacaagauguucuucgugaagaaccccaccgacaccggccacggcaccguggugaugcaggugaaggugagcaagggcgcccccugcagaauccccgugaucguggccgacgaccugaccgccgccaucaacaagggcauccuggugaccgugaaccccaucgccagcaccaacgacgacgaggugcugaucgaggugaacccccccuucggcgacagcuacaucaucgugggcagaggcgacagcagacugaccuaccaguggcacaaggagggcagcagcaucggcaagcuguucacccagaccaugaagggcguggagagacuggccgugaugggcgacaccgccugggacuucagcagcgccggcggcuucuucaccagcgugggcaagggcauccacaccguguucggcagcgccuuccagggccuguucggcggccugaacuggaucaccaaggugaucaugggcgccgugcugaucugggugggcaucaacaccagaaacaugaccaugagcaugagcaugauccuggugggcgugaucaugauguuccugagccugggcgugggcgccugaggacuaguuauaagacugacuagcccgaugggccucccaacgggcccuccuccccuccuugcaccgagauuaauaaaaaaaaaaaaaaaaaaaaaaaaaaaaaaaaaaaaaaaaaaaaaaaaaaaaaaaaaaaaaaaaugcaucccccccccccccccccccccccccccccccaaaggcucuuuucagagccaccagaauu

SEQ ID NO: 1228 - RNA, 2293 nt, Artificial Sequence
  mRNA product Design i-3 comprising derived and/or modified sequence from YFV__NC_002031.1__SSjev-prME-XX (polyprotein: aa122-788) (opt4)
gggagaaagcuuaccaugggcaagagaagcgccggcagcaucauguggcuggccagccuggccguggugaucgccugcgccggcgccgugacccuggugagaaagaacagauggcugcugcugaacgugaccagcgaggaccugggcaagaccuucagcgugggcaccggcaacugcaccaccaacauccuggaggccaaguacuggugccccgacagcauggaguacaacugccccaaccugagccccagagaggagcccgacgacaucgacugcuggugcuacggcguggagaacgugagaguggccuacggcaagugcgacagcgccggcagaagcagaagaagcagaagagccaucgaccugcccacccacgagaaccacggccugaagaccagacaggagaaguggaugaccggcagaaugggcgagagacagcugcagaagaucgagagaugguucgugagaaaccccuucuucgccgugaccgcccugaccaucgccuaccuggugggcagcaacaugacccagagaguggugaucgcccugcuggugcuggccgugggccccgccuacagcgcccacugcaucggcaucaccgacagagacuucaucgagggcgugcacggcggcaccugggugagcgccacccuggagcaggacaagugcgugaccgugauggcccccgacaagcccagccuggacaucagccuggagaccguggccaucgacagacccgccgaggugagaaaggugugcuacaacgccgugcugacccacgugaagaucaacgacaagugccccagcaccggcgaggcccaccuggccgaggagaacgagggcgacaacgccugcaagagaaccuacagcgacagaggcuggggcaacggcugcggccuguucggcaagggcagcaucguggccugcgccaaguucaccugcgccaagagcaugagccuguucgagguggaccagaccaagauccaguacgugaucagagcccagcugcacgugggcgccaagcaggagaacuggaacaccgacaucaagacccugaaguucgacgcccugagcggcagccaggagguggaguucaucggcuacggcaaggccacccuggagugccaggugcagaccgccguggacuucggcaacagcuacaucgccgagauggagaccgagagcuggaucguggacagacagugggcccaggaccugacccugcccuggcagagcggcagcggcggcguguggagagagaugcaccaccugguggaguucgagcccccccacgccgccaccaucagagugcuggcccugggcaaccaggagggcagccugaagaccgcccugaccggcgccaugagagugaccaaggacaccaacgacaacaaccuguacaagcugcacggcggccacgugagcugcagagugaagcugagcgcccugacccugaagggcaccagcuacaagaucugcaccgacaagauguucuucgugaagaaccccaccgacaccggccacggcaccguggugaugcaggugaaggugagcaagggcgcccccugcagaauccccgugaucguggccgacgaccugaccgccgccaucaacaagggcauccuggugaccgugaaccccaucgccagcaccaacgacgacgaggugcugaucgaggugaacccccccuucggcgacagcuacaucaucgugggcagaggcgacagcagacugaccuaccaguggcacaaggagggcagcagcaucggcaagcuguucacccagaccaugaagggcguggagagacuggccgugaugggcgacaccgccugggacuucagcagcgccggcggcuucuucaccagcgugggcaagggcauccacaccguguucggcagcgccuuccagggccuguucggcggccugaacuggaucaccaaggugaucaugggcgccgugcugaucugggugggcaucaacaccagaaacaugaccaugagcaugagcaugauccuggugggcgugaucaugauguuccugagccugggcgugggcgccgaccagggcugcgccaucaacuucggcaagugaggacuaguuauaagacugacuagcccgaugggccucccaacgggcccuccuccccuccuugcaccgagauuaauaaaaaaaaaaaaaaaaaaaaaaaaaaaaaaaaaaaaaaaaaaaaaaaaaaaaaaaaaaaaaaaaugcaucccccccccccccccccccccccccccccccaaaggcucuuuucagagccaccagaauu

SEQ ID NO: 1229 - RNA, 2263 nt, Artificial Sequence
  mRNA product Design i-3 comprising derived and/or modified sequence from YFV__NC_002031.1__SSjev-prME (polyprotein: aa122-778) (opt4)
gggagaaagcuuaccaugggcaagagaagcgccggcagcaucauguggcuggccagccuggccguggugaucgccugcgccggcgccgugacccuggugagaaagaacagauggcugcugcugaacgugaccagcgaggaccugggcaagaccuucagcgugggcaccggcaacugcaccaccaacauccuggaggccaaguacuggugccccgacagcauggaguacaacugccccaaccugagccccagagaggagcccgacgacaucgacugcuggugcuacggcguggagaacgugagaguggccuacggcaagugcgacagcgccggcagaagcagaagaagcagaagagccaucgaccugcccacccacgagaaccacggccugaagaccagacaggagaaguggaugaccggcagaaugggcgagagacagcugcagaagaucgagagaugguucgugagaaaccccuucuucgccgugaccgcccugaccaucgccuaccuggugggcagcaacaugacccagagaguggugaucgcccugcuggugcuggccgugggccccgccuacagcgcccacugcaucggcaucaccgacagagacuucaucgagggcgugcacggcggcaccugggugagcgccacccuggagcaggacaagugcgugaccgugauggcccccgacaagcccagccuggacaucagccuggagaccguggccaucgacagacccgccgaggugagaaaggugugcuacaacgccgugcugacccacgugaagaucaacgacaagugccccagcaccggcgaggcccaccuggccgaggagaacgagggcgacaacgccugcaagagaaccuacagcgacagaggcuggggcaacggcugcggccuguucggcaagggcagcaucguggccugcgccaaguucaccugcgccaagagcaugagccuguucgagguggaccagaccaagauccaguacgugaucagagcccagcugcacgugggcgccaagcaggagaacuggaacaccgacaucaagacccugaaguucgacgcccugagcggcagccaggagguggaguucaucggcuacggcaaggccacccuggagugccaggugcagaccgccguggacuucggcaacagcuacaucgccgagauggagaccgagagcuggaucguggacagacagugggcccaggaccugacccugcccuggcagagcggcagcggcggcguguggagagagaugcaccaccugguggaguucgagcccccccacgccgccaccaucagagugcuggcccugggcaaccaggagggcagccugaagaccgcccugaccggcgccaugagagugaccaaggacaccaacgacaacaaccuguacaagcugcacggcggccacgugagcugcagagugaagcugagcgcccugacccugaagggcaccagcuacaagaucugcaccgacaagauguucuucgugaagaaccccaccgacaccggccacggcaccguggugaugcaggugaaggugagcaagggcgcccccugcagaauccccgugaucguggccgacgaccugaccgccgccaucaacaagggcauccuggugaccgugaaccccaucgccagcaccaacgacgacgaggugcugaucgaggugaacccccccuucggcgacagcuacaucaucgugggcagaggcgacagcagacugaccuaccaguggcacaaggagggcagcagcaucggcaagcuguucacccagaccaugaagggcguggagagacuggccgugaugggcgacaccgccugggacuucagcagcgccggcggcuucuucaccagcgugggcaagggcauccacaccguguucggcagcgccuuccagggccuguucggcggccugaacuggaucaccaaggugaucaugggcgccgugcugaucugggugggcaucaacaccagaaacaugaccaugagcaugagcaugauccuggugggcgugaucaugauguuccugagccugggcgugggcgccugaggacuaguuauaagacugacuagcccgaugggccucccaacgggcccuccuccccuccuugcaccgagauuaauaaaaaaaaaaaaaaaaaaaaaaaaaaaaaaaaaaaaaaaaaaaaaaaaaaaaaaaaaaaaaaaaugcaucccccccccccccccccccccccccccccccaaaggcucuuuucagagccaccagaauu

SEQ ID NO: 1230 - RNA, 2311 nt, Artificial Sequence
  mRNA product Design i-3 comprising derived and/or modified sequence from YFV__NC_002031.1__X-SS-prME-XX (polyprotein: aa92-788) (opt5)
gggagaaagcuuaccaugagaggccugagcucccggaagcgcagaucucacgacgugcucaccguccaguuccugauccuugggaugcugcucaugacaggaggcguuacgcuggugcggaaaaaccgcuggcuucugcucaaugugaccagcgaggaucuggggaagacauuuuccgucggaaccggcaacugcacaaccaauauucuggaagccaaauacuggugucccgacucuauggaguauaacugcccuaaucucagcccgagagaagaacccgaugacaucgauuguuggugcuacgggguggaaaacguucggguggcuuauggaaagugugacuccgccggccgcucuagacggagccgcagagcgauugaucugccuacacaugagaaucacggccuuaaaacccggcaagagaaguggaugacggggcgcaugggagaaagacagcugcagaagaucgagcggugguucguccgcaaccccuuuuucgcugugaccgcccucacaauugccuaccugguuggcuccaauaugacccagagaguggucaucgcccuucuggugcucgcuguggggccugcuuauagcgcccauugcaucggaauuacagaccgggauuuuaucgaaggcguccacgggggaaccuggguuucugcgacgcuggagcaagacaaaugugugacagugauggcccccgauaagccuucccuggacauuagccucgagaccgucgcuaucgauagaccggccgaagugcgcaaaguuugcuacaacgcugugcugacacaugucaagauuaaugacaaaugucccucuaccggcgaggcccaccuugcggaagagaacgaaggcgacaaugccugcaagcggaccuauuccgauagaggguggggaaacggcugugggcuguucggaaagggcagcaucguggcuugcgccaaauuuacaugcgcuaagucuaugucccucuucgagguugaccagacgaaaauucaguacgugauccgcgcccagcugcacgucggggccaagcaagagaauuggaacaccgauaucaaaacacuuaaguuugacgcucugagcggaucccaggaaguggaguucauuggcuacggcaaagcgacccucgaaugucagguccagacagccguggauuuugggaacucuuauaucgcugagauggaaaccgagagcuggauuguugaccggcaaugggcccaggaucugacgcugccuuggcaguccggaagcggcgggguguggagagagaugcaucaccucgucgaguucgagcccccucaugccgcuacaauccgcgugcuggcccuuggaaaucaagaaggcucucugaagaccgcgcucaccggggcuaugcggguuacaaaggacaccaacgauaauaaccuguacaaacuucacggcggacacguguccugcagagucaagcugagcgcccucacacugaaaggcacgucuuauaagauuuguaccgacaaaauguuuuucgugaagaaucccacagauaccgggcauggaacagugguuaugcaggucaaggugagcaaaggcgccccgugccgcaucccugugaucgucgcugacgaccugaccgccgcuauuaacaaggggauccucgugacgguuaaucccauugccuccaccaacgaugacgaggugcugaucgaagucaauccucccuucggagauucuuacauuaucgugggccggggagacagcagacuuacauaucaguggcacaaagagggcuccagcaucggaaagcuguuuacccagacaaugaaaggcguugagcgccucgcggugaugggggauaccgccugggacuucucuuccgcuggaggcuuuuucacgagcgucgggaaggggauucauacaguguuuggcucugccuuccaagggcuguuuggcggacugaacuggaucaccaagguuauuaugggcgcugugcuuaucugggucgggauuaauacacggaacaugaccauguccaugagcaugauccucgugggagugauuaugauguuccugucccugggcgucggggccgaucagggaugugcgaucaauuuuggcaaaugaggacuaguuauaagacugacuagcccgaugggccucccaacgggcccuccuccccuccuugcaccgagauuaauaaaaaaaaaaaaaaaaaaaaaaaaaaaaaaaaaaaaaaaaaaaaaaaaaaaaaaaaaaaaaaaaugcaucccccccccccccccccccccccccccccccaaaggcucuuuucagagccaccagaauu

SEQ ID NO: 1231 - RNA, 2248 nt, Artificial Sequence
  mRNA product Design i-3 comprising derived and/or modified sequence from YFV__NC_002031.1__SS-prME (polyprotein: M,aa104-778) (opt5)
gggagaaagcuuaccauggacgugcugaccguccaguuccucauccugggcaugcuucugaugacagggggaguuacgcucgugagaaagaaccgguggcugcuucugaaugugaccagcgaggaucucggcaaaacauuuuccgucgggaccggaaacugcacaaccaauauucuggaagccaaguacuggugucccgacucuauggaguauaacugcccuaaucugagcccgcgcgaagaacccgaugacaucgauuguuggugcuacggcguggaaaacguuagaguggcuuaugggaaaugugacuccgccggacggucucgcagaagccggcgcgcgauugaucucccuacacacgagaaucauggccugaagaccagacaagagaaauggaugacgggccggaugggggaacgccagcuucagaagaucgagagaugguucguccggaaccccuuuuucgcugugaccgcccugacaauugccuaccucguuggauccaauaugacccagcgcguggucaucgcucugcuugugcuggccgugggcccugcuuauucugcccacugcaucgggauuacagacagagauuuuaucgaaggaguccauggcgggaccuggguuagcgcgacgcucgagcaagacaagugugugacagugauggcccccgauaaaccuucccuggacauuagccuggagaccgucgcuaucgaucggccggccgaagugcgcaagguuugcuacaacgcugugcucacacacgucaaaauuaaugacaagugucccucuaccggagaggcccaucuggcggaagagaacgaaggcgacaaugccugcaaaagaaccuauuccgaucggggcugggggaacggauguggccuuuucgggaagggaagcaucguggcuugcgccaaguuuacaugcgcuaaaucuaugucccuguucgagguugaccagacgaagauucaguacgugaucagagcccagcuccacgucggcgccaaacaagagaauuggaacaccgauaucaagacacugaaauuugacgcucuuagcgggucucaggaaguggaguucauuggauacggcaaggcgacccuggaaugucagguccagacagccguggauuuuggcaacuccuauaucgcugagauggaaaccgagagcuggauuguugaccgccaaugggcccaggaucucacgcugccuuggcaguccgggucuggaggcguguggcgggagaugcaccaucuggucgaguucgagcccccucacgccgcuacaaucagagugcucgcccuggggaaucaagaaggaagccuuaaaaccgcgcugaccggcgcuaugcgcguuacaaaggacaccaacgauaauaaccucuacaagcugcaugggggccacguguccugccgggucaaacuuagcgcccugacacucaagggaacgucuuauaaaauuuguaccgacaagauguuuuucgugaaaaaucccacagauaccggccacgggacagugguuaugcaggucaagguguccaagggagccccgugcagaaucccugugaucgucgcugacgaccugaccgccgcuauuaacaaaggcauccuggugacgguuaaucccauugccagcaccaacgaugacgaggugcucaucgaagucaauccucccuucggggauucuuacauuaucgugggacgcggcgacagccggcugacauaucaguggcauaaggagggguccucuaucggcaaacuuuuuacccagacaaugaagggaguugagagacuggcggugaugggcgauaccgccugggacuucagcuccgcugggggauuuuucacgagcgucggcaaagggauucacacaguguuuggaucugccuuccaaggccucuuugggggccugaacuggaucaccaagguuauuaugggagcugugcugaucugggucggcauuaauacacgcaacaugaccauguccaugagcaugauccuugugggggugauuaugauguuccucucucugggagucggcgccugaggacuaguuauaagacugacuagcccgaugggccucccaacgggcccuccuccccuccuugcaccgagauuaauaaaaaaaaaaaaaaaaaaaaaaaaaaaaaaaaaaaaaaaaaaaaaaaaaaaaaaaaaaaaaaaaugcaucccccccccccccccccccccccccccccccaaaggcucuuuucagagccaccagaauu

SEQ ID NO: 1232 - RNA, 2275 nt, Artificial Sequence
  mRNA product Design i-3 comprising derived and/or modified sequence from YFV__NC_002031.1__SSIgE-prME-XX (polyprotein: aa122-788) (opt5)
gggagaaagcuuaccauggacuggaccuggauccuguuccucguggccgcugccacaagaguccacagcguuacgcuggugcggaaaaaccgcuggcuucugcucaaugugaccagcgaggaucuggggaagacauuuuccgucggaaccggcaacugcacaaccaauauucuggaagccaaauacuggugucccgacucuauggaguauaacugcccuaaucucagcccgagagaagaacccgaugacaucgauuguuggugcuacgggguggaaaacguucggguggcuuauggaaagugugacuccgccggccgcucuagacggagccgcagagcgauugaucugccuacacaugagaaucacggccuuaaaacccggcaagagaaguggaugacggggcgcaugggagaaagacagcugcagaagaucgagcggugguucguccgcaaccccuuuuucgcugugaccgcccucacaauugccuaccugguuggcuccaauaugacccagagaguggucaucgcccuucuggugcucgcuguggggccugcuuauagcgcccauugcaucggaauuacagaccgggauuuuaucgaaggcguccacgggggaaccuggguuucugcgacgcuggagcaagacaaaugugugacagugauggcccccgauaagccuucccuggacauuagccucgagaccgucgcuaucgauagaccggccgaagugcgcaaaguuugcuacaacgcugugcugacacaugucaagauuaaugacaaaugucccucuaccggcgaggcccaccuugcggaagagaacgaaggcgacaaugccugcaagcggaccuauuccgauagaggguggggaaacggcugugggcuguucggaaagggcagcaucguggcuugcgccaaauuuacaugcgcuaagucuaugucccucuucgagguugaccagacgaaaauucaguacgugauccgcgcccagcugcacgucggggccaagcaagagaauuggaacaccgauaucaaaacacuuaaguuugacgcucugagcggaucccaggaaguggaguucauuggcuacggcaaagcgacccucgaaugucagguccagacagccguggauuuugggaacucuuauaucgcugagauggaaaccgagagcuggauuguugaccggcaaugggcccaggaucugacgcugccuuggcaguccggaagcggcgggguguggagagagaugcaucaccucgucgaguucgagcccccucaugccgcuacaauccgcgugcuggcccuuggaaaucaagaaggcucucugaagaccgcgcucaccggggcuaugcggguuacaaaggacaccaacgauaauaaccuguacaaacuucacggcggacacguguccugcagagucaagcugagcgcccucacacugaaaggcacgucuuauaagauuuguaccgacaaaauguuuuucgugaagaaucccacagauaccgggcauggaacagugguuaugcaggucaaggugagcaaaggcgccccgugccgcaucccugugaucgucgcugacgaccugaccgccgcuauuaacaaggggauccucgugacgguuaaucccauugccuccaccaacgaugacgaggugcugaucgaagucaauccucccuucggagauucuuacauuaucgugggccggggagacagcagacuuacauaucaguggcacaaagagggcuccagcaucggaaagcuguuuacccagacaaugaaaggcguugagcgccucgcggugaugggggauaccgccugggacuucucuuccgcuggaggcuuuuucacgagcgucgggaaggggauucauacaguguuuggcucugccuuccaagggcuguuuggcggacugaacuggaucaccaagguuauuaugggcgcugugcuuaucugggucgggauuaauacacggaacaugaccauguccaugagcaugauccucgugggagugauuaugauguuccugucccugggcgucggggccgaucagggaugugcgaucaauuuuggcaaaugaggacuaguuauaagacugacuagcccgaugggccucccaacgggcccuccuccccuccuugcaccgagauuaauaaaaaaaaaaaaaaaaaaaaaaaaaaaaaaaaaaaaaaaaaaaaaaaaaaaaaaaaaaaaaaaaugcaucccccccccccccccccccccccccccccccaaaggcucuuuucagagccaccagaauu

SEQ ID NO: 1233 - RNA, 2245 nt, Artificial Sequence
  mRNA product Design i-3 comprising derived and/or modified sequence from YFV__NC_002031.1__SSIgE-prME (polyprotein: aa122-778) (opt5)
gggagaaagcuuaccauggacuggaccuggauccuguuccucguggccgcugccacaagaguccacagcgugacccuggucagaaagaaccgguggcuccugcuuaauguuacaagcgaggaccugggcaaaacguucuccguggggaccggaaacugcacaaccaauauccucgaagccaaguacuggugucccgauucuauggaguauaacugcccuaaucugagcccgcgcgaggaacccgacgauauugacuguuggugcuacggcguggaaaacgucagaguggcuuaugggaaaugugauuccgccggacggucucgcagaagccggcgcgcgaucgaccuuccuacacacgagaaucauggccugaagaccagacaggagaaauggaugacagggcggaugggagaacgccaacuccagaagauugagagaugguuuguucggaaccccuucuuugcugugaccgcccugacgaucgccuaccuggucggcuccaauaugacccagcgcgugguuauugcucuccuggugcuugccgucggcccugcuuauucugcccacugcaucgggaucacagauagagacuucauugaaggagugcauggcgggaccugggugagcgcgacacuggagcaggauaagugugucaccguuauggcccccgacaaaccuucccucgauaucagccuggagacgguggcuauugaccggccggccgaagugcgcaaggucugcuacaacgcugugcuuacacacguuaaaaucaaugauaagugucccucuaccggagaggcccaucuggcggaagagaacgaaggcgacaaugccugcaaaagaacauauuccgaccggggguggggaaacggcuguggccucuuugggaagggaagcauuguggcuugcgccaaguuuaccugcgcuaaaucuaugucccuguucgaggucgaucaaaccaagauccaguacgugauuagagcccagcugcacguuggcgccaaacaggagaauuggaacacagacaucaagacgcucaaauucgaugcucugagcgggucucaagaaguggaguuuaucggauacggcaaggcgacccuugaaugucagguccagacagccguggacuucgggaacuccuauauugcugagauggaaaccgagagcuggaucgucgaucgccagugggcccaagaccugacacucccuuggcaguccggaucuggcggcguguggcgggagaugcaccaucugguugaauuugagcccccucacgccgcuaccauuagagugcuugcccuggggaaucaggaaggaagccucaaaacggcgcugacaggcgcuaugcgcgucaccaaggauaccaacgacaauaaccuguacaagcuccaugggggacacguguccugccggguuaaacugagcgcccuuacacugaagggcaccucuuauaaaaucuguacagauaagauguucuuugugaaaaaucccacggacaccgggcacggcacagucgugaugcaagugaagguuuccaagggagccccgugccgcauuccugucaucguggcugaugaccucaccgccgcuaucaacaaaggcauucuggugacagucaaucccaucgccagcaccaacgacgaugaggugcuuauugaaguuaauccucccuucggggacucuuacaucauugugggaagaggcgauagccggcugacguaucaguggcauaaggagggguccucuaucggaaaacucuucacccagacaaugaagggcgucgagagacuggcggugaugggggacaccgccugggauuuuagcuccgcuggcggauucuuuacaagcguuggcaaagggauccacaccguguucggaucugccuuucagggccuguucgggggacucaacuggauuacgaaggucaucaugggcgcugugcugauuuggguugggaucaauacacgcaacaugaccauguccaugagcaugauucuugugggcgucaucaugauguuucugucucucggagugggcgccugaggacuaguuauaagacugacuagcccgaugggccucccaacgggcccuccuccccuccuugcaccgagauuaauaaaaaaaaaaaaaaaaaaaaaaaaaaaaaaaaaaaaaaaaaaaaaaaaaaaaaaaaaaaaaaaaugcaucccccccccccccccccccccccccccccccaaaggcucuuuucagagccaccagaauu

SEQ ID NO: 1234 - RNA, 2293 nt, Artificial Sequence
  mRNA product Design i-3 comprising derived and/or modified sequence from YFV__NC_002031.1__SSjev-prME-XX (polyprotein: aa122-788) (opt5)
gggagaaagcuuaccaugggcaagagaagcgccggguccaucauguggcuggcuucucucgccguggucauugcgugcgcuggagccguuacgcuggugcggaaaaaccgcuggcuucugcucaaugugaccagcgaggaucuggggaagacauuuuccgucggaaccggcaacugcacaaccaauauucuggaagccaaauacuggugucccgacucuauggaguauaacugcccuaaucucagcccgagagaagaacccgaugacaucgauuguuggugcuacgggguggaaaacguucggguggcuuauggaaagugugacuccgccggccgcucuagacggagccgcagagcgauugaucugccuacacaugagaaucacggccuuaaaacccggcaagagaaguggaugacggggcgcaugggagaaagacagcugcagaagaucgagcggugguucguccgcaaccccuuuuucgcugugaccgcccucacaauugccuaccugguuggcuccaauaugacccagagaguggucaucgcccuucuggugcucgcuguggggccugcuuauagcgcccauugcaucggaauuacagaccgggauuuuaucgaaggcguccacgggggaaccuggguuucugcgacgcuggagcaagacaaaugugugacagugauggcccccgauaagccuucccuggacauuagccucgagaccgucgcuaucgauagaccggccgaagugcgcaaaguuugcuacaacgcugugcugacacaugucaagauuaaugacaaaugucccucuaccggcgaggcccaccuugcggaagagaacgaaggcgacaaugccugcaagcggaccuauuccgauagaggguggggaaacggcugugggcuguucggaaagggcagcaucguggcuugcgccaaauuuacaugcgcuaagucuaugucccucuucgagguugaccagacgaaaauucaguacgugauccgcgcccagcugcacgucggggccaagcaagagaauuggaacaccgauaucaaaacacuuaaguuugacgcucugagcggaucccaggaaguggaguucauuggcuacggcaaagcgacccucgaaugucagguccagacagccguggauuuugggaacucuuauaucgcugagauggaaaccgagagcuggauuguugaccggcaaugggcccaggaucugacgcugccuuggcaguccggaagcggcgggguguggagagagaugcaucaccucgucgaguucgagcccccucaugccgcuacaauccgcgugcuggcccuuggaaaucaagaaggcucucugaagaccgcgcucaccggggcuaugcggguuacaaaggacaccaacgauaauaaccuguacaaacuucacggcggacacguguccugcagagucaagcugagcgcccucacacugaaaggcacgucuuauaagauuuguaccgacaaaauguuuuucgugaagaaucccacagauaccgggcauggaacagugguuaugcaggucaaggugagcaaaggcgccccgugccgcaucccugugaucgucgcugacgaccugaccgccgcuauuaacaaggggauccucgugacgguuaaucccauugccuccaccaacgaugacgaggugcugaucgaagucaauccucccuucggagauucuuacauuaucgugggccggggagacagcagacuuacauaucaguggcacaaagagggcuccagcaucggaaagcuguuuacccagacaaugaaaggcguugagcgccucgcggugaugggggauaccgccugggacuucucuuccgcuggaggcuuuuucacgagcgucgggaaggggauucauacaguguuuggcucugccuuccaagggcuguuuggcggacugaacuggaucaccaagguuauuaugggcgcugugcuuaucugggucgggauuaauacacggaacaugaccauguccaugagcaugauccucgugggagugauuaugauguuccugucccugggcgucggggccgaucagggaugugcgaucaauuuuggcaaaugaggacuaguuauaagacugacuagcccgaugggccucccaacgggcccuccuccccuccuugcaccgagauuaauaaaaaaaaaaaaaaaaaaaaaaaaaaaaaaaaaaaaaaaaaaaaaaaaaaaaaaaaaaaaaaaaugcaucccccccccccccccccccccccccccccccaaaggcucuuuucagagccaccagaauu

SEQ ID NO: 1235 - RNA, 2263 nt, Artificial Sequence
  mRNA product Design i-3 comprising derived and/or modified sequence from YFV__NC_002031.1__SSjev-prME (polyprotein: aa122-778) (opt5)
gggagaaagcuuaccaugggcaagagaagcgccggguccaucauguggcuggcuucucucgccguggucauugcgugcgcuggagccgugacccuggucagaaagaaccgguggcuccugcuuaauguuacaagcgaggaccugggcaaaacguucuccguggggaccggaaacugcacaaccaauauccucgaagccaaguacuggugucccgauucuauggaguauaacugcccuaaucugagcccgcgcgaggaacccgacgauauugacuguuggugcuacggcguggaaaacgucagaguggcuuaugggaaaugugauuccgccggacggucucgcagaagccggcgcgcgaucgaccuuccuacacacgagaaucauggccugaagaccagacaggagaaauggaugacagggcggaugggagaacgccaacuccagaagauugagagaugguuuguucggaaccccuucuuugcugugaccgcccugacgaucgccuaccuggucggcuccaauaugacccagcgcgugguuauugcucuccuggugcuugccgucggcccugcuuauucugcccacugcaucgggaucacagauagagacuucauugaaggagugcauggcgggaccugggugagcgcgacacuggagcaggauaagugugucaccguuauggcccccgacaaaccuucccucgauaucagccuggagacgguggcuauugaccggccggccgaagugcgcaaggucugcuacaacgcugugcuuacacacguuaaaaucaaugauaagugucccucuaccggagaggcccaucuggcggaagagaacgaaggcgacaaugccugcaaaagaacauauuccgaccggggguggggaaacggcuguggccucuuugggaagggaagcauuguggcuugcgccaaguuuaccugcgcuaaaucuaugucccuguucgaggucgaucaaaccaagauccaguacgugauuagagcccagcugcacguuggcgccaaacaggagaauuggaacacagacaucaagacgcucaaauucgaugcucugagcgggucucaagaaguggaguuuaucggauacggcaaggcgacccuugaaugucagguccagacagccguggacuucgggaacuccuauauugcugagauggaaaccgagagcuggaucgucgaucgccagugggcccaagaccugacacucccuuggcaguccggaucuggcggcguguggcgggagaugcaccaucugguugaauuugagcccccucacgccgcuaccauuagagugcuugcccuggggaaucaggaaggaagccucaaaacggcgcugacaggcgcuaugcgcgucaccaaggauaccaacgacaauaaccuguacaagcuccaugggggacacguguccugccggguuaaacugagcgcccuuacacugaagggcaccucuuauaaaaucuguacagauaagauguucuuugugaaaaaucccacggacaccgggcacggcacagucgugaugcaagugaagguuuccaagggagccccgugccgcauuccugucaucguggcugaugaccucaccgccgcuaucaacaaaggcauucuggugacagucaaucccaucgccagcaccaacgacgaugaggugcuuauugaaguuaauccucccuucggggacucuuacaucauugugggaagaggcgauagccggcugacguaucaguggcauaaggagggguccucuaucggaaaacucuucacccagacaaugaagggcgucgagagacuggcggugaugggggacaccgccugggauuuuagcuccgcuggcggauucuuuacaagcguuggcaaagggauccacaccguguucggaucugccuuucagggccuguucgggggacucaacuggauuacgaaggucaucaugggcgcugugcugauuuggguugggaucaauacacgcaacaugaccauguccaugagcaugauucuugugggcgucaucaugauguuucugucucucggagugggcgccugaggacuaguuauaagacugacuagcccgaugggccucccaacgggcccuccuccccuccuugcaccgagauuaauaaaaaaaaaaaaaaaaaaaaaaaaaaaaaaaaaaaaaaaaaaaaaaaaaaaaaaaaaaaaaaaaugcaucccccccccccccccccccccccccccccccaaaggcucuuuucagagccaccagaauu

SEQ ID NO: 1236 - RNA, 2311 nt, Artificial Sequence
  mRNA product Design i-3 comprising derived and/or modified sequence from YFV__NC_002031.1__X-SS-prME-XX (polyprotein: aa92-788) (opt6) R7252
gggagaaagcuuaccaugagaggauuaucaaguagaaaaagaagaucacaugauguacuaaccgugcaauuuuugaucuuagggaugcucuuaaugacaggagguguuacauuaguaagaaagaaucgauggcugcuuuuaaaugugacaucagaggauuuagggaaaacauuuucgguaggaacaggaaauuguacuacaaauauacuugaagcaaaauauuggugcccagacucuauggaauauaauuguccaaauuuaaguccuagagaagaaccugacgauauagauuguugguguuaugguguagaaaauguaagaguagcauacggcaaaugcgauagugcaggacguucuagacguucaaggagagccauagaucugcccacucacgaaaaucacggauugaaaacacgacaagaaaaauggaugacugggcgaaugggagaaagacaacuacagaaaauugaaagaugguucguuagaaauccauucuuugccguaacagcuuuaacaauagccuauuuaguagguaguaauaugacacaaagaguaguaauagcauugcuaguguuagcaguuggaccagcuuauagugcacauugcauaggaauaacagauagagacuuuauagaaggaguacacgggggaacuuggguaagugccacuuuagaacaagauaaauguguuacagugauggcgccagauaaaccaagucuggacauaaguuuggaaacaguagcgauugauagacccgcagaaguaagaaaaguuuguuauaaugcuguucuaacccauguuaaaauaaaugauaaaugcccuagcaccggagaagcccaucuagcagaagaaaaugaaggagauaacgcauguaaacgaacauacucagauagaggauggggcaacggauguggcuuguuuggaaaagguagcauaguagcaugcgcuaaauuuacaugcgcaaagucaaugucauuauuugaaguagaucaaacaaaaauacaauauguaauaagagcucaauuacacgugggugcaaaacaagaaaauuggaauacagacauaaagacacuaaaguucgacgcauuaaguggaucacaagagguagaauuuauaggguacggaaaagcgacuuuagagugucaaguccaaacagcaguagauuucgguaacucauacauagcagaaauggaaacugaaaguuggauaguagauagacaaugggcacaagacuugacacuaccuuggcaaucaggaagcggaggaguauggagagaaaugcaucauuuaguagaauuugaaccaccucaugcagcaacaauaagaguauuagcccuaggaaaccaagaaggaaguuuaaaaacagcacuaacaggagcuaugagaguaacaaaagauacaaaugacaacaaucuauacaaauuacacggaggacauguaagcugccggguaaaguugagcgcacuaacauuaaaaggaacgaguuauaaaauaugcacagauaaaauguucuuuguuaaaaauccuacagauaccggucauggaacaguaguaaugcaaguaaaaguaaguaaaggcgcucccuguagaauaccuguaauagucgcagacgauuuaaccgcagcaauaaauaaaggaauauuagucacgguaaacccaauagcgucaacaaaugaugaugaaguauuaauagaaguuaacccaccuuuuggagacaguuauauaauagucggaaggggugauaguagacuaacauaccaauggcauaaagaaggaagcucaauaggaaaauuauuuacucaaaccaugaaagguguagaaaggcuagcuguuaugggugacacagcaugggauuuuucaagcgcaggaggguucuuuacaucaguagguaaaggaauacauacaguauuuggaagugcauuucaaggauuauuuggugguuuaaauuggauaacaaaaguaauaaugggcgcaguuuuaauauggguagguauaaacacaagaaauaugacaaugucuaugaguaugauauuggucggaguaauaaugauguuuuuaucacuaggagugggugcagaucaagguugcgcuauuaauuuuggaaaaugaggacuaguuauaagacugacuagcccgaugggccucccaacgggcccuccuccccuccuugcaccgagauuaauaaaaaaaaaaaaaaaaaaaaaaaaaaaaaaaaaaaaaaaaaaaaaaaaaaaaaaaaaaaaaaaaugcaucccccccccccccccccccccccccccccccaaaggcucuuuucagagccaccagaauu

SEQ ID NO: 1237 - RNA, 2248 nt, Artificial Sequence
  mRNA product Design i-3 comprising derived and/or modified sequence from YFV__NC_002031.1__SS-prME (polyprotein: M,aa104-778) (opt6)
gggagaaagcuuaccauggauguucuaacaguacaauuuuuaauauuagggauguuauuaaugacaggaggcguaacauuaguacgaaagaaucgauggcuauuacuaaacguuacgucugaagauuuaggaaaaacauuuagcguaggaacaggaaauugcaccacgaauaucuuagaagcaaaauauugguguccagauaguauggaauacaauuguccaaauuuaaguccuagagaggaacccgacgauauagauugcugguguuacggaguggaaaauguaagaguagcauauggaaaaugugacagcgcagguagaaguagaagaucacgacgagcaauugaucuacccacucaugagaaccauggacuaaaaacaagacaagaaaaauggaugacagguagaaugggcgaaagacaauuacagaaaauagaaagaugguuuguacgaaauccuuucuuugcugucacugcauuaacuauagcuuauuuaguaggaaguaacaugacucaaagaguaguaauagcacuauuaguacuagcaguaggaccagcuuacagugcacacuguauagggauaacggauagagauuuuauagaaggaguacauggggguacaugggugucugccacuuuagaacaagacaaauguguuacaguuauggccccagauaaacccucuuuagacauaucauuagaaacuguagcaauagauagaccggcggaagugagaaagguauguuauaaugcaguacuaacccauguaaaaauuaaugacaaaugcccaucaacaggagaggcucaucuagcugaagaaaaugaaggagacaaugcuugcaaacguacauauucagacaggggguggggaaauggauguggauuauuugguaaagggucaauaguagcaugugcaaaauuuacaugcgcaaaaaguaugagcuuauuugaaguagaucaaacaaaaauccaauauguaauuagagcucaacuucacguaggagcaaaacaagagaauuggaacacagauauaaaaacauuaaaauuugacgcuuugucuggaagucaagaagucgaauuuauuggcuauggaaaggcaacauuagaaugccaaguucaaaccgcaguagauuuuggaaauucauacauagcagaaauggagacugaaaguuggauaguagauagacagugggcucaagaccuaacuuuaccauggcaaucaggaaguggugguguauggagagaaaugcaucauuuaguagaauuugaaccaccacaugcagcaacaauuagaguacuagcauuaggaaaucaagaagguaguuuaaagacagcgcuuaccggagcaaugagaguuacaaaagauacuaaugacaauaauuuauauaaacuucauggaggacauguuagcuguagagucaaauuaagugcauuaacacucaaaggaacaucauacaaaauauguacagauaaaauguuuuucgucaagaauccaacagauacaggacauggaacaguuguaaugcaaguaaaaguaucaaaaggagcaccuugcagaauaccaguaauaguagcagaugauuuaacagccgcaauuaauaaagggauauuaguaacaguaaacccuauagcaaguacaaaugaugaugaagucuugauagaaguaaauccaccauuuggagauucguauauaauagucggaagaggagauagucgauuaacauaucaauggcauaaagaagguucaucaauaggaaaauuauuuacacaaaccaugaaaggaguugaaagauuagcuguaaugggggacacagcuugggauuuuucuagcgcaggaggauucuuuacauccguaggaaaagguauacacacaguauuuggcucagcauuccaaggguuauuuggugguuuaaauuggauaacaaaagugauuaugggagcagugcuaaucuggguaggaauaaauacaagaaauaugacaaugaguaugagcaugauucucguaggaguaauaaugauguuccuuaguuugggaguuggcgcuugaggacuaguuauaagacugacuagcccgaugggccucccaacgggcccuccuccccuccuugcaccgagauuaauaaaaaaaaaaaaaaaaaaaaaaaaaaaaaaaaaaaaaaaaaaaaaaaaaaaaaaaaaaaaaaaaugcaucccccccccccccccccccccccccccccccaaaggcucuuuucagagccaccagaauu

SEQ ID NO: 1238 - RNA, 2275 nt, Artificial Sequence
  mRNA product Design i-3 comprising derived and/or modified sequence from YFV__NC_002031.1__SSIgE-prME-XX (polyprotein: aa122-788) (opt6)
gggagaaagcuuaccauggacuggacauggauauuauuuuuaguagcagcagcaacaagaguacauucaguuacauuaguaagaaagaaucgauggcugcuuuuaaaugugacaucagaggauuuagggaaaacauuuucgguaggaacaggaaauuguacuacaaauauacuugaagcaaaauauuggugcccagacucuauggaauauaauuguccaaauuuaaguccuagagaagaaccugacgauauagauuguugguguuaugguguagaaaauguaagaguagcauacggcaaaugcgauagugcaggacguucuagacguucaaggagagccauagaucugcccacucacgaaaaucacggauugaaaacacgacaagaaaaauggaugacugggcgaaugggagaaagacaacuacagaaaauugaaagaugguucguuagaaauccauucuuugccguaacagcuuuaacaauagccuauuuaguagguaguaauaugacacaaagaguaguaauagcauugcuaguguuagcaguuggaccagcuuauagugcacauugcauaggaauaacagauagagacuuuauagaaggaguacacgggggaacuuggguaagugccacuuuagaacaagauaaauguguuacagugauggcgccagauaaaccaagucuggacauaaguuuggaaacaguagcgauugauagacccgcagaaguaagaaaaguuuguuauaaugcuguucuaacccauguuaaaauaaaugauaaaugcccuagcaccggagaagcccaucuagcagaagaaaaugaaggagauaacgcauguaaacgaacauacucagauagaggauggggcaacggauguggcuuguuuggaaaagguagcauaguagcaugcgcuaaauuuacaugcgcaaagucaaugucauuauuugaaguagaucaaacaaaaauacaauauguaauaagagcucaauuacacgugggugcaaaacaagaaaauuggaauacagacauaaagacacuaaaguucgacgcauuaaguggaucacaagagguagaauuuauaggguacggaaaagcgacuuuagagugucaaguccaaacagcaguagauuucgguaacucauacauagcagaaauggaaacugaaaguuggauaguagauagacaaugggcacaagacuugacacuaccuuggcaaucaggaagcggaggaguauggagagaaaugcaucauuuaguagaauuugaaccaccucaugcagcaacaauaagaguauuagcccuaggaaaccaagaaggaaguuuaaaaacagcacuaacaggagcuaugagaguaacaaaagauacaaaugacaacaaucuauacaaauuacacggaggacauguaagcugccggguaaaguugagcgcacuaacauuaaaaggaacgaguuauaaaauaugcacagauaaaauguucuuuguuaaaaauccuacagauaccggucauggaacaguaguaaugcaaguaaaaguaaguaaaggcgcucccuguagaauaccuguaauagucgcagacgauuuaaccgcagcaauaaauaaaggaauauuagucacgguaaacccaauagcgucaacaaaugaugaugaaguauuaauagaaguuaacccaccuuuuggagacaguuauauaauagucggaaggggugauaguagacuaacauaccaauggcauaaagaaggaagcucaauaggaaaauuauuuacucaaaccaugaaagguguagaaaggcuagcuguuaugggugacacagcaugggauuuuucaagcgcaggaggguucuuuacaucaguagguaaaggaauacauacaguauuuggaagugcauuucaaggauuauuuggugguuuaaauuggauaacaaaaguaauaaugggcgcaguuuuaauauggguagguauaaacacaagaaauaugacaaugucuaugaguaugauauuggucggaguaauaaugauguuuuuaucacuaggagugggugcagaucaagguugcgcuauuaauuuuggaaaaugaggacuaguuauaagacugacuagcccgaugggccucccaacgggcccuccuccccuccuugcaccgagauuaauaaaaaaaaaaaaaaaaaaaaaaaaaaaaaaaaaaaaaaaaaaaaaaaaaaaaaaaaaaaaaaaaugcaucccccccccccccccccccccccccccccccaaaggcucuuuucagagccaccagaauu

SEQ ID NO: 1239 - RNA, 2245 nt, Artificial Sequence
  mRNA product Design i-3 comprising derived and/or modified sequence from YFV__NC_002031.1__SSIgE-prME (polyprotein: aa122-778) (opt6)
gggagaaagcuuaccauggacuggacauggauauuauuuuuaguagcagcagcaacaagaguacauucaguaacauuagucagaaagaacagaugguuauuacugaacguaacaagugaagacuuaggaaaaacauuuaguguaggcacaggaaauugcacaacaaauauacuugaagcaaaauauugguguccagauagcauggaauauaauuguccaaauuuaucaccuagagaggaacccgaugauauagauuguugguguuauggaguugaaaacgugcgaguagcauaugguaaaugugauagcgcaggaagaaguagaagaaguagaagggcaauagacuuaccaacucaugaaaaccauggauuaaaaacaagacaggaaaaauggaugacaggaagaaugggagaacgacaauuacagaaaauagaaagaugguucguaagaaauccauucuuugcaguaacagcauuaacaauagcauaucuaguuggaaguaacaugacucaaagaguaguaauagcauuguuaguacuagcaguaggaccggcuuauagcgcacauuguauagggauaacagauagagacuuuauagaaggagugcacgguggaacauggguuucagcaacgcuagagcaagauaaauguguaacgguaauggcgccggauaaaccaagccuugacauaucacuagaaacgguugcaaucgaucgaccagccgaaguaagaaaaguaugcuauaaugcggucuuaacacacguaaaaauaaaugauaaauguccuucaacgggagaagcacauuuagcagaagaaaacgaaggagacaacgcguguaaaagaacauauucagauaggggcuggggaaacggcugcgguuuauuuggaaaaggaaguauaguagcaugcgcaaaauuuacuugcgcaaaaaguaugaguuuauucgaaguugaucaaacaaagauacaauauguaauacgagcacaauuacauguaggugcaaagcaagaaaauuggaauacagacauaaaaacauugaaauuugacgcuuugaguggaucacaagaaguagaauuuauaggauacggaaaagcuacauuagaaugucaaguacaaacugcaguagauuuuggaaauucguauauagcagaaauggaaacugaaucauggauuguagauaggcaaugggcacaagauuuaaccuugccauggcaaagcggaagcggggguguauggcgggaaaugcaucauuuaguagaguucgaacccccacacgcggcuaccauaagaguacuagcauuaggaaaucaagaagggagucucaagacagcacucacaggugcaaugcgaguaacgaaagauacaaaugacaauaaucuauacaaacuacacggaggacauguaucuugcagaguaaaauuaucugcauuaacacuaaaagggacaaguuacaaaauuuguacagauaagauguucuuugucaaaaacccaacagacacgggacacggaacgguagucaugcaaguuaaaguaagcaaaggagcgccaugcagaauaccaguaaucgucgcagaugauuuaacagccgcaauaaauaaagguauauuaguaacgguaaauccaauagcgaguaccaaugaugaugaaguacuaauagaagugaacccaccauuuggugauagcuauauaauaguagggcgaggagauucaagauuaacauaucaauggcauaaagaagguaguaguauaggaaaauuauuuacacaaacuaugaaaggcguagaaagacuagcagucaugggagauacagcaugggauuucucaagugcaggcggauuuuucacaagcgucggaaaaggaauacauacaguguuugguagugcguuucaaggauuauucggaggacuaaauuggauaacgaaaguaauuaugggagcaguucucauaugggucggaauaaauacaaggaacaugacuaugaguaugagcaugauccuaguaggaguaauaaugauguuucuaagccuaggcguuggugcaugaggacuaguuauaagacugacuagcccgaugggccucccaacgggcccuccuccccuccuugcaccgagauuaauaaaaaaaaaaaaaaaaaaaaaaaaaaaaaaaaaaaaaaaaaaaaaaaaaaaaaaaaaaaaaaaaugcaucccccccccccccccccccccccccccccccaaaggcucuuuucagagccaccagaauu

SEQ ID NO: 1240 - RNA, 2293 nt, Artificial Sequence
  mRNA product Design i-3 comprising derived and/or modified sequence from YFV__NC_002031.1__SSjev-prME-XX (polyprotein: aa122-788) (opt6)
gggagaaagcuuaccaugggaaaaagaagugcaggaaguauaaugugguuggcaaguuuagcaguaguaauagcaugugcaggagcaguuacauuaguaagaaagaaucgauggcugcuuuuaaaugugacaucagaggauuuagggaaaacauuuucgguaggaacaggaaauuguacuacaaauauacuugaagcaaaauauuggugcccagacucuauggaauauaauuguccaaauuuaaguccuagagaagaaccugacgauauagauuguugguguuaugguguagaaaauguaagaguagcauacggcaaaugcgauagugcaggacguucuagacguucaaggagagccauagaucugcccacucacgaaaaucacggauugaaaacacgacaagaaaaauggaugacugggcgaaugggagaaagacaacuacagaaaauugaaagaugguucguuagaaauccauucuuugccguaacagcuuuaacaauagccuauuuaguagguaguaauaugacacaaagaguaguaauagcauugcuaguguuagcaguuggaccagcuuauagugcacauugcauaggaauaacagauagagacuuuauagaaggaguacacgggggaacuuggguaagugccacuuuagaacaagauaaauguguuacagugauggcgccagauaaaccaagucuggacauaaguuuggaaacaguagcgauugauagacccgcagaaguaagaaaaguuuguuauaaugcuguucuaacccauguuaaaauaaaugauaaaugcccuagcaccggagaagcccaucuagcagaagaaaaugaaggagauaacgcauguaaacgaacauacucagauagaggauggggcaacggauguggcuuguuuggaaaagguagcauaguagcaugcgcuaaauuuacaugcgcaaagucaaugucauuauuugaaguagaucaaacaaaaauacaauauguaauaagagcucaauuacacgugggugcaaaacaagaaaauuggaauacagacauaaagacacuaaaguucgacgcauuaaguggaucacaagagguagaauuuauaggguacggaaaagcgacuuuagagugucaaguccaaacagcaguagauuucgguaacucauacauagcagaaauggaaacugaaaguuggauaguagauagacaaugggcacaagacuugacacuaccuuggcaaucaggaagcggaggaguauggagagaaaugcaucauuuaguagaauuugaaccaccucaugcagcaacaauaagaguauuagcccuaggaaaccaagaaggaaguuuaaaaacagcacuaacaggagcuaugagaguaacaaaagauacaaaugacaacaaucuauacaaauuacacggaggacauguaagcugccggguaaaguugagcgcacuaacauuaaaaggaacgaguuauaaaauaugcacagauaaaauguucuuuguuaaaaauccuacagauaccggucauggaacaguaguaaugcaaguaaaaguaaguaaaggcgcucccuguagaauaccuguaauagucgcagacgauuuaaccgcagcaauaaauaaaggaauauuagucacgguaaacccaauagcgucaacaaaugaugaugaaguauuaauagaaguuaacccaccuuuuggagacaguuauauaauagucggaaggggugauaguagacuaacauaccaauggcauaaagaaggaagcucaauaggaaaauuauuuacucaaaccaugaaagguguagaaaggcuagcuguuaugggugacacagcaugggauuuuucaagcgcaggaggguucuuuacaucaguagguaaaggaauacauacaguauuuggaagugcauuucaaggauuauuuggugguuuaaauuggauaacaaaaguaauaaugggcgcaguuuuaauauggguagguauaaacacaagaaauaugacaaugucuaugaguaugauauuggucggaguaauaaugauguuuuuaucacuaggagugggugcagaucaagguugcgcuauuaauuuuggaaaaugaggacuaguuauaagacugacuagcccgaugggccucccaacgggcccuccuccccuccuugcaccgagauuaauaaaaaaaaaaaaaaaaaaaaaaaaaaaaaaaaaaaaaaaaaaaaaaaaaaaaaaaaaaaaaaaaugcaucccccccccccccccccccccccccccccccaaaggcucuuuucagagccaccagaauu

SEQ ID NO: 1241 - RNA, 2263 nt, Artificial Sequence
  mRNA product Design i-3 comprising derived and/or modified sequence from YFV__NC_002031.1__SSjev-prME (polyprotein: aa122-778) (opt6)
gggagaaagcuuaccaugggaaaaagaagugcaggaaguauaaugugguuggcaaguuuagcaguaguaauagcaugugcaggagcaguaacauuagucagaaagaacagaugguuauuacugaacguaacaagugaagacuuaggaaaaacauuuaguguaggcacaggaaauugcacaacaaauauacuugaagcaaaauauugguguccagauagcauggaauauaauuguccaaauuuaucaccuagagaggaacccgaugauauagauuguugguguuauggaguugaaaacgugcgaguagcauaugguaaaugugauagcgcaggaagaaguagaagaaguagaagggcaauagacuuaccaacucaugaaaaccauggauuaaaaacaagacaggaaaaauggaugacaggaagaaugggagaacgacaauuacagaaaauagaaagaugguucguaagaaauccauucuuugcaguaacagcauuaacaauagcauaucuaguuggaaguaacaugacucaaagaguaguaauagcauuguuaguacuagcaguaggaccggcuuauagcgcacauuguauagggauaacagauagagacuuuauagaaggagugcacgguggaacauggguuucagcaacgcuagagcaagauaaauguguaacgguaauggcgccggauaaaccaagccuugacauaucacuagaaacgguugcaaucgaucgaccagccgaaguaagaaaaguaugcuauaaugcggucuuaacacacguaaaaauaaaugauaaauguccuucaacgggagaagcacauuuagcagaagaaaacgaaggagacaacgcguguaaaagaacauauucagauaggggcuggggaaacggcugcgguuuauuuggaaaaggaaguauaguagcaugcgcaaaauuuacuugcgcaaaaaguaugaguuuauucgaaguugaucaaacaaagauacaauauguaauacgagcacaauuacauguaggugcaaagcaagaaaauuggaauacagacauaaaaacauugaaauuugacgcuuugaguggaucacaagaaguagaauuuauaggauacggaaaagcuacauuagaaugucaaguacaaacugcaguagauuuuggaaauucguauauagcagaaauggaaacugaaucauggauuguagauaggcaaugggcacaagauuuaaccuugccauggcaaagcggaagcggggguguauggcgggaaaugcaucauuuaguagaguucgaacccccacacgcggcuaccauaagaguacuagcauuaggaaaucaagaagggagucucaagacagcacucacaggugcaaugcgaguaacgaaagauacaaaugacaauaaucuauacaaacuacacggaggacauguaucuugcagaguaaaauuaucugcauuaacacuaaaagggacaaguuacaaaauuuguacagauaagauguucuuugucaaaaacccaacagacacgggacacggaacgguagucaugcaaguuaaaguaagcaaaggagcgccaugcagaauaccaguaaucgucgcagaugauuuaacagccgcaauaaauaaagguauauuaguaacgguaaauccaauagcgaguaccaaugaugaugaaguacuaauagaagugaacccaccauuuggugauagcuauauaauaguagggcgaggagauucaagauuaacauaucaauggcauaaagaagguaguaguauaggaaaauuauuuacacaaacuaugaaaggcguagaaagacuagcagucaugggagauacagcaugggauuucucaagugcaggcggauuuuucacaagcgucggaaaaggaauacauacaguguuugguagugcguuucaaggauuauucggaggacuaaauuggauaacgaaaguaauuaugggagcaguucucauaugggucggaauaaauacaaggaacaugacuaugaguaugagcaugauccuaguaggaguaauaaugauguuucuaagccuaggcguuggugcaugaggacuaguuauaagacugacuagcccgaugggccucccaacgggcccuccuccccuccuugcaccgagauuaauaaaaaaaaaaaaaaaaaaaaaaaaaaaaaaaaaaaaaaaaaaaaaaaaaaaaaaaaaaaaaaaaugcaucccccccccccccccccccccccccccccccaaaggcucuuuucagagccaccagaauu

SEQ ID NO: 1242 - RNA, 2311 nt, Artificial Sequence
  mRNA product Design i-3 comprising derived and/or modified sequence from YFV__NC_002031.1__X-SS-prME-XX (polyprotein: aa92-788) (opt11) R7253
gggagaaagcuuaccaugcggggacuaagcagcagaaaaagacgcagccacgaugugcucaccgugcaauuccucauacuggggaugcuccuaaugaccggaggcgugacccuaguaaggaaaaacagauggcuacuacuaaacguaaccucagaagaucuaggaaagacauuuucagucggcacaggcaacugcacaaccaacauacuagaagcaaaauauuggugcccagacagcauggaauacaacugucccaaccucagcccaagagaggaaccagacgacauagacugcugguguuacggaguagaaaacguaagaguggcauacggcaaaugcgacagcgcaggcaggagccgaagaucccgcagagccaucgacuugcccacgcacgaaaaccacggccucaaaacacgacaagaaaaauggaugacagggcgaaugggagaacgacagcuccagaaaauagaacgaugguucguccggaacccguucuucgcaguaacggcacuaacaaucgcauaccucguaggcagcaacaugacacaaagaguggucaucgcgcuacucguacuagcaguggggcccgcauacagugcacacugcauaggaaucacagaccgugacuucaucgaaggcguacacggaggaacguggguaagcgcgacacuggaacaagacaaaugcgugacaguaauggcaccagacaaaccaagccuagacauaucccuagaaacggucgccaucgaccgucccgcagaaguacgaaagguaugcuauaaugcaguccucacacacgucaaaauaaacgacaaaugccccagcacgggcgaagcacaccucgccgaagaaaacgaaggggauaacgcgugcaaacgcaccuacuccgacaggggauggggcaacggaugcggacuguucggaaaaggauccauagucgcaugcgcaaaauuuaccugcgcaaaaagcaugagcuuguucgagguagaccaaacgaagauccaauacguaauccgagcucaacuacacguuggggccaagcaagagaacuggaauacggacaucaaaacacuaaaauucgacgcacucuccggcucacaagaagucgaguucaucggcuacggcaaagcaacacuagaaugccaaguacaaacagcgguggacuucggcaacagcuacauagcagaaauggaaacagaaagcuggauaguagaccgacaaugggcacaagaccuaacucugccauggcaaagcggcucaggaggaguguggagagagaugcaccaccugguagaguucgaacccccacacgcagcaacaauaaggguacuggcacuaggcaaccaagaaggcagccuaaaaaccgcacucacaggagccaugcgcgugacgaaggacaccaacgacaacaaccucuacaaacuccacggagggcacguauccugccgcguaaaacuaucagcacuaacgcuaaaaggaacaagcuacaaaauaugcacagacaaaauguucuucgucaaaaaccccacagacacaggccacggcacagucguaaugcaagugaaggucagcaagggggcccccugccgaaucccagucauaguggcagacgaccucacggccgccaucaacaaagggauccugguaacagugaacccaauagcaucgaccaacgacgacgaaguccucauagaagugaaucccccguucggcgacagcuacaucaucguaggacgcggcgacucccgacugacguaccaauggcauaaagaaggcagcagcauuggaaaacuauucacccaaaccaugaagggcgucgaaagacucgcggugaugggagacaccgcaugggacuucucgagcgcaggcggcuucuucacaagcguaggaaaagggauucacacaguauucggauccgcauuccaaggccucuucgggggacuaaacuggauaacgaaaguaauaaugggagcaguucucauauggguaggaaucaacacacgaaacaugacaauguccaugucaaugauacucguaggcguaaucaugauguuucugucacucggagugggagcagaccaagguugcgccauaaacuucggcaagugaggacuaguuauaagacugacuagcccgaugggccucccaacgggcccuccuccccuccuugcaccgagauuaauaaaaaaaaaaaaaaaaaaaaaaaaaaaaaaaaaaaaaaaaaaaaaaaaaaaaaaaaaaaaaaaaugcaucccccccccccccccccccccccccccccccaaaggcucuuuucagagccaccagaauu

SEQ ID NO: 1243 - RNA, 2248 nt, Artificial Sequence
  mRNA product Design i-3 comprising derived and/or modified sequence from YFV__NC_002031.1__SS-prME (polyprotein: M,aa104-778) (opt11)
gggagaaagcuuaccauggacguccuuacgguacaauuccuaauacuaggaaugcuucucaugaccgggggcgucacccuaguccggaaaaacagauggcuacugcuaaauguuacaagcgaagaccuuggcaagacauucagcguaggcacgggcaacuguacaaccaacauacuagaagcgaaauacuggugcccagacuccauggaguacaacugccccaaccuaagcccacgggaagaacccgacgacauagacugcugguguuacggggucgaaaacguccgcgucgcauacgggaaaugcgauagcgcaggccgcaguagacgcucccgccgcgccauagaccuaccaacgcacgagaaccacggccucaaaacucgccaagaaaaauggaugacagggcgaaugggugaacgccaacuacagaagaucgaaaggugguucgucaggaacccauucuucgcagugaccgcacuaacgauagccuaccuagugggaucaaacaugacgcaacgagucgugaucgcacuccuaguacuggccguaggaccggccuacuccgcgcacugcaucggcauaacggauagggacuucauugaaggaguacauggcggcacgugggucagcgcgacacucgaacaagacaaaugcguaaccgugauggcacccgacaaaccgagucuugacauaagccuggaaacgguagcgauagaucguccagccgaaguaagaaaaguaugcuacaacgcaguccuaacacacguaaaaauaaacgacaaaugcccaagcacaggggaagcccaccucgcagaagagaacgaaggcgacaacgcaugcaaacgcacauacuccgacaggggaugggggaauggcugcggacuauucgggaaaggaagcaucgucgcgugcgccaaauucacaugcgccaagagcaugagccuguucgaagucgaccaaacaaaaauccaauacguaauacgcgcgcaacugcacguaggagcgaaacaggaaaacuggaacacggacauuaaaacccucaaauucgacgcgcucucaggaucacaagaagucgaguucaucggcuacggcaaggcaacgcucgaaugccaaguacaaacagcaguagacuucggaaacagcuacauugccgagauggaaaccgagagcuggauagucgacagacaaugggcccaagaccuaacccugccauggcaaucaggcuccgggggcgucuggcgagagaugcaccaccuaguagaguucgaaccaccccacgccgccacgaucagaguacuggcccugggcaaccaagaaggcucacucaagacggcgcucacaggagcaaugagggucacgaaagacaccaacgacaacaaccucuacaaacuacacggagggcacgugagcugccggguaaaacugagcgcacucacucugaagggaacaagcuacaagauaugcaccgacaaaauguucuucgugaaaaacccaaccgacacuggacacggcacggucguuaugcaagucaagguaucaaaaggagccccaugcagaaucccaguaauaguagcggacgaccuaacagccgccauaaacaaaggaauccuagucacgguaaauccgauagcaucgaccaacgacgacgaaguacuaauagaagugaacccaccauucggcgacagcuacauaauagucgggagaggcgacucgcgacuaaccuaccaauggcacaaggaagggagcucuaucgggaaacuauucacccaaacgaugaagggcguagaaaggcucgcagucaugggcgacaccgcaugggacuucuccagcgcgggaggcuucuuuacuucagugggaaaagggauacacaccgucuucggcagcgcauuccagggccuauucggcggguuaaacuggaucacgaaagugauaaugggggcaguucucaucugggucggaauaaacacacguaacaugaccaugagcaugagcaugauccuagucggggucauaaugauguucuugagcuugggaguaggugcaugaggacuaguuauaagacugacuagcccgaugggccucccaacgggcccuccuccccuccuugcaccgagauuaauaaaaaaaaaaaaaaaaaaaaaaaaaaaaaaaaaaaaaaaaaaaaaaaaaaaaaaaaaaaaaaaaugcaucccccccccccccccccccccccccccccccaaaggcucuuuucagagccaccagaauu

SEQ ID NO: 1244 - RNA, 2275 nt, Artificial Sequence
  mRNA product Design i-3 comprising derived and/or modified sequence from YFV__NC_002031.1__SSIgE-prME-XX (polyprotein: aa122-788) (opt11)
gggagaaagcuuaccauggauuggacguggauacucuuucucguggccgcggccacgcgcgugcacucggugacccuaguaaggaaaaacagauggcuacuacuaaacguaaccucagaagaucuaggaaagacauuuucagucggcacaggcaacugcacaaccaacauacuagaagcaaaauauuggugcccagacagcauggaauacaacugucccaaccucagcccaagagaggaaccagacgacauagacugcugguguuacggaguagaaaacguaagaguggcauacggcaaaugcgacagcgcaggcaggagccgaagaucccgcagagccaucgacuugcccacgcacgaaaaccacggccucaaaacacgacaagaaaaauggaugacagggcgaaugggagaacgacagcuccagaaaauagaacgaugguucguccggaacccguucuucgcaguaacggcacuaacaaucgcauaccucguaggcagcaacaugacacaaagaguggucaucgcgcuacucguacuagcaguggggcccgcauacagugcacacugcauaggaaucacagaccgugacuucaucgaaggcguacacggaggaacguggguaagcgcgacacuggaacaagacaaaugcgugacaguaauggcaccagacaaaccaagccuagacauaucccuagaaacggucgccaucgaccgucccgcagaaguacgaaagguaugcuauaaugcaguccucacacacgucaaaauaaacgacaaaugccccagcacgggcgaagcacaccucgccgaagaaaacgaaggggauaacgcgugcaaacgcaccuacuccgacaggggauggggcaacggaugcggacuguucggaaaaggauccauagucgcaugcgcaaaauuuaccugcgcaaaaagcaugagcuuguucgagguagaccaaacgaagauccaauacguaauccgagcucaacuacacguuggggccaagcaagagaacuggaauacggacaucaaaacacuaaaauucgacgcacucuccggcucacaagaagucgaguucaucggcuacggcaaagcaacacuagaaugccaaguacaaacagcgguggacuucggcaacagcuacauagcagaaauggaaacagaaagcuggauaguagaccgacaaugggcacaagaccuaacucugccauggcaaagcggcucaggaggaguguggagagagaugcaccaccugguagaguucgaacccccacacgcagcaacaauaaggguacuggcacuaggcaaccaagaaggcagccuaaaaaccgcacucacaggagccaugcgcgugacgaaggacaccaacgacaacaaccucuacaaacuccacggagggcacguauccugccgcguaaaacuaucagcacuaacgcuaaaaggaacaagcuacaaaauaugcacagacaaaauguucuucgucaaaaaccccacagacacaggccacggcacagucguaaugcaagugaaggucagcaagggggcccccugccgaaucccagucauaguggcagacgaccucacggccgccaucaacaaagggauccugguaacagugaacccaauagcaucgaccaacgacgacgaaguccucauagaagugaaucccccguucggcgacagcuacaucaucguaggacgcggcgacucccgacugacguaccaauggcauaaagaaggcagcagcauuggaaaacuauucacccaaaccaugaagggcgucgaaagacucgcggugaugggagacaccgcaugggacuucucgagcgcaggcggcuucuucacaagcguaggaaaagggauucacacaguauucggauccgcauuccaaggccucuucgggggacuaaacuggauaacgaaaguaauaaugggagcaguucucauauggguaggaaucaacacacgaaacaugacaauguccaugucaaugauacucguaggcguaaucaugauguuucugucacucggagugggagcagaccaagguugcgccauaaacuucggcaagugaggacuaguuauaagacugacuagcccgaugggccucccaacgggcccuccuccccuccuugcaccgagauuaauaaaaaaaaaaaaaaaaaaaaaaaaaaaaaaaaaaaaaaaaaaaaaaaaaaaaaaaaaaaaaaaaugcaucccccccccccccccccccccccccccccccaaaggcucuuuucagagccaccagaauu

SEQ ID NO: 1245 - RNA, 2245 nt, Artificial Sequence
  mRNA product Design i-3 comprising derived and/or modified sequence from YFV__NC_002031.1__SSIgE-prME (polyprotein: aa122-778) (opt11)
gggagaaagcuuaccauggauuggacguggauacucuuucucguggccgcggccacgcgcgugcacucggugacccuaguccgcaaaaacagauggcuacuacuaaacguaacaagcgaagaccugggcaaaacauucagcguuggcacaggcaauugcacgacaaacauacucgaagcaaaauacuggugccccgacagcauggaauacaacugcccaaaucuaagcccacgcgaagaaccagacgacaucgacuguuggugcuacggagucgaaaacgugagggucgcauacgguaaaugcgacagcgcuggcagaagcagacgcucccgacgagccauugaccucccuacccacgaaaaccacggccuaaaaacccggcaggaaaaauggaugacaggccggaugggagaacgccaacuacagaaaauagagaggugguuuguaagaaacccauucuucgccguaaccgcgcucaccaucgcuuaccucguaggaucaaacaugacgcaaagaguagugaucgcgcuacucguacuagcgguaggccccgccuacagcgcacacugcaucggcaucacugacagggacuucauagaaggcguccacgggggcacguggguuagcgccacacucgaacaagacaaaugcgucacagugauggcaccagacaaacccucacuagacaucucacuagaaaccgucgcaaucgaccgcccagcagaagucaggaaagugugcuacaacgccgucuuaacccacguaaaaauaaaugauaaaugcccaagcacgggagaggcacaccuagcggaagaaaacgaaggcgacaacgcgugcaaacguaccuacagcgacagaggguggggcaacggaugcggcuuauucggaaaaggaaguaucguagcaugcgcaaaauuuaccugcgccaaaagcaugucccuauucgaaguagaucaaacaaaaauacaauacgucauccgagcccaacuacacgugggggcaaaacaagaaaacuggaacaccgacaucaaaacacucaaauucgaugcccuaagcggcucccaagaaguagaguucaucgguuacggcaaggccacgcucgagugccaaguccaaacagcaguagacuucgggaacucauacaucgccgagauggaaacggaaucauggauugucgacagacaaugggcacaagaccuaacacuaccauggcaaucaggcagcggaggggucuggcgagaaaugcaccaccuaguagaguucgaacccccacacgccgcaacaauccgaguacuagcccucggaaaccaagaaggaucacuaaaaaccgcacucaccggcgcaaugcgcguaacaaaagauacaaacgacaacaaccuauacaaacuacacggcggacacgucagcugccgcgucaaacuauccgcccuaacacuaaaaggaacaagcuacaaaauaugcacagacaaaauguucuucgucaaaaauccgacugacacgggccacggcacagucguaaugcaaguaaaagucucaaaaggcgcaccaugcagaaucccaguaaucgucgccgaugaccuaacagccgcaaucaacaagggcauccucguaacaguaaaccccauagccagcaccaacgacgacgaaguccuaaucgaagucaacccacccuucggagacagcuacauaauaguaggacgaggggacucacgccuaaccuaccaauggcacaaagaaggauccucaaucggcaaacuguucacacaaacgaugaaaggcguagaaagacucgcaguaaugggcgauacggccugggacuucucaagcgcgggcggcuucuucacgagcgucggaaaaggcauccauacaguauucggaagcgcauuccaaggccuauuuggaggccucaacuggauaacaaaagugaucaugggagcaguacugaucugggucggcaucaacacccgcaacaugacgaugagcaugucaaugauccucgugggaguaauaaugauguuccucagccugggcguaggcgcaugaggacuaguuauaagacugacuagcccgaugggccucccaacgggcccuccuccccuccuugcaccgagauuaauaaaaaaaaaaaaaaaaaaaaaaaaaaaaaaaaaaaaaaaaaaaaaaaaaaaaaaaaaaaaaaaaugcaucccccccccccccccccccccccccccccccaaaggcucuuuucagagccaccagaauu

SEQ ID NO: 1246 - RNA, 2293 nt, Artificial Sequence
  mRNA product Design i-3 comprising derived and/or modified sequence from YFV__NC_002031.1__SSjev-prME-XX (polyprotein: aa122-788) (opt11)
gggagaaagcuuaccauggggaaaaggagcgcgggcucgauaaugugguuggccucgcucgcggucgugaucgcgugcgcgggcgcggugacccuaguaaggaaaaacagauggcuacuacuaaacguaaccucagaagaucuaggaaagacauuuucagucggcacaggcaacugcacaaccaacauacuagaagcaaaauauuggugcccagacagcauggaauacaacugucccaaccucagcccaagagaggaaccagacgacauagacugcugguguuacggaguagaaaacguaagaguggcauacggcaaaugcgacagcgcaggcaggagccgaagaucccgcagagccaucgacuugcccacgcacgaaaaccacggccucaaaacacgacaagaaaaauggaugacagggcgaaugggagaacgacagcuccagaaaauagaacgaugguucguccggaacccguucuucgcaguaacggcacuaacaaucgcauaccucguaggcagcaacaugacacaaagaguggucaucgcgcuacucguacuagcaguggggcccgcauacagugcacacugcauaggaaucacagaccgugacuucaucgaaggcguacacggaggaacguggguaagcgcgacacuggaacaagacaaaugcgugacaguaauggcaccagacaaaccaagccuagacauaucccuagaaacggucgccaucgaccgucccgcagaaguacgaaagguaugcuauaaugcaguccucacacacgucaaaauaaacgacaaaugccccagcacgggcgaagcacaccucgccgaagaaaacgaaggggauaacgcgugcaaacgcaccuacuccgacaggggauggggcaacggaugcggacuguucggaaaaggauccauagucgcaugcgcaaaauuuaccugcgcaaaaagcaugagcuuguucgagguagaccaaacgaagauccaauacguaauccgagcucaacuacacguuggggccaagcaagagaacuggaauacggacaucaaaacacuaaaauucgacgcacucuccggcucacaagaagucgaguucaucggcuacggcaaagcaacacuagaaugccaaguacaaacagcgguggacuucggcaacagcuacauagcagaaauggaaacagaaagcuggauaguagaccgacaaugggcacaagaccuaacucugccauggcaaagcggcucaggaggaguguggagagagaugcaccaccugguagaguucgaacccccacacgcagcaacaauaaggguacuggcacuaggcaaccaagaaggcagccuaaaaaccgcacucacaggagccaugcgcgugacgaaggacaccaacgacaacaaccucuacaaacuccacggagggcacguauccugccgcguaaaacuaucagcacuaacgcuaaaaggaacaagcuacaaaauaugcacagacaaaauguucuucgucaaaaaccccacagacacaggccacggcacagucguaaugcaagugaaggucagcaagggggcccccugccgaaucccagucauaguggcagacgaccucacggccgccaucaacaaagggauccugguaacagugaacccaauagcaucgaccaacgacgacgaaguccucauagaagugaaucccccguucggcgacagcuacaucaucguaggacgcggcgacucccgacugacguaccaauggcauaaagaaggcagcagcauuggaaaacuauucacccaaaccaugaagggcgucgaaagacucgcggugaugggagacaccgcaugggacuucucgagcgcaggcggcuucuucacaagcguaggaaaagggauucacacaguauucggauccgcauuccaaggccucuucgggggacuaaacuggauaacgaaaguaauaaugggagcaguucucauauggguaggaaucaacacacgaaacaugacaauguccaugucaaugauacucguaggcguaaucaugauguuucugucacucggagugggagcagaccaagguugcgccauaaacuucggcaagugaggacuaguuauaagacugacuagcccgaugggccucccaacgggcccuccuccccuccuugcaccgagauuaauaaaaaaaaaaaaaaaaaaaaaaaaaaaaaaaaaaaaaaaaaaaaaaaaaaaaaaaaaaaaaaaaugcaucccccccccccccccccccccccccccccccaaaggcucuuuucagagccaccagaauu

(The sequence listing continues in the following parts.)
